United States Patent Application Publication US 2005/0287570 A1 - sequence listing, part 3

SEQ ID NO: 3064 - DNA, 5453 bp, Rattus norvegicus
gaattcggcacgagctgcgcggggacgggcgggggaccccgggccggggcgcagcgcacacgcgtggcgcacgccaagtggaccgggcggcgccgaaggcactcgggatcgcgctttcggagcttcgggccgcccagaccccgggcgcggacggcccgcggcgccccctgggctctcggtgccccgcgcagccccgggggcgatcggagcccgggtcggggagtgggagccacccgcgctcatccccttccccccacgggcgggcgggcagcccgggggagggcgggcggcggcgcttggctgtatatatctccgcacaccccgccaggtccgcacagcgccccgagcccaggcgcctccccgcccccctcccgggctccgcggcggcggcggcagcagtagcagcaacatggctgttgatgggtgttcggggtggcgctggcggcgggaggagctccctcgagcccctgcgccggccgtccgttgctagctatggcaaacggtggcggcggcggcggcggcggcagcagcggcagcagcggcggcggcggcggcggcggcggaggcgagacggctcttagaatgagcagcaatatccacgcgaaccatctcagcctagacgcgtcctcttcttcctcctcctcttcttcctcctcctcttcctcctcgtcctcggtccacgagcccaagatggatgcgctcatcatcccggtgaccatggaggtgccgtgcgacagccggggccaacgcatgtggtgggctttcttggcctcctccatggtgactttcttcgggggcctcttcatcatcttgctctggcggactctcaagtacctgtggaccgtttgctgccactgcgggggcaagacgaaggaggcccagaagataaacaatggctccagccaggcagatggtactctcaagccagtggatgaaaaagaggaggtggtggcagccgaggtcggctggatgacatctgtgaaggactgggcaggggtgatgatatctgcccagacactgactggcagagtcctggttgtgttagtctttgctctcagcattggtgcccttgtaatatacttcatagactcatcaaacccaatagaatcctgccagaatttctacaaagatttcacattacagatcgacatggctttcaacgtgttcttccttctctactttggcttgcggtttattgcagccaatgataagctgtggttctggctggaagtgaattctgtagtagatttcttcacagtccctcccgtgtttgtgtctgtatacttaaacagaagttggcttggcttgagatttttaagagctctcagactgattcagttttcagaaattttgcagtttctgaatatccttaaaacaagtaattccatcaagctggtgaacctgctctccatatttatcagcacgtggctgactgcagctggattcatccacttggtggagaattcaggggacccatgggaaaatttccaaaacaaccaggcacttacgtactgggaatgtgtctacttactcatggtcacaatgtctacagtgggttacggggatgtttatgcaaaaaccacgcttggacgcctcttcatggtcttcttcatcctcgggggactggccatgtttgccagctacgtccctgaaatcatagagttaataggaaaccgcaagaaatacgggggctcctatagcgcggttagtggaagaaagcacattgtagtctgtgggcacattactctggagagtgtctctaacttcctgaaggactttctgcacaaggaccgggatgatgtcaacgtggagattgtttttcttcacaacatctcccctaaccttgagcttgaggctctgttcaaacggcatttcactcaggtggagttttatcagggctctgtcctcaatccacacgatcttgccagagtcaagatagagtcagcagatgcatgtttgatccttgccaataagtactgcgctgacccggatgcagaagatgcctccaacatcatgagagtgatctccataaagaactaccacccaaagatcaggatcatcactcagatgctgcagtatcacaacaaggcccatctgctcaacatccccagctggaactggaaagagggtgatgacgcaatatgccttgcagagctcaagttgggtttcatagcccagagctgtctggctcaaggcctctccacaatgcttgccaatctcttctctatgaggtcattcataaagattgaggaagatacatggcagaaatactacttggaaggagtctccaatgaaatgtacacagaatatctttccagtgccttcgtgggtctgtccttccctactgtttgtgagctgtgttttgtgaagcttaagctcctgatgatagccattgagtacaagtctgccaacagggagagccgaagccgaaagcgaatattaattaaccctgggaaccaccttaagacccaagaaggtactttaggatttttcatcgcaagtgatgccaaagaagttaaaagggcatttttttactgcaaggcctgtcatgatgacgtcacagatcccaaaagaattaaaaaatgcggctgcaggcggctgatctattccaagatgtccatctacaagagaatgagccgagcatgttgttttgattgcggacgttcygagcgtgactgctcgtgcatgtcaggccgtgtgcgtggtaacgtggacacccttgagagaaacttcccgctttcttctgtctctgttaatgattgctccaccagtttccgtgcctttgaagatgagcaaccgccaacactgtcaccaaaaaaaaaacaacgtaatgggggcatgaggaactcacccaacacatccccgaagctgatgaggcatgaccccttgttaattcctggcaacgatcagattgacaacatggactccaatgtgaaaaagtacgactccactggaatgtttcactggtgcgcacccaaggagattgagaaagtcatcttgactcgaagtgaagctgccatgactgtcctgagtggtcatgttgtagtctgcatctttggggatgtcagctcagccctgattggcctccggaacctggtgatgccgcttcgtgctagcaattttcactatcatgagctcaaacacattgtgtttgtgggctccatcgagtacctcaagcgggagtgggaaacactgcacaacttccccaaagtatccatattgcctggtacgccattaagtcgggctgatttaagggctgtcaacatcaacctctgtgacatgtgcgttatcctgtcagccaatcagaataatattgatgatacttcgcttcaggacaaggaatgcatcttggcgtcactcaacatcaaatctatgcagtttgatgacagcatcggggtcttgcaggctaattcccaaggattcacacctcctggaatggacagatcatcacctgacaacagcccagtgcacgggatgttacgccagccgtccatcacaaccggagtcaacattcccatcatcacggaactcgtgaacgatactaatgttcagtttttggaccaagatgatgatgatgaccctgacacagagctgtacctcacacagccctttgcttgtgggacagcatttgccgttagcgtcctggactcactcatgagcgcgacatacttcaatgacaatatcctcaccctaatacggaccctggtgacaggaggagccacgccagagctcgaagctttaatagctgaggagaatgcacttcgagggggttacagcactccgcagacactagccaacagggaccgctgccgagtggcccagttagccctgttggatgggccctttgcggacttaggggatggtggttgttatggtgatctgttctgcaaagctctgaaaacatataacatgctttgttttggaatttaccggctgagagatgcccacctcagcacccccagccagtgtacaaaaaggtacgtcatcaccaatcccccctacgagtttgaacttgtaccgacagacctgatcttctgcctgatgcagtttgaccacaacgctggccaatcccgggccagtctgtctcattcctcccactcctcacagtcgtccagtaagaagagctcctctgtccactccatcccgtccacagcaaatcggccaaaccggcccaagtccagggagtcccgcgacaaacagaaaaaagaaatggtttacagatgagacggataatgcctatcccagaaacattcaaatccaagcccatgagtacccacatggctaaccagatcaaccaatataaatccacaagcagcctgatccctccaatcagagagttgaagatgaatcttcattcccaggagaccagaactatttttttaaaggctgacaaactgcataaatggtgacgtgacttctcttcctcttacatgctgaatcactggtggaaacactagaatatgcaagaattgcaataaaataaaattagacagatcttctctttgccttgaatattgcttccatgtattttgggaaagaaaaatttcatttataaatgaacatactaaaatagtcatgtatagttcctagtgttttaaattatttttatttattagaaagaaaatatatttttctttttttcattgtcagatatcttcccatatatcacagcaatgcaaaattaaaatgagtaagtggccagattccttaatgcacatttctcttctttctctcttttcgaggagaatgatggtcaccaccccaatttgtaatgaagggaaatggattactaaaacaaatttaagatgaccaacaatgtacacacatattttagtaaatcaaaaataaaaagtaaaagaagtggaggtgaatattatttccctctctcccagacaggtgtatgttttgatctgcattgacaccagctcttacaaatcagacttcattatcttcacagttgaaagtcatctctttgtagtttcagttttcctccagtgtttcttatcctttgttcatatatttagaagaaagagcttcttgcaatgtttctgcagttgccagatcaggtttaagcacccagctcaggatatgggaggaagtgtttatcggcacacctagaatatgaaggtcatgagccagaggcacccaggagcaggctctgttgttctcatggtgaggcctcctccaccatgttttatgctccttgtttcatacttctgagtcacccaagcaagttatgtggactgtgggaggatctggaatgttctttcccttattcagagcttttagcctgaaagttggtgaacatcaacgcatagttttacctaacaataggatctaagaagtatgcatgcttatcacaaatttttggtttaaaagtcagacaatgttcactgtcaaggaaatgacttttcttcaaattttcatttgctggctttccctccgttgcccag

SEQ ID NO: 3065 - DNA, 1320 bp, Rattus norvegicus
aacagctagcggagcggcaggaggagcactaaccasgaaaatggcagacggcttctcacttaatgatgccttagctggctctggaaacccaaaccctcraggatggcctggtgcatgggggaaccagcctggggcaggaggctacccaggggcctcctatcctggggcctacccaggacaggctcctccagggggttatcctggacaggctcctcctagtgcctatccgggcccaactggccctagtgcttatcctggcccaactgcccctggagcttatcctggcccaactgcccccggagccttcccagggcaacctgggggacctggagcctaccccagtgctcctggggcctaccccagtgctcctggggcstatcctgctactggcccytwtggtgccccgactggaccactgacagtgccytmcgatatgcccttgcctgraggagtcatgcctcgcatgctgatcacaatcatrggcacagtgaagcccaacgcaamcagtatcactctgaattycaagararggaasgacatcgccttccactttaacccccgcttcaatgagaacaacagaagagtcatcgtgtgcaacasraagcaggacaataactgggsaagggaagaaagacagtcagctttcccctttgagagcggcaaaccattcaaaatacaggtcctggttgaagccgaccacttcaaggttgcggtcaatgatgttcatctgttgcagtataaccatcggwtgaagaacctcagggaaatcakccaactggggatcattggtgacataaccctcaccagcgcttcccacgccatgatmtaagccagaaggggtgggccggcamcrgaactgccytgtgtgttatgagcgggaaactttgcatttctctctccttatacttcttgtaagacatccwtttaataaagtytsgtgytgrgrrdwaaaaaawamaarrarwamacgtacccacaaacaggacaaacagcaaggaaagcccgagggggggccggtacccaattcgcccatagagatcctatcccactccatggcggcgtgtacaggtctgactggaaacctgggataccacatatgacttaggaaatcccttggcacagcgtaaacaaaagccgcagatccctccacatggggccgagtggaggcattaccgtcatggaatggtactgtagaccattccaggcacgcacctatagaacgagggggcggaaaccaagactggactggcgtccatgtctgcatgcggccgtctctcgcactagacagctctacacacgggagcgagcggcgccgaagac

SEQ ID NO: 3066 - DNA, 1244 bp, Rattus norvegicus
ggaattcgcaacgcctrcacaaagatccctatcactgagcacccggaggcaaggctcagaaccccaggatcascaacatggagttctcccgtccaccgctagtgcatgtgaagggtatcccactcatcaaatacttwgcagagacaattgggccattgcagaacttmacagcctggcctgatgacttgctgatcagcacatacccaaagtctggtactacctggatgagtgagatcctggatatgatctatcagggtggcaagctagagaagtgtggccgmgcccccatctatgcccgggtacccttscttgagttcaaatgtccaggggttccctcargtcttgaaactttggaagagacaccagccccacggctccttaagacacatctgcccctgtccttgctccctcagagtctgctggatcagaaggtcaaggtgatctacattgcccgaaatgcaaaggatgtggttgtctcctattataacttctacaacatggccaagctgcaccctgatccaggcacctgggacagcttcttggagaacttcatggatggggaagtgtcctatgggtcgtggtaccagcacgtraagragtggtggragytgagacacactcaccytgttctcwatctcttctatgaagacataaaggagaaccccaaaagggagatcaagamgattctagagtttttggggcgctctctacccgaggagactgtggattccattgttcaccacacatctttcaagaaaatgaaagagaactgcatgactaactacacaaccatccccactgagattatggaccmcaatgtttctcccttcatgaggaaaggtactactggggactggaaaaataccttcactgtagcccrgaatgagcgctttgatgcccactatgctaagmcaatgacagattgtgacttcaagtttcgttgtgarmtatgagtggattatggmtatactgggaaccaaggcaaactgacacagcccatcatgatctcaagtaaaatgtgatgtgttcaawmwamwwrwwrwawrmmwaraggaaatytgagytmagagaataggattggggatgtgsctgaggcagagggttttatcaacgcatgtcaggaaagcaatcagtcccaacacctaaaaagaacctaaagtacaaacatgcaaaaaatmgtaasrtaaactatattttacctgaaagaataaatgccmctgggaawtgaaaaaaaaaaaaaaaaa

SEQ ID NO: 3067 - DNA, 1743 bp, Rattus norvegicus
gaattcctgctgcacccatatttgaatattgttttatcctcatcacgcgaacttcctggggaaggactccaaggtccaagtgggcgggaaggagggtccttaaatgtgccctctttcagctcttgctcattccaggagtcccagctgctggagaaggctgtgtaggagttgcaatgagcagtatcagtgacaccgtgaaacgggccagggaggcctttaactccggcaagactcgatcgctgcagttccgaatccagcagttggaggcgctgcagcgcatgatcaatgagaacctgaaaagcatctctggggcgctggcctctgacctgggcaagaacgaatggacctcctactatgaggaagtggctcacgtactggaggagcttgataccacaattaaggagctccctgattgggctgaggatgagcctgtggccaagactcgccagacccagcaggatgacctctacatccactcggagcccctgggtgtggtccttgtcataggtgcttggaactaccccttcaacctcaccatccagcccatggtgggtgccgttgctgcaggaaacgcagtgatcctcaagccctcagaagtgagcgggcacatggcagacctgctagcgacactcatccctcagtatatggaccagaatctgtacctagtggtcaaagggggtgtccctgaaaccacggagctgctcaaagagaggtttgaccacatcatgtacactgggagcacagccgtagggaagattgttatggccgctgccgccaagcatctgactcctgtcaccctggagcttggagggaaaagcccttgttacgtggacaaggactgtgatctagatgtggcttgcaggcgtatcgcctgggggaaatttatgaacagtggccagacctgtgtggccccagactacatcctctgtgacccctcgattcagaaccaaatcgtggagaagctcaagaagtcactcaaagatttctatggggaagatgctaagcagtcccgtgattatgggaggatcatcaatgaccgtcacttccagcgggtcaaaggcctgattgacaaccagaaagtagcccatggaggcacttgggaccagtcctcacgatacatagctccaaccatcctggtggatgtggacccccagtccccagtgatgcaggaggagatctttgggccggtgatgcccattgtgtgtgttcgaagcttggaggaggccattcaatttatcaaccagcgtgagaagcccctggcactctatgtgttctccaacaatgagaaggtgatcaagawwmkgmwcgsrgagacatccagcggtggagtgacagccaatgacgtcattgttcacatcaccgtgcccactttgccctttggtggtgtggggaacagcggcatggggscctmccatggcaagaaaagcttcgagaccttctcccaccgccgctcttgcctggtgaagtctctgttgaatgaagaagctcacaaggccaggtatcccccaagcccagccaagatgccccggcactgagagagtgctgctgcacctgacacatgttttgctggctgtcttgtccttgaggagttgctcatggagcctcatcctggcttattcccacctgcygtcctgtgcttaactccccgaaggactctcacctcactcctccaaattccactgtttgctgggcacagaaatcaataaaagcctctgaggaaaarwmaaaaaaaaaaaaaaaaaa

SEQ ID NO: 3068 - DNA, 1729 bp, Rattus norvegicus
  misc_feature (1494)..(1494): n is a, c, g, or t
catgrcwgcsagcggcccgctcagaatcaggcatgggtctccatccttgttctcctgtggaccatggggtcccctcctgggtcctggtcttgttgctgacactgggtctgtgcagcctgcaggctacagccgacagcgttctagaccctgactttcgtgagaattactttgagcagtacatggaccatttcaactttgagagtttcagcaacaagacctttggccagcggttcctggtgtcagataagttctggaagatgggcgaggggcccattttcttctacacagggaatgagggggatatctggtccctcgctaacaactctggcttcatagtggaactggcagcccagcaggaggccctgctggtctttgctgagcatcggtattatgggaaatcgcttccattcggtgtgcagtccacacagcggggatacacacagctgctgactgtggagcaggcgctggctgacttcgccgtgctgctccaggccctgcggcacaatcttggggtccaggatgcccccaccatagcctttggagggagttatgggggaatgctgagcgcctacatgaggatgaagtacccccacctggtggctggggcactggcggccagcgctcctgttatagctgtcgcaggccttggcaaccccgaccaattcttccgagatgtcacagcggacttctatggccagagtcccaagtgtgcccaggctgtgcgggatgctttccagcaaatcaaagacttgttcctccagggagcctatgacaccatcagccagaattttgggacctgccaatcactttccagcccaaaggacctgactcagctctttgggtttgcccggaatgcatttactgttctcgccatgatggattacccgtaccctactaactttctagggccccttcctgccaaccctgtcaaggtgggctgtgaacggttgttgagtgagggccagaggatcatgggtctacgggcactggcagggctggtctacaactcctctggcatggaaccctgttttgacatctaccagatgtaccaaagctgtgctgaccccactggctgtggcactggctccaatgccagggcctgggactaccaggcctgtacggagatcaatctgacctttgacagcaacaacgtgacagacatgttccctgaaatccctttctctgatgaactccgccagcaatactgcctggwtacatggggcgtgtggcctcggccagactggcwssagrccagcttytggggtggsgaccttaaagcagccrgcamsaksattttytccaacggtgacctagacccytgggcagggggtrgrawccagsgcaacctgagtacatcaatcattgctgtcaccatccargggggagcacatcacbtdgacctcagagcathtaamtcagaagaccccccgtctgtygtgraggtgcgtaagctkgaagctaccctcattygsgagtggrtwgcagcagccagantaaagcawccmgcagaggcacagtggcctgggcctaagtagcagcsttccarccgagatgcagcaaacccagagaccctgttytatgtgarccsctgtgtgacagctcgccttamgtctgatamtatccmgamtcatggtgctttgtytgagctggacctcarcaaggagctkgtgggagatkgagagacmgaataaacacgtgctatgtcmwwrwmwaaaaaaaaaaaaaaaaa

SEQ ID NO: 3069 - DNA, 3885 bp, Rattus norvegicus
  misc_feature (967)..(967): n is a, c, g, or t
gcggtgtggttgagtagggtgctgctttcagtcgtgtggcctttgggaactccgcgtagcactgccgcctcctcctgtcctcgccatgttcctcactcggtccgagtacgacaggggtgtgaacactttttctcctgaaggaagattatttcaagtggaatatgccattgagggccataagcttggttctacggccattggcatccagacatcagagggtgtatgtctagctgtggagaagagaattacctcgccactaatggagcctagcagcattgagaaawtcgtagagattgatgctcatataggttgtgccatgagtgggctaattgctgatgctaaaactttaattgataaagccagagtggagacacagaaccactggttcacctataatgagmcaatgacagttgagagtgtkacccaggctgtgtccaatctggctttgcagttcggagaagaaratgcagatccaggkghtatgtctcgtcccttyrgmgyarcattkttktttggaggagttsatrrgaaagggccccaactgtttcacatggaccyatctgrgaccttcgtacastgtratgcwcgakcaawtgdttctgcgtmmgagggtgcccagagctcyttscaggaagtttmccacaagtcwmygwcthtgaaggagsccatcaagtcttcaykcaysakvctcaagcaagtcatggaggagaagctgaacgcaastaacatsgagctgsccacagtgcagcmtggtcagaatttccacatgttcacaaagsaagahctsgagraggtgatcaasswcrtktaaggagggbccatcctcgaacttctgtgggacagtttcagttctaatggctcttagactttattwccaactccacktcgtggaaaatmtccagtatatgkatgtgtgtwwktbtatgatgtctgtacataacagcamttytgaartmaaaaaaatttncaahtwwwaaaaraamwmmrdavrmmrmmmraamrrarmagcaccgcggacagcgccggccgcgccgcgcccagctcagcctgctcagccctctsgtcccgaggttcgcgctcagcgctctctctaactagccgctgcaccatggcagaatcccacctgcagtcatctctgatcacagcctcacagttttttgagatctggcttcatttcgacgctgatggaagtggttacctggaaggaaaggagctgcagaacttgatccaggagcttctgcaggcacgaaagaaggctggattggagctatcacctgagatgaaaacctttgtggatcaatatgggcagagrgatgatgggaaaataggaattgtagagttggcccatgtcttacccaccgaagagaatttcctgctgctctttcgatgccagcaactgaagtcctgcgaggaattcatgaagacttggagaaagtatgacactgaccacagtggcttcatagaaacggaggaacttaagaactttcttaaggacctgctagagaaagcaaacaagaccgtgsatgatacgaaacttgctgagtacacagacctcatgctgaagctgttcgactcaaataatgatgggaagctggagctgacagagatggccaggttactaccagtgcaggaaaatttccttcttaaattccagggaatcaaaatgtgtgggaaagagttcaataaggcttttgagttatatgatcaggatggcaacggatacatagatgaaaatgagctggatgccttactgaaagacctgtgtgagaaaaacaaacaggaattggatattaacaatatttctacatacaagaagaacataatggccttgtcggatggagggaagctgtaccgaacagatcttgcccttattctctctgctggggacaactagagttggtggccacaaccacttgctagtgatacattgtatcyaaaaccataactgtgcgctataaaggagtaggctgtattttcttttatatctgtaaattctactgcatatagagaattatccaggatgtgtggcacattcttttctgcttgtttctatactgtttgtaatgtacagtttttgtaagcatataattgaaaagaagaaagtctatgcttaggccagtcagtataatccattttcaaagatgaatctaacatgattctgctttcataaatacagatgaacacttggatttccctaaaactctaccatctcaacaattctagtgtcagatgtgtaaatgcagctgtcagtgagtaaaagaataattcatgacaagccaagtgttttttaatttaggcaatcatagaactgtcccacaaagcacttctgtgcgtttccatctagtggaagggatgtgcttctgcttgtgaagcaccaaatatcaatagttaactatggctttatcataaaacgatctccctagagatttaattyackrvdcagkggcatgtctactgcttgaatagatrccrcactgttggttcaagctggcttggtggcaagggaaggtagccagatgacacataartctgtctgatactatgcctatatttccaagaagtctattgcagagagtatgacyttagcccattttctaaattattttcatgtgttccagatgacaattattctagtaaactgctgttttgtgtcatattctgtgtgtactctctgattaaattcaatgtrctgagwaaaaaaaaaaaamrgggctgcggcattgcgcccagcagcggactccgagatccatagacctcggcgaacccttgctctcgaccacccacccactttcggaaccatggccgcagtggcagcagcctcggcagaactgctcatcatcggctggtacatcttccgcgtgctgctgcaggtgttcaggtactccctgcagaagctggcgcacacggtgtcccggaccgggcggcaggtgctgggggagcgcaggcaccgagcccccaactgaggccccatctcccagccctgggcggccgtgtcatcaggtgctcctgtgcttctcgaccagcatgggagccaatgccgcgcaggaatggggggtcccctgtgctccctcgtcagaggagcacttgccaaggtcagtgaggggccggtaggtccccagaaaagcagcaccggaccaatgatgaagacatccagttcctttcccagccccccccccctttgcccctgtcccatggccggcgggtgggagaggatgggggaagaggggagcaaccctcgagatatgggcgtaggcaccacattctgatctggaccaagttggaacagcaccatctcagccgcacaagatcctaccatggagagctaasrcmcsmrscaaccagcagaatggacattytgacatcaccagytgaaaccytgaatctcggtgcagaagagaaagtgtcaactgcgtgcascactgggggabtggagggtktggktgktggaggaagagggttaagaaaactagtggggccctmttgctgtccmtkkcmtatggcacgcrtattcctgccwwgytscctcactccccctytccchtscyttccaaagccccaccccccaaaaatgtgtcacttgattcggacytattcaaccagtaattggatcccacctttaccaaaacaccgtytytgacccccggcccttcactgatcttgcttatccctggtctcacgcagcagttgtggttgctattgtggtagtcgctaattgtactagtttacgtgtgcattagttgtgtctccccggmtagattgtaagctcctggagacagggmccmcctccacaaaaaataaaaaaacggmcctctcctgtcttgtagtgtsctaggaccctgcagggcagtgggggtgcmccaaaarwwmaaaaaaaaaaaaaaaaaa

SEQ ID NO: 3070 - DNA, 2301 bp, Rattus norvegicus
gtctgcggcgggtccgggcccatgaggcgacgacggaggcgggacggcttttacccagcgcctgacttccgacacagggaagctgaggacatggcaggagtgtttgacatagacctggaccagccagaggatgcaggctctgaggatgagctggaggaggggggtcagttaaatgaaagcatggaccatgggggagttggaccatatgaacttggcatggaacattgtgagaaatttgaaatctcagaaactagtgtgaacagagggccagaaaaaatcagaccagaatgttttgagctacttcgggtacttggtaaagggggctatggaaaggtttttcaagtacgaaaagtaacaggagcaaatactgggaagatatttgccatgaaggtgcttaaaaaggcaatgatagtaagaaatgctaaagatacagctcatacaaaagcagagcggaatattctggaggaagtaaagcatcccttcattgtggatttaatttatgcctttcagaccggtggaaaactctacctcatccttgagtatctcagtggaggagaactatttatgcagttagaaagagaggggatattcatggaagatacagcttgcttttacttggctgaaatctccatggctttggggcatttacatcaaaaggggattatctacagagacctgaagccggagaacatcatgcttaatcaccaaggtcacgtgaagctgacagactttggactatgcaaagaatctattcatgatggaacagtcacgcacacattttgtggaacaatagaatacatggcccctgaaatcttgatgagaagcggccacaaccgtgctgtggattggtggagtctgggagcattaatgtatgacatgctgactggagcacctccattcactggggagaatagaaagaagacaattgacaaaatcctcaaatgtaaacttaatttgcctccctacctcacacaagaagctcgagatctgcttaaaaagctgctgaagagaaatgctgcttctcgtcttggagctggccctggggatgctggagaagtccaagcgcatccattttttagacacattaactgggaagagcttttggctcggaaggtggagcgcccctttaagcctctgttgcaatctgaagaggatgtgagtcagtttgattcaaagtttactcgtcagacacctgttgacagccccgatgactcaactctcagtgaaagtgccaaccaggtctttctgggttttacatatgtggctccatctgtacttgaaagtgtgaaagaaaagttttcttttgaaccaaaaatccgatcgcctcgaagatttattggtagcccacgaacgcctgtcagcccagtcaaattctctcctggggatttctggggacgaggtgcttcagccagcacagcaaatcctcagacacctgtggaatacccaatggamacragkggaatagagcagatggatgtgacaacgagcggggaagcttcagcgccacttccaatccgacagcccaactctgggccatacaaaaaacaagcttttcctatgatctccaaacggccagagcacctgcgtatgaatctatgatgaaacaatgcttttattaatgcaaatgcaaaaaggaaacaaatcctggaagggsatgtgtgagratcctgcaagataaaaatgagaaaatggcagtctcaaagagtcagtgtcattacctggaatgctttcgatggaggaaaaaataaacatggatttttaaaaaaatcaatcaatggtgcaaaaaataaacccacaaaaaactcaaacaaaatagtattgtggaacccacagacacatcaactgactggttcctaccctagcaacatctcagcgttcgtaaggattctcatgctgatggcygtaaactgacagtattaagggtaggatgttgcttctgaatcactggtaaagtctgatgatgtcacataagggttatcctaataggcaaagtacaagattgcctgtaatacttgcaactaaggacaaattagcatgcaagctttgtcaaactttttccagcaacacagaatcaaagacaaaagaaacttatcgattgatgttttacgtgcaaacaacctgaatcttttttttatataaatatatatttttcaaatagatttttgattcagctcattatgaaaaacatcccaaactttaaaatgcgaagttattggttggtgtgaagaaagccagcttctgttcttctcttgatgaaataaaatgcaaatgratcattgttmmmaaaaaaaaaaaaaaaaa

SEQ ID NO: 3071 - DNA, 2446 bp, Rattus norvegicus
cgtcgctgcgcacccagaagacccagtttgggaggaagcagatttcagaagctctcctgaggtgccgctccgcagccgcagaccccaccatggcgctgtccyacccgaggccctgggcctctctgctgctggtggacctggctttacttgggttgctacaaagmtctctgggaactctgcttcccccggggctgccaggaytatggctggagggcaccctgcgasttggagtgctgtggggactgctaaaagtgggagggctgctgagactygtggggacctttctgcccttgctctgcctgacyamccccctgtttttctcgctgagagccctggtgggaagcaccatgagcacctcagtastcagagtggcttctgcctcttggggctggctgcttgctgrctatgkagccgyggcgttgagccttgccgtgtgggctgtgctgagccccgctggagcacaggagaaggaaccaggccaggagaayaacagagcactcatgatacggttgctgaggctgtccaagccggatctgcctttcctcatcgttgccttcatctttcttgcgatggctgtgtggkgggagaygttmatccctcattattcgggtcgtgtgattgacatcctgggaggtgattttgacccagacgcctttgcgagcgccatctttttcatgtgcttattctctgttgggagctccctctctgcaggctgccgaggaggctccttcctcttyrccrwgtccaggatcaacctgcgcatacgagagcagcttttctcatctttgttgcgycaagaccttgcattcttccaggagaccaagacaggggagctgaactcacggctgagctcggacacctccctgatgagccrstggctyyctttmaatgccaatatcctgctkcggagcctggtgaaggtggtggggctgtactacttcatgctccaggtctccccgagactyaccttcctctccctgctggacctgcccctcacaatagcagccgagaaggtgtacaacccccgccatcaggctgtgctaaaggagatccaggatgyagtggcgaaggcagggcaggtggtgcgtgaggccgtaggaggsctgcagaccgtgagaagctttggsgcrgaggagcaggaaktcagmcgctacaaggaggccctggagcgatgtcgacagctgtggtggcgccgagacctggaaaaarrmttgtatttagtyatacrgagggtaatggccttgggcatgcaggtgctgattctgaackkcggtgtgcagcagatcctggctggggaggtcacccggggcggcctgctctccttcytgctgtatcaggaggaagtggggcaccatgtccrgaacctggtatacatgtatggggatatgctgagcaacgtgggtgcygcggaaaaggttttttcctacttggaccgaaggccaaatctgccgaakcctggkaccctggcccctcccaggstggaggggcgcgtggaatttcaagatgtctccttctcgtaccccagtcgccccgagaagcctgtgctccagggcctgacgttyaccctgcatcctggaaaggtgacsgckttggtgggacccaatgggtcagggaagagcaccgtggccgccctgctgcagaacctgtaccagcccaccgggggcmagstgctsctggatggcgagcccctggtccagtacgatcaycactacctgcaccgccaggtggttctggtggggcaggagcctgtgctgttctccggttctgtcaaggacaatattgcctatggcctgagggactgtgaggaygctcaagtgatggctgctgcccaggcggcctgtgcagacgacttcataggggaaatgacgaayggaataaacacagaaatcggggagaragggagccagttagctgtgggacagaarcaacgtctggccattgcccgggcccttgtgcggaacccgcgggtcctcatcctggatgaggctaccagtgccctggacgccgagtgcgagcaggcccttcagacctggagatcgcaggaggacaggacgatgctggtcattgctcaccggctgcacacggttcagaatgctgmccaagttctggtgctcaagcaggggcagctggtggagcrcgaccagctcagggatgagcaggatgtmtacgctcacttggtacagcagcggctggargcgtgaggcctccagacactgagccctctcaggactgtggccaggatctgacccacagggactgtgstggaggctagcgtcaggataaagattgggaccctttggactttgtttattwtggtgggcttggtgggtgaggkccaggggatgggatggytgctgggtggggtgggtggtttaaacattatttttttctaaatataaaamtamtaaatmtatwkataatamwwwaaaaaaaaaaaaaaaaaaaa

SEQ ID NO: 3072 - DNA, 2093 bp, Rattus norvegicus
tgtcgagtaagcactcagcaactagtccaacatcctccacggcggctggaccagataggatttgttggtggctcacagatcatcagtcctggagccttctgatcccacctcagtgctcttgactgagcaatggagtctttcactgctgacaccaactcaactgacctacactcacggcctctgtttaaaccccaagacattgcctccatggtcattctcagtctcacgtgtttattgggactgccaggcaatgggctggtgctgtgggtcgctggcgtaaagatgaagaggaccgtgaacacagtctggttcctccacctcaccctggccgatttcctctgctgcctctccttgcccttctccgtggctcacctgattctccgaggacactggccctatggcttgttcctgtgcaaacttatcccgtccgtcattatcctcaacatgtttgccagtgtcttcctgcttactgccattagcctggaccgctgtctgatggtgcacaagccgatctggtgccagaaccatcggagcgtgagaacagccttcgccgtctgtggatgcgtctgggtggtaacctttgtgatgtgtataccggtatttgtataccgtgatctgctcgttgtggatgattacagtgtatgtggctataactttgattcctccagggcatatgattattgggactacatgtacaattcacatctaccagaaatcaaccctcctgacaactccactggacatgtggatgacaggacagctccttcctcctctgtaccagcaagggacctttggacagctaccactgctctccagtcacaaacgttccacacatctcctgaagacccattctctcaagactcagcaagtcagcaaccccattatggggggaagcctcctactgtgctcatagccaccatacccggcgggtttcctgttgaagatcataaatccaacacactgaacactggtgcttttctctctgcccacacagagccgtccctcactgcttctagcagtcctttatacgcccatgatttcccggatgattattttgaccaactgatgtatggcaatcacgcgtggacacctcaggtggcaatcaccatctcgaggctggtggtgggcttcctggtgccctttttcatcatgataacctgttacagcctcatcgtcttcagaatgcgaaaaaccaacctcaccaagtcgaggaacaaaacccttcgggtggccgtggcggtggtcaccgtcttttttgtctgctggattccataccatattgttggaatcctgttagtgattactgaccaagaaagcgccttgagagaagttgtgctaccctgggaccacatgtccattgctttagcatctgccaatagttgtttcaaccctttcctttatgccctcttgggaaaagacttcaggaagaaagcaagacagtccgtaaagggcattctggaagcagccttcagcgaagagctcacgcactctaccagttgtacccaggacaaagccccctcaaaaagaaaccatatgagyacgrrkgtgtgaagatgctgcactggggacctaagcagatgttctgaggtgaatactggtgatgggtgacctgtgagcgggacaccttagacagcctggccaccctcagagaaaggtctcttattgacatcagcatcatttgaaaacactaaaggcacaaaatttcaagccccatcccagatgtttgactccgaatctctggcccgtggggaccaatgtcttaacaggcccccttgtttccaccaatgttaagttttattcaactcattytattcccatccctgamtcggccatgtgcaatgaataacgtyytcatctgtttccagtattaatctcttcttgcatagcatcatytaaatcctytagtttgtgcgggaggctgctattgtccagagtgaaagatatttytttattgwacatttgtgtggtggtagcagtgattttttagtggggaggcaggggagaaagacacagaaataaaaggtytytggaaaaaaaaaaaaaaaaaaaaaaaaaaaaaaaaaaaaaaaagaaaaaaaaaaaaaaaaaaaaaa

SEQ ID NO: 3073 - DNA, 5383 bp, Rattus norvegicus
gattttgactgggggtaggagaaagggaagggtgggtraggacggaaaaagcagcatcggtcagccgcgaaccccaggagaaaasstgggggcctgagccagaaccggagccctagcggcacaagscagacacccagggttggtcagctccgcatgatgagtctccggcttttcagcattctgctcgccgctgtggtctctggagcccagggctggggctactatggctgcaatgaggagctggtggggcctctgtatgcacggtctctgggtgcttcctcctactatggactctttaccacagcccgctttgcccggctacacggcatcagtggatggtcgccccggattggggacccgaatccctggctccagatagacttaatgaagaagcatcgaatccgggctgtggccacacagggagcctttaattcttgggattgggtcacacgttacatgctgctctacggggaccgtgtggacagctggacaccattctaccaacaagggcacaacgcgaccttcttcggtaatgtcaacgactcggcggtggtacgccatgacctgcactaccattttacggctcgctacatccgcatcgtgccactggcctggaacccccgcggcaagattggcttgaggctgggcatctacggttgtccctacacgtccaacatcctgtattttgacggcgatgatgccatttcataccgcttccagcgaggggccagtcaaagtctttgggacgtgttcgcttttagtttcaagacagaggagaaggacgggctgctgttgcacaccgaaggctcccagggggattatgtgacgcttgaactgcaaggagcacacctgctgctgcacatgagcctgggcagcagccccatccagccgagacctggtcacaccacggtgagcgctggtggcgtacttaatgacctaagctggcattatgtgcgggtggaccgatacggccgagaagcaaatctcaccctggatggttacgtacatcgctttgtgctcaacggcgactttgaaaggctgaatctcgaaaatgagatattcatcggaggtctagtgggcgcagcgcgtaagaacctggcctaccgccataacttccgtggctgtatagaaaacgtgatctacaaccggatcaacatagctgaaatggcagtgcagcgccattcgcggatcaccttcgagggtaatgtggctttccggtgcttggatcccgttccacaccccatcaacttcggaggccctcacaacttcgtccaagtgcctggctttccacgtcgaggccgccttgctgtctccttccgcttccgcacctgggacctcacagggctgctccttttctcccgcttgggggatgggctgggtcatgtggagctgatgcttagtgaagggcaagtcaatgtatccatcgcgcagactggccgcaagaagcttcagtttgctgcggggtaccgcctgaatgatggcttctggcatgaggtgaactttgtggcacaggaaaaccatgcggtcatcagtattgatgatgtggagggggcagaggtcagggtatcatacccactgctgatccgcacagggacttcatacttctttggtggttgtcccaaaccagccagtcgatggggctgccactccaaccagacagcattccatggctgcatggagctgctcaaggtggatggtcaactggtcaacctcactctggtagagtttcggaagcttggttactttgctgaggtcctctttgacacatgtggcatcacagacagatgcagccctaatatgtgtgagcatgatgggcgctgctaccagtcttgggatgacttcatctgctactgcgaactcaccggctacaagggagttacctgccatgaaccattgtataaggagtcctgtgaagcctatcgcctcagcgggaaatattctggaaattacaccattgatcctgatggcagtggacccctgaaaccatttgtagtgtattgtgatatccgagagaaccgagcrtggacagttgtgcgacatgacaggctatggaccactcgagtgacaggttccagcatggaccggccctttctgggggccatccaatactggaatgcctcctgggaggaagtcagtgctctggccaatgcttcccagcactgtgagcagtggatcgagttctcctgctacaattcccggctgctcaacactgcaggaggctacccctacagcttttggattggccgaaatgaagaacagcatttctactggggaggctcccagcctgggatccaacgctgtgcctgtgggctggaccagagctgtatagaccctgcactgcactgcaactgcgatgctgaccagccacagtggagaacagacaaggggctcctgacctttgtggaccatctgcctgtcactcaggtagtgataggtgacacaaaccgctccagctctgaagctcagttcttcctgaggcctctgcgctgttatggtgaccgcaattcctggaacactatctccttccgcactggagctgcactgcgtttccctccaatccgtgccaaccacagccttgatgtctccttctacttcaggacctcggctccctcaggagtcttcctagagaacatggggggtcctttctgccagtggcgccgaccttacgtgagagtggagctcaacacatcccgggatgtggtctttgcctttgatattggcaatgggratgagaacctgacagtgcactcagatgacttcgagttcaatgatgacgagtggcatttggtccgggctgaaatcaacgtgaagcaggcccggctgcgagtggaccatcggccctgggtgctaaggcccatgcccctgcagacgtacatctggctggagtatgaccaacccctctatgtgggatctgcagagcttaagaggcgcccatttgtggggtgcttgagggccatgcgtttgaatggagtgactctgaacttggagggtcgtgccaatgcctccgagggcaccttccccaactgcacgggccactgcacccacccccggttcccctgtttccacggaggacgctgtgtggagcgatacagctactacacgtgtgactgtgacctcacagcttttgatggaycatattgtaatcacgatattggtggattctttgagactggcacatggatgcgctataacctccagtcagcactgcgttctgcggcccaggagttctctcacatgctgagccggccggtaccgggctatgagcctggctatatcccaggctacgacactcctggttacgtgcctgggtaccatggtcctgggtaccgcctacccgactacccaaggcctggccggccagtgcccggataccgggggcccgtgtacaatgttactggagaggaggtctcctttagcttcagcaccagctctgctcctgcagtcctgctctacgtcagctcctttgtgcgtgactacatggccgtgctcatcaaggaagatgggaccctacagcttcgctatcagctgggcaccagtccctatgtgtaccagctaaccacccggccagtgaccgatggccaaccccatagtgtcaacatcacccgggtctaccgaaacctctttatccaggtggactacttcccgctgacagaacagaagttctctctcctggtggacagccagctggactcccccaaggccttgtatctagggcgtgtgatggagacaggagtcattgacccagagattcagcggtacaacaccccaggtttctcaggctgcctgtctggtgtccggttcaacaatgtggctcctctcaagacccatttccgaacccctcgccccatgactgctgagctggcggaggccatgcgggttcaaggagaactgtcggagtctaactgtggcgctatgccacgccttgtctccgaggtgccaccagagcttgatccctggtacctgcccccagatttcccatactaccatgacgacggatggattgccatactcttaggttttttggtggccttcctgctgctggggcttgtgggaatgctggtgctgttctatctgcaaaatcatcgatacaagggctcctatcacaccaacgagcccaaggccacccatgattcccaccctggcggcaaagctcccctacctccctcaggccctgcccaggcccctgcccccactccagctcccacccaggttccgaccccagccccagccccagcctctggcccaggccccagggaccagaacctcccccagatcttggaggagtccaggtctgaatgagtcacaagggcttcagggaccaaggccaactcctctaagtyccttmagctcctgcctctcctctcccctgtcagggacatttggctcttcttagcaggctctgttcaccaggaggatcccctcttgccaagtttggtgtgcagagctacagatgggaccaaagggagtggccgagtctcactgcctaaaccaatgccctgcccccaccccccaccccagctcctggctgtttgcctgccctacgggagaaagctcatggagctgaggcgggcctttcctgccatctctgtcccagctgctggcaaggattaacaaccaagggcaggggagrtgaactgcctcccttcctgtgggtattatcagcagggacagatgtgggggatcgaggggctgcacagggcaggcagggagggagggaggasrckrskaaaacacaccctggagcctcccccctgccctrctgaccggctgtcttccatctrcttcctctcagctggggttgagggaagaayttcatcsccaccccccacctcacccaaccstttttgttcttacagagaccaagaggcctcagcttagtcactttagtacctccactgcttcayatgctttascsaaagccrtaaaaagcytgcaagtagaagaartaatgcagaccctgcccarccagtcctbtgctcctccacccctttccaaaatacgcaatagcctgggtgcctgtgtgcaggcctggccccccyscgtgmatgargagccccccctcccccgctcagagatgctgcgwgwtcgtccaggaggtcatattcttyatatatattytwtgwtgyaaagcctcwmwmwararaamwawawattactctaattttttaattatctgtttatatataaaagaactcagtgggcmrwmmwrwrmwrwrmmmarwwwgtagtgagctccttctgtgttggatgtctcatgagtcytgccagccactcacccgcctgccgggcctccattytagagcagggcagagcccgctgtgccctcacytgagcaggttcaataaaagcagmgtggcagarmmmmaaaaaaaaaaaaaaaaaa

SEQ ID NO: 3074 - DNA, 2795 bp, Rattus norvegicus
ggcacgagaaaaccagaaagcaggcgaccctcacttacccgtggactggaagccagaagaagaggaaaccgaaagttgtcctttctcagtgcctcgcagagctcttgtcagggacatatctgtagcaccgcaccctcctgaagcgacctggcccgatatcacacctggagccgagaggcgcctttccaccagtgctcctcgggtcacatagactttccgggcatccctgggtctttgaagaagaaagaaaagagatactctaggagagtcaagggcgtccagcggtaccatgggccgtcggagcgcgctagcccttgccgtggtctcagccctgctgtgccaggtctggagctctggcgtatttgagctgaagctgcaggagttcgtcaacaagaaggggctgctggggaaccgcaactgctgccgcgggggctctggcccgccgtgcgcctgcaggacmttctttcgcgtatgcctcaagcattaccaggccagcgtgtccccggagccaccctgcacctacggcagtgcggtcacsscagtgctgggtgtcgactccttcagcctgcctgatggcgcaggcatcgacyccgccttcagcaaccccatcygattccccttcggattcacctggccaggtaccttctctctgatcattgaagccctccacacagattctcctgasgacctcgcaacagaaaacccagaaagactcatcagccgcctgaccacacagaggcacctcactgtgggwgaagagtggtctcaggaccttcacagtagcgsccgcacagacctccgctactcttaccggtttgtgtgtgatgaacactactatggagaaggctgctccgtgttctgccgaccgcgggatgatgcctttggccacttcacctgcggggagagaggggagaagatgtgcgaccctggctggaaaggccagtactgcactgaccccatttgtctgccaggctgtgatgaccaacatggatattgtgacaaaccgggggaatgcaagtgcagagttggctggcagggccgctactgcgatgaatgcatccgatacccaggctgtctccatggtacctgccagcagccctggcagtgtaactgccaggaaggctgggggggcctcttctgcaaccaggatctgaactactgcactcaccataagccatgcaggaacggagccacctgcaccaacacgggccaggggagctacacatgctcttgccgacccgggtatacaggggccaactgtgagctggaggtagatgagtgtgctcccagcccctgcaggaatggagggagctgcacggatcttgaggacagctactcttgcacctgccctcctggcttctatggcaaggtctgtgagctgagcgccatgacgtgtgcagatggtccttgcttcaatgggggacgatgttcggataaccccgatggaggctacacctgccattgccctgcgggcttctctggcttcaactgtgagaagaagattgatctctgtagctcttccccttgttctaacggtgccaagtgtgtggacctcggcaactcctacctgtgccgatgtcagactggcttctccgggaggtactgcgaggacaatgtggatgactgtgcctcttctccctgtgcaaacgggggcacctgccgggacagtgtgaacgatttctcctgtacctgcccacctggctacacaggcaggaactgcagcgcccctgtcagcaggtgtgagcatgcaccctgtcataacggggccacctgccaccagaggggccaacgctacatgtgtgagtgcgcccagggctatggcggcgccaactgccagttcctgctccctgagccaccaccagacctcatagtggcggcccagggcgggtccttcccctgggtggctgtgtgtgccggggtggtgcttgtcctcctgctgctgctgggctgtgctgctgtggtggtctgcgtccggctgaagctacagaaacaccagcctccgcctgatccttgcgggggagagacagagaccatgaacaacctagccaattgccagcgtgagaaggatgtttctgttagcatcattggggctacacagatcaagaacaccaacaagaaggcggactttcatggggaccatggtgctgacaagagcagctttaaggcccgataccccactgtggactataacctcattcgagacctcaagggagatgaagccacggtcagggatgcacacagcaaacgtgacaccaagtgccagtcacagggctctgtaggagaagagaagagcacctcaacgctcaggggtggggaggttcccgacagaaaaaggcccgagtctgtctactctacttcaaaggacaccaagtaccagtcggtgtatgttctatctgcagaaaaggatgagtgtgttatagcgactgaggtttaaggtggaagtgatgtggcaaagttcccatttctcttaaataaaattccaaggatatagccccgaggaatgctgctgagagaggaaccggagaggaaaccccagggactgctgctgagaaacagactcaggcggagggttcatctcggagttagcagagaaccggacacacccagcccaggattgatgccgctgtactgcctgctggatgttcccgttgcactatggacagttgctttgaagagtataatatttaaatggacgagtgacttgagttcacacaggaagcacgcactgccggacatgtctatcttggattactatgagccagtctaaacttgaactagaaacacaactgccttta

SEQ ID NO: 3075 - DNA, 2013 bp, Rattus norvegicus
gaattcggcacgagcgcagacacagagcgggtccctggcgggtccctgcggacccggccaggcgcttccgcgggttctggcttttgcatcccggcgcagcgcgcaggcggaggcgcaggcaaggcggccccgctgacccgaggctgagacgcgatgagcagccacggcaacagtctgttcctgagggagagcggcgctggcgggggctgtctgcaaggcctgcaggacagtctgcagcagagagcactgcgcacgcgcttgcgcctgcagaccatgacccgagagcacgtgcggcgcttcctgcgccgaaatgccttcatcttgctcacagtcagcgctgtgatcattggcgtcagcctggcatttgccttgcgcccatatcagctcacctaccgccagatcaagtacttctcttttcctggtgagctgctcatgaggatgctgcagatgctggtgctacccctcattgtctccagccgkgtcacaggtatggcatccttggacaacarggcaacagggaggatgggaatgagggcagctgtgtactacatggtgacgaccgtcattgcagttttcatcggcatcctaatggttaccatcatacatcctgggaagggctccaaggaggggctgcaccgtgagggccgaattgagactgttccaacagctgatgctttcatggacctggtcagaaatatgtttccaccaaaccttgtggaggcctgcttcaaacagtttaaaacacagtacagcacacgagtggtaacaaggacgattgtaaggacagacaacgggtcagagttgggggcctccatttctcctccatcctcagcagaaaatgaaaccagcatcctggaaaatgtcacccgggccttgggcaccctgcaggaggtgataagctttgaggagactgtgcctgtacctggctcagctaatggcatcaacgctttgggcctcgtggtcttctctgtggccttcgggctggtcatcggtggcatgaagcacaaaggccgtgtcctgagggatttcttcgacagcctcaatgaggctattatgaggctggtgggcatcatcatctggtatgcaccagtgggcatcctgttcctgattgctggaaagattctggaaatggaagacatggctgtccttggaggtcagctgggcatgtacacgctgactgtcattgtcggcttatttcttcatgctggtggtgtgttacccctcatctacttccttgtcacacatcggaacccctttcccttcatcggtggtatactacaggcactcatcacagccatgggtacctcttccagctctgcaactctgcctatcactttccgatgcctggaggagggcctgggtgtggaccgccgcatcaccagattcgtgttgcctgtgggggccactgtcaacatggacggcaccgcgctctatgaggccttggcagccatctttattgctcaagtcaacaactatgagctgaaccttggtcagatcaccacaatmagcatcacagccacagctgccagcgtaggagcagctggcatcccccaggcaggactggtyaccatggtgattgtgctcacgtctgtcggcctgcccacagaggacatcacattgatcatagctgtggattggttccttgatcgacttcgtacgatgaccaatgtacttggggactcaattggagcagctgtcattgagcatttgtcccaacgggagctggagctgcaagaggctgagctgactctacccagcctggggaaaccctataagtcactcmtggcacaagmmaagggggcatcaaggggtcggggaggtaatgagagtgtcatgtgagaagcttctagctctttgtccagggcggagggaaggggctgggaggggagtcctggggacaatctgttgcacaactgactgtgggctgcacawacatgttctgtgtgggttctctggggactgctgagataaaagagaaggaatgaaaggtraaaaaaaaaaaaaaaaaaaaaa

SEQ ID NO: 3076 - DNA, 4527 bp, Rattus norvegicus
agctccaccagatgacatgtagcgcgcgggacctctgcatcagccaagaggaattaagctttgtcactccccactgggactaccttcctcctggtatgtgcgcaaggaattcatatactgctgctcgccgccgcaggcaccagagcagagccctgtgtgcactttggcagagatcagggagcaagaatgatagctgtctcttttaaatgccgctgtcagattctaaggcgacttaccaaagatgagagtccctacactaaatctgccagccagacaaagccgcccgatggagcattggctgtgaggagacagagcatcccagaggaattcaagggctccaccgtggtggagctgatgaagaaggagggaaccactcttggcctgacggtatcaggaggaatcgataaagatggaaagccaagagtgtccaacctgcggcagggagggattgctgccagaagtgaccagctggatgtgggcgactacatcaaagcggtgaatgggatcaacctggccaaattccgccatgatgagatcatcagcctgctgaaaaatgttggggaaagagtggtcctggaggtcgagtatgagcttccaccggtctctatccaaggatcgagtgttatgttccgaacagtggaggtcaccttgcacaaagaaggcaacacctttggttttgtcatccgagggggagcgcatgatgacagaaataagtcccgtccagttgtgataacctgtgttcgtcctggagggcctgctgacagagagggcaccatcaaacctggagacaggttgctcagtgtggatggaattcggcttctgggaaccacccatgctgaggccatgagcatccttaaacagtgcggacaagaagcaacgctgctgatagaatatgatgtctccgtgatggattctgtagcaacagcatccgggccactactagttgaagttgccaaaactcccggtgcaagccttggggttgcactaactacctccgtgtgctgtaacaaacaagtcatcgtcatagacaaaatcaaatctgcaagcattgcggacaggtgcggggcgctacatgtgggagaccacatcctctccatcgacggcacgagcatggagtactgtaccctcgcagaagcaacccagttcctggccaacaccactgaccaggtcaagctggagattctcccacaccatcagacccgcctggccctgaagggacctgaccatgtgaaaattcagaggagcgacagacagcttccctgggatccctgggccagcagccagtgcagcgttcataccaaccatcaccataacccgcaccacccagaccattgccgagtaccagccctgggttttccgaaagcgcttactccaaacagccctccggctatggtgtcctcgtcctctcctacctctatgagtgcgtacagcctgagttccctgaacatggggactttacctcgaagcctctactctactagtccacgaggaaccatgatgaggaggagactgaaaaagaaggacttcaaaagctcactgtctttagcttctagcactgtgggattggctggacaggttgttcacactgaaaccacagaggttgtgctgacggctgatcctgtcactggctttggaatccaactgcagggcagcgtgtttgccacagagactctctcctccccacctctgatttcctatattgaagctgacagcccagcagagagatgtggtgtgctgcagattggagacagagtcatggccattaatggaatcccaacagaagacagcacctttgaggaagccaatcagctccttcgagactcttccatcacgagcaaagtcacactggaaatcgagtttgatgttgcagaatctgtcatcccaagtagtggaacatttcatgtaaaactgcctaagaagcacagcgtggagcttggaataaccatcagttcgccatccagtagaaaaccaggggaccctctcgtcatttcagatatcaagaaaggcagtgtggcacacagaactggaactctggaacttggagataaattgctcgccatagataacatccggttggacagctgttccatggaagatgcagtccagatcctccagcagtgtgaagacctggtgaagctcaaaatccgcaaagatgaagataactcagatgagcaagagagttccggggcgattatttacacggtggagctgaagcgctatggggggccccttggcatcaccatttctggaacggaagagccctttgatcctattatcatctcgagcctcactaaagggggattagctgaaaggactggagcgatccacatcggagatcgaatcctagccatcaatagcagtagcttgaaggggaagcctctgagtgaagccatccacttgctacagatggcgggagagactgtcaccctgaaaattaagaagcagacagatgctcaacctgcctcaagtcccaagaagctgcccatccccagccactcaagtgacctaggagatggtgaggaggacccctccccaatacaaaggcctggcaagctctctgacgtgtacccctccacagtacccagcgtggacagtgctgtggactcctgggacggatctggaatagatgccaggtatgggagtcaaggcacgacttttcagacttcagggtacaatttcaacacctatgactggaggagtccgaagaaaagagccagcctgtccccggtccccaagcctcgaagccagacatacccagatgtgggcttgagtaatgaagactgggaccggtccacagccagtggcttcgccggggcttctgacagtgcagacgctgaacaagaggaaaacttctggtctcaagcattggaggacctggagacctgcggccagtcgggaatcctgagagagctcgaggcaacaatcatgtcggggagcactatgagtttgaatcatgaggctccaacggctcgcagtcagctggggcgacaggccagcttccaggaacggagcaattcgaggccacactatagccaaacgactcgcagcaacactctgccctcggatgtgggcagaaagtctgtgaccctgcggaaaatgaagcaagaaatcaaggagattatgtccccaactcccgtggagcttcacaaggtgaccttatacaaagactctggcatggaggactttgggttcagtgtggcagatggcctgctggagaaaggggtgtatgtcaaaaatatccgcccagctgggccaggtgatcttggaggcttgaagccttatgacaggctcttacaggttaaccacgtccgaacgagagacttcgactgctgcctggtggtgcccctcatagccgaatccggtaacaagctggacctggttattagcagaaacccgctggcctcccagaagtcgatagaacagccggctctgcccagtgactggagcgaacagaacagcgctttcttccagcagcccagccacggtggtaacctagagacacgagaacccactaacacattatagcattacttttataaagcaggacgaaagacgatatctacatggtgctaaaacaaaacagaacagaacagaacagaacagaacagaacagaacagaacagaacagaacaaccctttaagatttcttgtgacagcttgaagcacagagaatcaccgtggcattaattgcaaagcacaggggtcttttaaatctccctcatagctcatgttctcatcccttcccaactagaagaggtttcttttaggatgaccactctgttaactggcgggtcctcctctgccgggggtggggaggccccttcggtagacaataaagaggaaggcagcccaccccttcccccaccccaatcaagatcagaggaaactttttacaattcaccttactgtcacttttaacagagagaaacatccctttgaaaatattctctatggtaatttcctgaatggagtaagtttcttactataacgtcattagtgtaagaacacgatcaatatggatttacacatagctggccctgctaggggagctaggatgggtgaatggctaggcctgccgcggtgggaggggcacaggtataacattaggttttcttaaaatatttcagcaacagtgcacgttggagaccataataggtggtggtaaatgtttcgcccaaatataggaatgattttaactaagatgtatgctattccctatgcaacagatgatcaaacaggatatgtcttgtgacctgtttttttttttccttaaggacacattcttttttttttttttaatagctgaaaaaaatctctggtaatgaattagagtgtgtggtaacactgagcattagtgatatgaccctatttttaaaatccaagactaagaatttaaggagtgaagagtctaatgaaatgagattcactttctgggtaggcaaacagaactcatgcagctcagaagtctgcagactgctacaccgaggggtgcacagcacaatgacttaaggacgacgacgatttggt

SEQ ID NO: 3077 - DNA, 5056 bp, Rattus norvegicus
cacgaggcgccctcgggcaggaccccgccccggctcccctgtgctcccggcgcccatggcgctgagcaaagggctgcgactgctggcgcggctggaccccaccggcccgagcagcgtgctgctggaggcgcggggccgcggcgactgtctactctttgaggccggcgcggtggccacgctggctccggaagagaaggaagtcattaaaggactgtatgggaagccgacggatgcctatggctgcctcggggagctgagtttaaaatccggtggcgtccccttgagctttctggtgttggtgacaggctgcacgtcagtgggcagaattccagatgcagagatctacaaaatcactggcactgagttttaccccctgcaggaagaggccaaggaagaggaccgcctgccagccttgaagaaaatcctgagttcaggggtgttctatttcgcatggcccaatgatggcgcctgcttcgatctgaccatcagggctcagaaacagggtgatgactgctctgaatgggggacctccttcttctggaaccagctattgcatgtgcctctgcggcagcaccaggtgaactgtcatgactggttgctgaaagtcatctgtggggtggtgaccatccgcacggtttatgcctcccacaagcaggccaaggcctgtctcatctctcgcatcagctgtgaacgcgcaggtgctcgcttcctcacccggggtgtgaacgacgatggccacgtgtccaactttgtggagacagagcaggcgatttacatggatgatggagtgtcgtcctttgtccagatccgaggctccgttccgctgttctgggagcagccagggctccaggttggctcccatcatctgagactgcacagaggcctagaggccaacgcccctgcttttgaaaggcacatggtgcttctgaaggagcagtacgggcagcaggtggtggtgaacctgctgggaagcagaggcggtgaggaggtgctcaacagagccttcaagaagttgctctgggcttcttgccacgcaggcgacacgcctatgataaattttgacttccatcagtttgccaaaggtaggaagctagagaaattggagaacctgttgagacctcagttaaaactacactgggatgactttggcgtatttgcgaagggcgagaatgtaagtccacggtttcagaaaggcactctgcggatgaactgtctcgactgtctggacagaaccaacactgtacagtgcttcattgctcttgaggtgcttcatctgcagcttgagagcctagggctgaattccaagcccatcactgaccgcttcgtggagtccttcaaagccatgtggtctctgaatgggcatggcctgagcaaggtgttcacagggagcagggccctggaaggaaaggccaaggtggggaagctgaaggatggggctagatccatgtctcgtaccatccagtccaacttcttcgacggggtgaagcaggaggccatcaagctactgctagttggagatgtctacaatgaagagtctacagacaaaggcaggatgctgctggacaacacggcccttctgggtttggggtcaaataaacaaaacagtctttcaggcatgctggatggaaaagcaacacccaggatcctgaaggccatgacagaacgccagtcagaattcacaaatttcaagcggatccagattgctatggggacctggaatgtgaacggaggaaaacaattccgtagcaatctcctggggaccactgaactcactgactggctcctggatgcaccccagctctcaggagcagtggactctcaggacgatggcggtcccgctgacatatttgccgtcgggtttgaggagatggtggagctgagtgcaggaaatattgtcaatgccagcaccaccaacaggaagatgtggggtgagcagctccagaaagccatctcccgatcccatcggtacatcctcttgacctcagcacagctggtgggcgtctgtctttacatctttgtacgtccgtaccacgtcccgttcatcagggatgtggccatcgacaccgtgaagaccggtatggggggaaaggcagggaataagggcgccgtgggtatccgctttcagttccacagcactagcttctgcttcatctgcagtcacctgacggctgggcagtctcaggtgaaggagaggaacgaagactaccgggagatcacgcacaagctctccttcccttcggggagaaacatattttcacacgattatgtgttttggtgtggcgatttcaactaccgcatcgatcttacttacgaagaagtcttctattttgttaaacgccaagactggaagaaacttatggaatttgatcagttacagctacagaaatcaagtgggaaaatttttaaagactttcatgaaggaaccattaacttcggacccacctacaagtatgacgttggatcggctgcctatgacacaagtgacaagtgccggaccccagcctggacagacagggtgctgtggtggaggaagaagcatccgtacgataagacagctggcgaactcaaccttctagacagtgatctagacggtgatgccaacatcagacatacctggtctccgggcactctcaagtactacggccgtgccgagctgcaggcatctgatcacagacctgtgctggccatcgtagaggtggaggttcaagaggtcgatgtgggagcccgggagagagtcttccaggaagtgtcctctgtccaaggcccgctggacgccactgttattgtaaaccttcagtctccaacccttgaagagagaaatgaatttccagaggacctgcgcacagaacttatgcagactttggggaattatgggacgattattctggtcaggatcaaccaagggcagatgctggtgacatttgcagacagccactcagctctcagtgtgctggatgtggatggtatgaaggtgaaaggcagggccgtgaagattcgaccaaagaccaaagattggctagaaggcttgagagaggagctcattcggaagcgggacagcatggcccctgtgtctcccaccgccaactcctgcttgttggaggagaactttgacttcacaagtctggactatgagtcagaaggggatgttcttgaagatgatgaagactacttagcggatgagtttggtcagcctgtagtctcagacagtgagcttggaggagacgactcttctgataccatgagcgcctcgacacctgccagcaagtctcccgcactggctaaaaagaagcaacatccaacgtacaaagctggcttaatggtgaagaagtctgcctcagatgcgtctatctcctccggaacccacgggcaatattccatcttgcagaccgcgaaacttcttccaggagcacctcagcaaccgcccaaggctcgaactggaataagtaaaccttacaacgtcaaacagatcaaaaccaccaatgctcaggaggcggaagcagctatccggtgtctcctggaagctggcggaggtgtcccagagtcagccccgggtgccacgcccctgagaaaccaagggtcttctaagccagaggcctccctggggcctccagtcctaccgcgccggcctgttccaagggttcccactatgaagaaaccaactttgaggagaacaggaaagatcgttttctgctctagctcacaagcttctcaaccttgctcactgctgcaaagacatgagtttgtaaggacagtagccgcccagagactgacacccgtagatgcttccggatcttccgtttgatctcagttctgggagcaggccacttgcccatgttaccagaagaacagtgtgaacagcagcctgtccattttacaatggcttcccaggaaatgaaccttgagacccctcctccaataacagctcccatcccgcctgttcccaaaccaagaacatttcagcctgggagaggtgttgagaggaggccgagtggtggcaagccagaaccggatgacgctcctcctgtgacaggcgctgtggagttatcgtctccagaggccccagaggccccgtccctggctcccaaggtgcctcctaggaggaagaagtctgcaccagcagccttccacctgcaggtcctgcagagcaacagccaacttctgcagggcctcacatgctccagcagttctccgtccccacsaragcctgacryscccctgctctatccgcaaatggcacttggcacttcatctgctataagtcccgaaactgatggccccagagtgacggagcccgaggcagcctcttttcatggcgattacccagatcccttctggagccttctccaccaccccaagctgttgaataataatacctggctgtccaagagctctgagcctttakacttggggtccaggacccctgagargacacacacagactcagcgcaggtcaatgcatcagtggttgagagggggcttccaccagaccatgggggtaaagacttcagtcactggatggccgccagtaacaaagacaagaggacaacattaggcgtttgacccacaggcaagaacatggcctgttggctctgtagatgctctcatttcaaacgctcaccttcctmatgtgggcattgcttgacctggtcaaaagggatgttgatgtaaaggcacactgaaaccctttgtttatctgtcactctgtgtagtgaatgaaaactgtctcccattcagtacagttatccagccacccaaacgttccattcaaggtctgtgcattttaagcttgctctcaggacactgggaaatgtgctgttgcattcgggatatggattttaaagggaagaaatctagattcccaagacgctctcatctgcggaattttaagtggttgttcaatatatgtttgtgtgccawwwrmwwrwwrrwwwwrtttgtgtttttacagatttgggataagtggttaggttcataaaagatgacatcaaaagcagtcgggaccttaagagctgttgtgacccacttgaaaccacattaagaaaaaaaaaaaaaaaaa

SEQ ID NO: 3078 - DNA, 3070 bp, Rattus norvegicus
ctcgagggaagttgtagacgcgccctgcgctctgcgctgccttcatctctgctctgaggaagcggcggggtccggggtcctgtctggccatggacacggcctcctccccgcccaatgctgagaggaagcgcgcgggttggggccgcctgctaggcgcccggcggggaagcgcgggactagcaaagaagtgtcccttttcactggagctggccgaaggtggcccgacgggaggcacggtctacgcgcccatcgcaccaaccggagctccagggctcgcgccccccatgtcaccccctgtgtcgcccgtcccggcccctgcagacctcggcccacgtccgcgggtgagccttgacccgcgcgtctccatctacagtacgcgtcgcccgctgctggcgcgcacccacatccagggccgcgtctacaacttcctcgagcgccccacgggttggaagtgtttcgtgtaccacttcaccgtcttcctcattgttctggtctgcctcatcttcagtgtcctgtccactattgagcagtatgccgctctggccaccgggaccctcttctggatggarattgtccttgtggtgttctttgggacaragtatgtggtccgtctctggtctgcaggctgccgcascaagtacktgggcatctggggccggctacgctttgcccggaagcccatttccatcatcgacctcatcgtggttgtagcctctatggttgtcctctgtgtgggttccaaagggcaagtgttcgccacatcagctatcaggggtatccgcttccttcaratcctgcggatgctgcatgttgatcgccagggaggtacctggaggctcctgggctctgtaktcttcattcaccgccaggagctgatcaccaccctgtacattggctttctgggtctcatcttctcctcctactttgtctacctggctgagaaagatgcagtgaatgagtccggccgcatcgagtttggcagctacgcagatgctctgtggtggggagtggtcacagtcaccaccattggctacggggataaggtaccccagacatgggttgggaagaccatcgcctcctgtttctctgtcttcgccatatccttctttgcactcccagcgggcatacttggctctgggtttgcactgaaggtccagcagaagcagaggcagaaacacttcaaccggcagatcccagccgcagcctcactcatccagactgcatggaggtgctatgctgcggagaatcctgactcatccacttggaagatctatgtccggaagcctgctcggagccacactttgctctcccccagccccaagcctaaaaagtctgtcatggtaaagaagaagaagttcaagctggayaargayaaygggctgagtcctggagagaagatattcaatgtccctcacatcacttgtgatcccccagaggatcggaggccagaccatttctccattgatggctacgacagctcagtaaggaagagccctacactgctggaagtaagcacaccccatttcttgagaacaaacagctttgctgaggacctggacctggaaggggagaccctgctgacccccatcacccatgtgtcacagctgcgggatcaccatcgggccaccatcaaggtcatcaggcgcatgcagtactttgtagccaagaagaaattccagcaagcacggaagccctacgatgtgcgagatgtcatcgagcagtactcccagggccacctcaaccttatggtgcgcattaaagaactacagagaaggctggatcagtccatcgggaagccatctttgttcatccccatctcagaaaagagcaaagaccgtggcagcaacaccatcggtgcccgtttgaacagggtggaagacaaggtgacacaactggaccagagactggtgatcatcacagacatgctccaccaactgctgtccctgcaacaaggtggtccaacctgcaacaacaggtcacaagtcgtagccagtgatgaacgtggctccatcaaccctgagctcttcctgcccagcaacagcctgcccacctatgaacagctgactgtgccccagacaggccctgatgaaggctcctgaaggagctcagaagggaggttcagggtaaccttccacaggtctgccccacctccctctcaacaggggcacctgcctggttctcaccctcttgaaggcctgatatgacagcctagctccctaaagccccaaaacccatgggtcaagccactggcctgaatctggagctcaccaagacccctctgcccagtcagtgggaactagaacttggctgagcatggggttcctctcaggcccctatcaagatggtgatgttattctcctgatggctggggacatacggatggggagtgtctgaccaggatgcaactcaggcagaaggaagcccatccaggtgatgccaaatggcttcctaaagggaaacaggaagaatctgaaagagtctggggtttccaccctcaactctgaatccagagcccagcagggagcaggcagggcaagacaggcccagcccacactaactacaagctgtagcccagtgggggctcaacaggccaaagtctgactccttcactctctagtgatgttgaccacttccgaataccagagggatttccagcttcccccaaaggatatcccaggcaggggaccattcactgtccaccctaaccaggtatggactgacaacttctcccmtaaagtgaagagcrrgsccctcaagccytgtgataagcccttygtgcagcctgcctcctccttgmtggtcagaggtgccggagagatgttcagactccagtctcttcacgccacatccmtcagccagcagstgagccacagcaaggttaagggcatcgcggtttmtcmcagsatcggttccttgggcatcacacctcccagaaatcaagataatytctggtgattcagactctgtgttttaatgaatttcatagtatgatcttgattgagaggcttttgcaaataaagctgggacatgccaggttaaaaaaaaaaaaaaaaaaaaaaaaaaactcgag

SEQ ID NO: 3079 - DNA, 2023 bp, Rattus norvegicus
gggacacacgcaccctgtacaggctccttgcccactccaagtcaggagagggcgtggagagatgcagggcagctaggccggttgcaatcttcccaagattgcaacttgtcccaagccggtggtagctcaggggacaggacccattcaaattagtccttctgaggacagtttactgcctttggctggagatgaagcctgcaggtacgggccccacagtctcctctgggggcgagtccaccgacgtgtccctcggcccgccgtttccttggccctgcccgcccgacgtgcggctctgtggccatctgaggaagcagaagtcccagcgccgccgctttttcgtgctgcgtgctgacccaccacggctggagtgctatgagagcgagaagaagttcttggccagcggctgccgcccacctcgaccccggcgtaccgttagcctggaaggtgcctgcactattagcaagcgcgcggatgcccgtcagcgccacctgatcgtcatctataccagcgacagcagcctgggcgtggcggcggccagtgaagcagagcagcaaacatggtacagcgccttgctcgaggtgcgcgccaccgccgctgcagctgctgccaccgctatgggtttcagcccccaagaggcccctgagtcttggatcttcgccccgttccaggacgtctggcctgtgacactgcggtccaaggggctggggagagcaccaggcctgagcagcggcagctatcgcctgtgcctgggttctggggccctgagcctcctgcggaagccgggaagcaaaggctccagagacagccgggcaacgccaccaccagtcctgcgcttgtccttgcttagtgtgcgccgctgcggccacgcagattcctttttcttcctggaactcgggcgctcagcgcccataggtcctggtgagctgtggctgcaggcccctgatgcagtggtggcccaaagcattcatgagaccgtcctggctgccatgaagagactggggagcagtgcagccagtggcaaagctgaggcaccgctgggagattctccaaagggggcttctgcagtccctgccccagcaccatatgagatccctgctttggcactggcagcacaagcgagaagtccgggtgagagagcgaagcaggactacgtcaatccactggaaaggatggggtcagcaccctcctacagggggccagatctgggtggggactacatcgccatgggaatgaggaatgactatgtgcacatgggggggaaagctgctgagtacatgtggatggcgcccccaggtctccctccccccacccctcccagggtagatcccagaaaggagcctgaggattgtgagagcacagagtatatgcccatgaacagatttttaccggggcctctttactacgagttcaaggccagggagcctgaacatgggcattctagtgcccagtgtagcattagggacagatggagacccatggtggctcagccccgctcttcccaagggtcagagctctctggggactacatgtacatccctgactatcccagtgctaggctgggswckmkggasagsygmmkcaactatgtggacctggacctagtccctcccctggaggttcctggagcggccccagggaatagtccacatagctatgccagcatcaagttctagaactttcagaagataggggaggagaaccaagcattggttagggaagagaggaaaagaagagaaaaccttagcactgttcagctcagcttctgcacataggagccagggactctgaggccttgtgaggtgctatgctgccccmttgcctgctctgtctcttccagctgtaccgcctcagaaacacctcaggaagaagtgctccaaagaaattagactcttaagagaaagtactagaacatctctctgcacccccaccccaaacccaaacaacaaacaaataaaacacctacagaaccagtaaaaaaaaaaaaaaaaaaaaaaacattgcggccgcaagcttattcccttta

SEQ ID NO: 3080 - DNA, 1658 bp, Rattus norvegicus
ccggttccgagagcggcaaaggcttgacaagttccgcactgagtgagaagagactgatggctgaggttggtggtaggtccagaacgactgaggcctgaaccgtggggcgcaccccaccctacagataccatccctagatcgaaccgtgagctccaaagctgtgtactactgaccaccatcatgtccatccccggagtcaacgcgtccttctcctccactccggagaggttgaacagcccagtgaccattcccgcagtgatgtttatcttcggggtggtgggcaacctggtggccatcgtagtattgtgcaagtcgcgcaaggagcagaaggagactaccttttacactctggtatgtgggctggctgtcactgacctactgggcacattgttggtaagcccagtgaccatcgccacatacatgaaggsccagtggcccggagaccaggcattgtgtgactacagcaccttcatcctacwykwsktcggcctgtcgggtctcagcatcatctgtgccatgagcattgagcgckacctgrccatcaaccacgcctacttctacagccactacgtggacaagcggctggccggtctcacgctcttcgccgtctatgcatctaacgtgctcttctgcgcactgcccaacatgggcctgggtaggtccgagcggcagtacccggggacctggtgcttcatcgactggaccaccaacgtaacggcctacgccgccttctcttacatgtacgcgggcttcagttccttcctcatcctcgccaccgtgctctgcaatgtgctggtgtgcggcgcgctgctccgcatgcwccgccagttcatgcgccgcacctcgctgggcacggagcagcacyacgcggccgctgcagcagcggtggcttcggtggcctgtcggggtcacgcggccgcctccccagccctgcagcgcctcagtgactttcgccgccgcaggagcttccggcgcatcgcgggtgcagagatccagatggtcatcttactcatcgccacctctctggtggtgctcatctgctccattccgctcgtggtgcgagtgttcatcaaccagttatatcagccaagtgtggtgaaagacatcagcagaaacccggatttgcaggccatcagaattgcttctgtgaaccccatcctggacccttggatctacatccttcttcggaagactgtgctcagtaaagccatagaaaagatcaagtgcctcttctgccgcattggtggttctggcagagacggttcagcacagcactgctcagagagtcggaggacatcttctgccatgtctggccactcccgctccttcctctcgcgggagttgagggagatcagcagcacctctcasaccctcctatacctgccagacctaactgaaagcagcctcggaggcaagaatttgcttccaggtacgcatggcatgggcctgacccaagcagacaccacctcgctgagaactttgcgaatttcagagacctcagactcctcccagggccaggactctgagagtgtcttgttggtggatgaggttagtgggagccagagagaggagcctgcctctaaggggaactctctgcaagtcacgttccccagtgaaacgctgaaattatctgaaaaatgtatatagtagcttaaagg

SEQ ID NO: 3081 - DNA, 1665 bp, Rattus norvegicus
gaaagggggatgtgctgcaaggcgattaagttgggtaacgccagggttttcccagtcacgacgtttgtaaaacgacggccagtgccaagctaaaattaaccctcactaaagggaataagcttgcggccrmgagaasgwwktcttttttttttttttcttgcgggagaacttaatgctgcatttattattaacctagtaccctaacataaaacaaaaggaagaaaaggayyaaggaaggaaaaggtgaatcgagaagagccatcatgtcggggcgaccgagaaccacctcctttgcggagagctgcaagccagtgcagcagccttcagcttttggtagcatgaaagttagcagagataaagatggcagcaaggtaaccacagtggtggcaactcctggacagggtcctgacaggccacaggaagtcagttacacagacactaaagtcattggaaatgggtcatttggtgtggtatatcaagccaaactttgtgactcaggagaactggtggccatcaagaaagttcttcaggacaagcgatttaagaaccgagagctccagatcatgagaaagctagatcmctgtrmcrtagtccgattgcggtatttcttctactcgagtggcgagaagaaagatgaggtctaccttaacctggtgctggactatgttccggaaacagtgtacagagtcgccagacactatagtcgagccaagcagacactccctgtgatctatgtcaagttgtatatgtaccagctgttcagaagtctagcctatatccattcctttgggatctgccatcgagacattaaaccacagaacctcttgctggatcctgatacagctgtattaaaactctgcgactttggaagtgcaaagcagctggtccgaggagagcccaatgtttcatatatctgttctcggtactacagggcaccagagctgatctttggagccaccgattacacgtctagtatagatrtrtggtctgcaggctgtgtgttggctgaattgttgctaggacaaccaatatttcctggggacagtggtgtggatcagttggtggaaataataaaggtcctaggaacaccaacaagggagcaaattagagaaatgaacccaaattatacagaatkcamrwksycmsraatcargrcacayccywggacrarggtctttcgsccccgaactccaccagaggcaatcgcactgtgtagccgtctcctggagtacacgccgaccgcccggctaacaccactggaagcttgtgcacattcattttttgatgaattacgggacccaaatgtcaaactaccaaatgggcgagacacacctgccctcttcaactttaccactcaagaactgtcaagtaacccaccyctggccaccatccttatccctcctcacgctcggattcaggcagctgcttcacckcctgcaaacgccacagcagcctcagatactaatgctggagaccgtggacagaccaataacgccgcttctgcatcagcctccaactctacctgaacagccccaagtagccagctgcgcagggaagaccagcacttacttgagtgccactcagcaacactggtcacgtttggaaagaaaattaaaaararraaaamaaaaacaaammywwrmrrccscaagcttattcccttta

SEQ ID NO: 3082 - DNA, 1301 bp, Rattus norvegicus
acgactggtatcagattaatgtcttgtatatctgaattccgcggaattacgcagcattcaacagagagaagagacctgggactaaaactgggattccaaaaagaatcctgcagtgtggcagcctgcttctcaccttctcacctcggagttggctgaacccagaaccaaatgctttgcacgtctcccgtcaactgcttggactcagtttgttgcacttcgataaatatctcttcactggtccgaagagctgccctcacacacaatgacaaccacttcaactatgagaagacacacaacttcaaggtgcacacatttcggggcccacactggtgtgaatactgtgccaattttatgtgggggctcatcgcccagggagtccggtgttcagattgtgggttaaacgtacacaaacaatgttccaagcacgtccccracgactgccagcccgatctcaagaggatcaagaaagtatactgttgtgatctcaccacacttgtaaaagctcacaacactcagagacccatggtggtggacatatgtattcgggaaattgaagcaagaggattaaaatcagaagggctttacagagtctctgggttcacagaacacattgaagatgtcaagatggcgttcgacagagatggtgaaaaggcggatatctctgctaacatctacccagacataaacatcatcaccggagccctgaaactgtacttcagagacttacccatccccatcatcacatatgacacctatwccaagtttatagaggcagcaaaaatctccaatgcagatgagaggcttgaagctgtccatgaggtcctgatgctgctgcctcctgcccactatgagaccctgcgctacctgatgatccatctcaaaaaggttaccatgaatgaaaaggacaatttaatgaacgcagaaaatctggggatcgtgtttgggcccaccctgatgagaccccctgaagacagcaccctcaccaccctccatgacatgcggtaccaaaagctgatcgtgcagattttaatagaaaacgaagatgttctgttttagtccatcagggaagtgcagctgatagagctagtggaataaaaacgtttctcamamwwrrwwwrtcttttcaaacaagtggcagaatttcctggaccacagtggattgcagagttggggactgtgtctcccgcctccacatgagagcaagggtgaggggaggaaaccccttaccttgggtcttttgccgtgcctcgtatgtatgtctgtttcgctggaagagtgattaataaatctttctttaactt

SEQ ID NO: 3083 - DNA, 1963 bp, Rattus norvegicus
gctttatctgctaagctccgctcagttcagcatgctgcgcgccgcactcagcaccgcccgccgtgggccacgcctgagccgcctgctgtccgccgccgccaccagcgcggtgccagcccccaaccagcagcccgaggtcttctgcaaccagatcttcattaacaatgagtggcatgatgctgtcagcaagaaaacattccccaccgtcaacccttccacgggggaggtcatctgccaggtagccgaagggaacaaggaggacgtagacaaggcagtgaaggccgctcaggcagccttccagctgggctcgccctggcgccgcatggatgcatctgacaggggccggctgttgtaccgattggctgatctcatcgaacgggaccggacctacctggcggccttggagaccctggacaacggcaagccttatgtcatctcctacctggtggatttggacatggttctgaaatgtctccgctattatgctggctgggctgacaagtaccacgggaaaaccattcccatcgatggcgacttcttcagctacacccgccacgagcctgtgggcgtgtgtggacagatcattccgtggaacttcccgctcctgatgcaagcctggaagctgggccctgccttggcaactggaaacgtggtggtgatgaaagtggccgagcagacaccgctcactgcactctacgtggccaacttgatcaaggaggcaggcttcccccctggtgtggtcaatattgttcctggattcggccctaccgccggggctgccatcgcgtcccacgaggatgtggacaaagtggccttcacaggttccactgaggttggtcacctaatccaggttgccgccgggagcagcaatctcaagagagtaaccctggaactggggggaaagagccccaatatcatcatgtcagacgctgacatggactgggctgtggaacaggcccactttgccctgttcttcaaccagggccagtgctgttgtgcgggctcccggaccttcgtgcaggaggatgtgtatgatgaattcgtggaacgcagtgtggcccgggccaagtctcgggtggtcgggaaccctttcgacagccggacggagcaggggccgcaggtggatgagactcagtttaagaagatcctgggctatatcaagtcaggacaacaagaaggggcgaagctgctgtgcggtgggggcgccgccgcagaccgtggttacttcatccagcccaccgygwkcggagacgtcaaakwyggcakgaccatcgccaaggaggagatyttcggaccagtgrtgcagatcytcaaattcaagaccattgaggaggyygyggggcgagccaataattccaagtacgggctggctgccgctgtcttcacaaaggacctggacaaggccaattacctgtcccaagctctgcaggctgggactgtgtggatcaactgmtacgatgtgyttggggcccagtcccmrkywsgdsrykakraratgycggssarhggcaggrasytgggcgagtatggcctgcaggcbtacacgkaagtgaakacggtcaccgtcaaagtgccacakaagaactcgtaaaktggygtgcaggyttcctcagccagcgcccraaaacccaacaagatcctgrgaaaagccmccmccaagcacaytgcgcytgccaagagaaaaccccttcmccaaagcgtcttggsccmmgaaagtcaggatttgataaacagggcaggkytgktggscggykykyggggagcdtccccmgtaaactggggaagggaggagctytgtgcagabyaccacrcgcacgcacacacgctcaytgggtccttctgtgctggatgctggtyccaccctcagtgsttaaacaaatgrgcaataaaaatcagcagwtaaarmmwmvrrrwmarwwctytgagccctaarwwhwrrrwmwwwaaaaaaaaaaaaaaaaaa

SEQ ID NO: 3084 - DNA, 923 bp, Rattus norvegicus
tccggtccctttcagcagccgagatgcagaggaccaaggaagcaatgaaggcatcggatggcagcctcctgggagaccctgggcgcataccgctgagcaagagggaaggcatcaagtggcagaggccacgkttcacccgccaggccctgatgcgttgctgcttaatcaagtggatcctgtccagtgctgccccacaaggctcagacagcagtgacagtgaactggagttgtccacggtgcgccatcagccagagggcttggaccagctacaggcccaaaccaagttcaccaagaaggagctgcagtccctgtaccgaggcttcaagaacgaatgtcccacgggcctsgtsgatgaagataccttcaaactcatttattcccagttcttcccccagggagatgccaccacctatgcacacttcctcttcaatgccttcgatgctrmtsskmacssksccatcymctwtgaggactttgtggttgggctctccatcctgcttcgagggaccgtccatgagaagctcaagtgggccttcaatctctacgacatcaacaaggacggttacatcaccaaagaggagatgctggccatcatgaagtccatctacgacatgatgggccgccacacctaccctatcctgcgrraggacgcacctctggagcatgtggagaggttcttccagaaaatggacaggaaccaggatggagtagtgactattgatgaatttctggagacttgtcagaaggacgagaacatcatgagctccatgcagctgtttgagaaygtcatctaggacatgtaggaggggaccctgggtggccatgggttctcaacccagagaagcctcaatcctgacaggagaagcctctatgagaaacatttttctaatatatttgcaaaaagtgaaaaaaaaaaaaaaaaa

SEQ ID NO: 3085 - DNA, 685 bp, Rattus norvegicus
cacggaagcgagaagctggggctgcttgaggcaggcggcggagaggggtccggactccaacctttaacctgaagtagattagggactcaccagccttgtgttcgtcttttcagcctaagggtgtgaacactttttctcctgaaggaagattatttcaagtggaatatgccattgaggccatcaagcttggttctacggccattggcatccagacatcagagggtgtatgtctagctgtggagaagagaattacctcgccactaatggagcctagcagcattgagaaaatcgtagagattgatgctcatataggttgtgccatgagtgggctaattgctgatgctaaaactttaattgataaagccagagtggagacacakaaccactggwtcacctataatgagacaatgacagttgagagtgtgacccargctgtgtccaatctggctttgcagttcggagaagaagatgcagatccaggtgctatgtctcgtgccttaggagtagcattgttgtttggaggagttgatgagaaagggccccaactgtttcacatggacccatctgggaccttcgtacagtgtgatgctcgagcaattcggtatgcgtcagagggtgcccagagcttcttgcaggaaggttaccacaagtctatgactctgaaggaggccatcaagtgttcact

SEQ ID NO: 3086 - DNA, 1010 bp, Rattus norvegicus
tcgggtgtttgtggtggggctgcggagtcgccgatcccgccggaagcgccaggacaatggggacccgggacgacgagtacgattacctattcaaagtggtgcttattggggactcaggtgtaggtaagagcaacctgctgtcacgcttcaccagaaacgagttcaacctagagagcaagagcaccattggagtggagtttgccactcgcagcattcaggtggacggcaagaccatcaaggctcagatctgggatactgctggccaggagcgctaccgtgccattacctctgcgtactaccgtggtgcagtgggtgcactgctggtatatgacattgccaagcacttgacatatgagaatgtggagcgctggctgaaggagctgcgggatcatgcagatagcaacattgttatmmtgctggtgggcaacaagagcgacctscgccatcttcgggctgtgcccactgacgaggcccgtgcctttgcagaaaagaacaacttgtccttcattgagacctcagccttggattccaccaatgtagaggaagcattcaagaacatcctcacagaaatctaccgtattgtgtcacagaagcaaattgctgaccgtgcagctcatgatgagtcccctggcaacaatgtggtggacatcagtgtgccacccaccaccgatggacagaaacccaataagctgcagtgctgccagaacmygwgrctgccctgcacctccacccagcgtgcgtgcacgtcctcggtccttggccagcccctcaccagtgtcctcccggcccctcccttgtccctctaggacaggctgctcccaccctccaagtgagctccgcctgccagcccgatggcccaggaagagcaggagtccagtggcctctcctgtcctgcctgcttgagagaagctagaagcccccttgcttatgtacctgctcttggatattgtgggcatcttgacagggtagggaggttggtaggatggacaggaccagccagaggtgaggaa

SEQ ID NO: 3087 - DNA, 7224 bp, Rattus norvegicus
gaattccccagtctctccttcctgtgaatgaatctggggtagaggtagatagaaaggatcatatgttggtgtaattatgaaacaatggtacctatcctatgggtgctcccagagacagatcaagtttgttgaattgttaactaattcaactaattaactaattgtcctcccgtatgttcctcaaagaagtcaacactccaaaccctccttaagctaggttggtgagtcataagaaaaaaaagactgatggcgagttttcaaaatgtctgggacagtacatagaatgaatctatactggtctcctacgacccaagaacaaaggggtagggggttaaaagaatttattgtatctcttgtaaaggactacaagacagcatgaaagctagcatcataaagaagtaatgaatctataaaggtattgaaacactactctgtttggtccttgcatatgtgttaattatcacgcagtggctaaaacccacaagggataatgtgaatttcttaaagwcrdmrtvghtmbwtmmrkscvsrvcbymryrschsmcwkrymyhhswkactwgmaggaagtacacttgaagaacacaagtagaggaagtgcaggaaacaagacctacagaatgtaggaggagcctcccgaggaacagaaaatgccacgtcaccgcaagatcctttgctgcttgagcaacctgcaaaacatcggaacacctgccaaatatcaataatgagttcaataccatttcagagatgggcatttccctcaatgaaatacacaagtaaacattcmramawwrwmwwwarragtgtttgttaaaaaaaaaaaaaaaaaaaacaaaaacaaaaacaaaaaaaaaaagcttgcaccttgcaaaagtggtcctggcgtgggtagattgctgttaatcctttatcaataacgttctatagagaatatataaatatatatataattatatctcctagtccctgcctcttaagagccgaaaatgcatgggtgttgtagacattcggttgcactaaattcctctctgaattttggctgctgaagccgttcmkkymgcaamkgtttataggtggttgatgaatggttccttatctccatttcttcctatgtagcttaagccgcttccttcacagaatctaataatctcgtctaggccattagccctgccctttcttaacattcttgtatttgttgaatttggcctcctcgaaagcaatagcaactgggtggcccacccaagttttaacgcccctgattccatctatggcatttgtaccaaatataagttggatgcatttattttagacacaaagctttattttttcgacatcgtgtttcaagaaaaaaaacaaawasaawaacarwaamwawramwwwrarsccmatcrtkyykmskygtgygtttgaagcatagaacgtctcttaaactctcaatggttccttcaaatgatgagttagtatgtaacgtaaatagcagtttctctctctctctctctctttttattttttccatatagagcactatgtaaatttagcatatcaataatacaggaactatcaaacagtatgtaaactccgttgttgttgtttttagtacaatggtgctattttgtagtttgttctatgaaagaatctagtcaacacagagaaaggagaaagcaaagcaaaaacaatgaaagcctggagcccaaaaggacaaaattaggaaggaaactgaaaaaaaaatccatcctcttgggggatgcaaaggcctccccagttatgcctctaagagaagttaagacataacgtccattaagacacacttacttgtcaagtccagagaggaagctatggagtgtgaaaaagcaagaggctagggattctgggagtcctggtttcttttttaatcaccgaagaagcaaggatttgcaatctcggtcccacagactcaccaccgtgtgacctcagtcaagtcacttcacctctcggtgcctcagttttcctcatctgcaaaatgggggcaatatgccatctacctacctcaaaggggtggtatgaagattaaaaaagtagaccttcagattttagttctgggtttccaggagggtgcaacatcagaacccttgaattgctgggatgcaaggaattctgtaaataacccattaacaatgtagctcccaggatcgttcacctgtcactaggatgccaccatcgtatccaagctctttttggtgaagctgtgcaactaaccagtgacaagctagtgactcagtctctccaacatgtcacaaagtaagagacatttgatttgcaatttgagcttatggctaataaagacaagtgaaaagaaagaaaagaggaggaggaagaccttgccaatgaaagagtaatcaattattccatttatccactctcattaatccttccagtcacacagtttctagaaataactctaatactagcagtgagactcagtttgccaaacacaattctccttctccttaacatgtgaaaaaagggccctggcattcttacattttgaaatagtttctatcacagtcacaagctgctgtagtgggtgtagtcttgcccttggttgtatatgcaactacttttttcctattttatgaaaatacgctggcaagagttgctacttgagaggcaaactttttttctcttcaaatctgaggttctccctagtgtctgcttagaaggaagaaaatccagcttcctggaaatatgttgaatgcattcaactgggcattgacaaccaaaaccatctagaaaatattctgtgtttgtggagcaagatcatctcccacttttaaaaaacatccaatagccacgtcttattttctgcagccttgattctcttttgcaagcttccctaatgtacttataagatgtatttaaaaaaaaaaagatcatctttagtttttctcccaccagattcttctagaatctctggggaaatgcagtacgtgccgttgagtgaagccctcagtccactgggcttaggaacataaggcacgctgaacattccctgattactgtagagatggaaatgaactaagagagcagtttcaccatctacctgcttcctcagaagggtgcagggaaaagtcaggccctctcacaccctgggtggcacttctgacttctagttcttgttcacagtgtgtacctttacaaatcggttgtccccagaaagacaatagaggtggccttctccagatcggtgggcttcctgccatggttggcttcgatgattcccagtgtctatcaacatattttcttcatttacttctatacacagtcagaaattctctcctcggggagagctcaagtatgcagtcctatgcttagttctttccaactggatcggaaatcaagtcagaaaaagtcagtctactaattaaggatactaaagcagccttgcacttttaaatgaatgaaccctgtaagacaaatctacgtaractctgaaagccagctgatcaggatatgatgactgaagagcgatagaaagggacattctttaaaatcttacaactggaaattttgtaagctttgctgtggaggtgaattgttttagtgtctagacatggagcaattttagtaaatgcacaaaggaaataaaaagataggtakkwwkkwkkwkywykwsrtttgataggattatggctgatttacctaaaaaaatactcagtacctacctaggtcaatggttgatcctattctccaaagactatcaagtgctcgraaacattgtaaaatgagtctactccactgaaaaagttaatgcatctctccattataatstattttcctscggwwaaaaaaaaawmmwwwtttaaatacccatacacgtacctaccctacatgtgcacttgtgcgcatgtgcacacasgaacayacacacacacacacacacacacacacacacctattcaccctaagagttagaagaaatcatttccttgaaaaatcctatctttaaaaaaaaaaaaaaawmgacccatgccgcttgagactccttctccttctttgaatgtcaatgtaaaacgtggttatgtctgtagatkaaaccgtctcagacgccacggctccagggtttctgttacagtttgtgcacttgggaggatgcgcakaagacaggacgcagcgtgttttgctttcccctttactgtttggccagctacgccaatgtggtgctattgtttctttaagaaagtacttgrcttaaaaaaaaararaaaaaagaammmmrwrmmgaaagcatagacatatttttttaaagtctgaaaacaacagttctatagtagagggcttactgagatagcattagacctagccaccaccctagccaccacctttcaacttcgtgtcactcacaagtagaatattgttcaccaagttgtgagtttgggggttcagagacaagaggatggaaacgttttgaagttggatggctccattactcaattggctctcaaatgtaaccaaatgagcgatactttacccaatctgaaatgttggtcaataacttgaagtggggggaaaaaaataagttcaggaaaatggcagaagaaaataattaagttactttttgcttttgykgyygawwggtttyttkttkwttttggtttttggttttagtgcaggtgggtgagtgctgtgtgtgtgtgtgtgtgtgtgtyccactcaaaaaacaracactcaaaargtgaagaaaatacaargattttaagaacatagatttacctactactggatacagcttctgctacatcctctggggaaggcactgatttctggtttggagagcgtttgctcgctggtttgctctcccatcaaagaggcctcaaagagtggtcggtctcttagagcaatcatggatcttattgggagaggttggaaagtatttcctaatgaattgggcttatctcctcacaaaggaagggaagagtttatgagaaattgttgaagacgatggctaacaatctgtgaagattttgttctgtattttcttggtttggggttttgatttcttactttatacaatctttacggatggaaatcttactggcagaaaagacttggtctttttgctctttcatcacagaatggaasmtsgyraactcacgtagactctttgtaggttggctataaaaggggtggtttggctttttaaataagaccattttaaatgttcctttctattttcaatcataaaagattgtcttaatttattagcgtaggccctggttggcacttctcaagtggatgagcatttccattcaaagcatgggttcacccatgtcttcaaaagatgaatgattaatattaaggaattacttacttcaaaatacagtagaagcgtgagtctctgttcccactccccacaaagatcattaagtcctaaatctgaaagaggaaaaatactaagggaattttttttcttgcctgttttttatttcaatgctagtgcttaatcctatcctatacagatttgcttctcgctattgtgatattccgtaagactttccagttaggtattagaaattgatacatagatacctttttttgtgtggtttctatttaaaagaaaagagataagactgtctgaagcttaaatgcataaggtacatgataaagatatcactttaaataacaagccatatctggtacaatcctttctttcttatcattttaaggaaaactttcccagataagacagaggcccaggggactttcgaaagtgtctttgttcctcccatctgtttttgttggtggtgattttccccccaatgtctgcctcagaatcttttagaggctggccagaccaaatcggacaattaaagaactgtcttttaaaacacacatttcacatggtcccttttaatgaatgattacacttatattgaacgtgattttttttctctctccagttatttttttttctgtcattgataagggtccttaaggagaaaaattcattaacaaaaagcaagaaagcgtgtgaaaaagaagaaaatctaaatgtcaccgcgcaattgaaatacgagctaaaatggaaatactttcttctacttaaaacccagactgaatcaccttcaaagtgacctttcacaatctttccaatttgcctctgtttaaactgtctgggcctaaaagcaagcattattcattttctttttcccaaagtggactcgtgtgtaaagtaggaaaattaaaagaaactgctaaaaatcccttccaaccacaggctgaccccactcaccagctcacagcgaaggctcctgttgatctatcccctaatctcatttcatttggatatttacattgtacctactgctaaacactctgcaggaggctcaggaaacctcaatctgtccattcttatctcctatctgtgtctctgtatcattagtccttccaaacatcgtsccgtgtgtattcagtctatttgaaagctccaaatggtacatcakacctgatctgtttttkstsaagattwagggagctatgagaatttgsattataacatgcattttgcttcatttatttttatcmcacttaaagsccaagggtgatgattaacttacagacatcgaattcatttctctactgaaaccttaaagtagtatttggtcattcattgtatgtgtcttatatacccacccacacacagacacaaaggaaatctatcaaattaatcctgattgtattygaagtggktattcaattcatttatggcagagyaatatcagtcctaatgactcgtgaaagtgttactaactgaatcattatcttacatttactgtktagtaagcatattytgaaaaatgtatggctagagtgtcataataaaatggkatatctttctttagtaattacmttaaaattaatcatgtttgrttdamwrrwwmmwmwrawrwarwrwrwmatttcttaacatatagagaactgtagagcattttttttatttaatggcagtgtttgcaactcacaggcacagaaacacccagactaatcatttatcatagagatatagaacttacaggttaaatgattcacaatgtatgtaagagatgtatgattgtatgacatatgtgtggaataagctgggtggatgagaccaacatcacagaatctgacccaatagtgagtcatacctaacccataatgcaagcatttgggaaaatatttcctattaggagcatacccagataatact

SEQ ID NO: 3088 - DNA, 1578 bp, Rattus norvegicus
tcgacctgagttctgcactaactggggaggggacgtagggccaggatctagacaacaacccacagacctaaacaagccagagcaaacaaagggcaaatggagcccaaggctgtgatggggatacagctgtggaccctcactcagggtgatttttttctctaacctcagaacttgacaacatctggagacatttttgcagaactttagggagctgggaccagcagtgctactgaaaatcttaacagattcgtttcaatagtgctgagctgaggacccctggtgttcagcaagggagtccctgagcgagacgaggagggctaaaattccaacctttctcccagaggacacttgccctacctgaggggatgggatggtgccctttcctcggtttagccaaatactctgaggaatgggggaggcatagttcttcttcgccaagaagaaagcataccatacctcattccacaggctcccaggtgctgatctgtgctaaaaaaaatttttttaaagaaatatttagtctttagtaggtcaaaaagtcagacactgtcatctctttgtagcacacaggtagcaggtgagatgagataaaggtcttcactgctaccgttgccaatggcagcagaggatcagaagccacagaacacgcccacccctacccccaccccattccgacccaggcaaataggcactgaagatagtaatggaagtctatagaaacaatgaggcgtcgttcagtgcacaggtatggaaagggcccagaatatattaacttaaaaaaaaaacaacgtgcagaatcgaggaaaggtctttgctgtccttccctggaagaagacaaaaacacactatcccacagaagagtgtccgtccacgtgagcagaaggccttgggtctctgacctccgtgcatgggttcacctggagcgttttcctgtccagtgcacatttaggaccaccaactttgctttatttcctgggagagctgtgggcagttgctctgctcttcgtccccagagttaaacagatcagctttttaggaactggccagaccactgacacagagcttgagacaaagccagtaaatggcctcttccttaataacgctagcaaacctgaaggagatgtgttttcaacactcaggaggcctgggggtgagaatttcaggtgtttgaaggagtccctagggaagtggggagcggtacacagaaactaggaccaagagcaacccttgcctttccacacctcttctttctaggctggggaggtgaaaagaacgaatggaaggtctgaactgaaggtggcccacagcagggacaaacctgccccgcccccagccccgcccctattcccgccccgccctctcacactgggaggagggatcgctacaatggaccctctgcgggctttgtgcactctccgaatccagcagtcgccgccccacggagccccgtgtccccggagggcgcccatttccgggccgcccttcacccggagcgcattggcagccacagtcccagcggagcccacagccgctcccgccttctccgtgtcgggcgatccccagtctgtccccaaaatg

SEQ ID NO: 3089 - DNA, 2297 bp, Rattus norvegicus
  misc_feature (1747)..(1747): n is a, c, g, or t
tctagagagaacttcctacggcwckmsggcgcctcgggaaaatgggagctgctgcaaagttggcgttcgccgtctttcttatctcttgctcttcaggtgctatacttggcagatcggaaactcaggagtgtcttttctttaatgctaattgggaaagagacagaaccaatcagactggtgttgagccttgctatggtgataaagacaaacgacgacattgttttgctacctggaagaatatttctggttccattgaaatagtaaagcaaggttgttggctggatgatatcaactgctatgacaggactgattgtatagaaaaaaaagacagccctgaagtgtacttttgttgctgtgagggcaatatgtgtaatgaaaagttctcttattttccggagatggaagtcacacagcccacatcaaatcctgttaccccgaaaccaccctactacaacatcctgctgtattccttggtaccacttatgttaattgcggggattgtcatttgtgcgttttgggtgtacagacatcacawgatggcctaccctcctgtacttgttcctactcaggaccctggaccacctccaccttccccattactagggttgaagccattgcagctattggaagtgaaagcaaggggaagatttggttgtgtctggaaagcccagttgctcaatgagtatgtggctrtcaaaatatttccgatacaggacaaacagtcctggcagaatgaatatgaagtctatagtttacctgggatgaagcatgaaaacatactacagttcattggtgcagagaaaagaggcaccagtgttgatgtggacctgtggctaatcacggcttttcatgaaaagggctcactgtcagactttcttaaggctaatgtggtctcttggaatgaactttgtcatattgcagaaaccatggctagaggattggcatatttacatgaggatatacctggcttaaaagatggccacaagcctgcaatatctcacagggacatmaaaagtaaaaatgtgctgttgaaaaacaatctgacagcttgcattgctgactttgggttggccttaaagtttgaggctggcaagtctgsaggtgacacccatggccaggttggtacccggaggtatatggctccagaggtgttagagggtgctataaacttccaaagggacgcatttctgaggatagatatgtacgccatgggattagtcctgtgggaactggcttctcgttgtactgctgcagatggaccygtagatgagtacatgttrccatttgaggaggaaattggccagcatccatctcttgaagatatgcaggaagttgttgtgcataaaaaaaagaggcccgttttaagagattattggcagaaacacgcaggaatggcaatgctctgtgaaacgatagaagaatgctgggatcatgatgcagaagccaggttatcagctggatgtstaggtgaaagaattactcagatgcaaagactaacaaatataattactacagaggacattgtaacagtggtcacaatggtgacaaatgttgactttcctcccaaagaatctagtctatgatggttgcaccatctgtccacactgagaatcgggactctgaactggagctgctaagctaaggaaactgcttagtttattttctgtgtgaaatgagtagggtgcctccgggacacgtatgcaagcagccccttgtggaaagcatggattgggagacttcctgcagngtctgcaacacggatatgaagggggtctaaggggaaactgcgaactgtaaagaacttctgaaaacttacacgaagaatgtggccctctccaaatcaaggatcttttggacctggctaatcaagtatttgaaaactgacatcagatttcttaatgtctgtcagaagacactaattccttaaatgaactactgctattttttttaaatcaaaaacttttcatttcagattttaaaaagggtaactttttattgcatttgctgttgtttctataaatgactattgtaatgccaacatgacacagcttgtgaatgtgtagtgtgctgctgttctgtgtacatagtcatcaaagtggggtacagtaaagaggcttccaagcattactttaacctccctcaacaaggtatacctcagttccacggttgctaaattataaaattgaaaacactaacagaatttgaataaatcagtccatgttttataacaaggtattacaaactcactgtgttatttaagaaaaaatggtaagctatgcttagtgccaatagaagct

SEQ ID NO: 3090 - DNA, 2095 bp, Rattus norvegicus
atgaggcctccctggtatcccctgcatacaccctccctggcttctccactcctcttcctcctcctctccctcctgggaggaggggcaagggctgagggccgggaagaccctcagctgctggtgagggttcgagggggccagctgaggggcatccgcctgaaggcccctggaggcccagtctcagcttttctgggcatcccctttgcagagccacctgtgggctcacgtagatttatgccaccagagcccaagcgcccctggtcaggaatattggatgctaccaccttccaaaatgtctgctaccaatacgtggacaccctgtaccctgggtttgagggtaccgagatgtggaaccccaatcgagagctgagtgaagactgcctktatcttaatgtgtggacaccataccccaggcctacttctcccacacctgtcctcatctggatctatgggggtggtttctacagtggagcatcctccttggacgtgtatgacggccgtttcctggcccaggttgagggaaccgtgttggtatctatgaactaccgagtgggaacctttggcttcttggctctaccaggaagcagagamgcccctggcaatgtaggcctgctggatcaacggcttgccttgcaatgggtacaagaaaatatcgcagcctttgggggagacccratgtcagtgactctgtttggggagagtgcrggtgcagcctcagtgggcatgcacattctgtccctgcccagcaggagcctcttccacagggctgtcctgcagagtggcacacccaatgggccctgggccactgtgagtgcgggagaggccaggcgcagggccacactgctggcccgccttgtgggctgtcccccaggtggcgctggtggcaatgacaccgagctgatatcctgcttgaggacaaggcccgctcaggacctggtggaccacgagtggcatgtgctgcctcaagaaagtatcttccggttttccttcgtgcctgtggtggacggggatttcctcagtgacacgccggacgctctcatcaatactggagattttcaagacctgcaggtgctggtgggtgtggtgaaggacgagggctcctactttctggtttacggggtcccaggcttcagcaaagacaatgaatctctcatcagccgggcccagttcctggctggggtgcggatcggtgtaccccaagcgagtgacctggcggccgaggctgtggtcctgcattatacagactggctgcaccctgaggaccctgcccacctgagagatgccatgagtgcsgwggtaggcgaccacaacgttgtgtgccctgtggcccagctggctgggcgactggctgcccaaggggctcgggtctatgcctacatctttgaacaccgtgcctccacattgacttggcccctctggatgggggtgccccatggctatgaaatcgagttcatctttgggctccccctggatccctcactgaactacaccgtggaggagagaatctttgctcagcgacttatgmrryackrgrccaattttgcccgcacaggrgaccccaatgaccctcgagactctaagtctccacggtggccaccgtacaccactgccgcgcagcaatacgtgagcctgaacctgaagcctttggaggtgcgrcggggactgcgcgcccagacctgcgccttctggaatcgttttctccccaaattgctcagcgccacagacacgctggacgaggcggagcsccagtggaaggccgagttccaccgctggagctcctacatggtgcactggaagaaccagttcgaccactatagcaagcaggaacgctgctcagacctgtgaccccttggggacccaggtcctgccgtcctgcccgagcccctgattgtrtatacactatttatttaagggctgggatataatacaaccgagcccccaggccctgtccacccckccccgacttcctcccactaggggatcctcatcttctgcatgttttrrrctgagctcccctccccgcggwgccttsscccctctgggccgccaataaactgttmcwgctmmwaraaaarrrraaaaaaaaaaaaaaaaa

SEQ ID NO: 3091 - DNA, 1815 bp, Rattus norvegicus
gctcattacagtgatcacttgaatgacagtcgattaggaacccatgaaggcttgtccccaacacctttcatgaactcaaatctgatagggaaaacctcagagagaggctcattttccctgtacagcagagactgtggattatcaggctgtcagtctagtctcctgagacaagatctaggactcgggagcccagcacagttgtcttcttcaggaaaacctggaacaccatactactcatcctctgccacaagttctagaagaagaccgctccatgattctgtagctctagatcctttacaagcaaagaaagtaagaaaggtgcctcctggcctaccttcttctgtgtatgcaccatccccaaattctgacgatttcaaccgtgaatctcctagttacccatctcccaagccaccaaccagtatgttcgctagcactttctttatgcaagatggcacccacagttcttctgacctttggagttcatcgaatgggatgagccagcctggttttggtggaattctggggacctccacttcccacatgtctcagtccagtagttatggcagtcttcattcacatgaccgcttgagttatcctccacactcagtgtcaccaacagacataaacacaagtcttccgccaatgtccagcttccaccgtggtagtaccagcagctcaccatatgttgccgcctcacatactcctcccatcaatggatcagatagcatcctgggaacccgagggaatgctgctggaagctcacagaccggtgatgcacttgggaaggccttggcatctatttattctcctgaccacacaagcagtagttttccatcaaacccatcaacaccagtaggatctccttcaccyctcwcagcaggtaccagtcagtgscccagagctggagggcaagctccttcatcyccaagctatgaaaactcacttcactccytgcagtctcgaatggaagaccgtttrgacaggctggatgatgytatccatgtgctacggaaccatgcagttggaccttctaccagtytgcctactagccacagtgatatacacagtttattgkgaccatcccrtaatgcaccaattggaaacctcaattcaaactatggaggatcaagccttgtwacaaatagtcgatcagcttcgatggtcggaacycatcgggaagattcggtcagtctcaatggcaatcattcggtcctgtctagtactgttgctgcctcaaacacagaactgaaccataaaacaccagaaagtttcagaggtggtgtacaaaatcagtctggaagtgttgttccaammgaaatcaagactgaaaamaaaraaaaarawraaaaccttcatgaacctccttcatcagatgacatgaaatcagatgatgagtcctcccagaaagacatcaaagtctcatctagaggcagaacaagcagtaccaatgaagatgaggatctgaatccagaacagaaaatcgaaagggagaaggaaaggcggatggctaacaatgccagagagcgcttgcgtgtgcgggatatcaatgaggcattcaaggagctcggccgaatgtgtcagcttcatttgaagagtgagaaaccacagacaaaacttctcattcttcatcaagccgtggcagtcatccttagtctagaacagcaagtcagagagaggaacctcaaccccaaagcagcctgccttaagagaagagaagaagaaaaggtctctgctgcgtcagcagagccgcccaccacgttgccaggaacccatcctgggcttagtgagacaaccaaccctatgggtcatctgtaa

SEQ ID NO: 3092 - DNA, 1332 bp, Rattus norvegicus
caacacatcatcccaggaagactttggtctgcagaggaggataatattgatgtgcttggagagcatctggtggtaacgagatggctgcttctgtcccttgggcctgctgtgctgtgcttgccgctgccgctgccgctgtctacacccagaaacacagtccacaggaggcaccccatgttcagtatgagcgtctgggcacagatgtgacgctgccatgtgggacagcaagttgggacgcagctgtgacctggagggtaaatggaacagatctggcccctgacctgctcaatggctctcagctgatactacgaagcttagaactgggccacagtggcctgtatgcctgtttccaccgtgactcctggcacctgcgccaccaagtccttctgcatgtgggtttgccgcctcgggaacccgtgctcagctgccgttccaacacttaccccaagggcttctactgcagctggcacctgtccgcccccacctacatccccaataccttcaatgtgactgtactgcatggctccaaaatgatggtctgtgagaaggacccagccctcaagaaccgctgtcacattcggtacatgcacctgttctcaaccatcaagtacaaggtctccataagtgtcagcaacgccttgggtcacaacaccacggctatcaccttcgacgaattcaccattgtgaagcccgatcctccagaaaatgtggtggcccggccagtgcccagcaacccccgtcgactggaggtgacatggcagacsccctcaacttggcctgatcccgaatcctttccactcaagttttttctgcgctaccggcctctcatcctggatcaatggcagcatgtggagctctcgratggcacagcccacaccatcacggatgcctatgctggraaggagtacatcatccaggtggccgccaaggacaatgagattgggacatggagtgactggagtgtggctgctcacgccacaccctggactgaggaaccacggcatctcaccactgaagcccaggcccccgagaccacgaccagcaccaccagctccttggcacccccacccaccacgaagatctgtgaccccggggagctcagcagcggcggaggaccctccatacccttcttgaccagtgtccctgtcactctggtcctggctgccgctgctgccacagccaacaatctcctgatctgagccctgcatcccatgaggacacgccagacgcctacagaggagcaggaggccggagctgagcctgcagaccccggtttctattttgcacacgggcaggaggaccttttgcattctcttcagacacaatttgtag

SEQ ID NO: 3093 - DNA, 1843 bp, Rattus norvegicus
gggagccactctgccctctcctcgcaccctgcacagggcatcttgagaggctggaaacgtgaacaggcttaaagtatggcatgtggcgaagatggtttctgtccagaaggtacctgcgatcgtgctgtgctccggggtcagcctcgccctcctgcacgtcctgtgcctggcgacttgtttaaacgaatccccaggacagaattcaaaggacgagaaattgtgcccggaaaattttacccgtatcctggacagtttgctggatggttatgacaacagactgcgtcctggatttgggggtcctgttacagaggtgaaaactgatatatatgtcaccagctttggacccgtttctgatgttgaaatggaatacacaatggatgtgttcttcagacagacatggattgacaaaagactgaaatatgatggccccattgaaatcctgaggttgaacaatatgatggtcaccaaagtttggacccctgatactttcttcaggaatggaaagaaatctgtctcccataacatgacagctccaaataaactttttagaattatgagaaatggcactattttatacacaatgagactcaccataagtgcggagtgtcccatgagactggtggattttcctatggacggtcatgcctgccctttgaaatttgggagttatgcatatcccaagagtgagatgatctacacctggaccaaaggccctgagaagtcagtggaggtaccaaaggagtcctcgagcttagttcagtatgatctaattggccagactgtatccagtgagactatcaaatctattacaggtgaatacattgttatgaccgtgtactttcacctcagacggaagatgggctattttatgattcagacatatatcccgtgcatcatgacagtgatcctttctcaagtttccttctggatcaataaggagtctgttccagccagaactgtatttggaataaccacagtcctcacgatgaccaccctaagcatcagtgctcggcattctttgcccaaagtgtcctatgcgactgccatggattggttcatagctgtctgttttgcttttgtattttcggctcttattgagtttgctgctgtcaactatttcaccaacattcaaatgcaaaaagccaaaaagaagatatcaaaacctcctccagaagttccagctgccccagtactgaaggaaaaacatacagaaacatctcttcagaatacacatgctaatttgaacatgaggaaaagaacaaatgcattagtccactcagaatcagatgtcaacagcagaactgaggtggggaaccattccagcaagaccaccgctgcccaggagtcttctgaaaccactcctaaggcccacttggcttccagtccaaatccattcagcagggcaaatgcagctgagactatctctgcagcagcaagaggtctttcgtctgccgcatcgccctctcctcacgggacactgcagccagctcctttgcggtcggcgtctgctcgcccggcatttggagctagacttgggcgcattaagacaacagttaatacgacaggggtgcctgggaatgtgtcagccacacctcctccctctgctccaccaccttctggatctggcacaagtaaaatagacaaatatgctcgtattctctttccagtcacatttggggcatttaacatggtctactgggtggtttatttatctaaggacaccatggagaaatcagaaagtctaatgtaattttgttgctaaagcaatttcataaccgtgatggaaatacagactgtctttttaaatgtttttaaaggtaagtattctttactaaaataaaaa

SEQ ID NO: 3094 - DNA, 2595 bp, Rattus norvegicus
gccttccatcaagatgtggtaacctctttccctgagcgccacaggctctagaaagagaggctggttctagcaggatcarctccacctcctcagtgcccggaggctgctggaaagagattgccctgtcacttctggagaagatgcagacccaggagatcctgaggatcctgcggctgcccgagctatcggacttgggccagtttttccgcagcctctcagccaccacccttgtgagtatgggtgcactggctgccatccttgcatactggctcactcaccggccaaaggccttgcaaccaccatgcaacctcctgatgcagtcggaagaagtagaggacagtggtggagcccggcgatctgtgattggggattgcactcagttgcttacccactactatgacgatgcccggacgatgtaccaggtgttccgacgtgggcttagcatctcagggaatggaccctgtcttggcttccggaagccagagcaaccttaccagtggctgtcctatcaagaggtggccaaaagggctgaattcctggggtcaggacttctccagcatgactgtaaagtgggcacagagcagttcattggcgtttttgcacaaaatcggccagagtggatcattgctgagctggcctgctacacatattccatggtggtggtaccgctctatgacacactgggcccagggtctatccgctacatcatcaatacagcggacatctgcactgtaatcgtggataagccgcataaggctatactcctgctagaacacgtggagaggaaggagactccgggcctcaagctggtcatcctcatggagccatttgacgatgccctgagagagaggggaaagaagtgcggggtggacatcaagtccatgcaggctatagaggactccggccaagagaatcatcgtgtccccgtgcccccacggcccgatgacctctccattgtgtgtttcacgagcggtacaacagggaaccccaaaggtgcgatgctcacccacgggaacgtggtggccgatttctcgggctttctgaaagtcacagagagtcagtgggcccccacttgtgcggatgtacacttttcctatttgcctttagcacacatgtttgagcgaatggtgcagtctgttgtctactgccatggagggcgtgtgggcttcttccagggagacatccgcctcctctcagacgacatgaaagctctccgccccaccatcttccctgtggtcccacggctgctgaatcggatgtatgacaagatcttccaccaggcagacacctcactgaagcgctggctcctggagtttgcagcaaagcgcaagcaggctgaggtccggagcggaatcatcagaaacaatagtatctgggatgaactcttctttaataagattcaggccagtcttggagggcacgtgagaatgattgttaccggagcagcccccgcatcaccaacagtcctgggattcctacgagcagctctggggtgccaggtctatgaaggttatgggcaaactgaatgcacagctgggtgtaccttcacaacgccaggggactggacatcagggcacgtgggagcccctctgccctgcaaccacatcaagctggtcgacgcagaggaactcaactactggaccagcaaaggagaaggagagatctgtgtgaaaggaccaaatgtgttcaaaggctacttaaaagacgaggacaggacaaaggaggccctggacagtgacggctggcttcacacgggagacattggaaaatggctgccggagggaacgcttaaaatcatcgatcggaaaaagsacatatttaaacttgctcagggggaatacgttgcgcccgagaagattgagaacatctacatccgaagtgagcctgtggcgcaaatctacgtccatggggacagcttaaaggcctttctggttggcattgttgtgcctgaccctgaagtcatgccttgctgggctcagaagaaaggaatcgaagggaactaccaggaactytgcaaaagtaaggaattgaagaaagccattctggatgacatggtgatgttggggaaagaaagtggactgcattcttttgaacaggttaaagccatttacatccattgtgacatgttctcagttcaaaayggcwygmkgacaccaacactaaaggctaagaggcccgagctgagagagtacttcaaaaagcaaatakaagagmtgtactcaatctccatgtgaagctcaaggaggcccttctcagcccagcaaagtttgcagcaatattctaattattcttgagagaaaggagtcagaatgccmcagctcagagtgaacgagcacctgattttttttttttttgcaactgagcctttcctgacctgagaagtctctaacaatattttctctaccatcaccaagtacactttatttttattaaatgatattgtagcaagctgctaaaaaaattattgcaaacggtaatgtaaaaacaaatcaagacactttctcaagaactgtgtaccactaaagtaatatattcgcgatgttcacagaattccattaaacataaaraaaaaaamrwwaaaaaaaaaaaaaaaaa

SEQ ID NO: 3095 - DNA, 1928 bp, Rattus norvegicus
agatctgcccctccactttttttcctcatggtaccatagacttacatcctggtccccttcaccatccatcatgtgccctgaccatcttggtctttcctaaggagggatacctaaaagagtccccattgactcctgatctctcatctcatgattgatgtctagaaagactcaccttgaaacaggtcatgctgttggtataattctgaagttctaaacactcaatctttacattacagcttctatgacccccagagagggtagctaatagttttctaccttaagtcatcgatgggagcaggtaccagccatggagaaggacatgacagcctatgtgtgtgaacccttgcatataaaacctaagccacttcaagacatatccagcagtgcctcagactccatgaggaacctagaaggtagatatgtattacagacctgggagaagtctggcttggaagaccagctaaggactggggtgtgagcttttaaggccctgtcttactttcgtcttatccatgtcctgcacttcacaaggaacagcttgatctattgttagaacagcattgggtcagtcactaagccttccccaacttgcctttagcttggttggaagcccaattgtcagagctggaagagaagtggccaagaccaagaggtgaatgtagaagccacagggccccagaatggagcccaatggcacagttcattcctgctgcttggactctatggcattgaaagtcaccatcagtgtggtccttaccacgctcatcctcatcaccattgctggcaatgtggtcgtctgcctggctgtcagcttgaaccgtcggctccgcagtctgaccaattgcttcattgtgtccctggcagccactgacctgcttcttggactcctggtgctgcccttctctgccatttaccagctgtccttcacgtggagttttggccacgtcttctgcaacatctacaccagcttggatgtgatgctctgcacggcctccatcctcaacctcttcatgatcagcttggaccgctactgcgctgtcacggacccactgcggtaccctgtgctggtcaccccagttcgagttgccatctctttggtctttatttgggttatttctatcaccctatccttcctctctattcacctaggatggaacagcagaaatgggaccagagggggcaatgacaccttcaagtgcaaagtccaggtcaatgaggtgtacggactggtggatgggctggtcaccttctacctgcctcttctcatcatgtgtgtcacttactacagaatctttaagattgccagggagcaggccaaacggatcaaccacatcagctcctggaaggcagccaccatcagagagcacaaagccaccgtgacactggcagccgtcatgggagcgttcatcatctgctggtttccttacttcactgcattcgtttaccgtgggctgagaggggatgatgccatcaatgaggcggtcgagggcattgtcctatggttgggctatgccaattcagccctgaaccccatcctgtacgctgctctcaacagagacttccgcacggcgtaccaacagctcttccactgcaagttcgcaagccacaactctcacaaaacttccctgaggttgaacaactctctgctgcccaggagccagagccgagaaggtagatggcaggaggagaagcccttgaagctccaagtgtggagtgggacagaactcacacacccccagggaaacccaatcaggtaaaggttgtgggttggaagtgctgggagacaccccaccttcagtgtagatggtgctaagaccattccatgagcattttacagaaatcatctctcatcctcccaatggctggctctcttaggtaaaacgtttaccttcagttttaaaaggccacattaaaggtagcagagatct

SEQ ID NO: 3096 - DNA, 749 bp, Rattus norvegicus
aagctggaagtttctgtatatagtgatcaaaagaagatctatattggggatgacaaccctctgaccctgaccgtgaaggcgcagaatcaaggagaaggcgcctatgaagctgagctcatcgtttctatcccaccgcaggctgacttcatcggggttgtccggaacaacgaagccttagcaagactgtcctgtgcatttaagacagaaaaccaaacccggcaggtggtgtgtgaccttgggaacccgaagaaggctggaactcaactgcttgctggccttcgtttcagcgtgcaccagcaatcagagatggatacttctgtgaagtttgacttgaaaatccaaagctctaattcttttgacaatgtcagcccagtcgtgtcttacaaggtcgaccttgccgttttggctgcagttgagataagaggagtttcaagccctgatcacatctttcttccaattccaaactgggagcacaaggaaagccctgagaccgaagaagacgttgggcctgttgttcagcacatctatgagctgagaaacaatggtccaagttcattcagcaaggcaatcctgaacctccagtggccttacaaatacaacaacaatactttgctgtacattctccattacgacattgatggaccaatgaactgcacttcagatatggagatcaaccctttgagaattaagatgcctgaaaagaatgacacgggagctgagcaaggaggaaggaatcatctcatcaccaa

SEQ ID NO: 3097 - DNA, 450 bp, Rattus norvegicus
gctacagtctgtgatgaaaaaattggctggaggaatgatgcatcccatttgctggtgtttaccactgatgccaagacccatattgccgtggacggaaggctggcaggcattgtcttgcctaatgatgggcgctgccacattggccgggacaaccactactctgcttccactactatggattacccatctctggggctgatgactgagaaactatcccagaagaacattaacttgatctttgcagtgaccgaaaatgtcgtcagcctttaccagaattacagtgagctcatcccggggaccacagtgggagtcctgtctgatgactcaagcaatgtccttcagctcatcgttgatgcttacgggaaaatccgttctaaagtggagctggaagtgcgtgatctccccgaagagctgtcgctgtccttcaatgccacctgcctcaacaacgag

SEQ ID NO: 3098 - DNA, 603 bp, Rattus norvegicus
ttcttttcctgtgcctggttcttgggcgtcctttgctctggccttggcgtgtgtctctgcggtgtttgcttgtgcctcgtcggtttctttggggtcttttgtttctgctcttctgtcttctgctcgtgctgggccttggttgggctgttctgctgcgtccgtggccgttgcgtctgtgggctgtgcctgtgctctgtgcctggtgcctttggggtgtcgtgtgtgttgtgcccttcctgccctgttgcttgctgctccttgtgtgtctgtgtggtttgctcgctgcttctcctggggtttcctgtcttcctgtcctgcctcctcctgtgctttgttgtggtgttctcgtgggttgtctgcttcgtctttgtcgtcctggttgctgtgctttgcttcttcttttctgctttggtctgcgttttgttgttctgcttctctgttctgccctttggtttgtctttcttgtccgtcctctgggtgcctgtgtgtggttgtgccccctttgccttgtccttcctgctggctgtggttggctgcttcctcctggttggtttggctctcctggctttctggtttcttctcgtctccttcctcgtccgttgt

SEQ ID NO: 3099 - DNA, 2097 bp, Rattus norvegicus
aagaagaggcatgagatgccgcctcacatctatgccattgctgatacggcctacagaagcatgctacaagatcgtgaagaccagtccattctgtgcacaggtgagtctggagctggaaagacagagaacacaaagaaagtcatacagtatttggctgtggtggcatcctcccacaaaggcaagaaagacagcagcatcacgggggagctggaaaagcagcttctacaggcaaacccaatcctggaggctttcggcaatgcaaaaactgtcaagaatgacaactcctcccgctttggcaagttcattcgcatcaactttgatgtcactggttacattgtgggtgccaatatcgaaacatatcttctggaaaagtctcgggctattcgacatgctagggacgagagaacgttccacatcttctactatctgatcgctggagccaaggagaagatgagaaatgacctacttttggagagcttcaacagctacacatttttatccaatggctttgtgcccatcccagctgcacaagatgatgagatgttccaggagacactagaggccatgtccatcatgggcttcagtgaagaggaacagctagccatcttgaaggtagtatcatccgtccttcagcttggaaacattgtcttcaagaaggagcgaaacacagaccaggcatccatgcctgataacacagctgctcagaaagtttgccaccttgtgggrattaatgtgacagatttcaccagagccatcctgaccccacgtataaaagttggacgggatgtggtgcagaaagctcagaccaaagaacaggctgactttgccattgaggccttagccaaggccacytatgagcgccttttccgatggattctcagccgtgtgaacaaagcyttggataagacccatcgtcagggggcctccttcctgggcattctggatattgctgggtttgaaatctttgaggtaaactccttcgagcagctgtgcatcaactacaccaatgagaagttgcagcagctgttcaatcacaccatgttcatcctggagcaggaagagtaccaacgagagggcatcgagtggaacttcatcgactttggcctggacctacagccttgtattgaactgattgagcggccgmacaaccctcctggtgtgctggccctgctggatgaagaatgctggttccccaaagctacggacaagtcttttgtggagaagctgtgctcagagcagggcaatcaccccaaatttcagaagcccaagcagctaaaggacaaaacagagttctccatcatccactatgctgggaaggtggactataatgcaagtgcgtggctgaccaagaacatggacccgctaaatgataatgtgacctcactcctcaatgcctcctcggacaagtttgtggccgacctgtggaaggatgtggaccgcattgtggggttggaccagatggccaagatgactgagagctcactgcccagtgcctccaagaccaaaaagggcatgttccgcaccgtgggccagctctacaaagagcagctggggaagctgatgaccacactgcgcaacaccacgcctaactttgtgcgctgcatcatccccaaccatgaaaagaggtctggcaagctggatgcatttctagttctggagcagctgcggtgcaatggtgtgttggaaggcatccgcatctgccgtcagggcttccccaacaggattgtcttccaagagttccggcaacgctacgagatcctggcagcgaacgccatccccaaaggcttcatggatggaaagcaagcctgcattctcatgatcaaagcccttgaacttgaccccaatctgtacaggattgggcagagcaaaatcttctttcgtacgggagtcctggcccacctagaggaagaacgagacctgaagattactgatgtcatcatggctttccaggcaatgtgtcgtggctacctggccagaaaagccttcaccaagaggcagcaacagttaacagccagtaaggtgatccagaggaactgcgctgcctaccttaaactccgcaactggcaatggtggaggctcttcactaaagtaaagccg

SEQ ID NO: 3100 - DNA, 1745 bp, Rattus norvegicus
gaattcggcaggcgcaggccaagcaactcggccgtccagcgggtgcaggtgcggaccaccatcaccgcgcgcgcttgcagccaccgtagacaccggtctctggctccctagagcggggcagccacagaacccgaggccatgtaccatgaaaagagtttcttggtctctggggacagctatcctcccccaaaccctggctatcctgtggggccacaagcccctatgcctccctatgttcagcctccctaccctggggccccatacccacaggccgctttccagccctctccctatggtcaaccagggtatccccatggtcccggtccctatcacaaggtggttacccctcaaggacctactcaaggaggctacccaccagggccattacccacagagccccttcccccctaacccctatggacagccaccacccttccaggaccctggctcacctcagcatgggaactaccaggaggaagggcctccatcctactatgacaaccaggacttcccctcggtcaactgggacaagagcattcgccaggccttcatccgaaaggtgttcctggtgctgaccctgcagctgtcggtaaccctgtcgactgtggccattttcacttttgtcggggaggtgaagggctttgtccgggccaatgtctggacctactatgtctcctacgccatcttcttcatctccctcattgtcctcagctgttgcggggacttccggaaaaagcatccctggaaccttgttgccctgtcgatcctgaccatcagtttgtcctacatggtgggcatgatagccagtttttacaacacggaggcggtcatcatggccgtgggcatcaccacagctgtctgcttcacggtggtcatcttctccatgcagacccgctacgacttcacctcgtgcatgggcgtgctcctggtgagcgtggtggtgctcttcatcttcgccatactctgcatcttcatccggaaccgcatcctggagatcgtgtacgcctcgctgggcgctctgctcttcacctgcttcctggctgtggacacccagctgctcctggggaacaagcaactgtccctgagcccagaagaatatgtgtttgcggccctgaatctgtacacggacatcatcaacatcttcctatacattctcaccatcattggccgtagccaaggaataggacaagccccagctcaggtggcatggtgggctcagacccatgcccctgscatgacattgccatctgtgcttccccctctctggtycccagscatggcckggagcagagggagcccctctcgccctcgtgtatgtacactgcaaatacttaacgttcggaccctctctgccacagcatggmmmcctttatccctttkgccsktgccaaggggtgacagggctgcatttctgtgccaccttctgtctactcattgttgcatgagccctgtctgccagcccatcccggggtctgggatcaacaccaggtcccaggggagaaggatcataccaagaggtgagggtgcacgtcttccctcctgtcccagctcccctggcatagagtccccatgtcccctcctcaccctgccttctgaggggcttgcagggtggggyctcgttcttgttctgggccccgagascaagagagggtggcatgtttcaggggagaggctctcttgtgtgctgccattgtaaaatgccaataaaagggtatcttctgcwmwmwraaaaaammraawwmaaa

SEQ ID NO: 3101 - DNA, 517 bp, Rattus norvegicus
aggtcccatgggccctccaggagctattggtttccctggacccaaaggagaaggtggagttgtaggaccacagggtccaccaggtcccaagggagagccaggcctccagggcttccctggaaagccaggttttcttggtgaagtaggtccccctggcatgaggggtttccccggtcctataggacccaagggagaaggtggtcacaaaggattgcctggacttcctggtgttccaggcttgcttggacccaaaggagaacctggcataccaggggatcaaggtctacagggccccccaggtatcccaggaattgtaggacccagtggccccattggaccccctgggattccaggccccaaaggggaacctggcctcccagggccccctgggttccctggtgtagggaaacccggagtagcaggacttcatggccccccagggaagcctggtgcccttggtccccaaggccaacctggcctccctgggccccccgggccccccgggccaccaggtccc

SEQ ID NO: 3102 - DNA, 1751 bp, Rattus norvegicus
  misc_feature (1733)..(1733): n is a, c, g, or t
gagccgcgcactcgagggagcttctgccgccgccgccgccgccgccgcygcmgccgcmgccrcsgmcgcckcsgcckycgcygccgcygccgccgccgccraaawgtctacaggggtgccttcagggtccagtgctgccactggcagtaatcgaagactccagcagacacagaatcaagtwgatgaggtggtggacatcatgagagtcaatgtggataaggwgttagaaagagaccagaagctctcagagctagacgaccgcgcagatgcactgcwggcwggcgcctcgcagtttgaaacaagtgctgccaagttgaagagaaagtattggtggaagaactgcaagatgtgggcgatagggatcagtgtcctggwgattattgtcattatcatcattgwgtggwgtgtctcttwatgaakaacagaggaaatgaakcctgacggcaggatcttcttcgagactttctacttagaactgcgtgttgtcgcacttcccatgwttwtttktkttwkttyhcmyamagttmwktgsytagwtrywtwywkktywkwkccyaaawatgtgcctttgtttttcatatacactcgaggtgtgacctgccctgcccacattttgcacagtgcctttacagatttatggactgggaaagaggacttgtgtgtttcagagtgctgagatctaggtggwtgttgtcactgatggcttgtggattcaaggaagaggattttgttcaagtcagctgtccccacacctaacatggacttcaaaaccacagtttaaacctttgggtaattagattcccaacttggaccttccaagaagaacactactgcctaacaaaaatcagtgacaacagcagggcrtgccttattttgataactaggtaacttttcattaagagtacttttgtaagcactaccgaccccgctgtatttaasaygmtggtgaagagctcatgctcttatgttagatacggagatgttcactttctagttcttgttgwgtatcacttctaaaacagtattttaatcagaaataaccctttaggaagtttttatagaactgtgaccaaagtttctattttgccaaaagttaaatacaaatgaattgtccataagtttgtcccccagtagtarattcaaataagtgccaagtgtaaytyaaggtgccctttaagaaaaaatgttrgtactgtctgagcccscagcatcttgacagtccttcctgtggaatgctgtaggtacagcttctcatcctgatgtggwttctttcctasagckatagaggtgacctcaaatcacacctgtatgcaagatagtagtttgcagamtgcamtagcctgtggccamtastgtgatgrgagcagcatytgaagcstcacaaaggcaacagtytgcacagagttctgggagactgtggcagtsccmccaggatgtcctgaaatgtgtgtctgtgtgcaaagcagcattagccaaaatgtcataggatctggwtctagttttttttatctgrtcccctaacattacygaaacaaaacaagtgttgaagacatgccttgccacatagctagggcctctgtcctggtctgaccccacaactttggtgctgtctcctcgtactctgtcccatgtaagtcgttggctcctgtattaacacagtaatacctcgcttctctgtgcatttagctgggaatgttcccgctatggtgaccggaataaagttwttamcdygnvwmrwraaaaaaaaaaaa

SEQ ID NO: 3103 - DNA, 1195 bp, Rattus norvegicus
  misc_feature (639)..(639): n is a, c, g, or t
gggcggaaggccgcactgttgccacaatgatttcctgttcttcctttttcaggttgtcgaccatgtgtcaagctgtgtagggaaactgcctggagatggacattctgactgctaatggggacatgggacggcagttacctctgatcacttgcgtggattctcctggagcagaaagacagaagccgccagtcactsstccggatctagcactgggattctgtgctgaagggtctaaaaactcgttttgatttggatctgggagaatgtctgmgcaaggagaactaaccccgaccatactggaagaaggscggacagasccagaatctgccccrgaaaatggcatcctcaagtcagaaagtctggatgaggaggagaagctggaactgcagcggcgactggcagctcagamccaagagagaagaaaatccaagtcaggagcaggtaaagggaagctgaccagaagtcttgctgtctgtggaagagtcttcagccagacctggaggggaaagtcaccaggatcagactctctgagaactgcaaacggaaaggaactcaaaagaacttrgattaaaacttaacttacaamtgataaamtaaaataaaatadtaaaawmmwgtargcwcggaagtgctvvahrnmmamwvarrmwmwmwvttrawrmggcygaaccaaatacaccccaagcatcctgtctctatggagacagcttacctctcagctccccaaatgaacctgcctataaataacacaccactgttggctcctaggagatgagaaatagtgtctaagcaccctgaactgtggagaaatgctgctatggccttcgggaggttgttggtttttggtttggtttgttttttttttttttttttttttwaacwacwgcaaaaccggcccagaagagcgtctgaactggtagcgaatttgatattaaccagctgctgcacctccactctgtgatcccccaaagcttaaagttccagggcccttcgcatcctcttcgttacccttttttttttccttttttaactagtatatttatttgcttacggaaaacacagtcttgacgctgaaattttgctaatcttctcagaggtcaaaggcagccaagacagaaacgcaaatgatctgtctgagcccaagggaaggaaaattgattacaaaaatcattaattttcgtctgagtctctttgg

SEQ ID NO: 3104 - DNA, 3654 bp, Rattus norvegicus
catatgatatggagggaaagaaaattgaggtaggacactaggacctaacataaaaggatcaagaccctccgcatggccttgtggtttcagcagagaggacaccctcctaggtggtccacagtcacagtgacctcggtcacctaatttttggcttgttttggtcctttcttatgctttgccacattatctttattttccttttcaaaaagcaaggtgattcacgcagacaattcattttcagtgtgatgtcttagaagaaacttatggtaggtgctggagggatgacccactgtttaggatgctcgctgtctactgagtttgatcctcagcccccacatcaagagctggcaacatcacctcagcaccgggagacaggctggtctctggggctctctgggaaggtagcttagctgaatcaggggaccacaggttcccatgggagattctgtctctaaaaataccgcagatgttctcaccgaacagtaccccaggttgactatgggctccacattatcaatatgtctctgtacgtacacttatgtatgcactgtacacatacacacgagaacacacacacacacacacacacacacacacacaccaaatgtttagagagagagagagtaagagagagagagagagagagagagagagagagagagagagagagcgctacaagaagccaaggcactaagcctcagtggacccttccccaaagttcctaaattccttctctacagctgctccctgtggattgatgggtgcctctctctacttggaatcctatggcctagccccattgcttctcagactctgtcccttctccctgcagccatcagcaagaggcttctcgaatgtgacctgtgaagtacagacttggagccacctctgccaggcagcagaatactagtgtccctacggaaggttattccttctttatgggcactggaaatacatctccttagttcacccttgcccacctactccctccccctgtgagcctgcttcaggcctcccagcagggtcagggctctgtctgtcctgcctaacctgggatcttggcccacaagatgaccgactataatagctaccggattaacatagcaggcattgtctttctctgactatagggtgggtattatgtgttcatcaacagtcctaaaaatacccaggaaacaggtgtggccctgcaatcaggcaggctctggttgacatgaagattaagcagggaaaagactgttagcttccctgggttcaagaaatggaatgcggagtgctacttagacccttggcaaggaagattccttaaagcccacctgaagaagtgtagagatctgcaggcttccacgaacataggggtggcccgtctgctattgtgactcagttggaccccagaaacatgctatggggccgccagaaccctgcaggcaccctcctatctcactggtaccagagacacaaatacttaggtctttggttttttgagggtttttggagcatggtctggggttgcatgtctacatgtcctggctggagaggaagtgtcagcctgctagctccctccctgatctttaatggttcctcagacctcccagtgccctgattcccttcatcccccttcctgttcacatctctggtcaattccatatcctgtctagtcttcccgtctctgtcctcccccaggtgagtgctgttttccccaagtcaaaggctctgtgtgtgcagggtttgtgtgtgtgctcctgatgtatacacactggtctctaagcctgtgaggtacacacggcagcacgtatctgccctgcgaggtgcgcatggtgggagggggtgggaaggaggggcagctggagggggcagtggctgttctatttttactggccagttgccggaggccacggttttcatagcctgccctcagctctgcccccacaatctgccgtctgtggtgaggctcgggccagcctagctccacgaggactaaactaggtaagtgtctacaacactgaccatggacctgggcagctgagtagagaggtgaggttttgtttagaggggaaatgaagtttgggagacagagatgtttcttatttggatttgtgtgggcaggtttgttggcagatactctaagactcctagccttttgacccaccaaatggcatttctcctgtacgatgctgtgggcagttggacctggaagggaagactgtccaacatgttcctcagaaacccaaagcagtggactatgctctcacgagggactgcagccaggggcagggtggaccgagctcctggtgggaggggtggccctggggaccaaggcatcacatttgggagaagcctgggggagaagcaccagtggtcatgcaggactctgaggagacagtccagagggcctgctgaccgaagagaccatctcgtttctttgtcctttctctctgacaggtgctttgagctctcttcacccgtctcatctgcacaggacaccaacaggtatagacagaccaccatgcctcccccactgctcctgggctctgagtcggagaaggagttgtaggggaggtggatgaccacagtgtctggggtcagagtacaattgtctgtgagcatgtaagctagcaagacatctacagcatgatgatcggaggaggtttgggctaaaggcagcccctaccccaagtcctggaccctaagcggttctaatgctggacttctggccacaagcttgggagatcagcttgttagcaccctgtttgggaggatggggttgcccttgaactaagttccaaggtcagaggtggggtgcaagggtagagcatgacgcatacgccctatcagggggttggttcctttctgctgtgtctcacacaggatttacacactccatactcaagcaagtgggcttggcgtggaaaactgacagtctttcctctccaaggcctcagggccaggaaggtgagtcttgagtcaggcctgagtctgctcccttccttccagctctgtgctttctcttatctctcgctttccacttgtggtccagatggaattcggccctccagcccctctgctatctatatcctggcttctaatcaggcccctgcttctcttccatagagcctgtcaaggggtcctgcctggtgggtgtcagagcacaggtcagggcctcatgcttgatgtgggacccctgggcctggcatttgtcagtgaggcagttagggactgcctggagcttggcaggagcccaggctgcccagcagtgggccccacactggtgacaggggggctctctcagggatagaggaaggacagccatggctaagtgcccaccagggcgaagcataatctagggagacagatgcaagacctatcggctaagactcgcattcccagaggccagacagacttgggaggggaggatctttgtcagctagtgtctccttttggacttccccccagtgtcttcggaaaggcagagctcttgagtctgtgtattaaacctaatttcagctaagcatcttgggaatgcatgaatggttcccacatctcttccccagtaacccctggggacagctgagactccagggtcacctcccacctagccccattctctgcatgaacagaggcttaggtgcaaggctctgtaacaggctgggatcc

SEQ ID NO: 3105 - DNA, 828 bp, Rattus norvegicus
tgcacctcgtcgatcgtgcatctgtgcgccatcagcctggaccgctactgggccgtgagccgcgcgctggagtacaactccaagcgcaccccgcgccgcatcaagtgcatcatcctcactgtgtggctcatcgccgccgtcatctcgctgccgcccctcatctacaagggcgaccagggcccccagccgcgcgggcgcccccagtgcaagctcaaccaggaggcctggtacatcctggcctccagcatcggatctttcttcgctccttgcctcatcatgatccttgtctacctgcgcatctacctgatcgccaaacgcagcaaccgcagaggtcccagggccaagggggggcctgggcagggtgagtccaagcagccccgacccgaccatggtggggctttggcctcagccaaactgccagccctggcctctgtggcttctgccagagaggtcaacggacactcgaagtccactggggagaaggaggagggggagacccctgaagatactgggacccgggccttgccagccagttgggctgcccttcccaactcaggccagggccagaaggagggtgtttgtggggsayctccagaggatgaagctgaagaggaggaggaggaggaggaagagtgtgaaccccaggcagtaccagtgtctccggcctcagcttgcagccccccgctgcagcagccacagggctcccgggtgctggccaccctacgtggccaggtgctcctgggcaggggcgtgggtgctataggtgggcagtggtggcgtcgacgggcgcagctgacccgcgagaagcgcttcacctttgtgctggct

SEQ ID NO: 3106 - DNA, 562 bp, Rattus norvegicus
gctgattcattgtgaccccctgagaccccggagagagacgtgccatgaactgccagtcagaatcacaaccagccagaccaccgatgagagaggtcctccgggtgagcaggggcctccgggggctcccggccctcctggagttccgggcatagatggtattgatggtgaccgaggtccaaagggtccccccggacctccgggtcctcctggagaccccggcaagccaggagcaccaggcaagccaggcactccaggagctgatggattaacaggacctgatgggtccccgggctccgttggaccaaggggacaaaaaggagaacctggtgagcctgggtctcgtggatttccaggccgtggcattccaggaccccctggccctcctgggaccacaggacttcctggagaacttggccgagtaggccctgctggcgaccctgggaaaagaggaccacctggtcctcctggccccccaggacctagtggaacaattggatttcatgattgagacccattgtgccccaattcctgcccaccaggtcgctctggctatccaggccta

SEQ ID NO: 3107 - DNA, 1967 bp, Rattus norvegicus
caccgcccttcagactgcagcgttctaagcgacagtgggaactgctccagctaccggtattacagtcatttgttttcttcaactagagaagtttccagatggggcagaaccttcctgcccctgcctgcccgcccccttcgtaagcttagggggaggaatgcagaggggaggggcggcgagggacggccccttagacggtccattgccattaatagagacctgaagcaccgcctgctaaaaatacccggctggacacccataaaagcacagttggggctccagctcggcacttctcggatcctcagcccagtgcttctagatcctcagccctgaccagctcagccaagaccatgaccgagcgccgcgtgcccttctcgctactgcggagccccagctgggagccgttccgggactggtaccctgcccacagccgcctcttcgatcaagctttcggggtgcctcggtttcccgatgagtggtctcagtggttcagctccgctggttggcccggctatgtgcgccctctgcccgccgcgaccgccgagggccccgcagcagtgaccctggcccggccgttcagccgggcgctcaaccggcaactcagcagcggtgtgtcagagatccgacagacggccgatcgctggcgcgtgtccctggacgtcaaccacttcgctcctgaggagctcacagtgaagaccaaggaaggcgtggtggagatcactggtgagtttcccttatcccaagaggggacgaagctggtggggcgagcgagtaccgtggtggcagtggaggtggggggtgggggtgggtgctgaaaccttgagggacaggaccctgaaaagttagaaatgagctcagggacccggagacccgcgtcattctccctagcctgcttctcttgccccggaacgcgggtgcaggtttgctcctaaaagctctgtcatcttcgatgataaggaccaacagctgggggtgtagctcagggcagagtcttgcctggcaagcccggagccttgaggcttgaccacccgcagcacagaaacaaaatgaaggaagacccaaggcaccttctggaagacctcatccccaaataagcaagtggcaggactccagtcagggacctccagtcagggtccctagacccagccgcggtgggggcgtgcgcacagcttcgagtatgcctacgatctggcatccaagcctgggtcagagccaagcccaggtccgggacctttgcatccccaaatctcagaagcgaactttctggaaagttttaagatcccagacagtcaggcatcccaccacactcttaatttgtttgcctccttgggccccagccattccttagctaggactgcagagggctgcctctgacctccttctgtcccacccacaggcaagcacgaagaaaggcaggatgaacatggctacatctctcggtgcwysasscggaaatacacgtgagttctggttccttgcatggagagctggggggtgggggagcggacmctgggcvgagsvcgrrgwmaggmdgrayrwrydrhmyhtstysbdksttycbgswmmtmyasgctccctccaggtgtggaccccmccbkggkgtcctyttccctgtcccctgagggcacactcmcsktgraggytccgytgcccaaagcagtcmcacaatcagcggaratcvccattccggtcactttcgaggcccgtgcccaaattggagscccagagtcggaacagtytggagccaagtaraagccttcagcttsbtacccatccccagtagccgtcaccagccctccctbtytgtcaatytgaatgctcttttgawacatgkactttctgwtttwytcaartaaaagttggaaactaywrmwhvmmmmmmwmwmaraawaaaaaaaaaaaaaaaaaaaaaaaaaaaaaaaaaaaaaaaaaaaaaaaaaaaaaaaaaaaaaaaaaaaaaaaaaaaa

SEQ ID NO: 3108 - DNA, 1338 bp, Rattus norvegicus
gagctgctagcgagccggaggaggagccgcagcggcgccaggggcagccggggagcagagaagggcgccccaggtggttgccccctccttctcctgagatgtcagggaggagactacctgtatcctacacaggggccccacacagcctgggggcccccagccccagagtgaggaggtggaggtgctgttgacaggtgtgcaaagccatgctccctcgccactcctgctctctcctccttttccttctcctcctccccagcgtccccatggagccccaacccccctcctccaccctgcccccttttctggctcctgagtgggacctcttgtctccccgagtggccctgtcaaggggcacccctgccgggccccctctcctcttcctgctggaggccggggcctatggggagccggcaggggccccagccaaccgcagccggcgcggggtgagtgagacggcaccggcaagccgccggggtgagctggcagtgtgcgatgcagtgagtggctgggtgaccgaccggcggacagctgtggacttgcgtgggcgcgaggtggaggtgctgggcgaggtgcctgcggcaggtggcagtcccctgcgtcagtacttcttcgagacgcgctgcaaggccgaaagcgctggggaaggtggcccaggtgtgggcggagggggctgtcgcggcgtggatcggaggcactggctctcagaatgcaaggctaaacagtcctatgtgccggcgttgactgcagactctcagggccgcgtgggctggcgctggattcggatcgacaccgcttgcgtctgcacgctcctcagccgaacaggccgtgcctgacgtccaggcttgggaaccgctcaggttgaggaggaaaaaaaaaaccctggatgctgaaaggaccacagggatggctcgactgctctaccgtgccttctgactgtgaactgaaataaccacagaatcaaatctctctcattttgagagctcagtctgtgtggaatgtatgaggaaaccaaatggggtttcaactgatgaataggagttctcccgaaggaacttgacattaataatagccaatgtttactatctactgtgtatcagacctaatgtgtgactctgctaaccattttaacatcagaggaccctgacttaccctggcaagagagacgaggaaagactacgtgaaaaatcaatgtatgagctggggctaggcctcgatcagtaggctgtttctggttgcctagcatgcacacagtcctgggctctatcctgagcaccgtatcataaaccatgcacggtggtactcatctgcagtgccagttcttggcggccgcgaatt

SEQ ID NO: 3109 - DNA, 1873 bp, Rattus norvegicus
ccacgcgtccgagccagtctaagctgacccacagacataaaaaccaaggcactgggcacctttagctggggcatccaaactcttgaatcaaaggtgcaagcacccgactgctttcttggggaccaagaaaatgaacgtttgtcttcacatttaccccagcaatccatgagatcagggcactgacagaaaggatgttcaaacacctccgaagatggtttatcactcacatatttgggcgttcccggcaacgggcaaggctggtctctaaagaaggaagatgtaacatcgagtttggcaatgtggatgcacagtcaaggtttatattctttgtggacatctggacaactgtgctggacctgaaatggaggtacaaaatgaccgtgttcatcacagccttcttggggagttggttcctctttggtctcttgtggtatgtcgtagcgtatgttcataaggacctcccagagttctacccgcctgacaaccgcactccttgtgtggagaacattaatggcatgacttcagcctttctgttttctctagagactcaagtgaccataggttacggattcaggtttgtgacagaacagtgcgccactgccattttcctgcttatcttccagtctattcttggagtgatcatcaattccttcatgtgtggtgccattttagccaagatctctagacccaaaaaacgtgctaaaaccattacgttcagcaagaatgcggtgatcagcaagcgtggcgggaagctctgcctcctcatccgagtggccaatcttaggaagagccttctgattggcagccacatatatggcaagcttctaaagacaaccatcactcctgaaggcgagaccatcattttggatcagaccaacatcaactttgtcgtcgacgctggcaatgaaaatttgttcttcatatccccactgacgatctaccacattattgaccacaacagccctttcttccacatggcagcagaaactctttcccaacaggactttgagctggtggtctttttagatggcacagtggaatccaccagtgcaacctgccaggtccgcacgtcatacgtcccagaggaggtgctttggggctaccgtttcgttcctattgtgtccaagaccaaggaagggaaataccgagttgattttcataacttcggtaagacagtggaagtggagacccctcactgtgccatgtgcctctataatgagaaagatgccagggccaggatgaagagaggctatgacaaccctaactttgtcttgtcagaagttgatgaaacggacgacacccagatgtagcagtggcttttccacctacaaaaagcctcccaaggacctaagggttgactgtgttcagaagcatctgacgggggtctgaaagcaggatgagaacatgcgaaatctgctagcacagtcacccctgaaccccagggctatggttctacaagacacatagctctctaaggctgcatacggtgcatgcatgtgaatgaaactgtggaagccaaaggggcccacttggatcctcactatgactgtgtaagctcatatcgtgttgatggaaacaaagtcattcaaggacaaaacttaggagctttagaaagcttcaggaactagccacatttcctgtgtcttccaaagggaacaagttagcaggagaacttctttggaggaaggttctagtgtgaaggtcttgtttcttcatttccatacctgtatcattccaaattcaccttgaaaaaaaaaagtagagttcaaagctgctcaaagatcaaaatttttccggtatgtgattaataaatttctgaaacgtaaaaaaaaaaaaaaaaaaaaaaaaaaaaaaaaaaaaaaaaaaaaaaaaa

SEQ ID NO: 3110 - DNA, 1938 bp, Rattus norvegicus
tgccctcccagggccagcgcgggtgcccagagcgtcccgactcgcttcaagaagccggcaatgtaggatccaaagcttttctactcccgtgttttctttccgtgtttttttttaagggggaaaccgggtggtgggcagtctgacacgcacacaacctgccttcatactctgacaaaagcagatgcactttgacttctgacagctctacctcaagctggagagaacccagctttcccgaatcctgagctctttgcgtcttccttttcgtctgtttccattttatttatttacgtcccgccgcctctctgggtgaccttcactccttcgcgggctttgggcagaagagccgctttcttgcccgattgagactgattttcctcgcctggtgagcggaggtggcgctgctccaccccgctgccccgggactccggggctgccctctaccagcctggtctctccctcttttgatttgacagtacgggtttttgctttcccgagtacagcgggtttcttctttttggaggagctggttgtcttcagaagtcattccctggactctaattgccctgtcgctccgggcctcaccggaccaaaccaaagaccatggtgcactgtgcgggctgcaaaaggcccattctggaccgtttcctcttgaacgtgctggacagggcctggcacgtcaagtgcgtccagtgctgtgaatgtaaatgcaacctgaccgagaagtgcttctcccgggaaggcaagctctactgtaaaaacgacttcttccgatgtttcggtaccaaatgcgcgggttgtgcgcagggcatctctccaagcgatctggttcggagagcgcgaagcaaagtgtttcacctcaactgcttcacctgcatgatgtgtaacaagcagctctccacgggcgaggagctctacatcatcgatgagaacaagttcgtttgtaaagaggattacctgagtaacagcagtgtcgccaaagagaacagcctccactcggccaccacaggcagtgaccctagtttatctccggattcccaagatccatcgcaggatgatgccaaggactctgaaagtgccaacgtatcggataaggaaggtggtagcaatgagaacgatgaccagaacctaggtgccaagcgcaggggaccgcggaccacgatcaaagccaagcaactggagacgttgaaggcagcctttgcagctacgcctaagcccacacgccatatccgcgagcaattggcccaggagactggcctcaacatgcgtgttatccaggtctggttccagaatcgacgcwcsarggagcggaggatgaagcagctaagcgcgctgggtgcgcggcrccacgcctttttccgcagtcctcgccggatgcggcctctggtggaccgcttggagccgggcgaactcatccctaacggcccmttctccttttatggagattaccagagtgagtactacggtcctggaggcaactacgacttcttcccgcaaggaccaccgtcctcgcaggcccagacaccagtggacctaccctttgtgccatcatctgggccttcggggacgccccttggaggtctggaccacccgctgcctggccaccatccttccagcgaggcgcagcgattcactgacatcctggcacatcccccaggggactcgcctagtcctgagcccagcttgcccgggcctctccactccatgtctgcggaggtctttgggcccagtccacctttctcatctctgtcggtcaatggtggagccagctacgggaatcacttgtctcaccctcctgaaatgaatgaggcagccgtgtggtagcggggtctcgcatgggccacgggagctcgtggttgtacagagacgagcttttatttcagaaaataggagatttaaaaaaaaaamwdamraramwawwwawmammaggagaatta

SEQ ID NO: 3111 - DNA, 1695 bp, Rattus norvegicus
atggagaccaccgccacctgcacccgcttcaccgacgactaccagcttttcgaggagctcggcaagggtgccttctcggtggtccggaggtgcgtgaagaaaacgtcgacgcaggagtatgcagcaaaaatcatcaataccaagaagttgtctgcccgagatcatcagaaactagaacgagaggcccggatatgccgacttctgaaacatccaaacatcgtgcgtctccatgacagtatttctgaagaagggtttcactacctcgtgtttgaccttgttacgggaggggagttgtttgaagacatcgtggccagagaatactacagcgaagctgatgccagccactgtatacatcagatcctggagagcgtcaaccacatccaccagcatgacatcgtccaccgggacctgaagcccgagaacttgctgctggcgagtaaatgcaagggtgctgcggtcaagctagctgattttggcctggccatcgaagtgcagggagagcagcaggcttggtttggttttgctggcaccccaggttacttgtcccctgaggtcttgaggaaagatccctatggaaaacctgtggatatctgggcctgcggggtcatcctgtatatcctcctggtgggctaccctcccttctgggatgaggatcagcacaagctctatcagcagatcaaagctggagcctacgatttcccatcaccagaatgggacacagtcactcctgaagctaagaacttgatcaaccagatgttgaccataaaccctgcaaagcgtatcacagctgaccaggctctcaagcacccatgggtctgtcaacggtcaacagtggcatccatgatgcatcgccaagagacagtggagtgcttacgcaagttcaacgcccggagaaaactgaagggtgccatcctcacaaccatgcttgtctccaggaacttttcagctgccaagagcctattgaacaagaagtcagatggcggcgtcaaggagccacaaaccaccgtggtacataatgctacagatgggatcaagggctccacagagagctgcaacaccaccacagaagacgaagatctcaaagtgcgaaaacaggagatcattaagatcacagaacagctgatagaagccatcaacaatggggactttgaggcctacacgaagatttgtgacccaggcctcacttcctttgagccagaagcccttggtaacctcgtggaggggatggatttccataagttttactttgagaatctcctgtccaagaacagcaagcctatccacaccaccatcctaaacccacatgtccatgtcatcggcgaggacgcagcttgcatcgcctacatccggctcacccagtacatcgatgggcagggtcggcctcgcaccagtcagtcagaggagacccgggtgtggcaccgccgggatggcaagtggctcaatgtccactatcactgctcaggagcccctgctgcaccgctgcagtgagctcaggcacaggggcattaggagattccagctggaggctgaaccttcgaagtcagtgactctggagggcctgagtgacagccgcggtcctgtccatttgaggtttaaacaattacattacaaagcgcagcagccaatgacgcccctgcatgcagccctcccgcccgcccttcgtgtctgtctctgctgtactgaggtgttttttac

SEQ ID NO: 3112 - DNA, 444 bp, Rattus norvegicus
aaagtatctgtgtcttcagaggtgactgtattcgaacatacaagccagaaatcaagaaaggaagctacaataatatcgttgtccatgtcaagaccgctgttgctgacaacctccttttctaccttgggagtgcaaaatttattgactttctggctatagaaatgcgtaaagggaaagtcagcttcctctgggatgttggctctggagttggccgagtagagtatccggacttgaccatcgacgactcatattggtaccgtattgaagcatcaagaaccgggagaaatggacttatttctgtgagagctttggatgggcccaaagccagtatggtgcccagcacccaccattcagattctcctcctgggtacactatcctagatgtggatgcaaatgcaatgctgtttgttggcggcctgactggaaaattaaagaaggctgacg

SEQ ID NO: 3113 - DNA, 853 bp, Rattus norvegicus
atgcrcrgckccgtgtacctcgtggctctggtggtcctggaggcggctgtatgtgttgcgcagccccgaggtcggattctgggtggccaggaggccatggcccatgctcggccctacatggcttcagtgcaagtgaatggcacgcacgtgtgcggtggcaccctggtggatgagcagtgggtgctgagcgccgcgcactgcatggatggagtgaccaaggatgaggtyrygmrggtgctcctgggtgcccaytccctgtccagtcctgaaccytacaagcatttgtatgatgtgcaaagtgtagtgcttcacccgggcagccggcctgamagcgttgaggacgacctcatgctctttaagctctcccacaatgcctcamtgggtccccatgtgagacccctgcccttgcaacgcgaggaccgggaggtgaaacccgscacgctmtgcgatgtgrccggttggggcgtggtcactcatgcgggacgcaggcccgatgtcctgcagcaactgacagtgtcaatcatggaccggaacacstgcaatctgcgcacgtmccatgatggggcaatcaccaagaacatgatgtgtgcagagrgcaaccgcagggacamttgcaggggsgacyccggcggtcctytkgtktgcggggatkcggtcgaasctgtggtyacgtgggratctsgagtctgtggcaaccggagaaagccaggtgtctttacccgcgtggcaacmtacgtsccgtggattgaaaacgttytgagtggtaacgtgagtgttaacgtgacggcctgaggggacaccggagaccgtgactcacaataaatgcatgcdkcydmaaaaaaaaaaaaaaaaa

SEQ ID NO: 3114 - DNA, 2633 bp, Rattus norvegicus
cccgggctgtaccttccggttggaactgccaagggtgcccagtggcccagcctaagctcgtgtcctctcttttcaggtgatgccctttctctgaggaaaacctgtgactggaggaaggggctgcgcttcattcccacccggctgccatgaacacctcagtgccccctgctgtcagtcccaacatcactgtcttggcaccaggaaagggtccctggcaggtggccttcatcgggatcaccacaggcctcctgtctctagctacagtgacaggcaacctactggtactcatctccttcaaggtcaacaccgagctcaagacagtcaacaactacttcctgctgagcctggcctgtgctgacctcatcattggcaccttctccatgaacctctataccacgtacctgctcatgggccactgggctctgggcacactggcctgtgacctctggctggccctggactatgtggccagcaacgcctctgtcatgaatcttctgctcatcagctttgaccgttacttctcggtgacccgacccctgagctaccgagccaagcgcactccccgaagggcagctctgatgattggcctagcatggctggtttccttcgttctctgggccccagccatcctcttctggcaatacctagttggggagcggacagtgctggctgggcagtgctacatccagttcctctcccaacccatcatcacttttggcacagccatggccgccttctacctccctgtcacggtcatgtgtacactgtactggcgcatctaccgggagacagaaaaccgagcccgggagctggccgccctgcagggctctgagacaccaggcaaaggtggtggcagcagcagcagctcagagaggtcacagccaggggctgaaggctcacccgagtcgcctccaggccgctgctgccgctgttgccgggcacccaggctcctgcaggcctacagctggaaggaagaagaagaggaggatgaaggctccatggagtccctcacatcctccgaaggtgaggagcctggctcagaagtggtgatcaagatgcccatggtagattctgaagcacaggcacccaccaagcagcctcccaaaagctccccaaatacagtcaagaggcccaccaagaaaggccgagaccgaggcggcaagggccaaaaaccccgagggaaggaacagctggccaagagaaagaccttctcactggtcaaggagaagaaggcagctcggaccctgagtgccatcctgctggccttcatcctcacctggacaccatataacatcatggtgctggtatctaccttctgcaaggactgtgttcctgaaaccctgtgggagctgggctactggctatgctacgtcaacagcactgtcaaccccatgtgctatgcactgtgcaacaaagccttccgggacacgttccgcctgctgctgctctgccgctgggacaagaggcgctggcgcaagatccccaagcgccctggctctgtgcaccgcaccccctcccgccaatgctaacggcccccttctcctgcatccttccaccccagctccagggagaggccggtggaaagtgtcccggaaaacgggctgcatcttcagccccagagccctgctcaggactcccctggcttcccaggcccctgggtcaccttcctggacagcccagagagactctactagctttccaaactttgctattcccagacggggaatgaaacccggggaactggttttctgatccccgctgtgtgggaatgggcccagcaggaggatccgggctttggactgtttgcgtttaggcaggaagtcaggagccagcggggtgggccggccggccagtagtttaaaggtgcagtctttcttggcccagcagggggcctggattgcagtggtcatagaacccactgcatctacatttgggagatgacaccaagcacagagagaaaggtttggaacggggaggggggagggggtggggtgttggagggagggaggttgtgacccctggctggamaykmsstcctttcctaggcagagctcatccaggtaggccctaggcacactctccaggatcgttcaacctccttacaaatgaccccaggtcatccctatgtggatcatctccaagacaaatatccaagcgtgagcaggacaatgacactaggggagagcagcttggctaaacacaccaagtcccaaagcagcatcaggaccagatgtcaggtgtcctaaccggcccattctatgccattttcctgggggtgggggtggggtaaggtgcctgctccagtcccacaccctttctcctctctccctgccccgaagtgacctaggcccctcccttctggctcacagccattacctgggtggatctgctctgggcagatctagccagacctcctgcatgctgcctgcctcctccagcctggccccacacaggtctggcccagccagcagattctcttctgtaaactcctgaatccaatccatgcatggcctccctgccaccctgatctccaggccctgcctgcccctgttctttctttccatcctcagcatatgctgagtctgtgaataaagccacgtaactagtgggaactacaarraawwmaaaaaaaa

SEQ ID NO: 3115 - DNA, 1037 bp, Rattus norvegicus
  misc_feature (552)..(552): n is a, c, g, or t
  misc_feature (642)..(642): n is a, c, g, or t
  misc_feature (661)..(661): n is a, c, g, or t
  misc_feature (813)..(813): n is a, c, g, or t
agcttggttcttccctccgctctgtttgccgccgtgggaacagccggccagaggtgtaccactgtgaggcgactgtttttgcacgaaagcatccatgatgaagttgtagacagactgaaaaatgactactcacagatccgtgtcgggaacccctgggaccccaatatcctctatggaccgctccacaccaaacaggcggtgagcatgtttgtgcaagccgtggaagaagcaaagaaagaaggaggcacggtggtctatgggggcaaggtcatggaccaccctggcaattatgtggaacccaccattgtgaytggtcttgtccatgatgcgcccawtgttcacaaggagacttttgccccaattctytatgtcttcaaattcaagaatgaagaagrggtctttgaatggaacaatraagtaaaacaggractttcgagtagtatctttaccaagkatcwsgrsrgaatcttccgctggcttggacctaaggkttcagactgyggcabwkkgaamgkywwtwttysywyywktkggghtgwkmtmrdysktkhntywggaggsraraagcacacgrrcrrtggcagggaathtggcagygatgcctggaagcagtacwtgcggagatbtacgtgtaccatmaantacagcacggccmtccctntggctcaagktatcaagtttcagtgwkactggttggtcasttagccattcctgtgavtgcthtgaagacgcccaagaggacthtgactttcccggaataaatgatcratttgrgtacagcagtgcstasthtccagtgawcaaacccytgrntaaatcaagatatatccatttdtcawgaattgaaaattaaatatktacaacmtrrvdmmmdwwrrmaaarraaaaaaaaarrwwwrrmggccgcaagcttattccctttagtgagggttaattttagcttggcactggccgtcgttttacaacgtcgtgactgggaaaaccctggcgttacccaacttaatcgccttgcagcacatccccctttcgccagctgg

SEQ ID NO: 3116 - DNA, 1483 bp, Rattus norvegicus
ggaagaacagccacaacttacgacactgatctgaccaacttgtgttggccaggaaactcagaaccgctcataactacagcagaccatgaagaaccctggctcacaagccctctttcctttacatcttccctggaaagccagcctggcagatgggaatccactcctgaaagtagtcatattttcatgcctcttgacctttggacgtgggaagttggagcaacctgaaatatcaatatccagagccagagatgagactgctgaaatatcctgtaaaggttttgttgaaagctttcaaagtgtagccatacactggtaccggcagaaaccaaaccaaggtttagagtttctattatatgtcctcgcaactcctactgagactttcttaaataagaagtacaaaaaaatgaaggcaagtaaaaattctagtgcttctacgtcgatattgacaatatattccttggaggaagaagacgaagctatctactactgttcctacggctatagctcgggctggagcaaagtatttgcagaaggaactaaactcatagtagttcctgctgacaaaagctttaatgcagacatttcccccaagcccaccatttttcttccttcttctgctgaaacaaatctccacaagactgggacatacctttgcctccttgaaaagttcttccccgatgtcataagggtgtattggaaagaaaaggacagcaatacgatcctggactcccaggaaggggagacgctgaagactaacgatacatacatgaagtttagctggcttactgtgcctgaagggtcaatgggtaaagagcacagatgtattgtcaaacacgagaacaacaaaggaggagcagaccaagagattttctttccttcaataaagaaagttgctctgagtacccagcctacaacttgctggcaagataaaaacgatgtgctgcagctccagttcacgggcacctctgcctactatacttacctgctcctgctcctcaagagcgtgctctacttggccatcatcagcttctttctgcttagaagaacagctkcctgtggcaataagaagagmtcctaaggaaataaacggtggaccagcaagtccrttgatyttyatccttactgtcataaaggtgacttatgggggtccagctgccttctcttgctggctttgacttctgtaaagtcacatgcacakcattctgttattgtgcaaacatttttctcacatttgtaagcaatttyagcaayttctctctaactgagctcaccttcctgattccatcctctccagcagtcccctcccccagaagcccaaagtatcaaagctctggtacgcataggctgcaggatttcccttgttgctcttgaaccagtcaactctctgaaagcctccgctctagacaacctgaagagccttctttattgttggattctgtgccttgtatttcatattagagacaataaatattttttaaaaatc

SEQ ID NO: 3117 - DNA, 1491 bp, Rattus norvegicus
ctttaatccacagatagatctgcagctgtgaggcaggaaaccccagaactgctcagaactggagcagaccaagaccaaccctaggggatccacacctccggatctgcatttttctgagacaataggacagccccatctcctgctggtaacctgaaattccagcttgcagagcacttcttgcctctgagtgaagcgactggccactgggatgctgctcctgagatggttcaccttctcctgcctctgggtttttgggcttgggcagttgaagcaaacgaaaatgtcagtcaccaaagcgacaggctacaatcaactccccttagacgggaagtacaagaaaattgaagcaagaaaagattttcaaacttctacttcaaacttgacattaaattacttgaagaaagaagatgaagccacctactactgtgcactctgggcatcgaagtacatcgtgggtcaaggtatttgccaaagggacaaaactcgtagtaattccctcagacaaactcattgactcagacatttctcccaagcccaccattttccttccttcttctgctgaaacaaatctccagaagactgggacatacctttgcctccttgaaaagttcttccccgatgtcataagggtgtattggaaagaaaaggacagcaatacgatcctggactcccaggaaggggagacgctgaagactaacgatacatacatgaagtttagctggcttactgtgcctgaagggtcaatgggtaaagagcacagatgtattgtcaaacacgagaacaacaaaggaggagcagaccaagagattttctttccttcaataaagaaagttttcacaactattaatgtcgatcccagagagagtgttttcagacatgaaaatgttaacaatgctactgttctggaagcttgcwygaragkaagkaaggatatgctgcagcttcaggtcaccaccacctctgccttctacgtctacctcaccctgttcttcaagagtgtggtccacttggccttcgttgtrttckggctgttcagaagagtaaatatgccttgtgatggccaacgttccagtggatgatgaamcaggaaggtcatgctatcttcatccytcctacmtytcaatatctgctgaggrtctagcttggcttgcttgctgrctttgatgtccacaaggacacatatgtgkggtttttgkrtcattacwataattctcagagcagagaaatcaacttcactctmtaacaaatrktagcttccaagcacccaatsgtcytgacccatcctytctcagtccctbtagtagccctagcaacacaggcccawtgtatataaactccagtttcctagtaccccacttcatgccctagaaccagatagtgcccccaaagcctttacttyatatgctstaaataactttattaggatttamattttgtgttttgttttataraatataatawaaaaatccagcctaamvmaaaaaaaaaaaa

SEQ ID NO: 3118 - DNA, 327 bp, Rattus norvegicus
agacataaccagactggggttctgttctgttcagctcctgggcggcgcagcggacgacaaacttacagccggtatcagaccttggaactagagaaggagtttctctttaatccttatttgaccagaaagcgccggatygaagtctctcacgccctgggactsacggaaagacaagtgaagatttggttccagaatcgaaggatgaagtggaaaaaggagaacaacaaggataaacttcctggggcccgagatgaggagaaggtggaagaagaagggaatgaggaagaggagaaggaggaggaggaaaaggaagaaaataaggactaa

SEQ ID NO: 3119 - DNA, 2275 bp, Rattus norvegicus
ggcggcggttactatggcggagtcggccggagcctcctccttcttcccccttgttgtcctcctgctcgccggcagtggcgggtccgggccccgggggatccaggctctgctgtgtgcatgcaccagctgcctacagaccaactacacctgcgaaacagatggggcctgcatggtctccatctttaacctggatggcatggagcaccacgtacgcacctgcatccccaaggtggagcttgtgcctgctgggaagcccttctactgcctgagttcagaggacctgcgcaacacgcactgctgctatattgacttctgcaacaagattgacctgagggtgcccagtggacacctcaaggagcctgagcacccctccatgtggggccctgtggagctggtcggcatcattgccggtcctgtcttcctcctcttcctcatcatcatcatcgtcttcctggtcatcaactatcatcagcgtgtctaccacaaccgccaaagactggacatggaggacccctcatgtgagatgtgtctctccaaagacaagacgctccaggatctcgtctacgatctctccacttcaggatcgggctcagggttacccctttttgtccagcgcacagtggcccgaaccattgttttacaagagattatcggcaagggccggtttggggaagtatggcgtggccgctggaggggtggtgatgtggctgtgaaaatcttctcttcccgtgaagagcggtcgtggttccgggaggcagagatctaccagactgtcatgctgcgccatgaaaacatccttgggtttattgctgctgacaataaagacaatggcacctggacccagctgtggcttgtctctgactatcacgagcacggctcactgttcgattatctgaaccgctacacagtgaccattgaggggatgattaaactggccctgtctgcagccagtggtttggcacacctgcatatggagattgtgggcactcaggggaagcctggaattgctcatcgagacttgaagtcaaagaacattctggtgaagaagaatggcatgtgtgccattgcagacctgggcctagctgtccgtcacgatgctgtcactgacaccatagacattgctccaaatcagagggtgggaaccaaacgatacatggctcctgaagtacttgacgagaccatcaacatgaagcactttgactccttcaagtgtgccgatatctacgccctcgggcttgtctattgggagattgctcggaggtgcaattctggaggagtccatgaagagtatcaactgccatattatgatttagtgccctctgacccttccattgaggaaatgcgaaaggtcgtctgtgaccagaagctacggcccaatgtccccaactggtggcagagttatgaggccttgcgagtgatggggaagatgatgcgggagtgctggtacgccaatggtgctgcccgcctgacagcgctgcgcatcaagaagactttgtcccagctaagcgtgcaggaagacgtgaagatttaagctgttcctctgcctacgcaaagaacctgggcagtgaggatgcctgcagccaccgtgcaagcgtggaggcctacctcttgtttctgcccagccctctggccagagccctggtctgcaagagggacagagcctgggagacgcacactccctactgggtttgagacagacactttttatatttacctcctgatggcatggagactctgagagcaaatcatgtagatgactcgatgccacaactcgcactgcgtgcagtgggaaggacagaaagcccagtgcatctggcatgttgccaggagtggtgatgggtgctgggctcgcctgggagcagcccccataccgtgttgtccactggactgcaggtttcctccagggaccagtcaactggcagatactgagaggaaccggaagtgtcctcccttttacctgtgggcagtcctgagccacgccatccccttctcatctggaggaccgcccctagagacacaacctgctgcctgtctgtccagccaagtgcgcatgtgccgaggtgtgtctcacattgtgcctggtccgtgcctcgcccgtgtgtgtgtgtgtgtgtgtgtgtatgtgtgtgtgtaggtgtgtgtgagtgtgtgtgttagtgtaggtgtgtgagagtgtgtgtgtaggtgtgtgagtgtgggtgtgtgagagtgtgtgtaggtgtatgtgagtgtgtaagtgtgtgtaggtgtgtgagtgtgtaggtgtgtgagtgtg

SEQ ID NO: 3120 - DNA, 2325 bp, Rattus norvegicus
ggcagggtggggctcaccgctccccacttaccggcctcgcccctctcgtgcgcgttaatgagattagcaattaaaaggcgggcgagccgcggccagagaccaggccctgacgagaagcgagcgcgggacatggagaaggcacggcctcaatggggcaatccgctgcagttcgttttcgcctgtatctcctacgccgtgggtttgggcaatgtgtggcgcttcccctacctgtgccagatgtacggcggagggagtttcctggtcccctacctcatcatgctcattgtggaggggatgccactcttgtacctggagctggctgtggggcagcgcatgcggcagggcagcattggtgcctggaggaccatcagcccctaccttagtggtgtcggtgttgccagtgtggtggtctccttcttcctctccatgtactacaatgtcatcaatgcctggggcttctggtacctcttccactccttccaggatcccctgccgtggtctgtctgcccactgaatagtaaccgcacaggctatgatgaggagtgtgagaaggcttcgtcgacacagtacttctggtacaggaaaacactcaacatctcaccgtccatccaggagaatggaggagtgcagtgggagccagccctgtgcctcaccctggcctggctgatggtatatctgtgcatcctgagaggcaccgaatctactggcaaggtggtctacttcaccgcattgatgccttactgtgttcttattatctacttggtccgtggcctcacactccatggagccaccaatggcctgatgtacatgttcacacctaagattgagcagctagccaaccccaaggcctggatcaatgcagccacgcagatcttcttctcactgggcttgggttttggcagcctgatcgcttttgccagctacaatgaaccctccaacgactgccagaagcatgctgtcattgtgtctgtcatcaacagctccacctccatatttgccagcattgtcaccttctccatctatggcttcaaggccaccttcaactatgaaaactgcttaaacaaggtgattctgctgctgaccaattcttttgaccttgaagatggctttctgacagccagcaacctggaggaggtgaaggactacctggcatctacttacccaaacaagtacagtgaagtgttcccacacattagaaactgcagcttggaatcagagctgaacacggctgtccaaggcacaggcctggccttcatcgtctacgctgaggccattaaaaacatggaagtgtcccagctctggtcagtgctctacttcttcatgctgctgatgctgggaatggggagcatgcttggaaatacagcggccatcctcacccctctgactgacagcaaggtcatctccagctacctgcccaaggaggccatttcaggtctggtgtgcctcattaactgtgctgttggcatggtgttcaccatggaggctgggaactactggtttgacatattcaatgactatgcagccacgctgtctctgctgctcattgtgctggtggagactatagctgtgtgctacgtgtatgggctgaggagatttgaaagtgatcttcgggccatgactggccggcccctcaactggtactggaaggccatgtgggcttttgtgagcccactgctcatcatcggcctctttatcttctacctgagtgacyacaksctcacgggaacgctgcagtaccaagcctgggatgctactcaggggcagctggtgaccaaggattascctccacatgcactagctgtcatykgtttgctggtggcttcatctactatgtgcatccccctggtggccctggggactttcatcaggaatcgcctcaagaggggaggctcttccccagtggcctaagaatggacctcccaaagaccgaagtcagccactctgkkkcacagttaccacctgctggtgggatcttcttggctggagkgctggtctgtggcctcctgagtctgtatagaagatgagagagcttagcaaaagaagactgccttggggaggggaccacatcccttaggaggggccctccatcctctgccgtctgaaggtcataccttatagcctctttgtcatcaaaggttaaggccagtattgaagattgttgttttcttgattctagaaagttctagaatttaaggtaaactgtcattagaaacttgactgtaactctaaggagccaaacaagcaattacattttttttattgttgttgttgttgtttaaaagaaaacaaaatactagagggtatttgcttttcaaccagtgtcag

SEQ ID NO: 3121 - DNA, 102 bp, Rattus norvegicus
aagaggacaattcaaggtaacatagagtacagctgcccggccacgaatgaatgtgagatcaccaagcgcagacgcaaatcctgccaggcctgccgcttcatg

SEQ ID NO: 3122 - DNA, 1452 bp, Rattus norvegicus
  misc_feature (1441)..(1442): n is a, c, g, or t
aagcttgttcacaggtggccatgacctcactgccccctggaaccactggggaccccgatttgttttctgggccgtcgccagccggctccactccagccaaccagagtgcagaggcttcagagagcaatgtgtctgcgacggttcccagagctgcagcagtcacgccgttccagagcctgcaactagtgcaccagctgaagggactgatcgtgatgctgtacagcatcgtggtggtcgtgggtctggtgggcaactgccttcttgtgctggtgatcgcgcgcgtgcgccggctgcacaacgtgaccaacttcctcatcggcaacctggccttgtccgatgtgctcatgtgtgccgcctgtgtgcctctcacgctggcctacgcctttgaacctcgtggctgggtgttcggtggaggcctgtgccaccttgttttcttcctgcagccggtcaccgtctacgtatcggtgttcacactcaccacaatcgctgtggaccgctatgtggttctggtgcacccgctacgtcggcgcatttcactgaagctcagcgcctacgctgtgctgggcatctgggctctatctgcagtgctggcgctgccggccgcggtgcacacctaccatgtagagctcaagccccacgacgtgcgcctctgcgaggagttctggggttcgcaggagcgccagagacagatctatgcctgggggctgctgctgggcacctatttgctccccctgctggccattctcctgtcttacgtccgggtgtcggtgaagttgcggaaccgcgtggtgcctggcagcgtgacccagagccaggctgactgggaccgagcgcgtcgccgtcgcactttctgcctgctggtggtggtggtggtcgtgttcgcgctctgctggctgcctctgcacattttcaaccttctgcgggacctggacccgcgtgccatcgacccctacgccttcgggctggtgcagctcctctgccactggcttgccatgagctccgcctgctacaaccccttcatctatgcgtggctgcacgacagcttccgagaggagctacgcaagatgcttctgtcttggccccgcaagatcgtgcctcatggccagaatatgaccgtcagtgtggtcatctgatgacactctgccaggtctgagctggggagcttcagagtcattagccccggaagtcatcatgagatcttattcccatttgccaacacaagtgaaattcctacccagccctctagactagctatatgtctgtttgtgtgcttgtgtgaaatgttagataggctttggagtagaagagcctgaggagagagaagcagatttatcaggtctacccctgaaagcaaaagagatatttttctgggttcagaaaaaataaatcagaagcagtctttctttccttctctctctctctctctctctctctctctctnnctttctttct

SEQ ID NO: 3123 - DNA, 3048 bp, Rattus norvegicus
ccgtctgyggsrygwktgttcttgccctcgtagccctctgtccagccgccatgataagcgccagcagagccgcggmcgcgcstctcgtgggcaccacagcgtcccggagtcyykccgccgcccgtcaycaggatggctggaatggccttagtcatgaggyttttagatttgtttcaagaagggattatgcgtcagaagcaatcaagggtgcagttgttggaattgatttgggtactactaactcctgtgtggctgttatggagggcaaacaagccaaggtcctggagaackccgaaggtgccagaactaccccttctgtggwtgcctttacaccagatggggagcgacttgttggtatrccagcaaaacgacaagctgtcaccaayccaracaatacbttctatgctacaaagcgtcktattggacgacgatatgatgaccctgaagtacagamagacacyargaatgttccctttaaaattgtccgtgcctccmmtsgtgmygcctgrgwggaggctcatggaaaactctattctccgagtcarattggagcgtttgtkttgatgaagatgaaagagactkcwgmraattacttgggccatacagcaaaaaatgctgtgatcacagtccctgcttatttcaatgrctcacagcgacaggccactaaggatgctggccagatatctgggctaaatgtgctccgagtgatcaacgagcctacagctgcagctctggcttacggtctggacaaatccgaagacaaagtcattgctgtatatgatttaggtggaggaacctttgacatttctatcctggaaattcagaaaggagtgtttgaggtgaaatccaccaatggggacactttcttaggaggtgaagactttgaccaagctttgttacggcacattgtcaaggagttcaagagggagacaggggttgatttgaccaaagacaacatggcrcttcagagggttcgggaagctgctgagaaggctaaatgtgagctctcctcatctgtacagactgacatcaacttgccataccttacaatggatgcttctggaccaaagcatttgaatatgaagttgactcgagctcagtttgaaggcattgtcacagatctaatcaagagaactattgctccgtgtcagaaagctatgcaggatssagaagtcagcaagagtgacataggagaagtgatcctggttggtggcatgacgaggatgcccaaggttcagcagactgtgcaagatctttttggcagagccccaagtaaagctgttaatcctgatgaggctgtagccattggagctgccattcaaggaggtgtgttggctggtgatgttacagatgtgctactcttggatgtcactcccctctctctaggtattgagacacttggaggtgtctttaccaagcttattaataggaacaccactattccaaccaaaaagagccaggtattttctactgctgctgatggacaaactcaagtagagattaaagtgtgtcagggggaaagagagatggccggagacaacaaacttctaggacagttcactttgattggaattcccccagcccctcgtggagtgcctcagattgaagttacatttgacattgatgccaatgggattgtgcacgtttctgccaaagataaagggacaggacgtgagcaacagattgtaatccagtcttctggtggattaagcaaagatgatattgaaaacatggttaaaaatgcagagaagtacgctgaagaagaccggaggaagaaggaacgtgttgaagcagttaatatggctgaaggaattrttcatgacacagaaaccaagatggaagaattcaaggaccagttgcctgctgacgagtgcaacaagctaaaggaagagatttccaaaatgagagaactccttgctcgaaaggacagtgaaacaggagaaaacattaggcaggcggcatcttcccttcagcaggcatcattgaaactctttgaaatggcatataaaaagatggcatctgaacgggaaggttctggaagttctagcactggggmacagaargaagatcaraaggaagagaarcagtartagtggcagtgcattgtggagcyaggacgacatactatgaagcttgggagtaaaggaacttcctgagcagaaaaggggcaaacttcagtctttttactgtatttttgcagtattctatatataatttccttaatatataaatccagtgacaatatataaatccagtgacaatagctataactcatttaatggtaataaagtcagcaatagcaggttcacacttctataactagcctgctgttttcagykgcacgyaaaggggtgggatgggsctgbgyacsaatcattattaggtaaatctggtttgtgctgaagtagctatgttwtcragatggaagcccatttcacatgcarkasagkwratctgtcatggaccytgaattgrggttcatatgcagatgctwgttgaccaagagcactgctwwaaatgacctgtgtgkacatttgctccttcaactgatgccttgcaagactaagctctctgtgtcatggyctataggyacagargttaggtcaatggataacagctgtgttagccatagcttaaagkgatyyatcargaattatacaagcctctcatgggcctaaggcatacttctccagytaccctcttgggtggmcaatgtctgacatctatattcttgatgattkktyytttytcaymcattctggattkttwtttwwtttaataaaattctgmamgccwmwwrawmwvmwwwrwraawrrkagtagctcaaggactatgactgtaccayyaggkttgygagtagaggtaaaaaatcaacmcykgctaaaaggttgaacaaattaaacatggtgagggactaaataacatgttggcatgtatgctggatgtggaagcccactcaggaagcagtgtgaagccaggcggggctacacaatgagacaccccgtcttaataaaatactggcataaacgaaaammwmrwrmmraaaa

SEQ ID NO: 3124 - DNA, 1352 bp, Rattus norvegicus
tggtagtggtttccgcgacaggcaggtgcgactgctttagccckgcctgggctccacggctgcctggagggtctctgcagtgcccaccccttctcctccgggaccccacgccagcagcgaccctgagccagcagccggagcgaccggcaatggcggcctcgacggcctcgcaccggcccatcaagggaatcctgaagaacaagacctctacgacttcctcggtggtggcctcggccgaacagccccgccggaccgtcgaagaggagctgagtaaaaagtctcagaagtgggatgaaatgaacatcctggcaacatatcatccagctgacaaagactacggcttgatgaagatagacgagccagacactccataccacaatatgataggtgatgatgaagatgtctgtagtgattcagarggcaatgaagtcatgactccagagatcttagcgaaaaagttagctgctgctgagggctccgagccaaagtttcggactcgggaacaagaaagcagtggagaggaagacaatgacctctcccctgaagagcgagaaaagaagcggcagtttgaaatgaaaaggaagcttcattacaacgaaggactkratattaaattagccagacagttaatttcaaaagacctacatgatgatgacgaagatgragaaatgkcagagactgsagatgcagacmgsatgratattgaagagkcaaatyaaggatytamtgsaggsgamsatykgsagsacaaawymcaawgttcataaacgtgktcatyartgcagkcgktgkcaaatacmaamcttgktamttathcmamamwrhdwhwwrdwmtctwmgamtcgwgamtatgtaccaaaatacacaccagttatatattgccaagaattaagaccatagagactgagtagatggaaaatgcctaattaatgcayatattcttgtgcctcatatttcaccacaaatacagtgtaatgttagtagtccaaaactgctttacttttgtaagaacactggttaatttgtataagatgttatatagctttttatgctttagagattaaataatatgggggaaactatttatttttgtcacttctagatggtggtacctcttataaaatgtttgggggtagktwgatgwttwttcttcttttaatctaaagcctattcataaagtgggatatgtagatggataaatatttaggctgaaagatttttttaagcatttatctttagctwsdtwtggctaawtsaggwttmtaagagrraktgttcattttaatggccacggccattaaaattcctgttgattttgctttgcgcttgaaaggaataaaatctttacatcc

SEQ ID NO: 3125 - DNA, 2905 bp, Rattus norvegicus
cgcaagtacagagcaccagaggatgcagactagcagtgaagaatcacaagacctgtaacatgagtgcggcccaacccccagccaagctttgacacagaaccccaggacaatgaggacaccaccctgcccatagctccctgtgcagccacctaaagtgccaaaatggaccagcacatggcatttatctgggggctgtgctacatggccctggtggctctctgctggagacacggggtaacaaaggcagaagaaactgtccctctgaagactctgcagtgctacaacgactatatcgagcgcatcatctgcagctgggccgacacggaggacgcccaggggctcgttaacctgaccctctatcactggctagacaagaaacagccaatgtcctgtgagctcagtgaggacctcatgtggtcagagtgcccgtcatcccaccgctgtgtgcctagaagatgtgtcctcccctatacacagttttccgtctcaaaagaagactactactcactccagccggatcgtgatctgagtatccatctcgtggttccgctggcccagcatgtgcagccaccacctcccaaggacatcagcatcagcccctctggggaccatttcctgctgaagtggagtgtgccccttggggatgcccaggtctctctgctttcacaaaaggacatacagtttgaggtggcttataagcagcttcaggactcctgggaggatgcctccagcctccacacttgcaacctctgggtcactctcgagccaaagctcttcctacccaacagtatctatgtggcccgcgtgcgcgctcagctagccccaggttcgagcttgtccggaagacccagcggatggagcccagaggtacactgggactctccgacagaggacaaggctcggccacagaaccttcagtgcttctttgatgggatccagtccctcaactgctcctgggaggtgtggaccaaggtgactgactctgtttcctttgggctcttctatagctccagtcccaaagctggggagaagaaatgctctccagtggtgaaggagctgcaggccagccgctacacccggtaccactgcagcctaaatgtgtccgaccccgctgcacacagccagtacaccgtctctgttaagcggctggaacaagggaagttcatcgagagctttaaccacatccagatgaatcctccaaccctcaacctgaccaagaacagagacagctacagcctgcattgggagactcagaaaatgtcctatccattcatccagcatgcattccaggtccagtacaagaagaaactggaccgctgggaggacagcaagacagagaacctaaatcatgcccacagcatggacctgccacagctggagcctggcacctcatactgcgccagggtgagggtcaagaccatccctgaatacaaagggctctggagcgagtggagcaatgagtgcacctggacgactgactgggtgatgccaacattgtggatagtcctcatcctggtcttcctcatcctcaccttcctcctggccctccgctttggctgcatctatgggtgcaagttgtacagaagatggaaggagaaaatccccaaccccagcaagagcctccttttccaggatggaggtaaaggactctggcctcctggcagcacggtgaccttctccagtaagaaccccactccccaggggccacagaacaaccttttctctgagctacagggggtgtcatatacacatctggaggacaacgaagtgtcacctctcaccatagaggaccccaacattattcgagatccatcatctggccctgatacaaccccagctgcctcatctgaacccatggagcagtcttccaatgttcaagtagacccaccaactctttctggcagacccaggaagcaattacccagctttgacttcaatggcccgtacctggggcctccccaatcccactccctgcccgatctcccaggccagctggtttccccccagggggttggaagcctgaagccagcactgccaggctccttggagtacatgtgtctgccccctggagggcaagtgcaactggtcccactgtcccaggtgatggggcagggccgggatgtggatgtgcagtgtgggtccagcctggagaccacagagagcccttccatggaatcaagggagagccctccagttgagctgaaggaggaggaacaggagccaagggacaacccagtgactctccccataagctctggaggccccaaagacagtaaggtggcctctgagtatgtcacacctgcagatctggtgctcactctgcccacagagcccttgtctacctctctgggtccctctctagaggtctcctcagcccaaagccccagtctctgtctcaagctgcccagggtcccttctgaaagtccagctcttgcaccagcagtgtttgaagattacgtggagctgcctccaagcatgagccagcctgccaagtcccttccaggcaatcctgctcctcctgggccaagcagccccgcagtgagcccaggagagcccagggaggaagtaggcgcagcccccacacaccctgaaggcctccttgttcttcagcaggttggggactactgcttcctccctggcctgggacccagccccctctcaccacccagtaagccaccctctccgggcctgtgtctcgagactgaggacctagacaaggacttgtctgtcaaaaagcttccctaccaacccataccccaggtgccagccattcagtttttcaagtccctaaagcatcaggactacctgtcactgcccccttgggacaatagccagcctgggaaggtgtgctgagtctcccccctcccaatctcaccagcagccctgcgcctcagcctgtggacct

SEQ ID NO: 3126 - DNA, 956 bp, Rattus norvegicus
aagctttacagttactgagcacacaggacctcaccatgggatggagctgtatcatcctcttcttggtagcaacagctacaggtgtccactccgacatccagatgacccagagcccaagcagcctgagcgccagcgtgggtgacagagtgaccatcacctgtaaagcaagtcagaatattgacaaatacttaaactggtaccagcagaagccaggtaaggctccaaagctgctgatctacaatacaaacaatttgcaaacgggtgtgccaagcagattcagcggtagcggtagcggtaccgacttcaccttcaccatcagcagcctccagccagaggacatcgccacctactactgcttgcagcatataagtaggccgcgcacgttcggccaagggaccaaggtggaaatcaaacgtactgtggctgcaccatctgtcttcatcttcccgccatctgatgagcagttgaaatctggaactgcctctgttgtgtgcctgctgaataacttctatcccagagaggccaaagtacagyrsraggtggataacgccctccaatcgggtaactcccaggagagtgtcacagagcaggacagcaaggacagcacctacagyctcagcagcaccctgacgctgagcaaagcagactacgagaaacacaaagtstacgcctgcgaagtcacccatcagggcctgagctcgcccgtcacaaagagcttcaacaggggagagtgttagargswkaagtgcccccachtgctcytcagtwmcagcctgaccccytcccatcctttggcctctgaccmtttttccacaggggacmtacccmtattgcggtcckccagvtsatctttcasctcacccccctcctcmtcmktggctttaattatgctaatgttsgaggagaatgaataaataaagtgaatctttgcacctgtgmaaaaaaaaaaaaaaaaa

SEQ ID NO: 3127 - DNA, 772 bp, Rattus norvegicus
cacgagggtggccggctactaaggaactctcgacacttctactggagaagcaaagaractaacatggagcaggggaarggtttggctggcctcttcctggtgatctctcttcttcaaggcaccatggcccagcaaaaasaagaaaagcatttggtaaaagtggatgacagccaaggagatggctctgtacttctgacttgtgacttsaatgagaagacwatcacatggcttaaagatgggcacagaataagtcctccaaatgcaactaaaagcacgtggaatctgggcaacggtgccaaagaccctcgaggcatgtatcagtgccgaggagcaaagaagaagtcgcagctcctgcaagtgtactacagactgtgtgagaactgcattgagctaaatatgggcactgtgtccggctttatcttcgctgaaatcatcagcattttcttccttgctgttggtgtatacttcattgctggacaggatggagttcgccagtcaagagcttcagacaagcagactctgttgcaaaatgaacaggtctaccagcccctcaaggaccgggaatatgaacagtacagccgtctccaaggaaaccaagtgagaaagaagtgaactcagcaggaattcgagaatttcctttgtgatgaaggactgtcttgcctattacatcatcaaccttggctatgatctacctgatggcactggtacccaccctcactcagtgtgataagtaataaaccatccctatttgamwraraaaaaaaaaaaaaaa

SEQ ID NO: 3128 - DNA, 706 bp, Rattus norvegicus
tgtcgtgaggtgcggttcccaggcgctagggctcgagcgtttccccggacgctcaccacagctgctgggtccccagagaggaggagcggctcagagacgaggctgtaacaatctcaaggccggcggaggaccatttctgccacggaccggggacaagggcatgttgggcggcggcagtgacgcgggcctggccaccgccgcggcgcggggacaggtggagacggtgcggcagctcctggaagccggcgcagatcccaacgccgtcaaccgcttcgggaggcgcccgatccaggtcatgatgatgggcagcgcccaggtggcagagctgttgctcctccacggagcagaacccaactgcgccgatcctgccaccctcaccagacctgtgcatgatgcagctcgrgarggcttcctggacacrctaatggtgctgcacaaggcaggggcacggctggatgtgtgtgacgcctggggccgcctgccggtagacttagctgaagagcagggccaccgtgatattgcgaggtatctgcacgctgccactggagattgattgcaggtcctcagcctcctgcaaggaccattttttttttctccccagccctatctaggaagactgtaaacgtggagaggatcagcagcgcacagcctgctggccttccagaacccacctaccaggaaggcaagcaatcagaatacttctagt

SEQ ID NO: 3129 - DNA, 1769 bp, Rattus norvegicus
caatgttaaagtatatcaaaatgttgaccctgaacaagccagtccttcccaccctctcccacagcgcctcagccagtgacagctacttcccgcagcaagcagaaatgccataggctctcccggacaggtgctccccaagaaatccagacactagctggtggctcacagccccatccmtmkctctcycgtkwcwkktscgwcccycwsmkwmwwtccrkcagacactagctggccctcatgtcagtcatacccagctccaggccggtctccaccttggcacctgacaatgattttagagagatccacaactggacagagctgctccatctcttcaaccaaaccttttctgattgccrcatggaactcaatgagaacaccaaacaagtggtcctctttgtcttctacctggccatctttgtggtagggttagtggagaacgtcctggtgatatgtgtcaactgccgccgctcaggccgggtggggatgctgaacttatacatcctcaacatggccgtcgcggacctgggcatcatcctgtctctgcctgtktggatgctggaggtcatgctggagtacacctggctctggggcagcttctcctgtcgcttcattcattatttctaccttgccaacatgtacagcagcatcttcttcctcacctgcctcagcattgaccgctacgtcaccctcaccaatacctctccctcctggcagcgccaccagcaccgaatacggagggccgtgtgcgcaggcgtctgggtcctctccgccatcatcccactgcctgaggtggtacatatccagctgctggatggctccgagcccatgtgcctcttcctagcaccttttgaaacgtacagcgcctgggccctggcagtggccctgtcggctaccatcctgggcttcctactgccttttcctctcatcgcagtgtttaatatcctgtcagcctgccggcttcggaggcaagggcagacagagagcaggcgccactgtctgttgatgtgggcttacatagytgtctttgycatctgctggctgccctaccacgtgactatgctgctgctcactctgcacacaacccacatcttccttcactgcaacctggttaacttcctctacttcttctacgaaatcaytgactgcttctccatgctacactgtgtcgccaaccccatcctctacaactttctcagcccgagcttccggggccgactgctgagccttgtggtccgttaccttcccaaggagcaggccagggcagcaggcggtcgagcctcctcttcatcttccacccagcactccatcatcattaccaaagagggcagcctgccgytgcagcgratytgcacacccacgccatcagaaacgtgcaggcctcctytytgcctccgaacacctcacytacactytgcaattccatagccagytaaggtrgattytagcttcttccmccaagaacaaagttgrgagggggatsccagaggtctktgggaggggktgggaaggactggcttkttcagggtcaatgttaagtatatcaaaatgttsctktagggagagggagaaggttcgggacgsacggagaatsrgtcktbcckwrdtvgtttamytawwwrwwwrrrwamwrwatgtctaagagggcacacaggtgggggtggggcagagaagcgaaataaataaatcatagagacagmaawwaaaaaaaaaaaaaaaaaaaawrraagcggccgcaagcttattccctttagtgagggttaattttagct

SEQ ID NO: 3130 - DNA, 1964 bp, Rattus norvegicus
gaattcggcacgagggttccgcttcccctccggcccgggccgtcgccattgscgamgrskcctgccytcccctccytggctcaaggggttctgcgcctcacagcctcggtagcgacggccgcgccccgcrmmgywcmwmkmmgyyactgccatcctccctctctsstcccctagcacagtgytcgcccgcgtctggccctggcaggccbtgggtcggggagacctttcctctctggcygtttcctaattctgaatcatgtctgataacggggagytagaggacaagcccccagcacctccagtgcggatgagcagcaccatttttagcactggaggaaaggatcctttatcagccaatcacagtttgaagcctttgccttctgttccagaggaaaaaaaaccgaggaacaaaatcatctccatattctcaagcacaraaaaarraarwaaaaaraaaraaaaaraacggccagagatttctccgccgtctgattttgagyataccatccatgttggctttgatgctgttacgggagagttcactggcatgccagagcagtgggcacggctgttgcagacctccaacattaccaaactggagcagaagaagaacccgcaggctgtgctggatgtcttgaagttctacgactccaacactgtgaagcagaagtacctgagcttcactcctcctgagaaagatggctttccttctggaacaccagcactgaacaccaaggggtcagagacatcagctgtggtgacagaggaagacgatgacgatgaagatgctgctcctcccgtcattgcccctcggccagatcatacaaaatcaatctacacaaggtctgtcatcgaccctattcctgctccagttggtgactctaatgtcgacagtggtgccaagtcttcagacaaacagaaaaagaaagccaagatgaccgatgaagagattatggagaaattaagaactattgtgagcataggtgaccctaagaaaaaatacacaagatatgaaaaaatcgggcaaggggcttctggtacagtttttactgcaactgatgtggccctggggcaagaggttgctatcaagcagattaatttacagaaacaaccaaagaaggaattgatcattaatgaaattctggtgatgaaggagttaaagaatcccaacatagttaacttcttggacagttacctggtaggagacgagttgtttgtggtaatggagtaccttgctggtgggtccctcactgatgtcgtgacagaaacctgcatggatgaagcgcagatcgcagctgtgtgcagagagtgtttacaggcgttggagtttttacatgctaatcaagtgatccacagagacatcaaaagtgacaatgtgcttttgggaatggaaggctcagttaaactcactgattttggcttctgtgcccagatcacccctgaacagagcaaacgcagtacwatggttggaacgccatactggatggcaccggaggtagtcacgcggraagcctatggccccaaagttgacatatggtctctgggcatcatggctatcgaaatggtggaaggagagcctccatacctcaatgaaaatcctttacgggcattatacctgatagcaacgaatggaacacctgagctccagaatccagaaaaactttcccccatatttcgggatttcttaaatcggtgtttggaaatggatgtggagaagaggggttcagccaaagaactattacagcatcctttcctgaaactggccaaaccattatccagcttgacscctctgatcctggcagctaaagaagcaatgaagagtaaccgctaacgtcgtcagcgaggcctcatgttcctttatccattttctaaagaagtcttttaatacatgaaattgttactctgaggggtgtaaagagacagtttgcatcacatggagaaaagcaagcaaacttattattttc

SEQ ID NO: 3131 - DNA, 1935 bp, Rattus norvegicus
atgtgactggtgagcctcctagagwwcctcctccctgatagaatatgcgtgatccgagtcctcactcgcctgggagcctggaggtcgtcggagctgtgcgaggagcgcgtacccatacgcactggggcgcggggtgcaagaaagccacgcgggtcagcgtgtaagcaagcgccccttgtccctcctctgactcatcaggttagggaaacgctcctctgagcccccaagccaacccctaccccagttcccatctccttccaggagagcgggacccgcaaggggcgcgcacatcagacagcaaagcaacgagtcggcccacagtcgccttgttgggactctttggtacgaactctggcccttggtgctgtgcttagccactasgaggggcaggaccctgcttttggttgcgcaccaactccccctcagcatctccgtggggcggtgctgagccaggagctggctgagcccgggcacagcgccaccccgctgtctccagcagaacccggcgccaggggggttccgtcgctgtgcgctgtttccccagcaggttcctaagacgacctgcctttaaggagcgtttccctgggcgcgcctssctcccggcgccgttagccgggagcgtgcggtgggcaagggagggagaagccggtgcgatcgtagatccccgggagacctggccgtctctttcagtatcagacagcggagaagccgtcgcgggagccacttatcggggtctcgctggctctggtgcgccttcctacttgcctgatcggagtgcgagccagcaggcatggggtgtttgggcaacagcagcaagaccgcggaagatcagggcgtggatgaaaaggaacgccgggaggccaacaaaaagatcgagaagcagttgcagaaagagcgcctggcttacaaagcgacccaccgcctgctgcttctgggggctggtgagtccgggaaaagcactatagtcaaacagatgaggatcctacacgtcaatggctccaaccccgaggaaaagaagcagaaaattctggacatcaggaaaaatgtcaaagatgctattgtgacaatcgtttcagcaatgagtaccataatacctccagttccactggccaaccctgagaaccagtttcggtcagattacatcaagagcatagcccctatcactgactttgaatattcccaggagttctttgaccacgtgaagaagctgtgggatgatgaaggagtgaaggcctgctttgagagatccaacgagtaccagctgatcgactgtgcacaatacttcctggaaaggattgacagcgtgagtctggttgactacacacccacagaccaggacctactcagatgcagagtgctgacatcagggatctttgagacacgattccaagtggacaaagtgaactttcacatgtttgacgttggaggccagagggatgagagaagaaaatggatccagtgttttaacgatgtcactgccatcatctatgtggcagcctgcagcagctacaacatggtgatccgggaagataacaacaccaacagactccgggagtcgctggacctgtttgaaagcatctggaataacaggtggttacgaaccatttccatcatcctgttcttgaacaaacaagatatgctggcagaaaaagtcttggccgggaagtcaaaaattgaagactatttcccggagtatgccaactatactgtccctgaagatgcaacaccagatgcaggagaagatcccaaagttacaagagccaagttctttatccgggatctgttcttgaggatcagcacagccacgggtgatggcaaacattactgctaccctcacttcacctgcgccgtggacacagagaacatccgcagagtgttcaacgattgtcgtgacatcatccagagaatgcacctcaagcagtacgaactcttgtg

SEQ ID NO: 3132 - DNA, 395 bp, Rattus norvegicus
agacatcaggaagccaaagtcccagtggccatcagggtcctggatgtcaatgacaatgctcctaagtttgctgccccttatgaaggctttatctgtgagagtgatcaccccaaaccactctccaaccagccaatagttacagttagtgcagataacctggatgacacagtcaatggaccaagatttatcttcagtctaccccctgaaatcattcacaacccaaatttcacagtaagagacaacagagataacactgcaggagtatatgcccgacgtggagggttcagtcggcagaagcaggacctctacctcctgcccattgtgattagcgatggtggcatcccacctatgagtagcaccaataccctcactataaaagtctgtgcatgcgactc

SEQ ID NO: 3133 - DNA, 251 bp, Rattus norvegicus
tccacggctacggacagcagctactacaccaaccagcagcacccggcgggtggcggcggcgggggggcctcgccctacgcgcacatgggctcctaccagtaccacgccagcggcctcaacaacgtctcctactccgccaaaagcagctacgacctgggctacaccgccgcgtacacttcctacgcgccctacggaaccagttcgtccccagtcaacaacgagcccgacaaggaagaccttgagcctgaaat

SEQ ID NO: 3134 - DNA, 2584 bp, Rattus norvegicus
tggtgctggcgtttccctgcttgcacgcggttccctcgagcgccgctccgaccgacgtagccggccgcgaaggcgcccagacggcaagccagcgacccatgctgaagtgagcgcccaggtcagcgagatgctggcgctgctgaccgccggcgtggcgctcgccgtggccgcgggacaagcccaggataacccgatacctggcagtcgcttcgtgtgcaccgcgctgccccccgaagcggcgcgcgccggctgcccgctgcccgcgatgcccatgcagggaggcgcgctgagccctgaggaggagctgcgagccgctgtgctgcactggcgcgagaccgtcgtgcagcagaaggagacgctgggcgctcagcgagaagccatccgagaactcaccagcaagctggcccgctgtgagggactagccggcggtaaggcgcgcggcacgggggccacgggcaaggacaccatgggcgacctgccgcgggacccgggccacgtcgtggagcagcttagccgctcgctgcagaccctcaaggaccgcttggagagcctcgagctccaactccacaccaacgcgtctaatgccgggctgccgagcgacttccgagaggtgctccagcggaggctgggggagctggagaggcagttgctacgcaaggtggccgagctggaagacgagaagtccctgctccacaatgagacctcggctcaccggcagaagacagagaacacactgaatgcactgctgcagagggtgactgagctggagagaggcaacagtgcattcaagtcaccagatgcattcaaagtgtccctccctctccgtacaaactacctatacggcaagatcaagaagacgttgcccgagctgtatgccttcaccatctgcctgtggctgcggtccagcgcctcgccaggcatcggcacgccattctcctacgctgtgcctgggcaagccaatgagattgtgctgatagagtggggtaacaatcccatagagctgcttatcaacgacaaggtcgcacagctgcccctgtttgtcagcgatggcaagtggcaccatatctgcatcacctggaccactcgagacggcatgtgggaagcattccaggacggggagaagctgggcaccggggagaacctggcaccctggcatcccatcaagccagggggtgtgctcatcctggggcaggagcaggacactgtgggaggcagatttgatgccacacaggccttcgttggagagcttagccagttcaacatatgggaccgtgtcctccgggcacaagagatcatcaacatcgccaactgctccacgaacatgcctggaaacatcatcccatgggtggacaacaatgtcgatgtgtttggaggggcttccaagtggcctgtggagacgtgcgaagagcgtctcctggacttgtagctaccttctccctgtcccagaggccaagagcgggctgttctggggagttcaaggcatctattcccgagttcaactaaaatctctggcctgagtaggaaagaaccagagcccctaaggcaggctgtgtggcctcctttgtcttaggctcctatgttcttactgctttgttctttggtgggaagtgaccgaagccctgggaagagtcctgagccacttcctgctggggtttctagtaaagtctgtgagcctctccacccctcctgtaaatgctagtgcaacccagccctgcctgtcattttggatccttagtgtctcgtgtgtgcttcccgtctgtcccctttgatggctgtgtggtcatcctaccggggtggcctgggtcccttgtgtgtgtagcacatccctgcttttgactgaacacagtgcacagaagctacccgcccctgaaacagggtctctccctcagtgtcatgtgcactctggtctctccctctgaggggactgcagctgctggagggccacgtgcccagacagtccccagcatccccaaagcagaccctccgccatggagaaagtcccccacagcttccccaccctctgtccacctctcagaccccacgcttctaaggaccattgctgggttggctttsaaaagctgctgctctcatctggtgccaaaagttcatttgcagcttctacaccgttytgtgtggtttggggattgactttattcccccacaaaagaggwamagycwktagaagccmkccwcccctccttttgrtgytswkmcmamtbtgargmrygagcttgcttgtaagccacattggtttctgtgagcatctgactytcccccgtccagtattttccccggaactggagattcgagtgccattcggctgctacctgcttagtgamtscaggctgcrtcatgtwtcataatttatwttaaagacaaagtgattcagtggggaaatttataaagctataaatattatataytytatttttcatacatgtttaaagtgcsgatccatggatgttccatttgtaggrccagcttgacgtgcccatyctgacawtgtatsccrcaagagctmwtktgatgatggartwttgattaaagtkcamtggaagatgmwwwraaaaaaaaaaaaaaaaaa

SEQ ID NO: 3135 - DNA, 1478 bp, Rattus norvegicus
tctgtttgcctaactcccccgccctgttggcatcccctttcctctctccccgttattattatttttagtgtctgcgttgtagacgctttttgagaattggaagskwtttttttttttctttctgatttaagcttagcgtgtttgtytgtttggtwtggytkttaaacttkwtktggtgtggattatctctctggaccacgccggacttggcttcagcgaassaaccgaagctgggagaaagttacytgwgctgaaagttctgcacttcagaagggggtttctctctctctctctctctctctctctctctctctctctcctccactcccccctctttcttccccactcggctcctctcccccctcacgcccacagcgtttggtgttgattcgagcgkkaagaggggggtgggtgggattggagggaagaccatgacctccagctacgggcacgttctggagcggcaaccggctctgggcggccgcttggatagccctggcaacctcgacrmmmwgsaggcgaaaaagaacttctccgtcagtcacctgctagacctggaggaggccggggacatggtggcggcacaggcggacgaaagcgtgggcgaggcgggccggagcctgctggagtcaccgggactgaccagtggcagcgacacccctcagcakgacaatgatcagctgaactctgaggagaagaagaagagaaagcaacggagaaacaggacaaccttcaatagcagccagctgcaggccttggagcgtgtcttcgagaggacccattacccggatgcttttgtacgggaagatcttgcacgtcgggtgaacctcacggaggccagagtgcaggtgtggtttcagaaccgaagagccaagttccgcagrawtgagcgagccatgctggccaataaaaacgcttctctcctcaagtcctactcaggagacgtgactgccgtggaacaacccattgtacctcgtcctgctcccagacccaccgattatctctcctgggggacagcctctccgtacagcgccatggmtacttattmtgccacatgtgccaacaatagccstgcgcagggtatcaacatggccaacagcattgccaacctgagaytgaaggccaaggaatatagtttacagaggaaccaggtgccaacagtcaaytgaggaaaaaaataattaaacaggcctaagaagaaatcaaaarccataagacacstatcctgytctgtcatttcytcrtscgctggaaaaaaaagataaaagcaaacaaacaaagccagaactaaaatattgggaccatggcggagaaaagcaggagaggaacaaaatgaaaattagttaacaaatgtttcttcttcctcttggataccatcaccatttgttgtgtgtgtattttttttccttctacccatgctttgctaagtatacttcaggcttcttctattaggctcaacccacccattcctataattg

SEQ ID NO: 3136 - DNA, 1378 bp, Rattus norvegicus
  misc_feature (335)..(335): n is a, c, g, or t
  misc_feature (856)..(856): n is a, c, g, or t
tttttttttttttttttagcacaaacgcatttatttactaaccaaaggaatgatcctgggtaaaccaacggtctgacatgggtttcgggtaaagtgtctatgatgaaaagtcatgaaaaataaaaccaaagaagtgaagcagtgtggttctgtacgacctgctcattgaattgagcttawwssmwcmkcgsccscgscasmgmgtmtccttgctgcttttktgctctccckytcgccatggscwgcsktaargwcctggaagggwagtggygtctgrtggaawgccacggrtktgaggactacatgwaggwactwggagtwgggytggcwcwbrngaagatgggwkccatgsccaaaccagactgcatcattwccctmgwcrvcamsarsskcaccgdsdmdwbksagagsacrgtgawgacgaccgtkttttcttscaccttgrgagagamgwkkgatgaaaccacagctgatggcaggrrmactgwgrcggtytgcamyttcamwgacggtgccytgghcmagsmccrgaagtgsgwwgggdawraaagcacgdtwacgagaaaactgawdgacgggawgatggtvgksgwgtgcgtcatgaacaatgscatctgtaskcgggtctatgagaargtacaatgaggactgkctwactcgtcatcytggacarsagtcavctggctgarggwatawgctcamttcawtgwgcakgtcgbacagaaccacactgbttcactyyktkkgkybtadwwwtcawgmmttytsatyatagacactttacccgwaacccatgtcagaccgttggtttayccaggatcattcmwwtgrwtagtaaataaatgcgtytgtgbtnawwmhwvmaaaaaaawaaaaaaaaarhmhwhrmrrmmrmaarmwwakkssskytmgtgccgaattcggcacgagggacagacagctacgagcckmssataatggcacactccaaatggcgctcctgatccaataaaagatgaattgccttttgcaatccagtgcactgatgtctggggcgagaactccacaagaaacccaaaggtgctaggggtgcacggtgctccacacagcccacagcccgyttcatcctgtcaccccagacgtgagcrccgcctgacccactgtccagggtttgccacctcaggtccctcgatgggctgtgcagatagcaawcaaggaaactggtttctkccaccctstacacrgaattccatctttccgggccccaaaacacaaacttacgccctgtgtggcamtacgtagytgcttccgtggaagtcatggctttctgtggaataaagatggtccaaaggtagacggaaaataagtaggtaaataagtgtaaaaaaaaaaaaaaaaa

SEQ ID NO: 3137 - DNA, 2367 bp, Rattus norvegicus
agcagctctgtaagaagggaatgtcggcttttacataacgttcctctctgcttttgacacactgtgtgagggtccatcttctgatcacagatggagtggaatggcttgaagatgataattagcaccatggagcctcaggtgtcaaatggaccgacatccaatacaagcaatggaccctccagcaacaacagaaactgtccttctcccatgcagacaggcgccgccacagacgacagcaaaaccaacctcatcgtcaactatttaccccagaatatgacccaagaggaattcaggagtctctttgggagcattggtgaaatcgaatcctgcaaactcgtgagagacaaaattacaggacagagtttagggtatggatttgttaactatattgatccaaaggatgcagagaaagccatcaacactttaaatggactcagactccagaccaaaaccataaaggtgtcgtacgcccgtccgagctcggcctcaatcagggatgctaacctgtacgttagtggccttcccaagaccatgacccagaaggagctggagcagcttttctctcagtacggtcgcatcatcacctcacgcatcctggttgatcaagtcacaggagtctctagaggggtgggattcatccgctttgataagaggattgaggcagaagaagccatcaaagggctgaatggccagaagcccagcggtgctacagarccgattactgtgaagtttgccaacaaccccakccagaagtycagccaggccctgctctcccagctgyaccartsccccaacaggcgataccctggccctctmcaccaccaggctcaaagattcakgctggacaatttgcttaatatggcctatggcgtaaagagactgatgtctggaccagtccccccttctgmttgtccccccaggktctccccaatcaccattgacgggatgacaagtcttgtgggaatgaacatcvctggtcacacagggacaggmtggtgcatcttygtctataacctgtcccctgattmtgatgagaktgtcctctggcagstctbtggcccytttggcgcagtgaacaacgtcaaggtcatyygtgacttcaacaccaacaaatgcaagggattcggytttgtsaccatgaccaactacgatgaggcagycatgsccatcgccagcctcaatggttaccgcytgggwgacwkwktkttkywwktttcctttaaaaccaacaaagcccacaagtcstgaatttctcacccttacttattaaaaaatatwtataaatatatacgaacaaaacatgcgygcacacacatacacaaaagagagagacaaactttccaaggcttatattcaaccatggactttataagcccgcgttgcctaagtattaaaacattggattatcctgaggtktaccaggaaaggattttwtaatgmwwagaaaaaaaraaaaaaaamammaaamaaaatacctttkatgcattgaatgttctttcatagctgwcgytgttgaatataatatacatagatagcaatgtgcagggatttttacccagccagctaactttactaccttccttgaaggtgggtctyytyrwgmygaccattcgctcatttgaagaagaaaaacamamaamamaaaaaaataacaatttttacaaagtaatggaattcaraggaagaaaaaaaagatttttcttttttgccaaaatgttgatccaatcagattggytaaaaacacccccacacaaattaaagaggaataataaamawtgcaaaaattaaaaaaaaacttttgcaaatttttttatttttccttytttctttyatatcatgtgaactaaaacagtcttctgytaggggacggsgaaagggggtacctgatgacattaacaatttaatamcattaacattgytgccaamgaggtggtctctttgctgaaaatgggtttyamgaaaaatctatttttatmaaatatamagaayttttacamgagaayctggatttgagaaaaaatattttgactgsctaatttagggsaaaytgacamctttgycgcgytcatactgcactkgkaactytttagagatcaagatgtgygytttamactggrttcgtagactgttttttgaaggatgggctatwaacagatgaycttcatatcwtttcatagcatgtaataatwatwaaamatmttwattggctaggggaaaggartgttcgttctamccagggtaccaccagttccccacagtcaaaaccyaaaagcamggagatkmsttgaaagacagwktttctttaagycatcartatgggatgtcascagaacaawaattaaaaagattcattttccttttaatttc

SEQ ID NO: 3138 - DNA, 3578 bp, Rattus norvegicus
gaattccgtttaatgagcaaattcgtattagcaaatatgaaactgccacagagaggaggagcaggactgagaccacgggttgagggtcaggaagactaagaagaaccaactacttaagaaaccagggtggagaacagggaggaccaaagccagaggacgggagctgtggtcctgcaaaggagaaggcagggcactgagggcagacaacaaaattcaaaatagtttggccataaaatataaacacgctatgttcctaccatggggtaagagaggaggaaaggggtgtaagggkyamgaggctgtytgsksaatggcggaaaagccgctggtactctgaccgcctggtmmmmmmtggcagttgcgggggagtttcctgccggcgcggctggagtctctgtttctctgtgtccggtggctggaagatgctccagagagatcaggctgcggcggaggaggtggcggcggccgagtcggcagcggcgctgggttggagagaaggcggcggcggcggcgtgaggggccggacggtgtaaacagctcgggcggcggcggtggccgagcccccgagggcgaagcggcggcggaggcggtgtcgcgtctcgggagaaagccgggggccgcgggcggctgtgcggcgggcaagcccgcgagaccttgccttccaccttcgccccagattcgttactaaacatgggtgcatttttggataaacccaaaactgaaaagcacaatgctcacggtgcagggaacggtctgcgttacggtctgagcagtatgcaaggatggagagtagaaatggaagacgcacacactgctgttgtgggaattcctcacggcttggaggactggtcgttttttgcagtctatgatggtcatgctggatcccgagtggcaaattactgttcaacacatctattagaacacatcactaccaatgaagactttagggcagctgacaaatcaggctttgctcttgagccgtcagtggaaaatgttaagactggtatccgaactggctttttgaaaattgatgaatatatgcgtaacttttcagacctgaggaacgggatggacaggagcggctctaccgcagtgggcgtgatgatttcaccgacacacatctactttatcaactgcggtgactcgagagctgttctatgtaggaatggacaagtctgcttttctacccaggatcmcaaaccttgtaatccaatggaaaaggagcgcatccaaaatgcaggaggcagtgtaatgatacagcgtgtgaatgggtcgttagcagtgtctcgtgctctgggggactatgattacaagtgtgttgatggcaagggccccacagagcagcttgtttctccagagcctgaggtttatgagattctaagagcagaagaggatgaatttgtcgtcctggcttgtgatgggatctgggatgtgatgagcaatgaggagctctgtgagtttgttaactctaggcttgaggtgtcagacgacctggagaatgtgtgcaattgggtagtggacacttgtttacataagggaagtcgagataacatgagtattgtgttagtttgctttgcaaatgcccccaaggtctcagatgaagccgtgaaaagagatttagagttggacaagcacttggaatcacgggtggaagaaatcatgcagaagtctggagaggaaggaatgcctgatcttgcccatgtgatgcgcattttgtctgcagaaaatatcccaaatttacctcccgggggaggcctcgctggcaagcgcaatgttattgaagctgtttatagtagacttaatccaaacaaagacaatgatgggggcgctggcgatctagaagactcattggtagccttataaccttctaaatgcttttgattctgaaaattgggggaaaacttttaatcatattttcttcaatacaaggggaactattcttgtgaattcccactgttttgtggtatgagcagaagccattagcatttcccaccatttgctcatgtttgtacttcccagtaatcgccactcttagcactgcctggactcaacagtattctcgccagcctcaggcctctgcttacaactgtattgaatttttggccctagaaaaacaaaatgaccctacaaatcaacaagtgtgcctgaggtgcatgggaatatagttagctatactctgaagatacgttaagggtttgtttgtttgkttgttttttaaaagcaaaacaaaacaacaacatakaagcatgtaagagtaaaggattgcaagagaagttcagtttttcagtttactaagttggaagcctttcgttagttctgtggcttggaatttcatttgagcaatatactataggatatgtatttattattaattgttatttaatttttttccaatktacttgtattaccaaattgggttctccaataatgtaacattgccttgcttcaagatccattgtttggcaataatataaacccttaaagatttccgcatgtgtctgctacatcgttcagatctyackagragatcttttgaaaccaagtgagttaatttaaggctatttataatttgctttgtcatcttactggcttcgcattattttaattgatgagatttacctttataatgtaaattgtaatcttcttgttttacatgtggatttctatagttttaattttttcagcttttaagatacaagttttatgtmawttggtawaatttttaactgtttatgttattttaaaagctcagaatatcacatcaaaatactataaatacattttaaagtatctattttagatctaaggaaatacagagatattttcatgggttcagtaacctttcattttataacattgggcacggtacagagtggctgtcacatcggtacytaaattatttagttcyatttttacaataacyttaaattttttaagttttgcaygtattgaatttartgctgaacatgaagagtaaactatttaccaaaaagaagttcctggagtttggagaagtaacgaatgtatccatctgkacatgatttacatgttgtggatgctttgtaaacatttccccatgttttaattgtgtttcagcaggttgtaattgcctctgtgtgtagctgaacatgagtcattatctggtcctgtatgaaatggaatgtatggtattttctgtatcattttcctgaggctgtgtttggggagccacacattcgaatacagttttcctgatcamwwrawwwmwwrwrmacctgatttttgctctcaaaggaattactgccacaatatattttatttattctttagattttagccttgtcagttgaagtgcttcacatgatggtgttaaaaaytacttgtccmtttaytgggggtttgggggttgttaaaagatggggaggaagaatgcaaatgggtcattgttaacctgtccccactgatcccacctgtaytcatagtccctyccaggatggtatkctgatgtttcctacaatacggtgaccataggcaacwtgttacmtgaataaaggatcgattttaaacarmmwramawarwactttttggtgtgattttc

SEQ ID NO: 3139 - DNA, 2760 bp, Rattus norvegicus
cgacccaaggacacctcggcctctgcagttgggggctggctctgaggacagaaagccttttgagacagccgcctcccacctgatgggcatgcaaagcgcagccaggcactgtccccaaggtcacctcaggggttgatagaggtgtccctcccaagcactctggctcgaatgcatataagcaggaccacccagaccctgccatgccaccatgcaggggccacacctctctctgctgctgctgctgctagcgactatgggggctgtgttacaggctgacacagttgaagaactgaccaataccaggggcctcatcttccttgaagatggggtctggcctcccagcagtccccctgagcctttgtgcctggtggcggtgagaggggaaggggacacaagcaaggcttccctgacggtggtggggggcctgcacagctatgagcatgccttcctggaggctgtccaagagtctcgctggggacctcaagacctagccaccttcggagtctgcagtactgactcccagactaccctgcctgcccttcagcgcctcggggcctggctcggagagactggggaacagcagttgctagtcctacatctggctgaaggtacgtgaaggacaacatctcaacacccttgttgccttgggactaacggaggctcctcccaaggtttgggcgggacctgtggagtgtggggggaaatccctaacttggttgccaaacagaaccttgtgggacacaccttgtgggagccgtagtctgcaagatggcagaacatcccatggtcacaccttcccagacagaagagctgtcacgtccctatctataagcaaggtcttcatacatgaccccagaagatccccggttagagtctgactgagggacttgagggacagatgctaatggcctcagagactcagctgtcaccaatatttgcagtgatatgggagcctcagctcttgctgaagttccaagagcctccacctgggggagccagccgctgggagcaagccctgttagtgctataccctggacctgggccccaggtcacagtcacaggagctggactgcagggcacacaggtaccagagactggcgtgggtcctctggttgggggttgggggagaagttgtgccagatgggaggattcctgggtgaggagtacaccttggagtctattcccagtctggcagggggtggtgcctgaccacttccccagtccagtccagtgagttcctgtatccacagagcctctgccctactcgggacacccgctatttggtgctgactgtgcactttccagcgggggcctggagcggctcggggctcgccctaacccttcaaccaagcaaagaaggtaggtcctggcagagaggaggggacagtgtggaaggaggctgcccttagcccttgccctcagccagcacgcgcccaccctctacaggtgccaccctgaccatcgctcagctgcaggcctttctgtttggctctgattcccgctgtttcacgcggatgactcccaccctagtgctgctgccacccaccgggccgacaccgcagccagcacatggccagctggacaccgtgcctttcccgcagcctgggtgcgcgcaaggacggaggaggaaatggggaggtgggaatgggtagagggtccaccacagcctcttgtgctcacagctggcccacttcgttctattccaggctgtccctggagcctgaggacctgccacacagtgctgaccccttcctagagaccctcactcgcttggttcgtgctctgcggggacctctgacccgggcctcgaacactcgtctggccctggaccctggtgcgctggccagcttcccacagggcctggtcaacctttcagaccccgtggcgctgggacgtctgctcgatggggaggaacccctattactgctgctgtcacccgctgcggccactgtgggggaacctatgcggctgcacagccccacatctgctccctgggcagcaggcctggcacgcagggtagcggtagagctgcaggcagcggcctcggagctgcgggacctcccaggcctgccacccacagcccccccattgctgtcgcgcctactggcgctgtgccccaacgactcccgcagcgccggggacccgctgcgagcgctgctgctgctgaaggcactgcagggcctgcgtgcagagtggcgagggcgggaagggcgcgggagggcggggcgcagcaaggggacagggacagatgggctgtgcgcgctgcgcgagctgagcgtggaccttcgagcagagcgctcagtgctcatcccggagacctaccaagccaacaactgccaaggcgcctgtgcatggccacagtcggaccgtaacccacggtacgggaaccacgtggtgctgctgctaaaaatgcaggcacgcggggccgccctgggtcgcctgccctgctgtgtgcccactgcstacaccggcaagmtgctcatcagcctgtcggaggagcacatcagcgcgcaccacgtgcccaacatggtggctaccgaatgcggctgccggtgatgtccgccctaccccatccmccgtgtccccagtcagcgccccaataaagattagcaagcamwmarmwrrrrwrwmwgtgggcggagagaactcctgacaacctcccttagcgaatgcaaggcgtgagtccttcccatacacccggtactcccctatgggagagctttcggtccctaccgcttttctgtgtagccctggctgtct

SEQ ID NO: 3140 - DNA, 4703 bp, Rattus norvegicus
cagtgttaccctgacatgggactctggaaataccgagcctgtgtctttctacggcatccagtaccgtgcagctggcacagacggccccttccaggaagtggatggtgtggccagcacccgatacagcattggtggcctcagccctttttcagaatatgccttccgtgtgttggctgttaacagcattgggcgaggaccacccagtgaggcagtgcgagcgcgcacgggtgagcaggcaccctccagccctccacgccgtgtgcaggcccgaatgctgagcgccagcaccatgctggtacagtgggaaccccctgaagagcccaatggcctggtacggggatatcgagtctactacaccccagactctcgacgccccttgagcgcctggcacaagcataacaccgacgcaggactccttaccaccgtgggcagcctgctacctggcatcacctacagcctccgcgttctggcctttactgccgtgggcgacggccctcccagccccaccatccaagtcaagacacagcagggagtgcctgcacagcctgcagacttccaggccaaagccgagtcggacaccaggatccagctatcatggctgctgcccccgcaggagcggatcatcaagtatgagctggtgtactgggcagcagaggatgaaggccagcagcacaaggtgaccttcgaccccacctcctcctacactctggaggacctgaagcctgacacactgtaccacttccagctggctgctcgctcagatttgggggtgggcgtcttcactcccaccgtagaggcccgtacagcacagtccatgcctagcgggccaccacggaaggtggaggttgagcctctgaactccactgctgtgcatgtctcctggaagctgcccgtccccaacaagcagcacggacagattcgtggctaccaggtcacctatgtgcggctggagaatggggagccccgaggccagcccatcatccaggatgtcatgctggctgaggctcagtggagaccagaggagtccgaggactatgaaaccaccatcagcagcctcacccccgagaccacctactccattactgttgctgcctacaccactaagggggatggtgcccgaagcaagcccaaagtggttactaccacaggggcagtgtttgccaagaatttccgtgtggccgctgcaatgaagacatctgtgctgctcagttgggaggtccccgactcttacaagtcagctgtacccttcaagatcctgtacaatgggcagagcgtggaggtggatgggcactccatgcggaagctgattgcagacctgcaacccaacacagagtactccttcgtcctgatgaaccgcggcagcagcgctgggggcctacagcacctggtgtccatccgcactgccccagacctcctgcctcagaagccactgcctgcctctgcctttatagaggatggccgcttctccctctccatgcctcaagtgcaggacccctcgctagtcaggtggttctacattgtggtggtgcccattgaccgtgtgggcgggaacctgctggcaccaagatggagcacaccagaggagctggagctggacgagcttctggaggccatcgagcagggtgaggagaaacagcggaggcgtcggcgccaagcagagcggctgaagccttacgtggcagctcaagtggacgagctccctgagaccttcaccctgggggacaagaagaactaccgtggcttctacaaccggcccctgtctccggatctgagttaccagtgctttgtgctcgcctccctcaaggaacccatggaccagaagcgctatgcctccagcccctactcggacgagatcgtagtccaggtgacaccagcccagcagcaggaggagcccgagatgctgtgggtgacaggccctgtcctggcagtcattctcatcatactcattgtcatcgctatcctcctattcaagaggaagagaacacattccccatcgtcaaaggatgagcagtcaatcgggctgaaggactccctgttggcccactcttctgaccctgtggaaatgcgaaggcttaactaccagaccccaggttccagtgcccccagttgcccgaatatctcaagtatgcgagaccacccgcccatccccatcactgacctggcagacaatattgaacgtctcaaagccaatgatgggctcaagttctcccaggagtatgagtccattgaccctggacagcagttcacgtgggagaattccaactcagaggtgaacaagcccaagaaccgctatgcaaacgtcattgcctatgaccactctcgagtcctcctcacctccattgatggtgttcctgggagtgactacatcaatgccaactacattgatggctaccgaaagcagaatgcctacatcgccacacagggtccgctgcctgagaccatgggtgatttctggaggatggtgtgggaacagcgtacagccacagtggtcatgatgaccaggctagaggagaaatcccgggtgaagtgtgatcagtattggccagcccgtggcactgagacctatggcctcattcaggtgaccctggtggacactgtggagttggccacgtacaccatgcgcaccttcgcactccataagagcggctccagtgagaagcgtgagctgcgtcagttccagttcatggcctggccagaccatggggttcctgagtaccccactcccatcttggccttcctgagacgggtcaaggcctgtaacccgctagatgcaggacccatggtggtgcattgcagtgctggtgtgggccgcacgggctgcttcattgtcatcgacgcaatgctggagcgtatgaagcacgagaagacagttgacatctatggccacgtgacgtgcatgcgctcacaaaggaactacatggtgcagacagaggaccagtatgtgttcatccacgaggcactgttagaggctgccatgtgcggacacactgaggtgcttgctcgaaacctctatgcccacatccagaagctaggccaagtgcctcccggggagagtgtcactgccatggagcttgagttcaagttgctggccaactccaaggcccacacgtctcgcttcattagtgccaacctgccctgcaacaagttcaagaaccgcctggtgaacatcatgccctatgagctgactcgagtgtgcctgcaacccatccgtggtgtggagggctctgactacatcaatgccagctttctagatggcyacagrcagcagaaggcctacatagctacacaggggcctctggccgagagcaccgaggacttctggcgcatgttatgggagcacaattccaccatcatcgtcatgctgacgaagcttcgggagatgggcagggagaaatgtcaccagtactggccagcagagcgctctgctcgctatcaatactttgtcgttgacccgatggctgagtacaacatgccccagtatatcctgcgtgaattcaaagtcacagatgcccgggatgggcagtcaaggacaatccgacagttccagtttacagactggccagagcaaggagtacccaagacgggggaaggcttcatcgacttcatcgggcaggtgcacaagacaaaggagcagtttggacaggatgggcccatcacagtacactgcagtgctggtgtgggccgcacaggggtgtttatcaccctgagcattgtcctggagcgcatgcggtacgagggcgtggttgacatgttccagaccgtgaagaccctccgcacacagcgccctgcaatggtgcagacagaggaccaataccagctgtgctaccgtgcggccctggaatacctcggcagctttgatcactatgcaacgtaactactgctcccctctcctccgccgctcccctgaggggctccggaggggacccagctcctctgagccataccgaccatcgtccagccctcctgcacggatgctgttgccggcaragcacagcccactgggatcacagcatttcgggaacattgccacaccagtcagagagcycaraacacctgggcaagtaggcggactggcagcctggctctgggccctcgtccaccgggcccaagtggagccctgcttcaagctctctgttcagctccgcaattctcatgcttctcatggggtgggaaagggggcaragccccccacgttttatacatttaggcggggtaractgcggggtcctagcctcttcctccgactttccttttgcaggtctttcactacarattgggctgctgtgggagtwgggacttacttgttttcctttttgagttcacgttggatccttgtacaacttctgcggaaggacacagtacacgctttccttcctcgagcagagctagggccctacctgagcaagtcggctgtggcccgggaggcagctgagactcctgctgtcctccagcctttcagaggagatcctattccagccaaatgcagggaaacactttattttgttttaggttttgtttttccttgagagcctttttttaggccccacagacagtggtgggcggggaggcgataggaaacacatccccagtgtgcatttaacattcatagcctacaaccacagacgtgtctggggggagcctggcaaggcsttcctcgtcaccatcgtgtttgcaaaggttcaaaaaagcaaaaaaaaaaaaaa

SEQ ID NO: 3141 - DNA, 390 bp, Rattus norvegicus
gcacccacccgctcacccaaccctgtcacccggccctggaagcatgtagatgccatcaaagaagctctgagcctcctaaatgacatgcgtgctctggagaacgaaaagaacgaagacgtagacatcatctctaatgagttctccatccagaggccgacatgtgtgcagacccgcctgaagctatacaagcagggtctacggggcaacctcaccaaactcaatggcgccttgaccatgatagccagccactaccagacgaactgccctccaaccccggaaactgactgtgaaatagaagtcaccacctttgaggatttcataaagaaccttaaaggctttctgtttgatatcccttttgactgctggaagccggtccagaaatgaggaggc

SEQ ID NO: 3142 - DNA, 1753 bp, Rattus norvegicus
ggaaaggcagccggaggagggccacccaggcccacagcaccacccagcctgctctgctgaggctgtcagatcacctcctggctaactacaagaagggggtgcggcctgtgcgggactggaggaagcccaccctggtctccatcgatgtcatcatgtatgccatcctcaacgtggatgagaagaaccaggttctgacaacctacatatggtaccggcagttctggaccgacgagtttctacagtggactcctgaggacttcgacaatgtcaccaaattgtccatccccaccgacagcatctgggtccctgacatcctcatcaatgagtttgtggacgtggggaagtctccaagcattccttatgtgtatgtgcaccatcaaggtgaagtccagaactacaagcccctacagctggtgaccgcctgtagccttgacatctataacttcccgttcgatgtgcagaactgctctctgaccttcaccagctggctgcataccatccaggacatcaacatttccctgtggcgaacaccagaagaagtgaggtcggacaagagcatcttcataaatcagggcgagtgggagctgctgggggtgttcaccaaatttcaggagttcagtatagaaaccagtaacagctatgcggaaatgaagttctacgtggtcatccgccggcggcctttattctacgcagtcagcctcttgctgcccagtatcttcctcatggtcgtggacattgtgggcttttgtctgcccccggacagtggtgagagagtgtctttcaagatcacgctccttctgggatactcagtctttctcatcatcgtgtcagacacactgcctgcaacggccatccgcactcccctcattggtgtctactttgtagtgtgcatggctctgctggtgataagcctcgctgagaccatcttcattgtgcagctggtgcataagcaggatttacagcgccctgtacctgactggctgaggcacctggtcctagacagaatagcctggctgctctgcctaggggagcagcccatggcccataggcccccagccaccttccaagccaacaagactgatgactgctcagccatgggaaaccactgcagccatgtcggaagccctcaggacttggagaagacctcgaggagcagagatagccctcttccaccaccaagggaggcctcgctggctgtgcgtggcctcttgcaagagctgtcctccatccgccactccctggagaagcgggatgagatgcgggaggtggcaagggactggttgcgggtgggatatgtgctggacaggctgctgtttcgcatctacctgctggccgtgctggcttacagcatcaccctggtcacgctctggtccatttggcattattcctgagtgggtacagcctggcagggaggggatgtgagtcctgcatcctgtttccaacaccaattcatctgagcaaccccagtccccttgtcccctaaacttagcactgaagacccggtcagaccccccgacttcgctatcatggctttaaagcatgatatccttttccagtacttctgtgattatggcccttgggatggctcatttccacagtttttttttcctttttgatcagaggaaagcaaattctcttgcctaggtgcctgagacgtctgtgcctgttttatccaggccccagtggcttcttcttcagctcacttgtgggtacttccctagcgctcagcctcatcaaccaacggggggagggg

SEQ ID NO: 3143 - DNA, 1471 bp, Rattus norvegicus
accgggtaagcagagctcctggctgtcaggccgacttgctgtgttcttgaaaccagsmtyycaccwgyttccwggkmycaggmmctgcwrmacyskacatggtcttccatctctcggaacatttcttcaagaactcggcgaagttgaccgacgagtcgggatgcttcttcttgtgctcctcctggcacgaagaaggcgtacgaggacatcttgccccgcggcttgttggggtcccccttgcccatgatgaccgcgcagcgtctacctggcgcgagctcttccctcagacttccacagagagacttccttccccaagctccggcgagaactggtcctsaskaggsyttayatammacttrtgyamttgacwgggagccatggacatcgaagcatacttcgaaaggattggttacaagaactcagtgaataagttggacttggccacattaactgaagttcttcaacaccagatgcgagcagttccttttgagaatcttagtatgcactgtggagaagccatgtgtctgggcttagaggccacttttgaccacatagtaaggaaaaagcggggtgggtggtgtctccaggttaatcatctgctgtactgggctctgaccaaaatgggttttgaaaccacaatgttgggaggatatgtttacataactccagtcaacaaatatagcagtgaaatggtccaccttctagtacaagtgaccatcagtgacaggaactacattgtggattctgcctatggaagctcctaccagatgtgggagcctctggaattaacctcagggaaggatcagcctcaggtgcctgccatctttcgtttgacagaagagaatggaacctggtacttggaccaaatcagaagagagcaggatgttccaaaccaagagtttgttaactcggacctccttgaaaagagcaaatatcgaaaaatctattcctttactcttgagccccgcactattgaggattttgaatatgtgaatacctaccttcagacatcgccagcctctgtgtttgtaagcacatcgttctgttccttgcagacctcagaaggggtttgctgtttaattggttccacccttacaagtaggagattcagttataaggacaatgtagatctggttgagtttaagagtctgactgaggaagaaatagaagatgtactgaaaaccacatttggcatttctttggagaaaaagtttgtgcccaaacatggcgaactcgtttttactatttagggtaaattgttctccattattatctcagtcttaaacattctaaaaatatgcaaatacatatccataacagaaatcgcacagctcaatattgatcaactaatgacctgtatcttctatttcctacattttatacaaaacgaaacccagttgtcctgtcatttcaccaataaaaataccgccagttataatgaaataaacctgatcatggatgtaacgacaaa

SEQ ID NO: 3144 - DNA, 2610 bp, Rattus norvegicus
ggagaggagaggagagggaaagccagccaagaacacatggagagaggggaggggatgtggaaagagggagaaggcgcagagagtaagagagcaagggcgtcaaacagcccctttaagagtaagccaggcatgcctggctaatgccaggtaactgtgggggcagagcctagaggggatgctaacagagctcatctcagtccactcttctcacccagtctgccccagtcaccctgtctttgtatccaccccttctgctaggaaacaccatcctcacacatccgtggagctcactgtctgtcatccttcggatgcaagtgtggctttcttcatccatattagttcccatcaaaactctccttctacctctctattttagttatcctgtggacagctactacacttctcttttttgtttttaaattacttatgtattattttaatacccactgaaatgcaagattttggagggcaagaaagcatagcaagtatctaaaggatgttcagtgaagggatgacttggtcaatcagtgtagctcattcagtaaggagcctcatagagcacccagtgcagtgatgaatgggtcactcgccatggcattctctagtgtgtaagtctcccatttttgtgaataactgtttgaaagattattttggcaatatctacctttcatcaccaaggtaaccacatctaatctctcttttgactggtcatttagccttattttctacctcaaaaacttgaaagatacaaggaataacaaaactttcctctaaggctctctgagagtatttaatgaacagcaggtaaaagcaagccaggctgtagaggtgacatgattgcctaggagctatgtagaggcatctttcatgtatacacgttaacaacacattcgaactacagttagctgactctgggacacccagaagaattgatgtcatgtttgtctgctttcatcctgtttgccttagggagccatggacatcgaagcatacttcgaaaggattggttacaagaactcagtgaataagttggacttggccacattaactgaagttcttcaacaccagatgcgagcagttccttttgagaatcttagtatgcactgtggagaagccatgtgtctgggcttagaggccacttttgaccacatagtaaggaaaaagcggggtgggtggtgtctccaggttaatcatctgctgtactgggctctgaccaaaatgggttttgaaaccacaatgttgggaggatatgtttacataactccagtcaacaaatatagcagtgaaatggtccaccttctagtacaagtgaccatcagtgacaggaactacattgtggattctgcctatggaagctcctaccagatgtgggagcctctggaattaacctcagggaaggatcagcctcaggtgcctgccatctttcgtttgacagaagagaatggaacctggtacttggaccaaatcagaagagagcaggatgttccaaaccaagagtttgttaactcggacctccttgaaaagagcaaatatcgaaaaatctattcctttactcttgagccccgcactattgaggattttgaatatgtaaatacctaccttcagacatcgccagcctctgtgtttgtaagcacatcgttctgttccttgcagacctcagaaggggtttgctgtttaattggttccacccttacaagtaggagattcagttataaggacaatgtagatctggttgagtttaagagtctgactgaggaagaaatagaagatgtactgaaaaccacatttggcatttctttggagaaaaagtttgtgcccaaacatggcgaactcgtttttactatttagggtaaattgttctccattattatctcagtcttaaacattctaaaaatatgcaaatacatatccataacagaaatcgcacagctcaatattgatcaactaatgacctgtatcttctatttcctacattttatacaaaacgaaacccagttgtcctgtcatttcaccaataaaaataccgccagttataatgaaataaacctgatcatggatgtaacgrcaatcctctcaacattaatcaacaaaaattacttatcgaagaggtggcgatcttgggagccatattcatttacaaacctcycaacatcattttatggttgaactcagatgaaaaatgaatgaatatgaatgatcagagaacagcaggaagtaaagtcaggcagactaaatytgaggtccaaggtttacaagaaaccaccygtacaacttaggattagaataaagcaaagaagaatgaaccatcattwcaggtccaggtaacttcccagtcctcaaaacagaactcacgccagtggacctgggctctgggattaggtgccaagacaatgacacggcttagaaggcttagaatttcttccagagataattttgcagacacagttctttttgwatctgattttttttaactatgagaatactggtattaagtgatttataccttatatataataatctttgtagcctataatatatgtttcttggaaaaamawwawwwrwmaagtatattaagtgttaaatatatattaacattatatagtattggct

SEQ ID NO: 3145 - DNA, 1386 bp, Rattus norvegicus
cctcccaccagcttcctggtctcaggccctgctacaccggacatggtcttccatctctcggaacatttcttcaagaactcggcgaagttgaccgacgagtcgggatgcttcttcttgtgctcctcctggcacgaagaaggcgtacgaggacatcttgccccgcggcttgttggggtcccccttgcccatgatgaccgcgcagcgtctacctggcgcgagctcttccctcagacttccacagagagacttccttccccaagctccggcgagaactggtcctgagtagggtttatataacacttgtgcarywgcwctggaaaccatggacattgaagcatactttgaaagaattggttatcagagttccaggaacaaactggacttggaagaattaactgaaattcttcaacaccagatacgggctattccctttgaaaacttgaacatccattgcggggaatccatggagctgaatttagaagtcatctttgatcaagttgtgaggaagaagcgtggtggatggtgtctccaggttaatcatctgctgtactgggctctgaccaaaatgggctttgaagccacaatgttgggagggtatgtctttaacactccagccaataagtacagcagtggcatgattcacttactagtgcaggtgaccctcagtggaaaggactacattrttgatgctgggtttggacgttcctaccagatgtgggarcctctggaattaacatcagggaaggatcagcctcaggtgcctgccatctttcgtttgacagaagagaatggaacctggtacttggaccaaatcagaagagagcagtatgttccaaaccaagartttgttaactcagacctccttgaaaagaacaaatatcgaaaaatctattcctttactcttgagccccgcactattgaggattttgagtccattaatacctatcttcagacatcgccagcatccttgtttacaagtaaatcattttgttcyttgcagaccctagaaggggttcactgtttggttggctccaccctcacttataggagattcagttataaggacaatatagatcttgtagagtttaagagtctgactgaggaagaaatagaagacrtactgaaaactatatttggggtttctttagagagaaagcttgtgcctaaacatggtgatcgattttttaccatttagaatatgcagttttggtgtccttccatgtacttggactttatgttaaaatgttcaaactggtgacaaggacatacttctgaccatgttgatgtatgcgaacaaaaacccaccattggcttacagccaaatttatacagaatttgtgctaatagttaagtaaaaggaatagtgtgaaaagcattcccattcaa

SEQ ID NO: 3146 - DNA, 1043 bp, Rattus norvegicus
ggaagggcaagaagaaggaccggggatcccgcgggaagcccgggcccgccgagggcgacccgagcccagcactgcctcccagattgaaagaaatgaagagccaggagtcagctgcaggctccaagctagtgctccggtgcgaaaccagctccgagtactcctcactcagattcaaatggttcaagaatgggaacgagctgaaccgcaaaaataaaccagaaaacatcaagatacagaagaagccagggaagtcagagcttcgaattaacaaagcatccctggctgactctggagagtatatgtgcaaagtgatcagcaagttaggaaatgacagtgcctctgccaacatcaccattgttgagtcaaacgagttcatcactggcatgccagcctcgactgagacagcctatgtgtcctcagagtctcccattagaatctcagtttcaacagaaggcgcaaacacttcttcatccacatcaacatccacgactgggaccagccatctcataaagtgtgcggagaaggagaaaactttctgtgtgaatgggggcgagtgcttcacggtgaaggacctgtcaaacccgtcaagatacttgtgcaagtgcccaaatgagtttactggtgatcgttgccaaaactacgtaatggccagcttctacagtacgtccactccctttctgtctctgcctgagtaggagcatgctcagtcgatgctgctttcttgttgctacatctcccctcagagtcacctagagcctagaaccttctaccaggtctaatattgactgcctctgcctgtcgcatgagaacattaacaaggccgctgtgttacttctctgtttgtgactagtcggctcagagttactaaataggtgtgtgaggccccagaggtttctgaaaatggtcccgcagaaggtgatgcaaatcgatagtcaacatgccaagagtgaaataataataataataataataataataataataataataaaggcgtttcaaactcgcacttgtattggtaaaataaaatcattccaacaagt

SEQ ID NO: 3147 - DNA, 1867 bp, Rattus norvegicus
ccgtcacccaaccgggtccgcgtagagcgctcatcttcggcgagatgtctgagcgcaaagaaggcagaggcaaggggaagggcaagaagaaggaccggggatcccgcgggaagcccgggcccgccgagggcgacccgagcccagcactgcctcccagattgaaagaaatgaagagccaggagtcagctgcaggctccaagctagtgctccggtgcgaaaccagctccgagtactcctcactcagattcaaatggttcaagaatgggaacgagctgaaccgcaaaaataaaccagaaaacatcaagatacagaasaagccagggaagtcagagcttcgaattaacaaagcatccctggctgactctggagagtatatgtgcaaagtgatcagcaagttaggaaatgacagtgcctctgccaacatcaccattgttgagtcaaacgagttcatcactggcatgccagcctcgactgagacagcctatgtgtcctcagagtctcccattagaatctcagtttcaacagaaggcgcaaacacttcttcatccacatcaacatccacgactgggaccagccatctcataaagtgtgcsgagaaggagaaaactttctgtgtgaatgggggcgagtgcttcacggtgaaggacctgtcaaacccgtcaagatmcttgtgcaagtgccaacctggattcactggagcaagatgtactgagaatgtacccatgaaagtccaaacccaagaaaaagcggaggaactctaccagaagagggtgctgacaattactggcatctgtatcgccctgctggtggtcggcatcatgtgtgtggtggcctactgcaaaaccaagaagcagcggcagaagcttcatgatcggcttcggcagagtcttcggtcagaacggagcaacctggtgaacatagcgaatgggcctcaccacccaaacccaccgccagagaacgtgcagctggtgaatcaatacgtatctaaaaacgtcatctccagtgagcatattgttgagagagaagtggagacttccttttccaccagtcattacacttccacagcccatcactccacgactgtcacccagactcctagtcacagctggagtaatgggcacacggagagcgtcatttcagaaagcaactccgtaatcatgatgtcttcggtagagaacagcaggcacagcagtcccgccgggggcccacgaggacgtcttcatggcctgggaggccctcgtgataacagcttcctcaggcatgccagagaaacccctgactcctacagagactctcctcatagcgaaaggtaaaatggaagggtaaagctatcgtggaggagaacctcattcagtgagagaatcccatgagcacctgcggtctctcctaaggaaactcatcctttcataaggggcgtcatcaattccctgacgctcctagttgatgaagtcaacctcttatttgtctgaactcctttctcctgagcttctccccgcgtcccagtggctgacaggcaaccaactcctaaagagcaggagtaatgtaatgtggaaggcccagccgacttggagttctcagacctgaccctaaggtcagactcactggggtcttcctttcgtcaggtgcaccattttaaggaccctcatctaatcccgatcagccagttgtccattctctacctcgatggttgttctgccctcctctcctcatgctctaagtacccagcctctagcctcagttaaatcaagtcgagggctgggacacggctgatggtcatggcggaatgcctcctsgggttccaccacactgtatccatttacgacatccctagaagtcatgggtaaataaagttgttgtgtgatgtgra

SEQ ID NO: 3148 - DNA, 2184 bp, Rattus norvegicus
gggtagagtaaagctacgcccaggcccgcgtccgcaggcgacgcaggaacttcagcacccgcggggcggacagcgcccgccgcacctgctcacctgctccgggcgccggaagagcccacatcctcctgccagccccgtgaractgccacmsgrggccgcccagatcctctcccttcctgcacccaggctcctgtcccttccagcttcttactccccttctcattcataacaaaagctacagctcaggggcccagcgccargctctttccagcagagcgcagaggagcaagaaagaatggggttcctttggacaggctcttggatactggtgttggtgctcaacagcggcccaattcaagctttccccaaacccgaaggcagccaagacaaatccctgcataatagagaattgagtgcagagagacccttgaatgagcagatcgctgaggcagaggcagacaagrttaaaaagrcatacccytcagaaagcaagccaagkgaaagvaawywykhkkcggtcgrtaacttgaatctgctwaaggcgataacggaaaaggaaacagttgagaaagccaagcaatccataagaagctccccgtttgataacagactgaatgtggacgatgccgattcaactaaaaatcggaagctgaccgacgagtacgactccactaagagtggactggaccgcaaggttcaagatgacccagatggcctccatcaactggatggaactcctttaactgctgaagacattgtccataaaattgccaccaggatttatgaggagaacgacagaggagtgtttgacaagattgtytctaaactgctgaatctcggcctaatcactgaaagccaggcacatactctagaagatgaagtagcagaggctttacaaaaattgatttcraaagaggccracaattatgaggaggccccggaaaaacccacamgcaggaccgagaatcaggatgggaaaataccggagaaagtgactccagtggcagcaacccaagatggctttactaaccgtgaaaatgatgacacagtatcgaacaccttgaccttgtccaacggcttggaaaggagaacgaacccccacagggacgrtgactttgaggagstccagkrtttccccaacttctatgcactactgacaagcatcgactcagaaaaagaagcaaaagagaaagaaaccctgatcaccatcatgaagacgttgattgactttgtgaaaatgatggtgaaatacggtacaatatctccagaggaaggcgtttcttaccttgaaaacttggatgaaaccattgctctgcagaccaagaacaagctagaaaaaaataccactgacagcaaaagcaagcttttcccagctccgccagagaagagtcacgaagaaacagacagtaccaaggaggaagccgccaagatggagaaggaatacggaagcctcaaagactccacaaaagacgataactccaacctcggaggaaagacagatgaagccaaagggaaaacagaagcctacttggaagccattagaaaaaacatcgagtggctgaagaagcacaacaagaagggcaacawagaagattwcgmcctttcaaaratgagggwcttcatcamccaacaggctratgctwatkyggagarrggcatcctggataagraagaagccaacgccatcawacgcatctacagcagcctgtgaaaacggcaggcaacytgagccttcmmmytgttccrgcaaaaacaatatagcttaaaatctaattcggsggttaaagatttaycagcccaggagyyttargatgkgctgactytatarwagttaawyccttakaaatgagwraaakagagckctcttgccataaacmccttatgaarggkaaagttgtaaagagcctcggtttttctatgtagaatccttaatccttatttcctcttggatttacattttataatcasaratatgctgttytggaasagactctgatkggttgaacatacatytgaacctmyttcccactgtcgtmagccctgtttcggcatgctagacacctgagcacatcgttggatgtttgyyatttgatgctgtttccagtagttctmtgttgggcmcggaaataaaccsacgtctyttcataamwwwrawrmwmwraaaaccaaaaaaaaaaaaaaaaa

SEQ ID NO: 3149 - DNA, 1132 bp, Rattus norvegicus
  misc_feature (1073)..(1073): n is a, c, g, or t
ttttttttttttttttskcacgmrgggtcgcggtggcagccgtgcggtgcttggctccctaagctatccggtgccatccttswcgskgcggmgactcgcaacatctgmmgccatgaccgagcaaatgacccttcgtgggaccctcaagggccataatggatgggttacacagatcgccaccactccgcagttcccggacatgatcctgtcggcgtctcgagacaagaccatcatcatgtggaagctgaccasgsaygagaccaactackgcataccacaacgtgctcttcgaggtcactcccactttgttagcgatgttgtcatctcctctgatggmcagtttgccctctcaggctccyggsayggaaccctacgcctctgggatctcacaacgggmactaccacgagacgawyygtskgcsacrccaaggatgtgctgagcgtggctttctcctctgacaaccggcagattgtctctgggtcccgagmcaagaccatwaagttatggaatactctgggtgtctgcamstacrckgyccaggatgagagkmattcrgmaygrgtgtcttgtgtccgcttctccccgaacagcagcaaccctatcatcgwctcctgcggatgggamaagctggtcaaggtgtggaatctggctaactgcaagctaaagaccaaccacattgsccacactggctayctgaacacagtgactgtctytccagatggawsvmdmdgkgcttctggaggcaaggatgsccaggctmtgctgtgggatctcaatgarggcamgcacctyyacacwtwdgatggtggrracatcatcaatgcyktgtgykwcagmcccammcgykaytggcthtgygctkhcactggscccagyakcaagatvtgggacttggagggcaagatcatkgtmgatgaaytgargcargarbktwtcagcvmcagcagcaaggcagadscacybcagtgtacctctttgrswkgskmtkbtgatggccmgactytdkttgctggytwwwcmgacaacwtggtgcgwgtatggcaggtracymtysgtayccgctmaaagtttntgacarastyytagaaatwaactggctttytrddrwwrrhmwmwaaaaaaaaaaaaaaa

SEQ ID NO: 3150 - DNA, 2759 bp, Rattus norvegicus
aacctggtggcccttctcgacagcggagcgcgcggggacgctgcagcggcgggcaacgcgggcaggcagcgcgctccaggcagggccgcctggtcacctcccggcgccggggcggcgcggcgatggccagggcgcagagggaggcagagaccggcgggcgacggcgggcggagggggcgcggggacgcggccgggcgcccctgcccgccctggtgcccgccgcctaaggctgcccggggcgcgggagccggcgccggcgcggcgcgggcgcaggagaccactcgaggcgcgatgtcggtgccgctgctgaagatcggggtcgtgctaagcaccatggccatgatcaccaactggatgtcccagacgctgccctcgctggtgggcctcaataccacccggctctcggccgccagcggcgggacgctggaccgcagcaccggcgtgttgcccaccaaccccgaggagagctggcaggtgtacagctctgcccaggacagtgagggcaggtgtatctgcacggtggtcgccccccagcagaccatgtgttcacgggatgcccgcacaaaacagctgaggcagctactggagaaggtgcaaaacatgtctcaatccatagaagtcttggacaggcggactcagagagacctgcagtacgtggagaagatggagaaccagatgaaaggcctggagtccaagttcaggcaggtggaggagagccataagcagcatctggccaggcagttcaaggcaataaaagcgaaaatggatgaacttaggcctttgattcctgtgttggaagagtacaaggccgatgccaaattggtattgcagtttaaggaggaggtccagaatctgacgtcagtgcttaacgaactgcaagaggaaattggcgcctatgactacgatgaacttcagagcagagtgtccaatcttgaagaaaggctccgtgcatgcatgcaaaaactagcctgcgggaagctgacaggcataagtgacccggtgactgtcaagacctcaggctcaaggttcgggtcctggatgacagacccactggccccagaaggtgataaccgggtctggtacatggatggttatcacaacaaccgctttgtccgtgagtacaagtccatggtggacttcatgaacacggataattttacctcgcaccgtctcccacacccctggtcgggcacgggccaggtggtctacaatggctccatctatttcaacaaattccagagtcacattatcattaggtttgacctgaagacagagacgatcctgaagacgcggagcctggactacgctggctacaacaacatgtaccactatgcctggggcggccactcagacatcgacctcatggtggacgagaacgggctctgggccgtctacgccacaaaccagaacgcaggcaacattgtcatcagcaagctggatcctgtctcactgcaaatcctccagacctggaacaccagctaccccaagcgcagcgccggcgaggccttcatcatctgcggcaccctctacgtcaccaacggttactcggggggcaccaaggtccactatgcctaccaaaccaacgcctcgacctacgagtacattgacatccccttccagaacaaatactctcacatctccatgctggactacaaccctaaagaccgcgcgctgtacgcctggaacaacggccatcagaccctctacaacgtcaccctcttccacgtcatccgctccgatgagttgtagctcccgcttttccagaagccaagggtccaagtcctcaccccgaggacattttccataaaacagctgccaaatgattccaagaatactataacagtcctgattttgagaaatcagcgcaattttgacgccgagagatggtgtcctctctgtgttcctcctgctcgtgcaggtgggccacagatttcagaagaaaccgccatgtatgtggatggaactgcagcccaaggctccttggctgtccccatcccaccccatccctctctggtccaataactcaaagaagcaaggcgatgactgttggcccctctcacccaagaacaacccactgctaagattgcatggacatttccttaggtcgtgcccagcgagatgacgtgatggccattctccccacccacagcccccagcccccgtggcgctcggtgtaggytgcttcggcccacacgtatcgcagctgcctttttcttgactgtgktgttgtctcttagattaactgtgctgagactcccggtagctcatggacctgtgtctagtactttcccgaagcgatggtgggtgtgcgtagagtgaagttgctrtacccacgttgttgaacktgcgtaccctgtagctagatcgtgaggtgtccgtctgttatcccccscaaggtggtaackcsgtgtgttcaatttatgcaatgaatgttgtcatgcgatgctgtagtttggattgatamgtggwtggtttctgtttctaaaaaraaaaaaaaawmagtgttcgcccttataggagacatagtcaagttcatgttgataataacccagtgaaattcttctcttgtcaagttatctgaattgtgtaaccatagatgggaaggacgcatcttgggaaacttcagtttcctacgggaaggaactccccaagggcagccatgtgtgaaaagatcattttttaaaraaaaaaaaaawaagtcaaagagggcaactttgtactattcagttatctaaggaacaataaagatattaggagat

SEQ ID NO: 3151 - DNA, 6708 bp, Rattus norvegicus
  misc_feature (1166)..(1166): n is a, c, g, or t
  misc_feature (1212)..(1212): n is a, c, g, or t
gtcgacctgcaggtcaacggatctggtggtttctaggaatcgatgtgtgctctgaggcaagtttcaaaggatgaatggaaggcagccagctgaaaacggtgatgacgccatgtgtatgaggcaatggaaaagtcacattacatttaaaatgcaatttcctggattccctcacctcaagagtgccgggagacacgagagccttctcattgcaagctcccattcataaccgtttgcacttactagcacaggttctcacctgcagcgttctctctgacaaccttaagaggctctgctgtcatcctacagctggggtttagaaagagcacttgacccaaaaatcacataaataacaaggtgtgaagtaaaagctttgagctataccatagttccaggacctttaccgccgtccttaggcttgctcactgaagcgattagacagagaaggctctgaatttaggaaagatttcagaggtggtgtagtctccatgaaggccaggagaaaggatgagtgattggttagcgtgttaagtagtgaccatgggttgtctttctctgccctctgaagtgctctctagaggagctgcccgaaatagcagctgactgcagaaacatgagccttttggagcctggacaagcagtattcttccattagatgaaccaagtggaactgaatagcataaaaattggtcactgtggaaactgtgttcagaaaggaagtcttccagctctggtagtagaaaggtatggtggctgaaaaagtcccctgccccaggtcacactccttcccggggacagccaacataaagtgtttggtgcatgaatagaaagcagaattgtttgacctggttttccctccaaaatttctctactgactggtaagccaggatttgcatcttaatagctatatcaagctgaattgcaattcaggcatataaggagaatccagggaaacggtatttgattccccaagttctgttcagccttctctcttgatttaagttaggtctgggttggacagttccaccagatgccacctcacgttccctgcttgcatctccacttcatgcaagcaccttagccgtgtttactttaggaatccctcaacaccatggctatagcagtccacatacatactcgacccagcacaagagttcgcacccccaggnacaaccttcagtgagaaatgaacataaatgattactgtggggtgancctccaaaaaatttttcattggagacagcaatcctcctgacacaacagaaaaagtgctttgatcatgaagttaaatttcaacaaaagtttaaagaatgcctcgtgtgggtccggaaggctgtaaagttaatagaacaacagtgaacccagcaagacaatctctgctctctcagactcgacagttgtgggagagcaaactcttgaaggtaaaccacctagacgacaggaacctagtgttaggaaagggaaaaaccagtgaaacacacgcttattgcattgggttagcaaaactatcccaacccatggatctctcggaacatatgcagtgtccatgaagagtgtgtaaagtgaccagtattggggctggagaaatggctctgtggctaagagctcttccagaggactggggtttggttcctaaccccaacatggcagctcacggtcatctgtaactccagttccaggggacttgtcccctgctggcctttgtggacactgtacagatgtgcacttgtatacatacagggcaaatgctcatgaagtcaacgctttatgggtttagcgtctcgactggctatttttatataaacttgacatcagataaaataatttagaagaagaaaactcgattgtgaaaatatccccaataatgggcctgtggtccgttttattgatggatgatagatgtgggagggcccagctcactcgaggggcacccctgagctagcagtcctggatgctacaagaagatgagctgagtatggaagtaagtcggaaagcagcattgctccctgcctcctccaggacatcgacccctacctccaagttcccgccctggctttcctggaagacggactgactacgagttaaaagatgaaaccctttcttccccaagttgcctgtggtcatggccttttgtcacagcaacagaaatacagtaatacagtgtcgttcgtttttaaggaagtacagtaggctctctctaaggacagtaaggaatgatggcaggaaattggaatccttatacagtgctggcaggttgtaatttaatttggaatactttttcacgttttctccaaaagttaaatagttaccatatgacccagtggctcacttccaaatatctactcaagaacactgaggcatgtcccacagctgatgactggacagaccgttgtcatgccatgaaaaggaatggggcagtgaccttgaaagcctgctgagtgaaagcagacaccaaaggcaggatactgtaagagtccagtcatatcaaatattcaagcaggcaaatctatacacataaaaggaggtggttgccttcatccgaggagagaaacgagagtgcatttcctttaggagtcatgaaagcattctaagttttaatttaatgtctattttaaatactgctagtcactataaaagaaaaactctgatatttaaagcatgtctctgtcatctttttttttttttacaagaaggttgagctgatactatgaaaatcccggcaccagatcctttgacgaatggaaaaacaattccatgtaaacactgcacaggtagggatgggggcacctaagagtagccccaaaggcagggtcaggagggaggggcagcacagatcatgtaggacctcttaaagcttgtcacgtcttactgagttcctccaaagactagaaagaaacttgggaagcaaagcttttcaagattacagccaggccttgatcgattactgagctttaaggcagccttaccattctgtggatttacctgtctcagtaaagaacaagaccaagataagcttgtctactgagaagaaataatgttccgctgtgggcaactcagaactggcactgaggtgagcatgagccaaggggaaaccatttaactaagaattctagtgctacacgcatttaccttttacttctaaggcagacttatatttaagatctttaaaatcagtaaactagaccatgaaacagccataccctcgaagaataaccagatgtattaaagagctaagcatagtgtggcgtatgcttgcagtcccaatgctcagaagcctacaattgcgggtgagttcaaggccaacctggcctcagcagagattgactattttacgtacaaataaaaacgagataacctttcaactatcaacacttttttttaagtgttgtaaaacttaacataacacaatatttaccaatttagcctggtatgatggcatgtacccgtggtgccagtggtgccagtgttcaggagtctgaggcaggaggatgactacaagttcaagcagccaagtccacatagcaaaacctcatctaaagcaaaaaggccattttgccatgtttatagtgtgtaattcagtgggcgttaggtacacgtgctatgctgaatgaccactaatggtatcaacattttcagaaccttcccaacctcccagacaaactctgtacctatgacacaatcgcttgacatcccctcctcctcccgacccagagtaacctctcttctcctgctcccggagcctattgatttgttcattcgaagtaccctatacaaatgggctcacacaagaactgtatctggcccttcacttggcatagagctagcatgctctccctacctggtagcacatgtcagaatttcatccctccctaaggacggatggtatataccatgttttgttcaatttcttgttgatggctcaaaagacttagctgatgagagacctgttctctgaggaaaactcttccaaaccatctcagagctctccgtgctgagaagaaggacatgcactagagagtcttagaaaatgcaagagctagggagatggctcaaggggaagcattccctgcacaggcatgtcctgagttcgaatccccacatctacgtaaagctaggtgtgggactgtgcatctgtgatcctgctgttagggtgccgagatgggaggtggagggcagaaaagccaccactgccagatagcttacgatacgcaaaggtaaacaataaggaatgtgtctccaaagtggggagcgaaaacaacgtccaaggttgtcctctggctgacacacacacacacacacacaaccacaaatgtgtgcatgcgcatacacacacacaaagaggaaagttacggattttctaagcgaagggaaaagcagcagcccttcttgatttcaggctccagtaaacaaagccaaccccattctgttttttttttttttttcctaagtccaaacctctgagtagcctttgccagtagggaacgcccacctaccatcccccctaccccaccccttcctttaagcttcacttaaaacaggcaacctccatgaacatccsaggrmtwmaatggagctgctgggattcactacgcttgctctygtggtttcggtgacttgcctcagcctcctttcagtgtggacaaaactgcgcactagggggaggctgcccccggggccccaccccccttcccattattgggaatctactgcaactgaacctcaaggacatccctgcatcgctttccaagctggccaaagagtacgggcctgtttacacgctgtactttggaacctctcctactgtggtcctrcatggctatgatgtggtgaaggaggcgcttctccagcaaggggatgagttcctcgggagaggacctctgcccatcatcgaagatacccataagggatatggactcattttcagtaatggagagaggtggaaagtcatgcgacgcttctccctcatgactctgaggaacttcggaatggggaagagaagcctagaggagagggtgcaggaggaagccyggtgccttgtggaggaattacaaaaaacaaaagctcagccctttgaccccaccttcatcctggcctgtgctccctgcaacgtgatctgctccattcttttcaacgatcgattccagtacaacgacaagacgttcctcaaccttatggatcttttaaataaaaattttcaacaagtgaactccgtgtggtgccagatgtacaacctttggccaacgatcataaagtatctccctggaaagcatatagaatttgcaaaaagaattgatgatgttaaaaacttcattcttgaaaaagtgaaggaacaccagaagtccctggatcctgccaaccctcgggactacattgactgttttctcagcaagattgaggaggagaaggacaacctgaagtctgagttccatctggagaacttggctgtctgtgggtctaacttgtttacggcaggcaccgagacaaccagcaccaccctgagattcgggctcctgctccttatgaagtatccagasrygmrrgccaaagttcatgaggaacttgaccgtgtgattggacgccaccaaccccccagcatgaaggacaagatgaagctgccttataccgatgctgtattgcatgagattcaaagatacatcactctssttssttccagtctgccccatgctgtggtccaggacacaaaattcagagactatgtcatccccaagggtactactgtactcccgatgctgtcttccgtcatgctggatcaaaaggagtttgccaacccagagaagtttgatccaggacactttctggataaaaatggstgcttcaagaagacagactactttgttcccttctcccttggaaagcgggcctgtgttggtgagagtttggcccggatggagctcttcctgttyttcaccacccttytgcaaaagttywccmkgamgaskytggtggagcccaaggaccwtsacmtsaasccyawkactmyckgsmtkwtcaatwtgcykccaccttmcwwgctgtgmmwkrwwmctmrahaagggtktatcsttytaatcattcaaatcaaagkradkgkytyyttttwytwtwwwtwttytttttatgctaagcactgcytaggccaraaacatcatgcatgaaaaccacatggacatttatttcgatttaaaaathtaggtcttaaaagcttccagsacacaggcagkgtgtctgtgtccctcaactgctmtagaaaccaggccccaagcacawctgacaccagatatgcaagaccctcatcagacgccacctacaagtagcactgkgtgctcttctgtagctttggaaatagaattgttttckgtcattgtttyaatagagaaattaatgtaatggcctacgttcattttcctgttcacacttaaaaacatttacatgatttgtgccacattcacaaaataaattytcaccctgmcawwaaaaaaaaarraawwmmtgttggccgagttgtcagtcagcgtgaactctgccaccagctccctaagaaggggcattgaaggacccttcataggtttttggaggtaataaagccaggatatcatagagccttaagcggaccattgcagcactagctttcaggtgggggaattccaaaaaaaaaaaaaaaaaaaaaaaaaaaaaaaaaaaaaaaaaaaaaaaaaaaaaaaaaaaggaatt

SEQ ID NO: 3152 - DNA, 1301 bp, Rattus norvegicus
gccacaacacagaggcttgagctgaggcttggacccggagggacacgcagagcctacggctgagctcctatagggacatacaacgttccatgaccaggtgacccttcctgcccagagcaatggagcaaaatggctccttccgtgtggattctgagtttcgatacaccctctttccgatcgtttacagcgtcatctttgtactgggcgtggttgccaatggctatgtgctgtgggtctttgccaccttgtacccgtccaagaaactgaatgmgataaagatcttcatggtgaatctcaccgtggcggacctgctcttcttgatgaccctcccgctgtggattgtctattactccaacgagggcgactggattgtacacaaattcctgtgcaacctggctggctgcctcttcttcatcaatacctactgcagtgtggccttccttggcgtcatcacttataaccgctaccaggcagtagcctatcccatcaagaccgcccaggccaccacccgcaagcgtggcatcactttgtccctggtcatttggatatccatcgcggctactgcatcctacttcctggccacagactctaccaacgtggtgcccaaaaaggatggctcaggtaacatcacccgctgctttgagcattatgagccatacagtgtgcccatccttgtcgtccacatcttcatcacctcctgtttcttcctcgtcttcttcctcatcttctactgcaacatggtcatcatccacacgctgctcacgcggcctgtgcggcagcagcgcaaaccggaagtgaagcgccgggcgctgtggatggtctgcactgtcttggcggtatttgtcatctgctttgtgccccatcacgtggtccagctaccctggaccctagcagagttgggctaccagaccaacttccatcaggctattaatgatgcccaccaaatcaccctctgcctcctgagcaccaactgcgtcttagatcctgttatctactgctttctcaccaagaagttccggaagcacctcagcgaaaagttttacagcatgcgaagtagccggaagtgctcccgagccactagcgacacgtgcaccgaggtgatgatgccagccaaccagactcctgtcctgccattgaaaaattaatcaatgcttattaaagccaggtccagagccttctcttttatggcccccaccgatggcgcagaaagctaagaggttcctgcctgtggccaacccccaacttggaccctggtggactcttaagtgaggagttacttactacagagagccatttgctgg

SEQ ID NO: 3153 - DNA, 1784 bp, Rattus norvegicus
ggcgtgcctttagccggtcagaaaagaacgcattcggcacttctacagacgcactgaggagtcagggatttgtgtttgggagaggtttacgaagaggtgctgggctggtgcgaactgtggcaggcagagcccaggagtcctgcgaggtcctgagtttggtcgcctctcacccccctccccggtagacgggccatggcgcagttcgtgttcgagagcgatttgcattcactgcttcaactggacgcgcccatccccaatgcaccgattgctcgctggcagcgcaaagcaaaagaagccacaggcccagccccctcgcctatgcgggccgccaacagatcacacagcgccggtcggaccccgggccgaactcctggcaaatctaattctaaggttcagaccacccctagcaaacctggaggtgagcgctatatcccccaacgtagtgcttcccaaatggaggtggccagcttcctcttgagcaaggagaaccagccggaagacgggggtacgcccaccaagaaggagcatcagaaagcctgggctcggaacctgaacggttttgatgtggaggaagccaagatcctcaggctcagtggaaaacctcagaatgccccagaaggctaccagaacagattgaaagtactctacagccagaaagccacgcctggctccagtcggaaggcttgcagatacattccttccctgccagacaggattcttgatgcccctgaaatccggaatgactactacctgaatcttgtcgattggagctctggaaatgtattagctgtggcactggacaacagtgtgtacttatggaacgctggttccggtgacatcctgcagctgttgcaaatggagcagcctggggactacatatcatccgtggcctggatcaaagagggcaactacctggctgtgggcaccagtaatgctgaggtgcagctatgggatgtgcagcagcagaaacggcttcgaaacatgaccagccactctgctcgagtaagctccctgagttggaacagctatatcctgtcaagtggttcacgatctggccacatccaccaccacgatgttcgagtagcagaacaccatgtggccacactgagtggccatagccaggaagtatgtgggctgcgctgggccccagatggacgacatctggcaagcggtggcaatgataacattgtcaacgtgtggcctagtggtcctggagaaagtggctgggttcccctgcagacattcactcaacatcaaggtgctgtcaagrmtgttgcrksdygwssctggcagtccaatatmytkgcaacaggaggaggtaccagtgaccgacacattcgcatbtggaacgtctgctckggassmkgtctgagtgctgtggatgtgcattcccaggtgtgctccatcctmtggtctccccactataaggagctcatctcaggccatggctttgcccagaaccagctggttatttggaagtacccaaccatggccaaggtggcagagctcaawsgkcacrmrgccsgggtcvtgagtctcaccatgagtccagacggggccacagtggcatytgcagcagccgatgagactytgcggctctggcgytgctttgagytggaccytgccyttcggcgggagcgggaaaaagccagcacatytaaaagtagcctcatccaccaaggcatccggtgaaagacaaccywwkcwtttcccttcttgattttgttgttgttwatttttttctaataaagttcatatcttcmwwwvaaaaaaaaaaaaaaaaa

SEQ ID NO: 3154 - DNA, 1664 bp, Rattus norvegicus
aggcaaagggcaactgcttggaatttcagaaaatctgaaaccatgaggcatctatggctgctgctcctgtctgtttccttagttcaaactcaagctgcaactactgactccgataaagtggacctctcgattgcccgtggtcatcgacctgttgacaggagaaaggaagagcctcctagcctaagacctgcccctcctcctatcagcggaggtggctatcgagcccgtccagccaaagttgatgcaggtcagaagaaagtggaacgaaaaccccctgatgcaggaggctgtgttcacggtgacggagacatgggagtgctatgtgctacagggtgtgagttgcgtcaaactttgctaaaccacgaaaggccaatcaaaaacagtattgctgagttaaatagcaacataaactctgtttatgagacctcttcggtcacctttcagtacctgactctgctgaaagacatgtggaaaaagaagcaggcacaagttaaagataatgaaaatgtcataaatgagtattcctccattttggaagaccagaaattatatattgatgagactgtgaacgataatatcccccttaatcttcgtgtgctccgctcaatcctggaggacctgagaagcaaaatgcaaaaattggagtctgacatctcagctcagacggaatactgccacactccatgcaccgtcaactgcaacatcccggtggtgtctgggaaagagtgtgaagagatcattcggaagggaggtgagacatccgaaatgtatctcattcagcctgacacctccagcaaaccatacagagtgtactgcgacatgaagaccgaaaacggaggatggacggtcatacagaaccgtcaggatggcagcgtcgactttggcaggaaatgggacccatacaaaaaaggatttggaaatattgcaaccaacgaagatacgaagaagtactgtggcttgccaggcgaatattggcttggcaatgataagattagccagctcaccaggataggacccacagaactcctaatcgaaatggasgrcygsaaaggagacaaggtgaaggcacactatggaggcttcacggtgcagaccgaggccaacaagtaccaagtgtcagtgaacaagtacaaagggactgctggcaacgccctcatggaaggggcctctcagctggtgggggagaacagaaccatgaccatccacaacggcatgttcttcagcacctacgacagggacaacgatggctgggtaactacagatccaagaaagcagtgctcaaaagaagatggcggcggctggyggyayrasrgatgccatgcagccaatccgaatggcagatactamtggggtggcctttacagctgggacatgtccaagcacggcacagatgatggtgtggtgtggatgaactggaaggratcgtggtactccatgagaaggaygkytwygargatcaggcccgtyttcccacagcaatagtcccccaagcatagactttcagccttstatgtctgacattttttacattatgttattggaattttctttgatacattatatccactaatgctcaaaammmwvrmwrarwrwgtctttttttttttttttttggaatgataaaggataaagacattggaamcmgcaaaaaaaaaaaaaaaaaa

SEQ ID NO: 3155 - DNA, 2312 bp, Rattus norvegicus
gcggccrcgcagkgtccrggatcmwkrcctgccaggggttgtgcgcgcggccggccggctctgcccgcksccgyrkcgggctcccgagcggggcctcactcggccccctccatgtgacggcgcctcgtggagcctgagtgagcagcgggtccgtgcggagccggaggcgggaggaacatgacatcccggagatggtttcaccccaatatcactggtgtggaggcagagaatctcctgctgacccgaggagtcgatggcagtttcttagcgaggcscakcaagagtaaccctggagacttcactctgtctgttakaagaaatggagccgttacccacatcaagattcagaacactggggactactatgacctctatggcggggaaaagtttgccaccttgsytgaactggtccagtatwacatggagcatcamgggcagctgaaagagaagaatggagatgttattgagctcaagtacccactgaactgtgcagaccctacctctgaaaggtggttccayggtcacttgtctggaaaagaagcagagaagctgctgacagagaaggggaagcatggcagtttcctcgtccgggagagccagagccaccctggggacttcgtcctctccgtccgcactggygrysrcaaasggsagagsaatgacascamgtcyaaagtgacccatgtcatgatccgctgtcaggagctgaaatatgatgttggtggargagagcgctytgactctttgacagacctggtggvgcattacaagaagaaccccatggtggagacactgggcacagtcctgcasctcaaacagcccctcaacacaactcgtattaatgccgctgwratckaaagccgggttcgggagttaagcaagctwkyykwkwyywywkmtwrwstcwrwcmkkgcttttgggaagaatttgagactctacagcaacaggaatgcaaacttctctayagccgaaaagaaggacagagacaaraaaawaaaaacaaaaatagatacamaaacatcctgccctttgatcataccarggttgtcctgcacsatggggatyccaacgagccagtttctgattacatcaaygccaacatcatcatgcctgaatttgaaaccaagtgcaacaattcaaaacccaaaaagagttrcattgccactcaaggctgcctgcagaacacggtgaatgacttctggcggatggtgttccaggagaactctcgagtcattgtcatgaccacaaaggaagtggagagagggaagagcaagtgtgtcaagtactggcctgatgagtgtgcactcaaagagtatggcgtcatgcgtgtgaggaacgtcagagaaagtgctgcgcatgactacaccttacgagaactcaaactctctaaggtcggacaagswmwcacagagagaaccgtctggcagtaccactttcggacctggccagaccacggtgtgcctagtgaccctggaggtgtgctgracttcctggaggaggtccaccacaagcaggagagcatcgtggatgcaggccctgtcgtggttcactgcagtgctgggattggccggacaggaacgttcattgtgattgatatccttattgacatcatccgagagaaaggtgtggactgtgacatcgacgttcctaaaaccattcagatggtacggtcccagaggtcagggatggtccagacagaagcacagtaccggttcatcyacatggccgtccagcactacatagagacgctgcarcgcmggatcgaggaggagcagaaaagcaaaaggaaaggacatgaatataccaatattaagtmttccctggtggaccagacaagtggcgatcagagtcccctgccaccttgcaccccaacgccaccctgtgcggaaatgcgggaggacagcgctcgagtctatgagaacgtgggcctcatgcagcagcagaggagtttcagatgagcttcgggtggcagcrcgcagatgtgaactttcaccccttccctaaaatgtcaagaatagacgagaaagtttccaggacccgtgttcagaagctcgccggggttgactgactgccttttgagaagcgaagtttggaaccatttgaaagagcacgtgcctaattggcacctcctttcctcagctaaggagaaactgctctgcgttgtcgacagtgctattgtcatggaattggttttgaattgtgaagcagctaaattgtgctctgtattttctacattgkgggactcaaattctagtcacgggcaggattttgtttgtttctttttatgaccttaacagacctgttaagaccg

SEQ ID NO: 3156 - DNA, 846 bp, Rattus norvegicus
cacgagggccaaccccacccctcgcatggacatttattctccaccgccagtccctgccgccatcactgctgatccggactcctagagacacgctagagcagataccacgatggcgccctttgcatytstggcctstggcatcctsttgttgctatcattgatagctwccarwaaagcctgtwsywktrccccrayccwcmydcwdwcrkykwtcwgcwactsgsacctggttataagggmtaaattcatgggttccccaraaatcatsgagaccaccttataccagcgttatgagatcaagatgactaagatgctcaaaggattcgacgctgkggrraatgccacagrtwtccggttcgcctacaccccarycatggagagcctctgtggatatgtccacaagtcccagawccgcagsgaggmrykwskcatcgcgggccgkttaaggaacgraaatttgcacatcactgcctgmagcttcctggttccstgrcakmrkctgagccctgctcagcmaaaggscyymstaaagacctatagtgctggctgtgggktrtgcacagtgtttccctgttcagycatcccttgcaaamtggagagtgacastcattgcttgtggacagatcagatcctcatgggctmtgagaagggmtaccagagcsrtcacyttgcytgcmtgccacggaatccagrwttgtgcacctggcaatmccttggggtctcgatgaccmgaagccttcccytggcaaaagctgaascstgaacactgtttacmtttcmtccrtctttytttctcttaaatggtgaamyaaagaastatcacmcmrmaaaaaaaaaaaaaaaaaa

SEQ ID NO: 3157 - DNA, 5795 bp, Rattus norvegicus
ttaacatcttctcagagccaacacactggtagcatgaagaccacccacaatcctcaaaccaccagaaacacagaggtgactacaactctttctgcctcctcaagtgaccaagttcaggtagagacaacttcccagacaacactatccgatgcaacaacgacctcacatgctcccagagagagcagctcacctccaagtacatcagatattttaaccaccatggcctccacagaaggcacctcaggagacacaggacacacaatggcagtaactactcaaggttccacacctgccaccacagagatctcagtgacaccttcaacccagaaaatgtcacctgtgtcaacattcagcacttctacacaggaaataacaacactttcccaaagtcaacacactggaggcatgaagaccacccgcaatcctcaaaccaccggaaccacagaggtgactacaactctttcagcctcctcaagtgaccaagttcaggcagagacaagttcccagacaacactatctcctgatacaacaaccacctcacatgctcccagagagagcagctcacctccaagtacttcagacatgttaaccaccacggcctccacagaaggcacctcaggagacacaggacacacaacggcagtaactactcagggttctatacctgctaccacacagttatcaacaacattcgcatctcaaaaaatgtcaacagtgtcaacacccaccacctcctcaattcaggaattgtcaacacttcctcagagccaacacactggcagcatggagatcagtagcagacctcaaaccacctcagtcacatcaactctttcatcctctccaagtggctcaactcctgtacagactcggtccgtgacatcatcctcagatgaaagaaccaacccaacttcttctggtgtcagtaacacatccccagctacaacagaagtgctcaccccaacatcctctccagagtctactccaggaaacacagctccgaggacaactgagacctctacaacaaccacgacaaaagtcttaatgacatctttacaacagaaactaccaacagggtcaacactcggcacttctacacccacagaggtgactacaactctttcagcctcctcaagtgaccaagttcaggtagagacaacttcccagacaacactatctcctgatgcaacaaccacctcacatgctcccagagagagcagctcacctccaagtacatcagttatattaaccaccatggcctccacagaaggcacctcaggagacacaggacacacaacagcagtaactgaccaaggttccacacctgccaccacagagatctcagtgacaccttcaacccagaaaatgtcaactgtgtcaacacttgtcacttctactcaagaattaacttcttctcagagccaacgcactggaagcatggggaccagcagcaaacctcaagccaccacaccgacagaggtgaccacatccactctttcatcgttttcaaggggatccttattttctgcgcgtaactgctgcttgcaaacaaaaaaaccaccgctaccagcggtggtttgtttgccggatccgagctcggtaccaagcttgatgcatagcagcaaacctcaagccaccacaccgacagaggtgaccacatccactctttcatcattttcaaggggatccactcaaacccagacagtttcttgggaaacatcctcctcaggaaaaataactgccccatctacttccagtaggaggaccccatccgtagccacatcagacatattcaccaccacagactccacctcaggaaacgcggggcacacacttttaacgggaagccacagtgtgatcacatcaagagtcgcaagcacaactctaggccgattgtcaactgtagcgcacagacagtctactcagcgatcatctacacattctcagagttacttgactgaaagcatgggggcatccagcacgtctgaaaccagcctcctcacagaggctaccacagagacgagtttatgcctcttcacctggacccactgtgacagagaccttctctcgtggacgtcctcttcaggattgaccacgaaaacagacaatgacagaagtacagcactctcagccacctccttgacccttccggctcccagcacgtccacagcctccaggtccacagtgcctccagcccctcttccaccagatcagggtatttccctctttcagattggctttcccctcggctctctctgcgggattccttctattttacagataacggtcagatcattttccccgagtcagactacgatgtcttctcctaccccaacccacctcaaagaggcttcacaggaagggagcgtgtgccatagtggccattctggggtgatgctgatttctctagctccaggggaaccatattttaggaccactacatcacattttacgatgagcagcaccagcctaattcggaaggtggagtctctgattaatgagtttacaagtgactggagcttcaagccaagtgacactgaagtcacctgggtcaatgttcctgcctatccagcccaggggaggactttgggagccaatacctaccaagccatcctctccacagatgggagcaggtcctacgccctgtttctctaccagagcggtggcatgaggtgggatgtgacccagggactgtacaaccgagtgctcatgggcttctccagtggagatgggtattttgaaaacagcccgctgatattccggccagcagtggagaagtaccgtccagatcgattcctaactccaaattacggatccggggactcgaggtctacaggctacacagggaggtgtggcccaactacaggctcaagtgtctgcagtggttggaaagtcagcctcagcagcccagctggggctggaacaagatttcctgcccttgctcctggcagcagggacttcggttctggctcatcaacacaggtctgtggggcaggcagctatgcagcttctctccgggcagggcgtgtgctgtacgtatggcacctgggtgagtttcgagaaggctggagaatgcacagtccttggcagtttgatgaggacgaaggaaggcacagaactggcttggccgctggaacgacaagccctctttctgcgtccagtaccagctcaggcggccccgagttagttgtgctgggtaccaggcccccccggcccgcttggacatttggtgatccccacatcaccactttggataacgccaaatacaccttcaacgggctaggatacttcctgctggttcaggcccaggacagaaattcttccttcctgctggagggccgcactgcccagactgattctgccaatgccacgaacttcattgcctttgcggcccaatacaacaccagcagcctgaagtctcccatcacagttcagtggtttcttgagcccaatgacacaatccgagttgtacacaataaccaaacggtggcctttaacaccagcgacactgaagacttgcccgtattcaatgccactggtgtcctactgatccaaaatggctcccaagtctcagccaactttgatgggacagtgaccatctctgtgattgctctctccaacatccttcacgcctcctccagcctgtcagaggagtaccgcaaccacacaaagggccttctgggagtctggaatgacaatccagaagatgacttcagaatgcccaatggctccaccatcccctccaacacgtccgaggagactcttttccactatggaatgacatcggaaactaacgggataggcctccttggggtgaggacagaccctctgccttctgagtttactcccatcttcttgtcccaactgtggaacaagagcggcgccggtgaagacttgatctctgggtgcaacgaggacgcacagtgcaagtttgacatcctggccacaggaaacagagacatcggacaaagcaccaactcaatccttagaacattccggcacgtgaatggcacgctcaaccagtacccaccccctatccactacagcagcaagattcaagcctacaaggggcgagaacagtggccattgagatcaccagcaactctaaggatgtcgtattcagcctctccaacaagtgcagtggcctttgagctctttgaaaacgggagtttgcacgtggacaccaacatccccagaagaacgtacctggagattctagcaagggatgtcaagactaacttgtcatcggtactccagcctgagacggtggcttgcttctgtagtaaggaggaacagtgtttgtacaacgagaccagcaaagagggcaactcttccactgaggtgaccagctgcaagtgcgatgggaactccttcggccgcttgtgtgaacactctaaggacctctgcactgagccatgcttccctaatgtggactgcattcctgggaagggctgtcaggcctgccctccaaacatgactggagatgggcgtcattgtgtagctgtggagatctctgaattctgccagaaccattcctgtcctgtgaattactgctataaccatggccattgcgacatctctgggcctccagactgccagcccacttgcacctgcgcccctgccttcactggtaaccgctgcttcctggccgggaacaatttcactcccatcatctataaagagcttcccttgaggaccatcacgctctctctcagggaggacgaaaacgcctctaacgctgacgtcaatgcctcggtggcaaacgyackagagaacttggacatgcgggcttttctctccaacagcttagtggagctgatacgaacctctcccggagcaccagtccttggcaagcccattcatcactggaaggtcgtctcccacttcaagtaccgtcccaggggacccctcatccactatctgaacaaccaactgataagcgccgtgatggaggccttcctcctccaggctcggcaggagaggcggaagaggagtggagaagccaggaagaacgtccgcttcttccccatctcgagggcagacgtccaggacgggatggccctgaacctaagtatgctggacgagtacttcacgtgcgatggctacaaaggctaccacttggtctacagcccccaggatggcgtcacctgtgtgtccccatgtagtgagggctactgtcacaatggaggccaatgcaagcacctgccagatgggccccagtgcasstgcgcaaccttcagcatctacacatcctggggcgaacgctgtgagcatctaagcgtgaaacttggggcattcttcgggatcctctttggagccctgggtgccctcttgmtactggccatcttagcatgtgtggtctttcacttctgcggctgctccatgaacaagttctcytaccctctggactcagaactgtgaggcctcgtcccagatgggcagctgcacstagaatacctcaggacccgcccaccggtctgcccctgctctagggagactggaaagggccgactssatgaagatgatttgakattcttcaagcatgaataaagggagtgaaaccagactctaccattttagtagsccatgggtataggwwwwssssagatgassaaatgtagagatggatggattcctatacagcacatgggaaaggatattgcctatgtacacacacacacacacacacaccagagttaatggatgactggctttatattcaccaaaatgtttttacttataaaaccagcatacttctcmttaaaatctatttaaatdtaaaaaaaaaammrraawtc

SEQ ID NO: 3158 - DNA, 4546 bp, Rattus norvegicus
gccaccatggggctgccactagctcgcctggtggctgtgtgcctagtcctggccttagccaagggcttggaacttcagaaagaagccagatcccgaaaccatgtctgcagcacctggggtgacttccactacaaaacttttgacggcgatgtcttccgattccctggtctctgtgattacaactttgcttctgactgccgagactcctataaggaatttgctgtgcacctgaagcggggcttggacaaggctgggggtcactccagcatagagtccgtcctgatcaccattaaggatgacaccatctacctcacccacaagctggcagttgtgaatggggccatggtcagcaccccacactacagctccgggctgctcattgagaagaacgatgcttataccaaggtctactcccgtgctggcctctccctcatgtggaaccgggaagatgccctgatggtggagctggacggccggttccagaaccacacctgtggtctctgtggggacttcaatggcatgcaggccaataatgagttcctctctgatggcatacgcttcagtgctattgagtttgggaacatgcagaagatcaacaagcctgaggttgtatgtgaggaccctgaggaagtacaagagccggagtcctgctctgaacatcgagctgaatgtgagaggctgctgacctccacagccttcgaggactgccaggcccgggtgcccgtggagttgtatgtgctcgcctgtatgcacgaccgttgccagtgtccacagggtggtgcctgcgagtgcagcacccttgctgagttctcccgccagtgctcccatgcaggtggcagacctgagaactggaggactgcctcactgtgccccaagaaatgccctggtaacatggtgtacctggagagcggctcgccctggctcgacacctgctcacatctggaggtcagcagcttgtgtgaggaacactacatggatggctgtttctgcccagaaggcactgtgtatgatgacattacgggcagtggctgcatccctgtgagccagtgtcattgcaagctgcacggacacctctatatgccaggccaggagattaccaatgactgtgagcagtgtgtctgcaatgctggtcgctggatgtgtaaagacctgccttgccctgagacctgtgccctggaaggtggctcccacatcaccacctttgatgggaaaaagtttacctttcatggggactgctactatgtcctgaccaagaccaaatacaatgactcctatgccctcctgggtgagctggcctcctgtggctctacagacaagcagacctgtctgaagaccgtagtgctgttgactgacaacaagaagaacgtggtggccttcaaatcaggtggcagtgtgttgctcaatgaaatggaggtgtccctgccccatgtggcagcgagcttctccatcttcaaaccctcctcctaccacattgttgtgaacacgatgtttgggctgcggctgcagatccaattggtcccagtcatgcagctttttgtgactctggaccagtctgcccagggacaagtgcaaggtctgtgtggaaacttcaacggcctagagagtgatgacttcatgacgtctggtgggatggtggaggccacgggggctggcttcgccaatacctggaaggcccaatcaagctgccatgacaaattagactggctggatgacccctgtcccctcaacattgagagcgccaattacgctgaacactggtgctccctactgaagaggtcggagacgccctttgccagatgccacctggctgtggatcccactgaatactacaagaggtgcaaatatgacacgtgcaactgtcagaacaacgaggactgcatgtgtgcagctctttcttcctacgctcgtgcctgtgcagccaagggtgtcatgctgtggggctggcgggagagtgtctgcaacaaagatgtgcacgcttgccccagctcacagatcttcatgtacaacctgaccacttgccagcagacctgccgctcaatctcagaaggcgacacccactgcctcaagggatttgcacctgtggaaggctgtggctgccctgaccacaccttcatggatgagaaaggtcgctgtgtgcccttgtctaagtgttcctgctaccaccatggtctttacctagaggcaggagatgtgattctgaggcaggaggagcgttgcatttgccgaaacggaaggctgcaatgtacccaggtcaaactgattggccacacctgtctgagcccccagatccttgtggactgtaataacttaactgctttggccatccgggaaccccgtcccactagctgccagacactggtggctcggtattaccatacagagtgcatcagtggctgtgtgtgtcccgatggactcctggataatggccgtggtggctgtgtggtggaggatgagtgtccttgcatccacaacaaacaattctacgattctgggaaaagtatcaaactggactgcaacaacacatgtacttgtcagaaaggacgttgggagtgcacccgctatgcatgccacagcacctgctctatctatgggagtggccactacatcaccttcgacgggaagcactatgactttgatggacactgctcctatgtggctgtccaggactactgtggccagaactctaccggttcttttagcattatcactgagaatgtcccctgcggtaccacaggtgttacctgctccaaggccataaagatctttattggggggacagagctgaagttggtggataaacaccgtgtggtaaagcagttggaagagggacaccatgtgccctttatcacacgagaagtgggcctgtacctagtggtggaggtcagctctggcatcattgttatctgggacaagaagaccaccatttttatcaagctggatccctcttacaagggcaatgtatgtggtctgtgtgggaactttgatgatcagaccaaaaatgacttcaccactcgggatcacatggtggtggccagcgagctggactttgggaacagctggaaggaagcttccacttgcccagatgtgagccacaacccagacccctgcagcctgaacccacatcgccgctcctgggcagagaagcaatgcagcattatcaagagtgatgtgttcctagcgtgccacggcaaggtggaccccacagtcttctatgatgcctgtgttcatgactcatgctcctgtgacactggtggtgactgtgaatgtttctgctctgccgtggcctcctacgctcaagagtgcaccaaggccgaggcctgtgtgttctggaggacgccagatctatgccctgtattctgtgattactacaaccccccagatgagtgtgaatggcactatgaaccctgtgggaaccgcagctttgagacctgcaggaccctcaacggcatccattccaacatctcagtgtcttacctggagggttgctaccctcggtgccctgaggacaggcccatctatgatgaggacctgaagaaatgtgtcagtggggacaagtgtggctgctatattgaggatactcgctacccacctggaggatctgttcccactgatgagatctgcatgtcttgtacatgcaccaacacatcagaaatcatctgccgtccagatgaagggaagattattaaccagacccaagatggtatcttctgctactgggagacctgcggatccaatggaacagtggagaaacacttcgaaatttgtgtctcctccacactaagtccaacctccatgactagcttcaccacaacctccacccccatttctaccacccccatctccaccaccattaccaccacctcagccactgccacaaccacagtaccttgctgcttctggtctgactggattaacaacaatcatcctaccagtggcaatggtggtgatcgagagaactttgagcatgtctgtagtgctcctgagaacattgagtgcagggcagccacagatcccaaactcgactggacagagctgggtcagaaggtacagtgtaatgtctcagaggggctcatttgcaataatgaggaccagtatggaactgggcagtttgaactttgctatgactatgagatacgagtcaactgttgctttccaatggaatactgtctttcaaccgtctcacctacaacttcaacaccaatctcgtctactcctcaacctacgtcttcaccaaccaccttacctacaacttccccactgacttcatctgctacttcaccaacaacctcacatatcacttcaacagtttcaccaaccacctcaccaaccacctcaaccacctcaccaaccacctcaccaaccacctcaaccacctcaccaaccacctcaaccacctcaccaaccccctcaccaaccacctcaaccacctcaccaaccccctcaccaaccacctcaaccacctcaccaaccccctcaccaaccacctcaaccacctcaccaaccacatcaccaatcacttcaccaaccacctcaaccacctcaccaa

SEQ ID NO: 3159 - DNA, 1294 bp, Rattus norvegicus
ccttttcaagcagccagcagaaaatgttaatcagtacctcacgtgagtaacttccacaccccaccctcttgcctgccaccaaagacattctctgctttcttcagctgttacccctcaatgctaggtgtacacttttcaaaggatgctaaatgttcagtgttcaagctgttacggaatgaagatgaggagctttctgtggagaaagtgggattgccctggagcctggttcagtggccactatatacttgccccttggccccctctgctccctaacagagactccaaatttgtggagcggacattgcggctggcgggtacccagccattggaggtgctggaggctgtgcagcgcagcctggtgttgcagcgaccacagacttggggcgactgtgtgacctgggcctgccaccactggcacacccagtactgtaacaacatacggcagctgctgcacaactttcctcccgaccaggtaacatgtctgtttggcagcatgagtttccttgcaaccagtttgctgcagactcttaagtagcttctcccagttactagtctagatatggctggtatctgaggcaggagatgtcagaaaaataaaaactttttgtttcgttcctcattccttgaagcaagagaaccggttctcttgctgttcctggtcactgtgctgtaggctatgtctgacctgatttttatcagggttgtagtgaacctcgaggcagagatccttgacatgagagcaaaggagtcagcatttattcaaatcccagttttctctaaacttggcaagtcatttctctgtacctttctttagcttgaacgaggaacagttagatgttccacagggccttctgtgaatccacattcgttggtatttattaatactaagtacatacctggcaatctagtacagaccagtaagtaaagcaaatgtctaagaattgatggttttttcagccaggaccttgcagtgtaggtcttagatgattgactccagccctcttcaggacccagccaagggtagtgagttggggtgcatctaggattgtcagatcttgctcctgaaactctttctttgttttagctcaccagctcaggggcccctttctggtctggacccaaacgatgtccacacccacttacttttgatgttaacaatgtaagtcttcttattggatttcctggggtcatatagaaaggatgggtaggtgggaaggaggtggtggcttcctgtctaagggcagatgtgttaaccctaccatgccctgcctttgcctagacattgcatctggat

SEQ ID NO: 3160 - DNA, 3590 bp, Rattus norvegicus
gtcgacctagtacaacggatctgggaaagcccttgcaaggagtcgtttataagcatctaatttctggcctttgcctgctcagcttcatctcctggcaccagggcccgcaaaacgtctcggtgaatcaggttcacggggggccaagaatgactgtggaaaaggaaggaacaggtaccttcctacgagtgtbscctggagtcttcaggatcttgtgcacttttctcctctggtttacaaccgtcatctttctctgactttctttgtttcttccccgttgctttagtctttgcagaagacgtgctcggttggctagacatctggcattccacttcttcccttggctcctctgcacgccccttcttgcttccagacggctccatcttgaatttagatgagacctccgaaagaaagttctcctagcttcccttccacaggagtcttagagcttccctgatgtttgactgtggctctctgtatctcagttcccccacctctctctgtgtggaatgaatttcacccccctctwatcccacccccgtaaacctcagttcttccctgcaaatcttcttcccacattcacgacttgtttcatgttcctaaggacattatctagtgccatgtgcgtgactgtgagtttggaagcctgcgggtcaccagtgggttcacaactgagtacaattcctccttctctcattaggcagcaatgagtgtcaggccctgtctctttctcactggcaccaaagggtggcaggtgttgaattttggtggatagatatagtagaggaatatttcttttgagtctgtgtcttccatatcccaggcttgtctcaaacactctatgttgctttgaactttgtctttgaactttctgatgcccctgcctctggctctgtaagtgcaggattgagaagtctattacttatgatagtacactggggatagagccagagttctgtgactgctaagcagaatgtctctccaccaactgatccttatcattactcctagcgtttctttttcttttttcacaaagaagcactcatcatgagtctggacagttgcctcaggggttgagtgggcttttgcacttctggagaactggtgcttgattcctagacattacagtggagatataggtccttgagcagctccagtatttttcagtgaaggagaaagtccttctgtaatggtgtgcagatgacacagttttggcttaatttcatgaagatttgaatgaagtcagccttggtgagagattattttatattatcgaatttgcttgaatttctgatagaaacaaactaagaaactttggtcttacttatatggcactgttgttcactgacgccacccagaatgttaactcaaaggaggtcaaaataggctgtagatgaacttcatgaactgtctaggggaagagagtaccaaagtccacgtgaggcagaggtgatccatctactggctggatccctggtgccacccatctttccagcatataagtactgcaggctggcctcagtgcagcrgttgtgggcakwamkgawkyssmtgcagagyatcagaggcccagctagagggasaacacmgaggagtaatttgctgacagacmwgcagggatggacctgctttcagctctcacactggaaacctgggtcctcctggcagtcrtcctggtgctyctctacsgrykwgkracyyryasacatggamttttyaagaaacarggrattcctgggccmaaacctctgccytttttwggcactgtgctgaattactayawgggyttakggarattygayrtggagtgcyataaaaagtatggaaaaatatgggggttgtttgatggtcaaaygcctstgtttgccatcayggacacagaratgatyaagaatgtrctagtgaaggaatgcttttctgtcttcacaaaccggcggkattttggcccagtggggattatgggraargcyrtctctgtakctaaggatgaggagtggaagagatatagagccttrctgtcmcccacgttcaccagtggaagactcaaggagatgttcccyrtcatygaacagtatggagacattttggtaaartacttgargcaagaggcggagacaggcaarcctgtcmcyrtgaaaraagtgtttggtgcctacagcatggatgtgatcaccagcacatcatttggagtgaaygtygattccctyaacaacccraaggatccttttgtggagaaarccaagaarytsttaagawttgayttttttgatccgttgttcttgtcagtagtactctttccattcctcacsccartatatgagatgytaaayatctgcatgttcccaaargattcaatagmatttttcmaaaaatttgtgyacagaatraaggaaacccgyctggattctrwgcakaagcaycsaktkgrttttctycakctsmtgmtgawbgyycataatvatkmywwasmyraagwdtctcwtmmagccctrtcygatrtkgaratcayagcccagtcartyatytttatttttgctggmtatgaamccaccagcagcacactytcctttgtcytgyattycctggccactcacccwgataywcagaagaaactgcaggaggakmtcgayrrgkcyytkcybwdtmaggcacctsmbasstwygatrywgtgakgkaaawggaatacctggatatggtgttgaatgaaacyctcagattgtatccaattggtaatagacttgagagagtctgtaaaaaagatrywsravkyratggtktgtttatrcccaaagggtcagtrgtsaygattccawcwtatgctcttcaycrtgayccacagcastggccarascctgaggaatttcryccagaaaggtwbrgcaaggagaacaagggmagcattsatccttatgtatatctgccctttggaaatggacccaggaactgcattgrcatgaggtttgctctcatgaatatgaaactcgctctcactaaagttctgcaaaacttctccttccagccttgyaaggaaacacagatacctctgaaattragyagacaagsamttcttsaaccarmaaaacccattrttctaaaggttstgccacgggatgmartcataamtggakcmtgaytttccctcaaggarttytrytgrrwtcktcasaaakgyrgtgtctaagaacayyrraccytttaatttayktmmtgaatwraattcagatraaaytrggrcttaatygactttgttttgattyggtacatyttkgmtctttctmagtgtctacrawgtacccaymtaatawaaaggarwtgrcaagtcwgtgayrgaacaggaamttmacctttgstgattctcaygggacyayctccatyyrywtctggtkgtctctgttaatttcttttgatagtaaccwtgtctstgtmmtttgatcaakaawytttsatgwaaakgtgaamwattstgryamytytawttgtagatttggtatcagatgttttwsatgcawtattctasamtaaatgytacatggaaarwawrwraawaawcmcywskkkmaaaatcmmmaddddmaaaaaaaaaaaaaaaaaa

SEQ ID NO: 3161 - DNA, 1381 bp, Rattus norvegicus
ctgcggatgccacggaacatcgagccaaatcccaggaacacgctctgaaccccaggagctgcacaccactctattaggtagtttattggcgcatcaaatctggagtctacctccctcggttcacaaatcagttcagagagaggatcaaacttgcccaagattaaagagtaatggtgtcacctgctcctcttccctgaatggcatgatgccagggatgtgactggtgacctgaaagggagggaaatcaaggcaggaacggctgggtgtgatggagacctcaaggctgttgtgagccccccaagaacagactctctggaggcaggctttatcgagcaggtcgttcaactggggagcacaaaggctacttaaatttttggggagtgagtaggggcactcagggcaaacggatgtcattgtccaagaccaaggtgtagggaatgctttactgcatgaaaaggaatttgaggtgcttgctgtctggacgtgactttgtccagagaggaaatttaacctataacctggccaccggttatgactacctcaaggattgcagaggtggggccaaaaggctatgtacgtgctctggaacatgcaggcccaggacggagaaggaggcgtcctgctcctgccagccttaagatgggaattttagggtctggacatcactggtgctccaggtcagctttcctggttgcagatctctcctggtcaaggctcccagctcgcctggatcccacaactgcacagtgtmmskycswggagtgaaggatgccactctgggtgttctttgtgctcctcaccctcaccagtggctcccactgctcactgcccccctcacctcccttcagggtgcggcggcatgcagacgccatcttcaccagcagctaccggagaatcctgggccaattatatgcccgcaaactgctgcacgaaatcatgaacaggmascawrggraraggamccaggaacaaagatccaggttcaaccgccatttggacagagtgtgggcaraggacaagcagatggccctggagagcwtctwgswrrsmttsccaaggatgaagctttcagcggaggcttgagccctcggcccccaaacatagctggaccctgttacttctacttcagttctgatcttctccttcctctgtgaatacaataaagacccatctcatctgcamwwmarmwtccttcattgtcaatctgattgtttttttaaacgtggtttatggttacctctcccaagtagcatgacaaagtataatgatgcagacaggcagagccggagagatggctcagttggtaaggcttttgctgtacaagcatgagaggagctcagaccctagcacccacataaaagccaggctcaggagtgcatgc

SEQ ID NO: 3162 - DNA, 2226 bp, Rattus norvegicus
gccgcgtttgatttcggggaggagcggagcagagcaggacccctctgcacccactcagccgactcagccaggttcgtggagcaacttcggcatcatgaatgcagcggccaaagctggaaagctggctcgagcaccagccgacctcgggaaaggtggggttccgggagatgcagttcccggtgccccagtggccgccccgctggcgaaagwwwttyykkwkktyytwrwggayccacgcagccggcrgcagtatgtacggggccgcttyctgggtaaaggaggcttcgccaaatgcttcgaaatctcagactcagacacaaaagaggtgttcscaggcaagatcgtgcctaagtctttgctgctcaagccccatcagaaggagaaaatgtctatggagayctccattcaccgcagcctcgmacaccagcacgtcgtaggcttccatggcttttttgaggacagcgactttgtgttcgtggttttggagctctgtcgcargaggtstytyctggrgctscacammaggaggaaggcgctgaccgagcccgaggcccgatactacctgcggcagatagtcctgggttgccagtacctgcaccgcaatcaagtcattcacagggacctcaaactgggcaacctctttctgaatgaggatctggaggtgaaaataggggattttggcctggcaacaaaagtggaatatgaaggggaacggaagaagaccctgtgtggcactcctaactacatagctcccgaggtgctgagcaagaagggacacagctttgaggtggacgtgtggtccattgggtgcatcatgtataccttgctggtgggcaagccaccttttgagacctcatgcctaaaagagacctacctccggatcaagaaaaatgaatacagtattcccaagcacatcaacccagtggctgcctccctcatccagaaaatgcttcagacagaccccgctgcgcgccccaccattcacgagttgctcaatgacgagttcttcacttccggatacatccccgcccgtctgcctattacctgcctcaccatcccaccaaggttttcaatagctcccagcagcctagaccccagcaacaggaagcctctcacagtccttaataaaggtgtggagaaccccctgcctgaccgtccccgagagaaagaggaaccagtggttcgggagacamaygaggccatcgagtgccaccttagtgacttgctacagcagctgaccagtgtcaacgcctccaagccctcagagcgagggctggtgcggcaagaggaggccgaggatcctgcttgcatccctatcttctgggtcagcaaatgggtagactattcggacaagtatggccttggttatcagctatgtgacaacagtgtgggagtgctctttaatgactcaacacgcctcatcctctacaatgacggggacagcctgcagtacatagagcgtgatggcacggagtcctacctcactgtgagctcccaccccaactccttgatgaagaagatcactctcctcaactatttccgcaattacatgagtgaacacctgctgaaggcgggggccaacatcacgccccgggaaggcgacgagctggcccggctgccctacctacgaacatggttccgcacacgmakcgscaysaksctgcacmtcagsratggcacagkamagwttrrtktsktccwggaccasaccaawctwatcygtggccccctgatggcagcagtgacctacatcaacgagaagagggacttccggacataccgcctgagccttctggaggaatatggctgctgcaaggaactggctagccgcctccgctatgcccgcaccatggtagacaagctgctgagctcgcgttccgcctgcaaccgcctcaaggcctcctaggtctycgtccttcggactggtgccccttcattctgctagckstctgctagctctgggcctgcamtamtgggstcctggggccgctgttcagtgccctggccctggggctggcagggagcagtgcccctgtgaagggttgctgtgtgtaagttattttgtacatgattgggtgtggtttgcagcctgttccctgcccttggcccactgtatgaactgtataaatatttctattgaatttgggactgccctttccttagctttatatatattaaatatttgtacatctcwmwmwaaaaaaaaaaaaaaagggcggccgctct

SEQ ID NO: 3163 - DNA, 2405 bp, Rattus norvegicus
cctgacgctgccttctcactgcagataagtgagtagtacaggaccctctcccctctctatgcagccctgtgtctgtgagtgcccagggagcaggcatttaccaggtctggtggctgcgtgttccacacgtcctcatgaggctgaagagccaagcacatggcagacaacacacagaggcaaagagagtccatttccctcacgcctatggcccacggcctggagaacatgggggcagaattcctggaaagcatggaggaaggccgactccctcacagtcactcaagcctgccggagggtgaaggtggcctgaacaaagcagagcggaaggccttctcccgatggaggagtctgcagccgactgtgcaagcgagaagcttctgcagggagcaccggcagctgtttggatggatctgcaaaggcctgctctctactgcatgtcttggcttcttgatggtcgcctgcctcctggacctccagagggccctagcactgttgatcatcacctgtgtggttctcgtctttctggcctatgatctgctaaagaggcttctggggtccaagctgaggaggtgtgtgaagtttcaaggccattcttgcctgagcctctggctgaaaagaggtctagcccttgctgctggtgtgggcctgatcttgtggctatctctggacaccgcccagcggcctgaacagctggtgtcctttgcagggatctgtgtgttccttgtccttctctttgctggctcaaagcatcaccgtgcggtgtcatggcgagctgtgtcctggggccttgggctgcagtttgtgcttgggctcttcgtcatcagaacagaaccagggttcattgcattccagtggctaggggatcagatccaggtcttcctgagttacaccgaggcaggctccagcttcgtcttcggagaggctctggtgaaggatgtctttgcctttcaggttttgcccatcatcatcttcttcagctgcgtcatgtctgttctgtactatctgggcctcatgcagtgggtgatcctgaagattgcctggttgatgcaggtcaccatgggcacctcagccaccgagacactgagtgtggcgggaaacatctttgtgagccagactgaagctcctctgctgatccggccctatctggcagacatgacactctctgaagttcacgttgtcatgactggaggctatgctaccattgctggcagcctcctgggcgcctacatctcctttgggatcgacgctgcttccttaatcgcagcctctgtcatggccgccccttgtgcgttggctctctccaagctggtctacccagaggtggaggagtccaagttccggagtgagaatggcgtgaagctgacctatggagacgctcagaacctcttggaagcagccagtgctggggctgccatctcagtgaaggtcgttgccaacattgctgccaatctgattgccttcctggctgtactagccttcgtcaatgctgccctctcctggctaggggacatggtggacatccagggactcagcttccagctcatctgctcctacgtcctgcggcctgtggccttcttgatgggtgtggcctgggaggactgtccggtagtggctgagttgctgggcatcaagttctttctgaatgagtttgtggcctatcaagagctttcccagtacaagcaacgacgcctggcaggggctgaggagtggcttggtgacaagaaacagtggatctctgtcagagcagaaatcctgactacatacgccctctgtggatttgccaacttcagctccatcggcatcatgttgggaggcctgacctccctagtcccccagcggaggagcgacttctcccagattgtactccgggcactgatcacaggggctywcgkgtccctgctaaacgcctgtgtggcagggatcctctatgtacccaggggggtcgaggtggactgcgtgtcccttctgaaccaaactgtcagcagcagcagctttgaggtttacctgtgctgccgccaagtcttccagagcactagctcggagttcagccaagtggcactggacaactgctgtcgattttacaaccacacagtctgcacatagctgggacggagcatcttcctagcctcagggctcatccagcccagagaggccgtgggactcgtcactacctccatcccacaattgggaagggtgcaacggtcatcgctgctcccatgtctgcctctccaagtacgagttmccagagtctggtctgctctcctgccctttgggagccaacattctggtcctcttgagtcctctttccttgggaacctcatgtgcaccagccaaaagcctcctcsctgctccctcccaagcacccagcttgttgggtatccccccaaaagctgtctctagagaca

SEQ ID NO: 3164 - DNA, 1293 bp, Rattus norvegicus
ctcgtcttagacagagctactggggagtttttacctcagagcatgcaactcaacagactcttactagtttctttttcaggttgtgaaactcagccttcaaaggctcaagacctcggttccatctctgtgaaccaataggattgtctttagcatctgcttggtgtagaccatccagttttctctacggctctgtttcgtgatttttgtgagcctcggaggtgcctaagctcccttggctctagattcctggctttccccatctatcgagagcatctgaagcyatggcttacagttgccagcygmtgcaggaatcaccactcctcgggtttccacgtctcaggttcmwtcatctctktgtgctgctgctggtwggtctwytccagatatctwcaggtattgtcggccaagtgtccaagtcggtgagagaaaaggcattgctgtcctgtgattacaaattktgytctgaagagcagtccatacaccgamtctactggcaaaaacatgacarratggtgctctctgtcatctccggggtaccggaagtgtggcccragtacaagaaccggactgtatacgacatcgctaacaactactcctttagcctcctkggsctgatcctttcagacaggggcacatacacctgtgtcgttcaaaggtacgaaggagratcgtacgtggtgaaacacctgaccaccgtggagctgtctgtcagagctgacttccctacccccaacataactgagtmtggaaatccatctgctgacataaagaggattacctgctttgcttccgggggtttcccaaagcctcgsctctcttggttggaaaatggaagagaattaaatggcatyaatacaacaatttcccaggatcctgaatctgagctgtacaccattagtagccaactagacttcaacrcgacgtacgaccacttcatcgattgtttcattgagtatggagatgctcacgtgtcacagaacttcacctgggwaaaacccccagaagaccctcctgatgaaaagcaaacarttccgtttgcctgggcaggayctgatgcagtcaaagccatcatcatcttcttcatcgccatcaccgtcatcgccgtcatcgccgccatcgccatcatcatcttctgcatcactgtcaaattcmgacgctgcttcagaagaagaaatgaggcaagcagagaaacaaacaagaacctctacatagggcctgtggaagcagcagcygaacagactgtttgaaggtagccatttgccttccttkarytcttctctgcccactcgagca

SEQ ID NO: 3165 - DNA, 919 bp, Rattus norvegicus
aattccgcgccggccccttccccgtccctcccccgtccccgtccccgcccggccagccgcsaccgtttcccaccatggctctgaagagaatccacaaggaattgaatgacctggctcgagatcctccagcacagtgttcagcaggtcctgttggagatgatatktttcattggcaggctacaataatggggccaaatgacagcccctatcagggtggagtatttttcttgactattcatttcccaacagattaccccttcaaaccgcctaaggttgcatttacaacaagaatttatcatccaaatattaacagtaatggcagcatttgtcttgatattctmcggtcacagtggtctccagcactaactatttcaaaagtacttttgkccatctgttctctgttgtgtgatcccaatccagatgatcctttagtgcctgagattgctcggatctacaaaacagatagagaaaagtacaacagaatagctcgggaatggactcagaagtatgcsatgtaattaaagaaattattggataacctctacaaataaagctaggrgaactctgaaarararaaarwmmwwttgatttccatttgactgctttctatgagcccaccgcctcatcttcccctgtgcacatgtttacctgacacagcagtgctgcgttgttgtacatacttggaacaacaaactagaaatactgtacttctgtaccaacattgcctcctagcagagaagtgtgtgtgtgagaagccagttctccggkyktaacctaggcckatttcgatgtaagggtgaacattcatttgatggaaacacttgtgtatatttaaagacccagtgcttcctmtgragcttgwacgttcaagaatgattaatctgtgtaataaactgattactacagtcattacrkatag

SEQ ID NO: 3166 - DNA, 2161 bp, Rattus norvegicus
ctgacaccagcccagcaacagcttttactacagcaggcccaggcccaggcccagctcctggctgctgcagtgcagcaacactccgccagccaacagcacagtgctgctggggccaccatctcagcctccgctgccacacccatgacgcagatccccctgtctcagcccatacagattgcacaggatcttcaacaattgcaacagcttcagcagcaaaatctcaacttgcaacagttcgtcttggtgcacccaaccaccaacttgcaaccagcacagtttatcatctctcagaccccccagggccagcagggtctcctgcaagcgcaaaatcttttaacgcaactacctcagcaaagccaagccaacctcctacagccacagccaagcatcaccctcacgtcccagcctaccaccccaactcgcacaatagcagcaaccccaattcagacacttccacagagccagacaacaccaaagcgaattgatactcccagcttggaggagcccagtgaccttgaggagcttgagcaatttgccaagacttttaaacaaagacgaatcaaacttggattcactcagggtgatgttgggctygctatggggaaattatatggaaatgacttcagccaaaccaccatctctcgctttgaagccttgaacctcagctttaagaacatgtgcaagttaaagccccttttasagarktggctaaatgaygcrgagaacctctcatctgattctacagcatctwgcccaagtgctttgaattctccaggrttgggggctgagggcttgaatcgtaggagkaaaaaacgcaccagcatagagaccaacatccgtgtggcyttagaraagagtttcatggagaatcaaaagcctacctcggaagayatcaccttgattgctgaacagctcaatatggaraaggaggtgattcgkgtttggttttgtaaccgccgccagaaggagaaaagaatcaacccgccaagcagtggtgggaccagcagctcaccaatcaaagcaattttccccagcccaacctcactggtggcaaccactccaagccttgtgacaagcagtacagcaactaccctcacagtcaaccctgtgctccccttaaccagtgctgccatgactaatctttctcttacaggcactacagactccacgtccaacaacacggccaccgtgatttccacagcaccccctgcttcctcagcagtcacatctccctccttgagtccctctccttctgcctcagcctccacctctgaggcctctagtgccagcgagaccagcacaacacagaccacctccacacctctcccctcccctcttggagccagccaggtgatggtgacagcctctggcttacagactgcagccgccgctgctctccaaggagctgcacagttgccagcaaatgccagtcttgctgctatggctgctgctgcaggactcaatccaggcctgatggcaccctcacagtttgctgctggaggtgccttactcagtctcaatccggggaccctgggtggggctctcagcccggccctgatgagcaacagtacactggcaaccattcaagctcttgcttctagtggctctcttccaataacatctctggatgcaactgggaacctggtattcgccaatgcaggaggagcccccaacatcgtgactgcccctctgttcctgaaccctcagaacctctytctgctcmccagcaacccagtaagcttggtttctsccgytgcagcctccacagggaaytccgcacmtacagccagccttcatgcctcctccacctcaactgagtccatccagaactctctgttcacagtggcctctgccagcggggctgcctccaccaccacagctgcctccaaggcacagtgagctggacgcagagctggggctttcctcactgcagggtgataggctggctatcagctggctaaaacatgacgcctgtcattggcttcctcccaccatgttgtgaggatgaggaagacatggagagaagaaaaaaattacacataacaacaaaaaaaaaraawrgagacaggacaacgtttgcctaattttataataaaaacaatgtcttttcaggattgcttcatggattggagaactttctaaccaaaaawwwwaaaaaaaa

SEQ ID NO: 3167 - DNA, 2468 bp, Rattus norvegicus
tgagctgctcgctaccgggccacgaactggacgtgaggggcctggtgtgctgcctctacccaccgggagcctttgtgtctgtgtcccgggatcgtaccacccgcctctgggctccagacagtcctaacaggggctttacagaaatgcactgtatgagcggccactctaattttgtgtcttgtgtgtgcatcataccctcaagtgacatatatcctcatggactaattgccactggaggaaatgaccacaatatttgcattttctcgctggacagtccgatgccactttatattttaaagggtcacaaagatactgtttgtagtctttcttctggaaaatttgggacattacttagtggctcatgggacaccactgctaaagtctggctgaatgacaaatgcatgatgacattacagggtcacacagctgcagtatgggcagtaaagattttacctgaacagggcttaatgttaactggatcagcagacaaaacaattaaactatggaaggccggaagatgtgagaggactttttcagggcatgaagactgtgtaagaggtttggcaattttgagtgaaacagaatttctttcctgtgcaaatgatgctagtattagaaggtggcagataactggcgagtgtcttggagtatactacggacatacaaattatatttatagcatatctgtctttccaaattgtagagattttgtgacaactgcagaagacagatctctaagaatatggaaacatggtgaatgtgcccaaacaatccgacttccagctcagtctatatggtgctgctgcgtactggacaatggtgacattgtggttggtgcgagtgatggtattattagagtgtttacagaggcagacgagcggacagccagtgccgaggaaatcaaggcttttgagagagagctctctcaggcaactatagactccaaaactggcgacttgggggacattaatgctgagcagcttcctgggagggaacatctgaatgagccaggtactagagaaggacagactcgtctaatcagagatggagagagagttgaagcctatcaatggagtgttagtgatggcaggtggataaaaattggtgatgttgttggctcatctggtgctaatcagcaaacatctggaaaagttttatatgaagggaaagaatttgattatgttttctccatcgatgtgmaygaaggcggaccatcatataaattaccatataatgtcagtgacgacccctggctggttgcatacaacttcttgcagaaaaatgatttgaatcccatgtttytggatcaggtggctaaatttattattgataacacaaaaggtcaaacactgggacttggaaataccagtttttcagacccatttacaggtggtggtcgctatgttccaggaacttcagggccttccaacacagtgcagacagcagatcctttcacargtgctggtcgttatatgccagggtctgcagggatggataccaccatggctggagttgatccatttacaggaaatagtgcctaccgatcagctgcgykkmmrmcagtgaatatttatttccccaaaaaagaagctcttaccttcgaccaagcaaaccctacacaaatattaggaaaactgaaggaacttaatggaagtgcacctgaagagaagaagctaactgaagatgacttggtacttctggaaaagatactgtccctgatttgtggtaatgcttcagaaaagccgacggcccagcagcttcaggttctgtggaaagccatcaactggcctgaagacattgtctttcccgcacttgacattcttcggctatcaattaagcatcccagtgtgaatgagaatttctgcaatgaaaaagaaggagaccagttcagcagccaccttatcaaccttctgaaccctaaaggaaagccagcaaaccagctgcttgctcttaggactttttgcaattgctttgttagtcaggcaggacaaaagctcatgatgtcccagagggagtcattgatgtcacatgcaryasraskgaaatccgggagcaataagaacatcatattgctctggctacactgaccttgaactattctgtttgtttccataaagaccataacattgaagggaaagcccaatgcttgtcagtgrttagcacaatcttggaagttgtacaagacctagaagccacatttagactccttgtggctyttgggacacttatcagtgatgattcaaatgctatacaattagccaaatctttaggtgttgattctcaaataaaaaagtatgcttctgtatcagagccagytaaagtaagtgaatgctgtagacttrtcttaaawttgctgtagcagtggggaaargaagctgaggggtttksttttttttgttktgtyytgttttgtttttttccacattttacatgactgattgkagatgatttaaaaaraaaraaaraaa

SEQ ID NO: 3168 - DNA, 5560 bp, Rattus norvegicus
cgggcgagcgctagcggccgcggcggccgcgcggaacccagggaggcgggacgcagagccggagcgcggccccgaccaggcgggagcccgagcagcgctggcgtggatgctccccatcgcttggtcgttggagactcggttgctttttaatggcagcagcggctgttggatgactagagtttgttttgactggagggtcgcttttgcttggcactataactgctggattggtccttcctggcccttccactgttgaagggagaagatgccactgccatttgggttgaaattgaaacgcacccggcgctacactgtgtccagcaagagctgcctggttgcacggatccagctgctcaataatgagtttgtggagttcactctgtccgtggagagcactggccaggagagcctagaagctgtggcccaacgcctggagctgagagagatcacgtacttcagcctctggtactacaacaagcagaatcagcgtcgctgggtggatttggagaaacccctgaagaagcagctggacaagcacgcgctggagcccaccgtctactttggagtggtgttttatgtgccctctgtttcccagctgcagcaggagatcaccaggtaccagtattacctgcagctgaagaaggatgttctggaaggaaaccttccctgcacattggagcaagccattcagctggctggcttagctgttcaagctgattttggcgactttgatcagtatgaatcccaagattttcttcagaaattcgccttgctccctgtggggtggctacaggatgaaaaactgctggaagaagcagcccaaaaagtggccttgctgcatcagaaatacagagggctcacagctcctgaggccgagatgctgtacatgcaggaggtagagcggatggacggctatggagaggagagctaccctgccaaggacagccaaggaagtgacatatccattggtgcttgtctcgatggcatctttgtgaagcacaagaatgggaggcctcccgtggtgttcaggtggcacgacattgctaacatgtcacacaataagtccttttttgcgttagaactggcaaataaagaggagaccatccagtttcaaactgaagacatggaaacagcaaagtacgtgtggaggctgtgtgtggcacgccacaaattttacagactgaaccagtgtaacctgcaaactcaggctgccacgttgaactccgtcaggaggggctcatcgtccaggatgtctctgcctaaaccccagccctatgcgatgcctcccccaccccagctgcattataatggacattatacagagccatttgcttcttcccaagacaatgtctttgtgcccaacaagaatggattctattgccactcccagacaagtttggacagaacccaaattgacctcagtggccgcatccgcaacggcagcgtgtacagtgcacacagtacgaactccttaaacacacctcagccctacctgcagccctcccctatgtcctccaaccccagtattccaggcagcgatgtcatgagacctgactacatcccatcccaccggcacagcgccttgattcccccatcctaccgcccgacccctgactacgagagcgtgatgaagcggctcaacagaggcatggtgcatgcagacaggcatagccactcgctcaggaacctcaacattggcagttcctatgcatacagcaggcccgacgccttggtmtacagccagcctgagattcgggaacacccacacctcgcctctccccagtcagcccaytacccattwaacttgaacwacagtttccacagccaggctccgtatccataccctgtggagaggcggcctgtggtgggcgctgtgagtgtccctgagctgaccaatgtgcagctgcaggcccaggactacccagctccaaamawwawrarrammmaggtgtaccggccgcccccgccatatccttacccaagacctgccaacagcaccccggacctatcgcggcacctctacatcagcagcagcaatccagatctcatcaccagacgcgtccatcactcggtgcagaccttccaggaggacagcttgcccgtggctcactctctgcaggaggtgagtgagcccctcacagcagctcggcatgcacacctacagaagaggaacagtattgaaatcgcagggctcacacatggtttcgaaggcctgaggctcaaggaggagacgatgtcagcctcagccgcagacgtggctcccaggaccttctcagcaggctcccagtccagcgtcttctctgacaaagtgaagcaggagggaaccgaagagcaggggagtggtgggtacagtcacaagaagtccctttctgatgccaccatgctgattcacagcagcgaggaggatgaggacttagaagacgacagcagcagagaacacgctgtgtctgagccccgccttacggctgctttctctcaggaacaacagctaaactacccctgtgcttcagtgactccggtcactggccctctgcatattttcgagcccaagtcccatgttacggagcctgagaagagggcaaaggacatcagccctgtccacctggttatggagactcatcagccccgaagacatggactgctgaccccctccatgtccgagtcagacctcacgacgtcagggaggtaccgagctaggagggactctctcaagaagaggccagtgtcagatctcctctctgggaagaagaacactgtggaaggacttccgccactagggggaatgaaaaagactcgagcagatgcaaaaaaaattggccccctcaagctggcagccctcaatggactctccctgtcccggctgcccctgcctgacgaaggcaaagaagtgtccaccagagcgacaaatgacgagaggtgtaaagttctggagcagcggttagagcaaggaacggtcttcaccgagtatgagaggattctgaaaaagcggctggttgatggcgagtgctcaacagctcggctccctgaaaatgcagagagaaaccgattccaagatgtgctcccctacgatgatgccagagtggagttggtgccaaccaaggagaacaacactggctatatcaatgcgtcacacattaaggtctctgtcagcggaattgaatgggattatattgccacacagggaccattacaaaatacctgccaggacttttggcagatggtgtgggaacagggagtcgcaattatagcaatggtgacagcggaagaggagggaggtcgggagaagagctttaggtattggccacggcttggctccaggcacaacactgtcacctatggaaggtttaagatcacaactcgcttccgcacggactcgggctgctacgccaccacaggtttgaagatgaagcaccttctcacagggcaggagaggacagtttggcatctccagtacacagactggcctgaacatggctgtcccgaagacctcaagggatttttatcataccttgaagagatccagtcagttcgacgtcatacaaacagtacaagtgaacccagaagtcccaacccmccgctgctggtgcactgcagtgytggcgtgggaagaactggggttgtcattytgtcagagatcatggtggcctgtctggaacacaatgaggtgctggacatccccagagtsctggagctgstgaggcagcagaggatgatgctggtgcagacacttagccagtacacgttcgtgtaccggstgctcattcagttcctgaagagctytaggctcatctaagctccaccacctttmtatggggacccawtcatgtgatgtstttacagctttaaaaaraaaaarraaaraaaagagtgcagctcccactttgttcccaggagtccatgtggagacctcaacaggaagtgtgtaagagctgaagaagctaagcatggggctgaggagtctggggacctgggagaggccgaggaggcaggtgctgccctggccacatctgcctggtttgctgcacttgcacaagttttggagattgtattttctagacagttctctgtcgtactgaagctgcctgggcagtcccagccagcacttaaggcacacagacttctatcttaaactcatatttgataatgcaattttatgactaaatagggttttttcttttttagctagaagctgaacttttctgtgggacatccacagaccgtgtggttcttgagtacctgtatttaaaaccattattagcttttgtttaagaacaaaaaccatgggggaactaagtgttttattcatgaaatccaaaactaaagaaaatctaaaagtgttattttgaaacatagaaagcatttttatattcagaatgtttttttaaaagttatatatttgtaccttctatattttccaaataagagctccattgttatgacactgagtcaatgtaaagttggggataaaggcacattatttaaaaatctaagaatcagattcactattttttcagtattattagtaagcgtaaaatgagtttgatttttttgaacatgaaagagcaattgcataggatggttttaagcacttttttgttaaaaatgagtttaatatatgtggctttatatttaagcaacagtggacactatttcaaagagaagggctctgagtacgttcgatgactaggggaagaggaagtgctctcggggctcacccggaaggtgtggtcattacacaaatgcagtattacctatgctcactcgagcgagagcgagagctgagatggcgtggaactcaaggcctgctaccgtgatgacgggctttgctgcctggggttcttcctgtctttcttccccccacagacaagtccaggcttacattaccattagagacccccgaagaggctttgtttcctttaggttgaaaggaggaaatagttaacgaggttcctttccctgaaccacagcccaaacttgtggggccaccagaaattgctgtggtgttcagggggtacttgaatttagcaccgtaatcctgtcctcccccagggtcagttctaggtactggtctccctttccatcccatttgggcacattctctattgatcagaacccaggcttgaagtkgaaagtgctgttcttggrggacaagctggcacccttagctgaggtgtgtcatgttgtccagtgccctgcatcgtaggctgccgattcagtgtggacctagaatgttcgacmtaggactagcttccaatactgtcctgccatcactctgatttgactttgtggtgagcgtcaccacatgacaggggtgtgccagcccatcgaagcaggacagacacaggtggattgtgccccagggtgggatttgtgtgctctatgctccatgtcaagccatgtgaaggtcaggacccttctgaagcttttcttccaatggtacgttgtttgaagatgctttcctgtcacacctaaacatttggaaatatcccactgacaagaacacattgtaaaacaaaactttaattaaagrgtaatatatggcaaaaaaaaaaaaaaaaaa

SEQ ID NO: 3169 - DNA, 10140 bp, Rattus norvegicus
ggcacgagcagggttgccatgacggcctcctggaaaaactgatgaaggctttcgagtcgctcaagtcgttccagcagcaacagcagcagcagcagccgccgccgcagccgccaccaccgccgccgccgccgcctcaaccccctcagccgccgcctcaggggcagccgccgccaccaccgccgctgccaggtccggccgaggagccgctgcaccgaccaaagaaggaactctcagccaccaagaaggaccgtgtgaatcactgtctaacaatatgtgaaaacattgtggcacagtctctcagaaattctccagaatttcagaaactcttgggcattgctatggaactgtttctgctgtgcagcgacgatgcgagtagacgtagaatggtggctgatgagtgcctgaacaaagtcatcaaagctttgatggactctaatcttccaaggctacagttagaactctataaggaaattaaaaagaatggtgctcctcgaagtttgcgtgcagctctgtggaggtttgctgagctggctcacctggttcgacctcagaagtgcaggccttatctggtgaatcttcttccatgtttgacccgaacaagcaaacgaccggaggagtcagttcaggagactttggctgcagctgttcctaaaattatggcctcttttggcaatttcgcgaatgacaatgaaattaaggttctattgaaagctttcatagcaaatctgaagtcaagctctcccactgtgcggcggacagcagctgggtcagcagtgagtatctgccagcactctaggaggacacagtacttctacaactggctcctgaatgtgctcctaggtttgctggttcccatggaggaagaccaccccactctcctgatccttggtgtgttgctcacactgaggtgtctagtgcccttgctccagcagcaggtcaaggacacaagtctaaagggcagctttggggtaacacggaaagaaatggaagtctctccttctgcagagcagcttgtccaggtttatgaactgactttgcatcacacacagcaccaagaccataatgtggtgacaggggcattggagctcctgcagcagctcttccgtacccctccacctgagctgctgcaagcactgaccacaccaggagggctcgggcagctcactctggttcgagaggaagccgggggccgaggccgcagcgggagtatcgtggagcttttagctggagggggttcctcatgcagccctgttctctcaagaaagcaaaaaggcaaagtgctcttaggagaggaagaagccttggaggatgactcggagtccaggtcagatgtcagcagctcagcctttgcagcctctgtgaagagtgagattggtggagagctcgctgcttcttcttcgggtgtctccactcccggttctgtaggtcacgacatcatcactgagcagcctcgatcccagcacacacttcaagcagactctgtggatttgtcaggctgtgacttgaccagtgctgctactgatggagatgaggaagacatcttgagccacagctccagccagttcagtgctgttccatccgaccctgccatggacctgaatgatgggacccaggcctcctcacccatcagtgacagttctcagaccaccactgaaggacctgattcagctgtgactccttctgacagttctgaaattgtcttagatggtgctgacagccagtatttaggcgtgcagataggacagccacaggaggaagacagagaagctgcaggtgttctttctggtgaagtctcagacgttttcagaaactcttctctggcccttcagcaggcacacttgttggaaagaatgggtcatagccggcagccttctgacagcagtgttgataagtttgtttcaaaagatgaggttgctgaagctggggacccagaaagcaagccttgccgaatcaaaggtgacataggacagcctaatgatgatgattctgctcctctggtacattgtgtccgtcttttatccgcttcctttttgttaactggcgaaaagaaagcactggttccagacagagatgtgagagtcagtgtgaaggccctggccctcagctgtattggtgcagctgtggcccttcatccagagtcgttcttcagcaaactctacaaagtacctctcagtaccatggaaagtactgaggaacagtatgtctctgacatcctgaactacatcgatcatggagaccctcaggtgcgaggagctactgccattctctgtgggacccttgtctactccatcctcagcaggtcccgtctccgtgttggtgactggctgggcaccatcagggccctgacaggaaatacattttctctggtggactgcattcctttactgcagaaaactttgaaggatgaatcttctgttacttgcaagttggcttgtacagctgtgaggcactgtgtcctgagtctttgcagcagcagctacagtgacttgggattacaactgcttattgacatgctgcctctgaagaacagctcctactggctggtgaggactgaactgctggaaactcttgcagagattgatttcaggctggtgagttttttggaggcaaaagcagaaagtttacaccgaggacctcatcattatacagggtttctaaaactacaagaacgagtactcaataatgtggtcatttatttgcttggagatgaagaccccagggttcgacatgttgctgcgacgacattgacaagacttgtcccaaagctgttttataagtgtgaccaaggacaggctgacccagtcgaggctgtagcaagagatcaaagtagtgtttacctgaagctcctcatgcatgagacccagccaccatcccacttctccgtcagcaccataaccagaatctatagaggctacagcttactaccaagtgtaacagatgtcaccatggaaaacaacctctcaagagtcgttgccgcagtttctcatgaactcattacgtcaactacacgggcactcacatttgggtgctgtgaagccttgtgtgttctttcagccgcctttccagtttgcacttggagtctaggatggcactgtggagtgcccccactgagtgcctctgatgagtccaggaagagctgcactgttgggatggcctccatgattctcaccttgctttcatcagcttggttcccactggatctctcagccattcaggatgccttgattttggctggaaacttgctagcagcgagtgcccccaagtctctgagaagctcatgggcctcggaagaagaaggcagctcagcagccaccagacaggaggagatctggcctgccctgggggatcggactctggtgcccatggtggagcagcttttctcccacctgctgaaggtgatcaatatctgtgctcatgtcttggatgacgagactcctggaccagcaatcaaggcagctttgccttctctcacaaaccccccttctctaagtcctattcgacggaaagggaaggagaaagagcccggagaacaaacatccactccgatgagtcccaagaaaggtggagaggccagtacagcctctcgacagtcagacacctcaggacctgtcacagcgagtaaatcatcttcacttgggagtttctaccatctcccttcctacctcagactgcatgatgtcctgaaagccactcacgccaactataaggtcaccttagatcttcagaacagcactgaaaagtttggggggttcctgcgctctgccttggacgtcctttctcagattctagagctggcgacactgcaggacattggaaagtgtgttgaagaggtccttggatacttgaaatcctgctttagtcgagaaccaatgatggcgactgtctgtgttcagcagctattgaagactctctttgggacaaacttagcctcacagtttgatggcttatcttccaaccccagcaagtctacagtgccgagcacagcgccttggctcttccagtgtgaggcccggcttatatcactactgcttcatggcaccatacacgcacttcacgcaggctttggctgatgccagcctgaggaacatggtacaggcggaccaggagcacgatgcctcagggtggtttgatgtactccagaaagtgtctgctcagttgaagacgaaccttacaagtgtcacaaagaaccgtgcagataagaacgctattcataaccacattaggttatttgagcctcttgttataaaagcattgaagcagtacaccacgacaacatcagtacaactgcagaagcaggttttggatttgctggcacagctggttcagctacgggtcaattactgtctactggattcagatcaggtgttcatcgggtttgtgctgaagcagtttgagtacattgaagtgggccagttcagggaatcagaggcaattattccaaatatatttttcttcctggtactattatcttatgagcgctaccattcaaaacagatcattggaattcctaaaatcatccagctgtgtgatggcatcatggccagtggaaggaaggctgtcacacatgctattcctgcgctgcagcccattgtccatgacctctttgtgttaagaggaacaaataaagctgatgcagggaaagagcttgaaacccagaaggaggtggtggtctcaatgctgttacgactcatccagtaccatcaggtgctagagatgttcatcctcgtcctgcagcagtgccacaaagagaatgaggacaagtggaaacgctctctcggcaggtcgcagacatcatcctgcccatgttagccaagcagcagatgcatattgactctcatgaagcccttggagtattaaataccttgtttgagattttggctccttcctccctacgtcctgtggacatgcttttgcggagtatgttcatcactccaagcacaatggcatctgtaagcactgtgcagctgtggatatctggaatcctagccattctgagggttctcatttcccagtcaaccgaagacattgttctttctcgtattcaggagctctccttctctccatatttaatttcctgtccagtaattaacaggttaagggatggagacagtaatccaacactaggagaacgcagtrragggaaacaagtaaagaatttgccagaagatacattctcaaggtttctcttacagctggttggtattcttctggaagacattgttacaaaacagctcaaagtggacatgagtgaacagcagcatacattctattgccaagagctcggcacactgctcatgtgtctgatccacatattcaaatctggaatgttccggagaatcacagccgctgccactagactyttcaccagtgatggctgtgaaggcagcttctatactctagatagcctgaatgcacgggtgcgagccatggtgcccacacacccagctctggtactgctctggtgtcagatcctactgctcatcaaccacactgaccaccgatggtgggccgaggtgcagcagacgcccaagagacacagtctgtcctgcacgaagtcactaaacccccagatatctgctgaagaggattctggctcagcagctcagcttggaatgtgcaatagagaaatagtacgaagaggggcccttattctcttctgtgattatgtctgtcagaatctccatgactcagaacacttawyawrgctmattgwrawtmamawwmaarawmwrawcagcttgtcccacgagcctccagttcaagactttattagtgccattcatcgtaattctgcagctagtggtctttttatccaggcaattcagtctcgctgtgaaaatctttcaactccaaccactctgaagaaaacacttcagtgcttggaaggcatccatctcagccagtctggtgctgtgctcacactgtatgtggacaggctactgggcacccctttccgtgcgctggctcgcatggtcgacaccctggcctgtcgccgagtagaaatgcttttggctgcaaatttacagagcagcatggcccagttgccagaggaggaactgaacagaatccaggaacacctccagaacactgggcttgcacaaagacaccaaaggctctattcactgctggacagattccgactctctactgtgcaggactcacttagccccttgcccccagtcacttcccaccctctggatggggatgggcacacatccctggaaacagtgaatccggacaaagactggtacctccagcttgtcagatcccagtgttggaccaggtcagattctgcactgctggaaggtgcagagctggtgaaccgtatccctgctgaagatatgagtgacttcatgatgagctcggagttcaacctaagcctttttgctccctgcttaagccttggcatgagcgagattgcagggagccaaaagagtcccctttttgaagcggctcgtagggtgactctggaccgggtgaccaatgtggttcagcagctgcctgcagtccatcaagtcttccagcctttcctgcctacagaacccacagcctactggagcaagctgaatgatctctttggtgataccacatcataccagtctctgaccacacttgcccgtgccctggcacagtacctggtggtgctctccaaagtgcctgctcctttgcaccttcctcctgagaaggaggggcacacggtgaagtttgtggtaatgacacttgaggccctgtcatggcatttgatccatgagcagatcccactgagtctggacctccaagccggcctagactgctgctgcctggcactgcaggtgcctggcctctggggggtgctgtcctccccagagtacgtgactcatacttgctcccttatccactgtgtgcgattcatcctggaagccattgcagtacaacctggagaccaacttcttggtccggaaagcaggtcacatactccaagggctgtcagaaaggaggaagtagactcagatatacaaaacctcagtcacatcacttcggcctgcgagatggtggcagacatggtggaatccctgcagtcggtgctggccctgggccacaagaggaacagcaccctaccttcatttctcacagctgtgctgaagaacattgttgtcagtctggcccgcctccccctcgttaacagctatactcgtgtgcctcctctggtatggaaactcgggtggtcacccaagcctggaggggatttcggcacagtgtttcctgagatccctgtagagttcctccaggagaaggaggtcctcaaggagttcatctaccgcatcaacaccctagggtggaccagtcgtactcaattcgaagaaacttgggccaccctccttggtgtcctggtgactcagcccttggtgatggaacaggaagagagcccaccagaggaagacaccgaaaggacccagatccacgtcctggctgtacaggccatcacctctctagtgctcagcgcaatggctgtgcctgtggctggcaatccagctgtaagctgcttggagcaacagccccggaacaagccactgaaggctctcgataccagatttggaagaaagttgagcatgatcagagggattgtagaacaagaaatccaagagatggtttcccaaagagagaatactgccactcatcattctcaccaggcatgggatcctgtcccttctctgttaccagctactacaggtgctcttatcagccatgacaagctgctgctgcagatcaactcagagcgggagccaggcaacatgagctacaagctgggccaggtgtccatacactccgtgtggctggggaacaacatcacacccctgagagaggaggaatgggatgaggaggaggaggaagaagcggatgcccctgcgccaacatcaccacctgtgtctccagtcaattccagaaaacaccgtgctggggttgatattcactcctgttcgcagtttctgcttgaattatacagccgttggatcctgccatccagtgcagccagaaggacccctgtcatcctgatcagtgaagtggttcgatctcttcttgtggtgtcagacttattcactgacgtaccccagtttgaaatgatgtatctgacgctgacagaactacggagagtgcacccttcagaagatgagatcctcattcaatacctggtgcctgccacctgtaaggcagctgctgttcttggaatggacaaaactgtggcagagccggtcagccgcctactggagagcacactcaggagcacccacctgcccagccagatcggagccctgcatggcatcctctatgtgttggagtgtgacctcttggatgacactgtaaagcagctcattccagttgttagtgactatctgctgtccaacctcaaaggaatagcccactgcgtgaacattcacagccagcagcatgtgctggtgatgtgtgccactgcattctacctgatggaaaactaccctctggatgtggggccagaattctcagcatctgtgatacagatgtgtggagtaatgctgtctggaagtgaggagtccaccccctccgtcatttaccactgtgccctccggggtctggaacggctcctgctgtctgagcagctctctcggctagacacggagtccttggtcaagctaagtgtggacagagtgaatgtacaaagcccacacagggccatggcagccctaggcctgatgcttacctgcatgtacacaggaaaggaaaaagccagtccaggcagagcttctgaccccagccctgctacccctgacagcgagtctgtgattgtagctatggagcgagtgtctgtgctctttgacaggatccgcaagggatttccctgtgaagccagggtcgtggcaaggatcctgcctcagtttctagatgacttctttccacctcaagatgtcatgaacaaagtcattggagagttcctgtccaaccagcagccatacccacagttcatggccactgtagtatacaaggtttttcagactctgcacagtgctgggcagtcatccatggtccgggactgggttatgctgtctctgtccaacttcacacaaagaactccagttgccatggccatgtggagcctctcctgcttaccttgtcagtgcatctaccagcccatgggtttctgcaatccttccacacgtcatcagcaggatgggcaaactrgagcaggtggatgtgaaccttttctgcctggttgccacagacttctacagacaccagatagaggaggaattcgaccgcagggctttccagtctgtgtttgaggtggtggcagcaccaggaagtccataccacaggctgcttgcttgtttgcaaaatgttcacaaggtcaccgcctgctgagtagtacctgtggaacaagaggctgagaggaggcaactgctgtggytacagcctccaggggcctgcaccaagcttctgctaaggctgccttgsacgkgcaggcttccacttgtgtcaagtggacagccaggcaatggcaggagtgctttgcaatgagagctatgcagggaacatgcactatgttggggttgagcctgagtcytgggtcctggyatcactgcagctggtggcagtgytmggyygamymsktktytgtctttttcttagtgttgccctggccatagttgccaggttgcagctgccctggtatgtggaacagaatccgakctcttgtaagatggttctgagcccccctgtcccactgggctggakagctccctcccacatttacccagcaggtgtacctgccacaccagtgtctggacacaaagtgaatggtgtgggggctgggaactgggaytgccaggtgtccagcatcattttccctttctctgttttcttctcaggagttaaaatttaattatatcagtaaagagattaattttwmtgtaamwmwwmmwawrmmmrwgtaaagtgtgtgacttggcaaggcctgtgctgcatgtgacaaagtttatggaagtggatgcgccttctggccaccactctctctcctgtagctactcagtctagtcgggcaggtccctcatgtagccctcccaacaccctatggcacttgcacttcacacggctcctttttcttatgcattccatttgactagcaca

SEQ ID NO: 3170 - DNA, 1098 bp, Rattus norvegicus
gatagtgaattcgtgttgctttcaaggtcatgctggtgggggattccggtgtggggaagacgtgcctgctcgtgcgcttcaaggatggggccttcctggctggtaccttcatctccactgtgggcatcgacttccggaataaagttctggatgtggatggcatgaaggtgaagctgcagatctgggacacggctggtcaggagcggttccgaagtgtcacccatgcctactaccgggatgctcacgcactgttgctgctctacgacatcaccaacaaagattccttcgacaacatccaggcctggttgacagaaatccaggaatatgcccagcaggacgtggtgctcatgctgttggggaacaaggttgactctactcaagaacgagtggtaaagagggaagatggggagaaattagccaaggagtatgggctgccattcatggagaccagcgccaagagcggcctcaatgtggacttggcttttacagccatagcaaaggagctgaaacaaagatccaccaaggctcccagtgagccgcgcttcaggctgcatgactatgtgaagagggagggccgaggggtctcctgctgtcgactctgaacctagctgaatttcggttctacgctggaggcagctgtttgggataccataggtgatggatgccagaatgtcttccttttcaagacacctgaggctgatgctcttcagccccttggcctcaggggccatcacagaaagcatacaaaccacactatggcctgtggctgccctcttctgggcactcccagcaggaaggatggcaccacattcgtgcctcctatgaaaagccatgcttactgcacacggcctgggaaggaccccacacacgaccaaaggctacaagaatcatgttgtccatttgttgggttgcttccaagtcaactagtaggctctgatgtaggaaaccacaggaagattgggctgatagaaccaggtcactacttagcaggctggcccagtccttcccaccttgtactaaagtcaccagactacaaatgttgtgtgaaaacctgtccccattaataaaggtgtttctgcccgggaattcgcggtcacc

SEQ ID NO: 3171 - DNA, 5654 bp, Rattus norvegicus
ctgagctctatgatttctatcactatttctacatggtgaccaacacgctcttctatgtcagctcagcagtgacatacacagccacgatggctctgagaacctgggcgctgtgctggaggctgcggatctggctggcatccttgtgtctcaccaggctggcttggacccccagggagagagtctttctccacgtgatgaagcccaggaggccttcctcactcaggagctccaggcggctggggatggagctgacttgggcagaagctgatggtacctggatgaagacctgaagtgtggcgcggctcaccagcaccgtgcacacacgcgaggcaggctcaggctccccgtccgcgctttccacttcgtgcttctgtcccatgataaccgccatgggcagtgggggccgaggagcgcggccgagaagaccgtgcagcggagaagcggggtgccaagagcgcgggccgcctgcggagcgactgccccagccagccggatcccggtctcagcccgagccccaccggagcggagccggcccggtgctccaactgtccgcagccatgctggccggccgcgccgcacgcacctgtgcgctgctcgccctctgcctcctgggcagtcgggcccaggatttcgggccgacccgcttcatctgcacttcggtgccggtggacgccgacatgtgtgccgcgtccgtggccgcgggcggcgcggaggagcttcggagcaatgtgctgcagctccgggagaccgtgctgcagcagaaggagaccatcctcagccagaaggagaccatcagggagctgaccaccaagcttggccgctgcgagagccagagcaccctggacgcgggtccgggcgaggccaggtcgggcggcggccgcaagcagcctggctcgggcaagaatacgatgggcgacctgtcmcggactccggcctcggagacgctcasccaactcgggcaaactttgcaatccctcaaaacccgactggagaacctcgagcagtacagccgcctcaattcttccagccaaaccaacagcctcaaggatctgctgcagagcaagatcgatgacctggagcggcaggtgctgtctcgagtgaacactctggakgagggaaaaggrggccccaagaacgacacasaggaaagggccaagatcgagagcgccttgacctccctacaccagcggatcagcgagctggagaaaggtcagaaagacaatcgacccggagacaagtttcagctgacattcccactgcggaccaactacatgtatgccaaggtgaagaagagcctgccggagatgtacgccttcactgtgtgcatgtggctcaagtccagcgcggcacctggagtgggcacgcccttctcctatgctgtacctgggcaggccaacgagctggtcctcatcgagtggggcaacaaccccatggagatactcattaacgacaaggtggccaagctgccctttgtaatcaacgacggcaagtggcaccacatatgcgttacctggaccacccgggacggggtctgggaggcctatcaggatggcacccagggaggcaatggagagaacctggcaccctatcaccctatcaaaccacagggtgtgctggtgctaggccaggagcaggacactctaggcggagggtttgatgccacccaagcgtttgtgggtgagctagcccatttcaacatctgggaccgcaagctgaccccyggggaggtgtacaacttggccacctgcagcagcaaggccctctctggcaatgtcatcgcctgggctgagtcccwsrtsgagatctttggaggagccaccaagtggacattcgaggcttgccgccagatcaactgaaggcttcaggctagggctgagcccccgccccccgacgcctgcccaccctgcttgtgcagtgacccatcctctctctccctcccccccaacccccaggaatgactcaaggtcatggcccctgcacacgcacacgcacacagcctggtttgtcctccttgtgctcatgaagcagtcccggctcttctatggccccaaggatagccccttcttcctaagggcccttctatttcccgggcatgccatgctaaagcaggcagtatcagctttggcaatgcagaattatgtgagagagagagagagagagtgtgtgtgtgtgtgtgtgtgggaatgtgtgtgtatgtgcgtaggggaggctttcttctaaaatgaggtagttcattcccttctttctttgcgatttttgtaagtttcctgatgggtcagctgcccatgggcctcggggctggctcgggcttcctcggacacccatttatcgttgtttgcagacctctttgacataggtctctgttaacaagtttgttaaggttggggacctttcacgggaatctttatttgggatgataaagtggattctctgaaatttaaaggctggttgtccgggatgcaccacctgccaatcgtccctttcccatacccccatcaggccgtctgctgtctgctgtcatctgagggtagaggtgggtccttcagcaggtgtaccccagggactgctccttacctacccttggccttcctgcctccttgtatctatcaagggatctgttactccctttcagtttccaaagctacttcagcccagtggttctgagaggagagtgcccttccagagtcccaggacaccgggccttggcacccacccttcctcctccctatggcaataagagaccagaggcttcaagtggggatctcacgtgcttggtctcaactctacagggtactgagacttgacccacagtccgtgggaatgttttcccacggcatttttcacagccatactccctccccccagcacacccaggcccaggtgagctagctcagacctcaggggccaggggctcagaaacctctcatgcgaagcctgctggccagggtggggcctgccatccactcttgcatttcatggggcagcagcccccaccggccaccggcctgtgacactgagcccgtggctttttcttattgaaagtagcacgagggtacccccttctgggccttccaaggagggggacgaaatatgtgtgtgtgcgcgcacgtgtctgtggaatgctaaggaggttgtgtccaggtgtgggggaccckcgctttgttcccycatgttgcgggcacacgcccaatggcacctggacgacatctccagtaacctgactagcagaagrctggcaagtctttctagaaacctacgcactgcctggctcgtctgcagctgcagacacttaacttcctcatcaggagcaggtttttccacctgctgttccttccaggggcacctgtctccttccacacaggtccatgttgtgtctgaatctagtgcatccgtgtctgtctgtgtactgtctgtgtcgctgtttcttgtgggcgtctgcacggttcccggtcaccgctctgtggcgcatcccctctccgagggtgcggatcaggctgtgctccactcctccttgtccaagcagtggctttttttcttagataattgtgcttcctcagcacccgtcgggttgtggcatccttggatctgcggggatcttctgtgtttgcatgttccttggggtggtgtgttccttgctcccttggtccgacgcgtgttccttccttgcctgcatggacttctctggttctgtgttcgtgtgctgaatgccacccagtgttctgtgatcacccatgtagctactgaaaaatacggctgggtaagcaagccaggggtgttggggaggtcgagagagagaccagcatccctctcccctccccctcctccccagacatagcaagaagcattttctaacatctaggttgagaacaagcctgaatggtacccatggttgggagagagaactccagctttgaattgactttacagaccagatcgagccccacccttacttactttagccttctgggagccaccaccaggcgaggcccagagccggctgtggccggtgtactcctgccaacccctgccaccagccccagccccagcccctgccaactcggaccccagaccacttgcaccctgacgggtggggtgggagctgtccgttcaggaccacaagccatcctctgccctggctttgagggcagagcacaccccaatgcttctgcctctgtcccttcatctctcagcccctctcccttctcctctcccctgcggcacccacggtgccagggacagacgctgacatctagctcttgccctgcccctaactggagtctgtgccaagccctcttctccgtcactgtgttcacacttggcacttggctggccctgagaaacgtaatgacagccgcaaatctaatccgcatactttccatcgactccgtaatctgatcgatgttccctcttgcactgaataatacatgcctctctcaggtaagccattttataaaataagagataaaatgcactgtcgagacagtgtttgcttctgccgatggtgtccgacagcaccctgggcattagggtggtagagctgccacagaggctcccagcgcctagaggctgacgagctcacttgaatcgtaagccttcttgcttttgataacacagtattatttctcttactgtagaagaaaaagtttattaccaaacaagagtatttttatgaaaggataggacaaacckakraattatctcaacgtatatctatctcccttgaaaaaaaatactttcagactccaccaaaatgtaggrctgaaagagtgtattttggaagaaagagatacatttttgtatgcttttttttccttttgtagaactcccgacttagtttctaagactgcaaagatcacttcgtcaccagccctgggacctgagaccaaggggttgtcttgtgggcaatgaggggggaaggacaggccggcctgaggttcacagtcatwccaatgggttctgatgaggggccgctsgryckyraaggtgtgttggggaccaggaggttaaaaagataggccctccctcgatggtgggttctttgtgttggagctgaatggttacatggaaggagttgagaatttggataccagttctgrrcttggtagaagaaactagggtcactctggctaacataagggtacagcatccttagtaacccgagcgtggctcgaagcgttcatgatttcatccaaaacacaacatgtaaacttaytcagctaacaatgggraaatgtattgcttctgtgcscastggacttatgtgcaatttgttcaaaagggaacaagtcattgaggagaaacaagcccaatacttasagtccmaattttgtcttatttgccaaaaaaaaaaaaaaaaaaagcaacccccgccccctaragttgatattgttacaatgtacatattgtaaaatacggaagaatcgatgtatcttactttttcattatttgctaaccaaagctgtacatttttcatacaaatctgcagccttttgagtatcaaaggggtaaacccacacccatcagccattytggaagtgcactatttatactggtaccctcgcttttttttttcccattttcttgctgagatgacatgaattgttaagtttatttttacacagtaaagagtgaagammkmrwraaaaaaaaaaaaa

SEQ ID NO: 3172 - DNA, 1506 bp, Rattus norvegicus
atgcccggggccagggacgcgctctgtcaccaggcgctgcagctgctggccgagctctgtgcccgaggggccctggagcacgacagctgccaagatttcatctaccacctgcgggaccgtgccagaccccggctccgcgacccagatatctctgtgagcctgctaactctcgtggttaccgcctgtggtcttgccctctttggtgtctctcttttcgtgtcttggaaactgtgctgggttccgtggcgagagcgaggcctgttctctggtagcaaagacaacaaccaagagcctcttaactacactgatacagagacaaatgagcaggagaacagcgaggacttcctagacccacccacaccctgcccggactcctccatgaagatcagccacacttcccccgacattcccctctccacccagccaggtggccaggacaactgtgcccatgccgtccgtgtacagcgacaagtcacagagccaacgccgtcagctcggcataactcaatccgaagacaactcaacctgtcaaacccggactttaatatccaacagcttcagaggcaggagcagttgactgggattggtagaattaagccagagttatataaacagaggtcactggacaacgacgatgggaggagaagtaacagcaaagcctgcgggaaactgaacttcatcttaaaatacgactgcgacttggaacagctcatcgtgaagatccacaaagccgtcaatctgcccgccaaggacttctctgggacgtcagatccttatgtcaagatctacttgcttcctgaccggaaaacaaaacaccagactaaggttcacaggaagaccctgaaccctgtgtttgacgaggtgtttttatttcctgtgcactacaatgaccttgaagctcggaagcttcacttctccgtgtatgactttgacaggttctctcgccatgacttgattggtcaagtggtggtggaccacttcttcgacttggctgacttccccagggagtgcatcctttggaaggatatcgagtatgtcaccaacgataatgtggacctgggtgagcttatgttttcgctctgctatcttccaacagccggcaggctgaccatcaccatcatcaaagcaaggaatttaaaggcaatggacattacgggagcgtcagatccgtacgtgaaagtctcactgatgtgtgatggccggagactgaagaagaggaaaacatccaccaagaggaacacgcttaaccctgtttacaatgaagccatagtcttcgatgtccctcctgagagcattgatcagatccacttgtccatagctgtcatggactatgaccgtgtaggtcacaatgaggtcatcggcgtgtgccaagtaggcaacgaggctgagcggctgggcagagaccactggagtgagatgctgtcatatccccgraagcccatcgcacactggcactctctgctggagaaacgatgattgtggataggaagactgcttttgccaagg

SEQ ID NO: 3173 - DNA, 1222 bp, Rattus norvegicus
  misc_feature (673)..(673): n is a, c, g, or t
  misc_feature (802)..(802): n is a, c, g, or t
  misc_feature (910)..(910): n is a, c, g, or t
  misc_feature (912)..(912): n is a, c, g, or t
  misc_feature (925)..(925): n is a, c, g, or t
  misc_feature (1063)..(1063): n is a, c, g, or t
  misc_feature (1074)..(1074): n is a, c, g, or t
  misc_feature (1077)..(1077): n is a, c, g, or t
  misc_feature (1080)..(1080): n is a, c, g, or t
gcgagctgctgcaagccagctttcgaagcaccgcagcaacgccaaggacttttcttctctgcagcagggaacccccaacacccaaagccaagatgtccagcaagagagccaaggccaagaccaccaagaagaggccccagagsgctacgtccaatgtcttcgctatgtttgaccagtcccagatccaggagtttaaggaggccttcaacatgattgatcagaaccgtgatggcttcattgacaaggaggacctacatgacatgctggcctccctggggaagaaccccacggatgagtacctggagggtatgatgaacgaggccccgggacctatcaacttcaccatgttcctcactatgtttggggagaagctgaacggcacagaccccgaggacgtgatccgcaatgcctttgcctgctttgatrmggaagcctcagggttcatccacgaggaccacctgcgggagctgctcaccmccatgggcgaccgattcacggatgaggaggtggacgrsaygtascgtgaggcgcccattgataagaagggcaacttcaactatgtggrgywcasksgcatcmtcaagcacggcgccaaggrcaragrcgaytaggctcttcttagctgtcccaatgcctacaccccatcccagtcacytcctcramacatacactnwayycbscmcrwgrggagttaggkycccggmtcmcagggcasgrmaygagmcattaagacgcacagggtraggcaggggtkccacmacggacccargcactasaggaaggsccacagtggggaggtganccaagkktgggbccagctakcmccaaagtgaakgaagccactgaagatgbcmaccytyakccatgccctcccatyhcaggghtaccbtgakgaagaaaacayccatgntntggtgktsgwcantaattcccagmatcycymcaaagrhacacacccatbcmccatgtcchttcasaggatgacastytgcactyacacvyatggagttgtcccagcacacccagaatgcatwdarkrackykdcbtgagrgacaaawtytnymmyvcmhrsntrnryncmmhhhdvhhwdmararrawvamagtctgcacttacacctatggagttgtcccagcacacccagaatgcatagagggacgctgcytgagggacaaattctctaatacaaggctgagcaccammwmaaaaaaaaaaaaaaaaa

SEQ ID NO: 3174 - DNA, 1790 bp, Rattus norvegicus
gaattcacttcgtcctgacaattcttacatgtcacggtttctgccttatgtcttgttacccctgtccaggctgtgtcctctgaggttaaggctaggtgtcatgagacctcactatccacaggctgactgtctggtgtatgattcaggctgtgtttagtctgacaatgcccctccctaggctgtatctctgatgtcaggaccagcctgaagacttggatgtgctcatcagaccctgcaccctgacctggcctccactggctagtctgcgaaggacggttcctggatatccctttggtacccgctctcatacttgcccaacgtggaagccagctttgagcgttatggggtgatatgcaaagtgcgcccgtgggttctcaggtggtctctgtgaaagcctatctatgctacaatgccgggcagtgagggccagataaggaagaatagtcattgctccttaccagccatcttctgggaggtgggacctgttgaactcatggctactagccgctgctgctggagcaatgctaacatgcacccagtcagcccgcagttccttccttcagaggccaggtctgttcaccccagcctcacccacacaacctgctggaggctggtttccagtgtagaccgtttattgagagtaaggtaaggcagattcgataaagatgaaaagtctgtatctgcttgggttgacatctgtgtgggaggggctggagaggtggctcggtggttaagcgcattggctgctcttccagaggacccaggttcaattcccagcacccacacagtggctcacaaccgtctgtaagtccagttctcgggatcggatgtttttttctgactctgcatgctcctgcatacctgtggtacacagatgtatatgcaggtacatgtacacacacacacacacacacacacacacacacacacacacaattaagtaaaatttaaaaatatctgctcaggtctagaaaccagagctactgaaaatagatgtctctggatgggagcgggaactttatattctttgattttaaaaactaaatatattagtatttttaatatatgttaaataaaaataaaatataaattatatatttaattatacatttaaattatatatctttaaatatataatttatctgttatatcttttaatcaaaatatattttattatattgtattaatataaatctatatttatattaataaatatatgagtgtatttattaaatatgttttattaaaatacatttcagccattaaagtgtagctaacgataaaaaatggctttttctggagagttcagagcaagagagtttccaccttcacaagtgacaaacgatgttggtggtgctgtggacaaagtagcccagggtcttcttcactgttctcagtgaggtggttgagactaaatgtccctgcctagcctgtggctctgtccaggcagtggccttgccttgcagcctcatacaatctgctcatgaatgtctgtccctacctcttccagctccctgttttcctccctaaccctctcccctccccctcggactcccccccccgaccctgacaggattggggaggagtcttctggaatttcagagaagcgagtccagagtccgcagaacccagcaaacacatggctataaaagggctttccttgcgaccccacgcatcctcgggataccgaagtttgcctgctgccatggagaccagagccttctggataaccctgctgctggtcctggttgctgggtcctcctgcaaagcccaggaatttgttggcctat

SEQ ID NO: 3175 - DNA, 3528 bp, Rattus norvegicus
gcagccggcctgggacccagaaagggatcgatgagaggagcgcaataataacaataataacccacttcggagcaaacagcatctaaagagctgcgacccaactgcagcctaaaaaaaaaaatcaaacctgctcatgcaccatggttgttcaaactcggtacccttcgtggattattttgtgttacatctggctgcttggctttgcacacacgggggaggcgcaggctgcgaaggaagtactgttactggactcgaaagcacaacaaacagaattggaatggatttcctctccacccagtgggtgggaagaaattagtggtttggatgagaactacacaccaataagaacataccaggtgtgccaggtcatggagcccaaccagaacaactggcttcggactaactggatttctaaaggcaacgcacaaaggatttttgtagaattgaaattcaccttgagggattgtaatagtcttcccggagtcctgggaacttgcaaggaaacctttaatttgtactattatgaaacagactacgacaccggcaggaatatacgagaaaacctttacgttaaaatagacaccattgctgcagatgaaagttttacacaaggtgaccttggtgaaagaaagatgaagctgaacactgaggtgagagagattggacctttgtccaaaaagggattctatcttgcctttcaggatgtaggggcttgcatagcattggtttctgtcaaagtatactacaagaagtgctggtccattattgagaacttagctgtctttccagatacagtgactggttcagaattttcctccttagttgaggtccgtgggacatgtgtcagcagtgccgaggaagaggcagaaaattcacccaggatgcattgcagtgcagaaggagagtggttagtacccattggaaaatgtatctgcaaagcaggctatcagcaaaaaggggacacttgtgaaccctgtggccgcaggttctacaaatcttcctctcaggaccttcagtgttctcgttgtccaacccacagtttctctgaccgagaaggatcatcgaggtgtgaatgtgaagacgggtactacagagctccttctgacccaccatacgtcgcatgcacgaggcctccctctgcaccacagaaccttattttcaacatcaatcaaacgactgtaagtttggagtggagtcctccagctgacaacggaggaagaaacgatgtcacstacagaatattgtgtaagcgrtgcagctgggagcagggagaatgtrtaccatgcggaagtaacattggatacatgccccagcagacgrgattagaggataactatgtcactgtcatggacctgcttgcccatgcaaattacacgttcgaasktgaarctgtaaatggagtttcagacttaagcagatcccagaggctttttgcagccgttagcatcaccactggtcaagcagctccctcgcaagtgagcggagtgatgaaggagagagtgctgcagcggagtgtggagctttmmtggcaggaaccagaacatcccaacggagtcatcacggaatatgaaatcaagtattwtgagaaarawmaaararaaarracgtactcaacactgaaaaccaagtccacctcagcctccattaataatctgaaaccgggaacagtgtatgtttttcagatccgggcgttcactgctgccggctatggaaattacagccctaggctggatgttgcaacactagaggaagcttcaggtaaaatgtttgaagcaacagcggtgtccagtgaacagaatcccgtcatcataattgctgtggtggctgtagcagggaccatcatcttggtgttcatggtgttcggcttcatcattggaagaaggcactgtggttacagcaaggctgaccaagaaggggatgaagaactctactttcattttwartwwcmaggcacyrwmasytwyatwraccmwsaaamctwtkargacycaawtwgagctgtccatcaattcgccaaggagctagatgcctcctgtattaaaattgagcgtgtgattggtgcaggagaatttggagaagtttgcagtggtcgtttgaaacttccagggaaaagagatgttgcagtggctataaaaaccctgaaagttggttacacagaaaaacaaaggagggactttttatgcgaagcaagcatcatggggcaatttgaccacccaaatgtcgtccatttggaaggggttgttacaagagggaagcctgtcatgatcgtgatagagttcatggagaacggcgccctggatgcatttctcaggaaacatgatgggcaatttacagtcattcagttggtaggaatgctgagaggaattgcggctggcatgcgctacttggctgacatgggatacgttcacagggaccttgcggctcgcaacattcttgtgaacagcaatcttgtttgtaaagtgtccgattttggcctgtcccgggttatagaggatgaccccgaagctgtctacacgactactggtggaaaaattccagtaaggtggactgcccctgaagccatccaataccggaaattcacctcagccagtgatgtgtggagctatgggattgtcatgtgggaagtaatgtcttatggagaacgaccttattgggacatgtcgaatcaagatgtcattaaagcgatagaagaaggttatcgcttaccagcacccatggactgcccagctggtcttcaccagctaatgctggattgttggcagaaagaacgggcagagaggccaaagtttgagcagatagtcggaattctagacaaaatgattcgaaatccaagcagtctgaaaacacccctgggaacttgtagcagacccataagccctcttctggaccagagcactcccgacttcactgccttctgttcagtgggagagtggttgcaggctattaaaatggagaggtataaagacaacttcacagcggcaggttacaactcactcgagtcggtggcccggatgaccatcgacgatgtgatgagtttagggatcacactggttggccatcaaaagaagattatgagcagcatccagactatgcgggcacagatgctscacttacacggaaccggcatccaagtgtgacacatccgcctccctcagtgaggcttaagactgcaagagaacagttccggccttcagtatacacawagaatgctgctagaagacagtttgatatactgggtccttcctacaataaagagaagattttagaagcacctacagacttgaactcctaagtgccaccagaatatacaaaaagggaatttaggatccaccactggtggccaggaacacagcagagacaataaacaaagtactacctgaaaaaaacatcccaacaccttgagctctcgaacctcctttttatcttatagactttttaaaatgtacataaagaatttaagaaagaatatatttgtcaaataaaatcatgatcttattgttaaaaaawwmmaaaaaaaaaaaaaaaaaa

SEQ ID NO: 3176 - DNA, 2862 bp, Rattus norvegicus
atgaactttctgctctcttgggtgcactggaccctggctttactgctgtacctccaccatgccaagtggtcccaggctgcacccacgacagaaggggagcagaaagcccatgaagtggtgaagttcatggacgtctaccagcgcagctattgccgtccaattgagaccctggtggacatcttccaggagtaccccgatgagatagagtrtatcttcaagccgtcctgtgtgcccctaatgcggtgtgcgggctgctgcaatgatgaagccctggagtgcgtgcccacgtcggagagcaacgycactatgcagatcatgcggatcaaacctcaccaaagccagcacataggagaratgagcttcctgcagcatagcagatgtgaatgcagaccaaagaaagatagaacaaagccagaaaaarwrwcarkycraggmragkgaaagggtcaaaaacgaaagcgcaagaaatcccggtttaaatcctggagcgttcactgtgagcmwtgyymagagcggwgaaagcatttgtttgtccaagatccgcagacgtgtaaatgttcctgcaaaaacacagactcgcgttgcaaggcgaggcagcttgagttaaacgaacgtacttgcagatgtsacargccaaggcggtgagccaggctgcaggaaggagcctccctcagggtttcgggaactagacytctcaccggaaagaccgattaaccatgtcaccaccacaccaccatcgtcaccgtcgacagaacagtccttaatccagaaagcctgacatgaagggagaggagactcttcgaggagcactttgggtccggarggcgagactccggcagacgcattcccgggcaggtgaccaagcacggtggtccctcgtggaactggattcgccattttcttatatttgctgctaaatcgccaagcccggaagattagggagttttgtttctgggattcctgtagacacacccacccacatacacacacatatatatatatattatatatataaataaatatatatgttttatatataaawawawawawawmmwwwwwtttttaaattaactctgctaatgttattggtgtcttcactggatatgtttgactgctgtggacttgagttgggaggaggatgtcctcacttggatcccgacagggaagacaatgggatgaaagactccggtgtggtctttcgtccttcttagagaggccgaagtctgtttgcctgccagggagcacgcaaggccagggcacgggggcacgttggctcacttccagaaacacgacaaacccatccctggccctgagtcaagaggacagagagacagatgacagctaaagagataaagattctggttccgaccasacgwkktggggagcctcaggacatggcactattgtggatccccactagattctgcaagagcaccctgccctctgggcactgcctggaagaatcaggagcctggccatcaagctctctcctccacttctgaggagcctaggaggcctccacaggggtcctggcaaagagaagacacagtggtggaagaagaggcctggtaatggctcctcctcctcctcctgggaacccctcgtcctctccctaccccacttcctgggtatagctcaggaggaccttgtgtgatcagaccattgaaaccactaattctgtccccaggagayttggctgtktgtgtragtggcttacccttccccattttcccttcccaaggtacagagcaatggggcaggacccgcaagcccctcatggaggcagagaaaagagaaagtgttttatatacggtacttatttaatagccctttttaattagaaattaaaacagttaatttaattaaagagtagggktttttcagtattcytggttaatatttaatktcaactatttatgaggatscatctcttgctctttcttatttgtactgktttttttttttgywytgtttttctgtgystgtgtgygtgtatgaaatctgtgtttccaatctctctctcccagatcggtgacagtcwctagcttgtcmtgagaagatatttaattktgctaacactcagytmtgccctcccctgtccccaccacacattcctttgaaataaggtttcaatwtacatttacatactatatatatatttggcaacttgtgtttgtatataaatatatatatatatatatgtttatgtatatatgtgattctgataaaatagacattgctattctgttttttatatgtaaaaacaaaacgagaaaaaatagakaattctacmtactaaawhwmwmwmhwwwwwwaattttaatatttgktatcatttatttattggkgctactgtttatycgtaataatwgtgggggaaaagatattaacatcacrtstttgtctctagagcarttttccgagatattccgtagtacatatttmtttttaaacagcamcaargaaatacagatatatcttaagaaaaaammrgcattttgtattaaagaattgaattctgrwmwmaaarmwmwmmmwrrwmwctccttctctattgggtcctcctgtccactttccctcctcttttggggtacatggtgtttgtcttaggtttgagaaagcagtcctcggtgtaggatatggggtgacccatccattcctggttcactatgaagagttggtgctctagggatgggcagaggggagatggctccttagccaagggtcctcacactacacagcactcatctaggtccctgttccttgtcagacaaggacagggccacatctccaggtgctaactagagatcagagagagctgttggctgtagctggtcaggagagggaaagttggtactgcag

SEQ ID NO: 3177 - DNA, 755 bp, Rattus norvegicus
agaggcagcgagtaccagtcccttctctgctctgctgacaagcgcaccctctgttacctgctcagcaccatgaaggtctccaccrctgcccttgctgttcttctctgcaccatggcgctctggaacgaagtcttctcagcgccatatggagctgacaccccgactgcctgctgcttctcctatggacggcaaattccacgaaaattcattgctgactattttgagaccagcagcctttgstcccagccgggtgtcattttcctgaccaagagaaaccggcagatctgcgctgaccccaaagagacctgggtccaagaatacatcactgagctggaactraatgcctgagattagaggcagcaaggaacccccaaacctccgtgggccccgtgtagagcaggggcttgagccccagaacattcctgccacctgcaaatctccccctcctataagctgtttgctgccaagtagccacatccagggactcttcacttgaatttttatttaatttaatcctattgatttaatactatttaattttttaatttattttattgtcacatttgtgtttgtagctatttattctgaaagacctcagggcacattcctcagccctccccccccctcccagttgctcacactgtgtttggtgacaattattctaggtagacgtgatgacaaagtcatgaactgacaaatgtacaatggatgctttgtctataccagagaaataataaatatgctctttaacaaga

SEQ ID NO: 3178 - DNA, 3288 bp, Rattus norvegicus
gaattcgccgccgcctgacttcatggactgcgagcggggtgaagggtagctccagggtccgcggccaagagctctcccaaggctgagtgcgggctgagaatgcggccggaagaagagtcgcggcgtccccggtgacggtccggagttgcaaggtagggagtaggcagatggccaggcaaagttgatcggagcgaggaggtggttggcctgcgccttcggccgctgagaaccgcggagctacttggacttgaccctactcgccccagcgctttgagcagcgcctatctgtcgccctggcgggagcgcacttgcaaacttggtggaggtgccctgcgcgtcctgttgtgtaacctccgtgccgccagctggaccgggaagttgcccgcccgtccttcagcttggatcggtcgcagccccgggcgaatttcatggccccgcgacaaacgcgcggccagagccggtgtgggcgagcccccgcgcgctccgacccgtagggaactcccgcacgcggtccctgcccctggcccgcgcctccgatgcgcgctgagcctctcgccagcagctgccctctcgtcgcggtctgtcctttcgagtagctgcctgagttggaaagaagaggatgaccgaggtgccttggtcggctgtccccaacgggacagatgctgccttcctggctggcctgggctccctttggggaaacagtacaatcgcctcgactgcagcagtttcctcttcattccgatgtgccctgatcaagaccggcttccagttctactacctgcctgcggtctacatcttagtgttcatcataggcttccttggcaacagcgtggcaatctggatgtttgttttccacatgaagccttggagcggcatctcggtgtacatgttcaatttggctctggccgactttttgtatgtgctcaccctaccagctctcatcttctactacttcaacaagactgactggatcttcggggatgttatgtgcaagctgcagaggttcatcttccatgtaaacctctatggcagcatcttgttcctcacctgcatcagtgcacacaggtacagtggcgtggtgtaccctctcaagtctctgggcaggctcaagaagaagaatgccatttatgtcagtgtgctggtatggctcattgtggtggtggccatctcccccattctcttctactctggcactgggattcggaaaaacaaaactgtcacctgctacgactccacgtcagatgagtacctgcgaagttatttcatctacagtatgtgcacgactgtggccatgttctgcatccccctggtgctgatcttgggctgttatggattaattgttagagctttgatctacaaagatctggacaactctcctctccggaggaaatccatttacctggtgataattgtcctgacggtgtttgctgtgtcttacatccctttccatgtgatgaaaacgatgaatttgagggcacggctggatttccagaccccagaaatgtgtgatttcaacgacagggtttatgccacctatcaggtaacaagaggtctagcaagtctcaacagctgtgtggaccccattctttatttcttggctggagatacattcagaaggagactgtcccgagccaccaggaaagcttccaggaggagtgaggccaatttacaatccaagagtgaagaaatgactctcaacattttgtctgagttcaagcagaacggagacacaagtttgtgaaggcaggagatccaagctcctcagtttgtaacatggtcacaagaagtccctgagatgacctgatgcacaggtcaagaagaagcaacattctattggccaaaagaccagtttgtgccacatgagtaggtgttttcatataatgacagttatgttgacattttgttgaaagacacctgaaactgtaagatgtagcaagtgactcttcacactacaaagatgtcttcattccaagctcaagggtttgttttccttgttgctatctgctgtttattccttacaaagtactgtctcggactctttgatggttgctttgaacctgtattgaacggaaatgataaattaagaagaaacttagcacacaagacagaattcaaaattaaaaccgtgatgtgaccactgagaagacatttggaagcccattcttcatgaacagaaaaaggcgacaggacaccaactgttgatgccataggtgctgtggtaagtcttgaaaagcagtgagaactgtttggaatctgcttctgtgcttcctaggtctctccagtctagtccttggagaaagttctcaatctccaccgactgtggaacggacaagttgaaacctgtaaatctctgctcacccaaccaggacactaatccatcttgatatgacaaatatcagtactcagtagcaactagaattcaattagtgacaggacatagacagtgtgatactagtaaatgtgtattgaagcttttcttccattggtcgaatgtaattattgaaatagtatttattagaagaggtttataggccttcagatgtacagattgtaaaacttccttgaagatacaacatactggtgtaaactctatttattgaccagtgcataatgcttcaaatgatcacatgtatattttacagtatatatagctagataaaaatgagaattatatttaagagttttttttccagatattagtatctttgaacctttaggaccagtttgtatttgaatctgaaaagatgaaaatgtgttttctaacaagggttttaattttccctagatttgaatttgcatgctttcctttgtgtgggtttattgctacccagatatgatttggctgttagaccatggtaagatttataacaagcataggatattttagacaggttatgtatatgtacattatatatgtttatacaatagaaagtttgtgttgtcttttcagaamgkywmgagkattgccctaactatgatgcagcttccactgccaaaggctaatggcttatctcctattcaaaattgatttagatgtctagtggggttgggtagtgtagatacaatgtgagaatgtaaaagacaatctttagtgatgcagggtgataaagatgcagctgatagttttctgccagatcttgaagctttacaatgtatttttttcttaaggccacatagtacaatcttctttgmggssgykwattyttaagtaacactaacaacaaattgagcattgctattaattttaatctgttgttagtgttacttaaaaaaaaaggattgcggccg

SEQ ID NO: 3179 - DNA, 3281 bp, Rattus norvegicus
cggaacccgattgtgaagtgatcccgcaccacgggcaccaaaatacagggtgcattagggggtcgctaatatgtcagcaacaaattaatacgcatgtaatagctcattctttaactgaaaaaacccataaacaaaataagaaacgcagtgccattttggaacccaaggtaacaaggaaaattctccacagatgattgccccctgcaacgcccactggacccagaaaagggtgttggggacttcagagtgcagagagtctgtaggaagccttgaaaatgggagttggaggtgatctctggagagccgctctgcagaaaacaaagcaaaggtaactgagtggagagagggtttaaccgggggaaaggaccctgaggctttggctgccctcgctgcctcagtcaggcttctactcgcaacctgaaatggaatattcgacctggccgctaccaaaccccgtaattcccttgttcggtgattaattcttgctaacaagacttggcaagatctcggccgaataatttttggcttctgtaaggtccccaccacatgcgcgcataacctcctttcttgccaaaatcaagcccttgggaaattaaatgtccccgggaaggtaaaagcggggtgcagatgctacgtgacctggaaagagggatgtagaaactcgaatcgtctctgagcttattaaatttgccttttaaaaggtcactcttcgcatggacacttttcaacatcttccttcgcaccaaatgtagaccttaacaattatttccttagaggacattgcgtgtgagcaagagggaggcgaggacttccaccaaagcggaaaacctccgggtatatccctcctccccccttcccatggttaaataatcaggttttaggaagcttgggccggagtgcttcccattctcctgcaygggcacaccattcggccaattaacgcccccctctgggttgtaaagtaacaaacccctacacctctcttttgttattgggctttggcgcgaggacttccctttcatctttcaaagtccggggtttgcccaggttccgcgggaagctataaaaccgatctaatagctccggacggaaatcgatcacgcaaatgtataaactaagtccggggaatcgcattaaaaacaaaacaagacacaaccggccggacccgaagagcaagctttagtccggcgagaagaggtcccaagccctgcggggtggcagccatacagtgtcaggttccacccagcgagacctcggagacttggggggcggagggggagcgcaggggtgaagacctccacgctgagagcccaggcctcggttaggcccgcgtcgccacccgctactaacacaacgccgaacgccgcgctccggggctgaggaaggacagggagccgcacggcggctccattcacaaagtccgggagcttccggcttgccggcgggtcggaggctgcctcctttttcctctaggtctcggttttatgaatgggcctggcagacagcaccgagcgccctgtttactcctctctttgtgacgtcgagttcccgtgactgggtgcgagggggccggcgctccattcaagagtcggggtgggggcggggcggggagcttgcgtggggggcggggcctggagaggtagtaatgactcttccctcccccgggagagccggcgagcattaataaatctctaagcagaggaggaaactctggctggggcagtgcgtgcagctccggcggagcgttgggggaaaacggcggtgcctaaggcaggagcagcctagctagcaaaacacaccaggggcaacaaaccgagaggagccctgtctctcgtaaacatactcccctcctcggtcacttgctccgggtgccgtgcgcgcctgctttggcgccagagaaggctcggactgctatgtcccgtcgaggctgcgggaggaggaggaaggggtgttgggagaagagccttggggcaagtttgcgggtcacttcggcaggcgccttcttagccttcgcctgttccttcttgtagcctagctggcttgggtgcccttggtcttctccggctccccagctgctgtgctttgccggcgaaatggtgacgatggaggaactgcgggagatggactgcagcgtgctcaaaaggctgatgaaccgagatgagaacggcggcacggcgggcagcagcggcggcagccacggcgccctggggctgctgagcggcggcaagtgcttgctgctggactgcaggccgtttctggctcacagcgcgggctacatccgaggctcggtgaacgtgcgctgcaataccatcgtgcggcggagggccaagggctccgtgagcctggagcagattctgcccgccgaggaagaggtgcgcgcccgcctgcgctctggcctctactcggctgtcatcgtctacgatgagcgcagcccgcgcgccgagagtctccgggaggacagcacagtgtcgctggtcgtgcaggcgttgcgccggaacgcggagcgcacagacatctgcctgcttaaaggtggctatgagaggttttcttctgagtacccagaattctgctctaaaactaaggccctggccgccatcccaccccccgtacctcccagcacaaatgagtccttggatctgggctgcagctcctgtgggaccccactgcacgaccaggggggtcctgtggagatccttcctttcctctacctcggcagtgcctaccacgctgcccgcagggacatgcttgatgccctggggatcacggctctactgaatgtctcctcagactgccccaatcactttgagggacattaccagtacaagtgcatcccggtagaagataaccacaaggctgacatcagctcctggttcatggaagccatcgaatacatagacgcagtgaaggactgccgagggcgagtgctggttcactgccaggccggcatctctagatcagccaccatctgcctggcctacctgatgatgaagaaacgggtgaggctggaggaggctttcgagttcgtcaagcagcgccgtagcatcatctcgcccaacttcagcttcatgggccagttgctgcagttcgagtctcaggtgctcaccacgtcctgcgcagcggaggccgccagcccttccgggcccctgcgggagagggggaaggccactcccacccccacctcgcagttcgtcttcagcttccccgtgtccgtgggtgtgcacgcggctcccagtaacctgccgtacctgcacagccccatcaccacctcccccagctgttag

SEQ ID NO: 3180 - DNA, 815 bp, Rattus norvegicus
agccgagaggtgtgagsyrckagcagtgcccgagttaaggggaattggaggcaggcgccgatccacagcgatatcgagacactcagagccacaggcaccatgtccgatcctggtgatgtccgacctgttccrcacaggagcaaagtatgccgtcgtctgttcggtcccgtggacagtgagcagttgagccgcgattgcgatgcgctcatggcgagctgtctccaggaggcccgagaacggtggaactttgacttcgccactgagacgccactggagggcaactacgtctgggagcgtgttcggagcccagggctgcccaagatctacctgagccctgggtcccgccgccgtgatgacctgggaggggacaagaggcccagtacctcctcggccctgctgcaggggccagggccagctccggaggaccacgtggccttgtcgctgtcttgcactctggtgtctcacgcccctgagaggcctgaagactccccgggcgggaccgggacatctcagggccgaaaacggaggcagaccagcctaacagatttctatcactccaagcgccgattggtcttctgcaagagaaagccctgaagtgcccacgggaggctcgccttcttctgctgtgggtcaggaggcctcttccccatcttctgccttagccttcattcagtgtgtcttaattattatttgtgttttaatttaaacttctcctgtatatactctgcctgccccctcccmkcstscaaacttmgwtatwyaawwawmrawammaaacaatgaaattagtaggacggtaaaaaaaaaaaaaaaaa

SEQ ID NO: 3181 - DNA, 820 bp, Rattus norvegicus
tttttttttttttttttkkkycycagtttcycctttattgctccattyccctcccctcccccctgtaaacatggkgctgtgagactgtggcararaaggcttcctcggtgagctaggcacagtaragacacactggctcttctctgggcacaacccctcagtgctcggcagtcataccarggtgtgagtgaggtgggcarcargctcargtgcccctggtgggggcctggaagtttctgggtctcarcttcatttccgtgaagggcaccgagaactcgaakcccttccagtggtaccagctcactccctggtgatccactgtgctyccataragcccrttgagrttggcgtartgacagtycytgtaccamcaagcsccacgrtaggmswcagygcmsgagatkagcaagttattggggtctcgatcacgggcmgaaaagrcactgccgctgtggtagctcatagagtcacccgcggtcccatggtagccccctaggtgtagamgatagttctccttcgctgagtctactcggaagaagtcatactgggcgaacacggcttcctttccggcccgcaggtccacacgcatagagtagtctccagcctgcgtgaggctgtgaagggsctcattgcccagccagaattccctggagatgttcccaaaaccatgggcgtactcctcccagtctctccagaagtctgtctgtccgtccatgcggcgctggaacaccagccaacctcctccgtcagtctgcatgtcacaaaacacatccaagggccgctcgcggttgccattgaggaagatggtggtggtctttga

SEQ ID NO: 3182 - DNA, 2529 bp, Rattus norvegicus
tgggggtggaggatctcatcctcctggagcctctggatgaggagtctctgatcaagaacctccaacttcgttatgagaaaaaagagatttatacgtacattgggaatgtggtgatctccatgaacccctaccagcagcttcctatctatggcccagagtttattgccaaataccgggactataccttctatgagctgaagccccacatctatgctttggcaaacgtggcctaccagtcgctgaaggatcgggaccgggaccagtgtatcctgatcactggcgagagtggagctggcaagactgaggctagtaagctagtgatgtcctatgtggctgctgtctgtgggaaaggggagcaggtgaactcggtgaaggagcagctgcttcagtcaaacccagtgctggaagcatttggcaatgccaagaccatccgcaatgacaactcctctcgatttggaaaatacatggacatcgagtttgacttcaaagggtccccccttggaggtgtcattaccaactatctgcttgagaagtccagagtggtgaagcaactcaaaggggaaaggaacttccatatcttctatcagctgctggctggagcagacacacagctgctgaaggccctaaagcttgaggaagatgcacgtggctatgcctaccttaatggggaggtgtccagggtgaacggtatggatgatgcctccaacttcagggctgtgcagaacgcaatggcagtgattgggttctcagaggaggagattagacaagtgctggaggtgacagccctggtactgaagctgggcaatgtgaagctggcaggtgaattccaggccaacgggcttccagccagtggtgtctgtgatgggaaaggtattcaggagattggggagatgatgggtttgaactctgtagaactagagaaagctttgtcctcaagaaccatggagacaggcaaagagaaggtggtcacggtgctgaacgtcatccaggctcagtatgctcgggatgccctggccaagaatatttacagccgactcttcgactggatagtgaatcgcatcaacgagagcatcaaggtgggcactggggagaagaggaaggttatgggggtcctggatatctacggctttgagatactggaggataacagctttgagcagttcgtgatcaactactgcaatgaaaaactacagcaggtgtttatagaactgaccttgaaggaagaacaggaggagtataagagagaaggcataccatggacaaaggtggagtactttgacaacggcatcatctgtgacctcattgaacatagtcagcgaggcatcctggccatgctggatgaggagtgcctgagacctggggtggtcagtgacaccacttttctagcaaagttgaaccagcttttctccaagcacagtcactacgagagtaaagtcacccagaatgctcagcgccaatacgaccgcaccatgggcctcagctgcttccgcatctgccactatgcgggcaaggtgacatacgacgtgaccagtttcatcgacaagaataacgacctactcttccgagacctatcccagacaatgtggaaggcccagcatcccctcctccactccctgtttcccagaggtaatcccaaggaagcatctcccaaacggcccccgactgctgggacccagtttaagaattcggtggccatactcatgaagaacctgtattctaagaacccgaactacatcaggtgcataaagcccaatgaccagcagcagcaaggcaggttcacctcagaactggttatggtccaggctcgatacctggggctgctggagaatgttcgggtgcgcagggctggctacgccttccgccaggcctataagcctttcctggagaggtaccgattgctgagccggagtacgtggccgcgctggaatggggaagaccgggaaggtgtggagaaggtcctggggtctctgattttgtcatcagaggagctggcctatgggaggacaaagatcttcatcagaagccccaagactcttttctacctggaagaacaaaggcgcctgaggcttcagcagctggccaccctcatccagaaggtttaccggggctggcgttgtcggacccactaccagcagatgcggaagagtcagatcctgctctcggcttggtttcggggcaacaagcaaaagaagcactatgggaagatccggtcatcagtactgctgatccaggctttcgtgaggggctggaaggcccgcaagaactatcgaaaatacttccggtcaggcgcccgcatcactttggcaaattttatctaccagagcataacccagaaattcctcttgaatctgaagaagaatttgccatccaccaaagtgttggacaacacgtggccagctgccccttacaggtgcttcaacacagccaatcaggaactgcagcacctcttctaccagtggaagtgcaagaagtaccgagatcagctgtccccgaagcaggtgcagacactgagggaaaagctctgtgcca

SEQ ID NO: 3183 - DNA, 2607 bp, Rattus norvegicus
ggtttgtattgccttgtcttcatcatctaggaaagctttgctcttaggagtttcctaatacacccaaactcaaatatataaaggcatttgacttgttctatgccctaggggcggggggaagctaagccagctttttttaacatttaaaatgttaattccattttaaatgcacagatgtttttatttcataagggtttcaatgtgcatgaatgctgcaatattcctgttaccaaagctagtataaataaaaatagataaacgtggaaattacttagagtttctgtcattaacgtttccttcctcgctgacaacataaatgcgctgctgagaagccagtttgcatctgtcaggatcaatttcccattatgccagtcatattaattactagtcaattagttgatttttatttttgacatatacatgcagcatgtatcaaaattaatttggtttttttttcttaagtatttacattaaatggccatagtacttaaagttacattggcttccttgaaataaacatggagtattcagaatgtgtcataaatatttctaattttaagatagtatctccattggctttctactttttcttttattttttttgtcctctgtcttccatttgttgttgttgttgtttgtttgtttgtttgttggttggttggttaatttttttttaaagatcctacactatagttcaagctagactattagctactctggcaacccagggtgaccttgaagcatgggttgactgcgttttgccttccacatcaagattacaggttgagaaccactattttggttatagttagttagttagttagtagtgtgtgtgtgtgtaagtgttgtgtgtgattggtgtgtgtgtgtgatggtgcattgtgtgtgtgtgtgattgtgtttatgtgtatggtgtgtgtgtgtgtgtgtgtgtgtgtgtgttgtgatatatatttatggtagtgagaggcaacgctccggctcaggtgtcaggttggtttttgagacagagtctttcacttagctcggaattcaccaattagactgaaccagtgatcaataagcctcagtggtccatctgtctctgtctctctcctaattggtgacacatgccttcaggacaggcttgtaaatttagcttccggatcaaactcaggtcattatgctcacatgaaaagcagcttctgagaaactactatcaatcatttgtgggatttttatcaacatggaaatatataattggtcttgaaagccaggggaaaggtaaagaggggacaaagggacgaagtatgaaaatggctcagcaggtaagagcactggctgcttttccggatggactcagttttaattcccagcacccacatggcagctcacaactgtaactctgtttccaggggatccaacaccctcacagacatgtgtgtagacaaaacaccaatgcacataaaataaaacaatagttactttttaaaagtacaatgcaagcaacatcagagaaaagagctacaactattttttgttttaaagattttattaagaatgaagtgaatcacactgacgttcccttctttacattagctgggacatttctgatggcacctgttgtgtggtaggtgcatccactaatccttacagctcagaggtcaggccatggcttattgttccactcttctaccacaccggggctcgattcatactctgcctctgtggtttgagtctattcaaaatttaagaaaagaggctcctctttagtgccaatgttttcattaaatgtcattacacttgcatttttagcattgattattgaaaatgttgaagwaaactggagcttcatgtgtttcctgttccttagttacctcagttccaaaggcttgattgaaaggcaggggcakagctggtgaatcgtaagaaaagtactcaattacrrcatagcatttgcaaaacctacaaataagttctatttcaattgtctatactttcttggaaataagtagagcctttgtgatatacgttcgccatataaaatgataccgaatccagagtaattaattaatccctctaagtcttgaagtagtaagcattagggctgaaatcaatccctcccctcccctcccctytcccttttctttgttagttttgtggttaatgtgcaatgtgctttttattttattttttgcattttaatgtgccctaattttattctcttttgggggttaatgtgctttacttttaaaaggaggtccaataaattccttaagatagggcagggagctcaacatagctgaaactcaattgcactgtaccattcctgggaggaataaaacctcaaaaggaaaggcagggggaaaatccatgattcctttttctttctgtagctgagttgtttccgggagtagttttgcaagacttgtttctccttggttttgaccaggcccgagccagttcttcaaacaaagacagccagttactaactttggttgctaggtgtggcttcagttcatatcctataaaatcaggagtccagccctccacttccagtccgaaagcatctgagcaaagcttctcttcagttccctggaagacaaggcaatacaaaggtaaggctta

SEQ ID NO: 3184 - DNA, 2410 bp, Rattus norvegicus
gaattccgagggtgaggaccatggcaggtcggaccctagctctgcgatatgggcccccttggtcccctatttctgaaactgaggtgcttggagcctggcccaactggcatctcaccagcagcggggtcgcccaccacaggatcccactggcgccctttcctccgcctactctacagtctacggtcaaggagcccctgcctgcagcctcgaaacaggacccacacatctgggctttcgacgaagtcatcagcagatgggaaaccacctcaggctcagcacacacacccaagtggggcagtggcccctgtgctcagcccaaggcaccagaacatgaggatcccaggcggacactaggcatcaagtctttggcagaaaagctaagaagacatgaaggcctgggtgtccctctgaccacaaaataccagatcagtgagacaaaagcacagtacaaggactggccagatctggatcagagtgaccccctcttggcagagcccctatccctggagctcactgaccaccatcgagggggaccttctcaggccctaatcccctggacgaggaaccccaagttggctggccaacccttcacagtgaacaagatgggtgtcctcgatcggctccaaccttacatgaccacttctgcacgggacttctcaaggaagttgtctggatatccctaccagaaatcggagatttgccagagctggcccaagaaggcatctcgccgtgagctgaaaagtttacccacggtacgcagcccgcgcaggcccatcgcaaccgatcgtgccatacttgggaggccctgcctctgacaccgggagtcctacggacccccgatgcacccgttctgtaggatggaccgcatttgcctagtagacgcaccctggggaggcctccaccggaatccagtgccaggcatctacagtgtaccgaaggcctactgcactgagaattcccgctatgggagtgccaggagggagctggtgtgagcgtgtgaagcccacccacaacgcaaactccaacattagacttgtgggcaggccaacccagacacacyyyttyytywywkwkkttccyccaggcggagtttactgatcaagaagttttatagctgaaaccacacccatttttggacccaatccaggcatcctgattagggggctgggcgaggggcggcgcccacctctggttgtatttaaagcaaatttggrggctcacttgtcaraaccgaacaccgaagctgtgcccycctattcagttgtacycaaccatcggagtgggtctgactgaagttcattccagcatcctagggccagctagcagcctgcagagttctcccctttacctgttccctgtgttcccaatgtcagttaagctcaggcacctgggctgagtgtgaggccaattcactgaracactggagctggtccctggcttttctgaccttgtctgtctcgcccccaaagagattagtgtctaggttacccaagcctgtagcctctgcttagtggccttgccacccccacaacccgcaggtataaagccaggtgcccaaggtagggaaggtatcaagaatggagaggctccaggtaagatggtagggcccagggtacctcccgattctagcagaccccatagatggacagccttgtgacctaggggttggaggatggagaggaagggggctcctaactggtggacgtcaagtaagagaaatagatttgatggcgggtgatgggtcttgatggacagtttctctattatactgagcggctccagaacctggaatgcaaaagccaggtcagggatagaatgagacactggctatgtcccaggggctgctgctgtggctgctgctgagcccaagtgtggtgtgggcctccaggggcccccttcggccactgtgccggcctgtcaacgcaaccctggctgcagagaatgagttctgcccagtctgcatcaccttcaccaccagcatctgtgccggctactgtcctagcatggtgagctgaccaaatgggtatggacatcacytcmgmyswrsaktkctscwmscwgymctacaggttcgagtactgccagctgcmttgcctcccgtgcctcagccagtgtgcacctaccgtgagctgcgcttcgcctctgtccgcctccctggctgcccacctggtgtagaccccatagtctcctttcctgtggccctcagctgccrctgtgggccctgccgtctcagtagctctgactgtgggggtcccaggactcaaccaatgacctgtgaccttccccacctccccggccttctcctcttctgatgcccacccactaactccccattcttctggagccagcaggtgttctaaccatccctcccaataaaggcttwrcrgamtkcaaaaaaaaaaaaaaaaaa

SEQ ID NO: 3185 - DNA, 864 bp, Rattus norvegicus
gaattcccttgacgtccaccagttaggagcccccttcctctccatcctccaacccctaggtcacaaggctgtccatctatggggtctgctagaatcgggaggtaccctgggccctaccatcttacctggagcctctccattcttgataccttccctaccttgggcacctggctttatacctgcgggttgtgggggtggcaaggccactaagcagaggctacaggcttgggtaacctagacactaatctctttgggggcgagacagacaaggtcagaaaagccagggaccagctccagtgtctcagtgaattggcctcacactcagcccaggtgcctgagcttaactgacattgggaacacagggaacaggtaaaggggagaactctgcaggctgctagctggccctagtgtggtgtgggcctccaggggcccccttcggccactgtgccggcctgtcaacgcaaccctggctgcagagaatgagttctgcccagtctgcatcaccttcaccaccagcatctgtgccggctactgtcctagcatggttcgagtactgccagctgccttgcctcccgtgcctcagccagtgtgcacctaccgtgagcgcttcgcctctgtccgcctccctggctgcccacctggtgtagaccccatagtctcctttcctgtggccctcagctgccgctgtgggccctgccgtctcagtagctctgactgtgggggtcccaggactcaaccaatgacctgtgaccttccccacctccccggccttctcctcttctgatgcccacccactaactccccattcttctggagccagcaggtgttctaaccatccctcccaataaaggctttacaactgca

SEQ ID NO: 3186 - DNA, 305 bp, Rattus norvegicus
gcatgctgaaactctccctatacattataggccatgttgtgtgcgttcatttggctaagaacatagtgatgttatgttttgacttttgactgtccttgttctttctgcctcaggtggaacaaaattgggccacattacagggcggtgaaatgaccatccagacgacgcaagcatcagaggccacccaggcagtggcatcactggcagaggccgcagtggccgcttctcaggagatgcaacagggagccactgtcaccatggcccttaacaggtggaggcaggggtggggaagaatgggactgcag

SEQ ID NO: 3187 - DNA, 2059 bp, Rattus norvegicus
agacggactgacagacagctggcaagaggcagccctggggacatagctgcttcagcaggcctcatggctgagtgagcctcccttgggcccagcaacctaccccagcatggtccaggcctgtgaggggcgctccagagcacagctgccgaccttgtctttgggggcagacatgactcagcctccacccgccaaagctccagccaagaagcatgtgcggctgcaggagagaaggggctccagtgtggctctgatgctggatgtgcggtcactgggcactgtcgagcccatctgctcagtgaacacaccccgtgaagtcaccctgcacttcctgcgcacagccgggcacccccttacacgctggactctacagcaccagcctcccagccccaagcagctagaagaggaattcttgaagatcccctcaaactttgtcaaccctgaagacctggatatccctggccatgcctccaaagaccgatacaagaccatcttgccaaatccccagagccgtgtctgtcttggccgggcacacagccaggaggacagcgactacatcaatgccaattacatccggggctatgatggaaaggagaaggtctacattgctacccagggccccatgcccaacactgtagcagacttctgggagatggtgtggcaggaagatgtatccctcattgtcatgctcacccagctccgagagggcaaggagaaatgtgtacactactggcccacagaagaggaagcctatgggcccttccagatccgcatccagggcatgaaagagcacccagaatatactgtgaggcacctcaccattcagcaccaacaggaatgccggtcagtgaaacacatcctcttctcagcctggccagaccaccagacgccagaatcagccgggcccctgctgcgcctggtggctgaggtggagaccccagagacagctgccaactccgggcctatagtggtccactgcagcgcagggatcggtcggacaggctgcttcatcgccacccgaatcggctgccagcagctgaaggcccgaggggaggtggacattctgggcattgtgtgccaacttcgcctagacagaggaggcatgatccagacggcggagcagtaccagttcctacaccacactttggccctgtatgcagcccagctgcccccggagaccgacccctgacccctgacccctgacccctgacccctgaccctccaccagcccagggaccaaccttctctcaggtcagggacagtgggtctggggaagtgggctgtgcgctctggcatggcttctgcataagcacaggaaagggagccttggaagcaagaatgttttacagtctcaggaaactgccccagcaagcaacaggggccaggccgtaggtcttcgccacagaccatgactctgccttcttcagtggcccccggtggactccaggggagcttccctaagtggctctgaacttacagataggagctggtccttgaaatggattgagaaagcggctgaggcactggcttgtctttgtgcttcckgwsgrskcctttccttgtcggtgacacagagtcagtcctttgctgccattgtagaagcagacagaatgttcctgaaagccattccaggtasccytsccgttggggytgcagagatgctgatcgtaagatcctcttccggtaagrcsttgcccacacacaggccagatgcaagcgcagggaaaatcccagtmtgaccttggtcaaatcctctctattstacatagamtgctcctccccatacaccggggggtgytggatgacccgctcagaagagaataaaggccttggttggccccccyccacacctgtgstaaaaggagacgcagaggtamccaggtccagcagttaggaatccctggaagagcccaggtgtgatgacstacgtactcatcctccagcactcaggagtagaagcaggaggattgctgcaaatttgaggccagmtagatstatattttgagtmccagsccagacaggamtacatagcaagatyttytsttaaawaaaaaaaaaaaaa

SEQ ID NO: 3188 - DNA, 1461 bp, Rattus norvegicus
cccagtatcttcctcatggtcgtggacattggtggcttttgcctgcccccggacagtggtgagagagtgtctttcaagatcacgctccttctgggatactcagtctttctcatcatcgtgtcagacacactgcctgcaacggccatcggcactcccctcattggtaaggcctccctgatggaagaattcactgtgacagactgaggtcactgtgacagtctgagggaaagagttcactgtgacagactgagggaaagagattcactgtgacagactgaaggaagagttcactgtgatagactgaggaagagttcactgtgatagactgagggaagagttcactgtgactgatacctgccctattccctcccacacttagttgtgtctctttctctggctcaggtgtctactttgtagtgtgcatggctctgctggtgataagcctcgctgagaccatcttcattgtgcagctggtgcataagcaggatttacagcgccctgtacctgactggctgaggcacctggtcctagacagaatagcctggctgctctgcctaggggagcagcccatggcccataggcccccagccaccttccaagccaacaagactgatgactgctcagtgagagagtataggacagtcatacagagagtctggagcaggatactggataagatgtgggaactggttcaggatggaaacaggaggatgcttcagccagagaagtcagtcagaccggaaccttgtgtcccttcactatgtagaccaggctgggtttcacagcgatgggattaaaggtgtgcactaccaggtctagccgggctctgttgccttcgtttgcaaacccctcatcagtttaagggtgggatgtgggcagagaagggttcagaggagccaggtggcacacaccctcttatttgggagacatgggcgggtatgtctccatgagtttgatgccgtcctggtctgcgtagtaagtttcagaccagccagcggtacatagtaggatcctgtctcaagagggaaagagaaaaaaagaaggtagcatgcaactgaggtacacaccaaagtcaactttcaaccttcgaaacaatgcgcaccgccacaacgccagggcaccccaccaccctcttttttatactcaggctctcttcttccagccatgggaaaccactgcagccatgtcggaagccctcaggacttggagaagacctcgaggagcagagatagccctcttccaccaccaagggaggcctcgctggctgtgcgtggcctcttgcaagagctgtcctccatccgccactccctggagaagcgggatgagatgcgggaggtggcaagggactggttgcgggtgggatatgtgctggacaggctgctgtttcgcatctacctgctggccgtgctggcttacagcatcaccctggtcacgctctggtccatctggcactactcctga

SEQ ID NO: 3189 - DNA, 4326 bp, Rattus norvegicus
tcctctgccacctcagtaaataagtgggtgtcgcctgaactgaacagcaagagaaaagaagccagccaagtgagagcacagctcctctgtcactgccgcccccttgcaagtctggcggcttctcgcggggccagacgctgcgccccaggcgccctgcagatggggtggacagggacccggagctcaagccaccggtgacccgcgcgtggctggccgaccggccttccccgcttgcagaggatgttaagcagaggagccctggaaccgcatccgacactggccgacgttcgctaggctgcaacttggaatgcccagggagcggtcgggctcctaagaccgcgtcgccgcgtctagggaagctgcgctccggatttggaggcggagacctcaggcggcggagacctccggcggcggctgcagagggacgagccgggcgcaggagggggcgcgctttctcccagcgggtctcagtaatgaggagactgagtttgtggtggctgctgagcagggtctgtctgctgctgccgccgccctgcgcactggtgctggccggggtgcccagctcctcctcgcacccgcaaccctgccagatcctcaagcgcatcggacacgcggtgagggtgggcgcggtgcacttgcaaccctggaccacggccccacgcgcagccagtcgcgctcaggaaggcggcagggcgggtgcccagagggatgatccagagtccgggacgtggcggccaccggcgccctcgcaaggcgcacgctggttggggagcgccctgcatggccggggtccacccggctcccgaaagctcggggagggcgcgggggccgagaccctgtggccgcgggatgccctactgttcgctgtggaaaacttgaaccgtgtggaagggctcctaccctacaacctgtctttggaagtagtgatggccattgaggcgggcctgggcgatctgccgcttatgcccttctcttccccaagctcaccgtggagcagtgaccctttctcctttctgcagagcgtgtgccacaccgtagtggtacaaggggtgtcggcgctgctggccttcccccagagccagggcgaaatgatggagctggacttggtcagctctgtcctgcacatcccagtgctcagcatagtgcgccacgagtttccgcgggagagtcagaatcccctgcacctacagctgagtttagaaaactcactaagttctgatgctgatgtcactgtctcaatcctgaccatgaacaactggtacaattttagcttgttgctctgccaggaagactggaatatcacggacttcctcctccttacggagaataactccaagttccacctcgagtctgttatcaacatcactgctaatctgtcctccacaaaggaccttctaagtttcctgcaggtccagatggacaacattaggaacagcacacccacaatggtgatgtttggctgtgacatggacagtatccggcagatatttgaaatgtccacacagtttgggctatcacctcctgaacttcactgggttttaggagactcccagaatgtggaggaactgaggacagaaggcctgcccttagggctcattgctcatggaaaaaccacacaatctgtctttgagtactacgttcaggatgccatggagttggttgcaagagctgtagccacagccaccatgatccagccagagcttgctctccttcccagcacaatgaactgcatggatgtgaaaaccacaaatctcacttctggacagtatttatcaaggtttttagccaacaccactttcagaggtctcagtggttccatcaaagtaaagggctccaccatcatcagctcagagaacaactttttcatctggaacttgcagcacgaccctatgggaaagccaatgtggactcgcctgggcagctggcaaggaggaaggatagtcatggactctggaatatggccagagcaggcccagaggcacaaaacccacttccagcacccaaacaagttacacttgagagtggtgacattgattgaacacccatttgttttcacgagagaagtagacgatgaaggcttatgccctgctggacagctctgtctagaccctatgactaacgactcttccatgctggatcgtctgtttagcagcctgcatagcagtaatgacacagtgccaatcaagttcaagaagtgctgttatgggtactgcatcgatctcctggagcagctagcagaagacatgaactttgactttgacctctacattgtaggggatggaaagtacggagcttggaaaaatggtcactggactgggctggttggtgatctcctgagtgggacagccaacatggcggtcacttctttcagcatcaataccgcacgaagccaggtgatagatttcaccagccctttcttctcaaccagtttggggatcttagtgaggactcgagacacagcagctccaattggagccttcatgtggccactccactggaccatgtggctgggaattttcgtggctctccatatcactgccatttttctcactctgtatgaatggaagagcccctttggtatgacccctaaggggaggaacagaaacaaagtcttctccttctcctcagctttgaatgtctgctatgcccttctgtttggcagaacagcagccatcaaacccccaaaatgctggactggaaggtttctgatgaatctttgggccattttctgtatgttttgcctttctacatacacagcgaacttggctgctgtcatggtaggtgagaagatctatgaagagctttctggaattcatgaccctaagcttcatcatccttctcaaggcttccgctttggaactgtccgggaaagcagtgctgaagactatgtgcgccagagcttcccagagatgcatgagtacatgagaaggtacaacgtgccagccacccctgatggagtgcagtatctgaagaatgatccagagaaactagacgccttcatcatggacaaagcccttctggattatgaagtgtcaatagatgctgactgcaagcttctgaccgtaggaaagccatttgccatcgaaggatatggcattggtctccctccaaactctccattgacctctaatatatctgagctcatcagtcagtacaagtctcacgggtttatggatgtgctccatgacaagtggtacaaggtggttccctgcggaaagagaagctttgccgtcactgagactttgcaaatgggcatcaagcacttctctggactcttcgtgctgttgtgcataggatttggtctctccatcctgaccaccattggtgaacacatagtgcacagactgctgttaccacgcatcaaaaacaaatccaagctgcagtactggctgcacacgagtcagaggtttcacagagcattaaacacgtcattcgtagaagaaaagcagccacgttccaagacaaaacgtgtggagaagaggtccaacctgggaccccagcagctcatggtatggaatacttccaatctgagtcatgacaaccaacgaaaatacatctttaatgacgaggaaggacaaaaccagctgggtacccaggcccaccaggacatccctctccctcagaggagaagagagctccctgcctcactgaccaccaatgggaaagcagactccctcaatgtaactcggagctccgtgattcaggaactctctgagttggagaagcagatccaagtgatccgccaggagctgcagttggctgtaagcaggaagacagagctggaggagtatcaaaagacaaatcggacttgtgaatcctaggctgtgtctccccccactttctcagcccctggtactctgaagcccttgagacactttgtaaagcccttttatattccttgacaaaggtgtggggtctggcaatgaagtgtgctgttctctgcctaaggtgcagcagcagcagcagcagcagttcttcccacaaaggcccccaggtcttcagggtagtaatcgttccgatagtaggaagctagggttagtcgggagtaaagtctgtctgaggggatcggcgagctgccagacaactctggctcctctcaaccttttcacctggtgccacaaaaaaaattctggtttttagccctttctctgcacctcaacaagagataaaaagccggcgctcatacctgtgtcttactgggttggtttttaatattactacaaaacaaaattatccaatgttgcagatttgatacaactccccaatctagatctgatctaacattctgaatgagcagggtaggagccaggaaaacgggacagaaca

SEQ ID NO: 3190 - DNA, 2327 bp, Rattus norvegicus
gaattcggcacgaggccaggccagggaagaggatagcgagatcaggcacagcccgggtcactgtcctctgctgtcttgccggttgcgggaggttctagctggagacgcgcgctctctccgcgctgtctagggccatcctgtgaccctaggctacctccagagctggctttccctggctggcacaactctccaaggagctccggtccattgcacagcgccccaagggggtgtctcagtaagtgatggaactggctccggtgaacctcagtgaagggaatgggagcgaccctgaacctccagcggaacccaggccgctcttcggcatcggcgtggagaacttcatcacgctggtggtgtttggccttattttcgcgatgggcgtgctgggcaacagcctggtgatcaccgtgctggcgcgcagcaaaccgggcaagccgcgcagcaccaccaacctgttcatcctcaacctgagcatcgcagacctggsctacctgctcttctgcatccctttccaggccaccgtgtacgcactgcccacctgggtgctgggcgccttcatctgcaagtttatacactacttcttcaccgtgtccatgctcgtgagcatcttcaccctggccgcgatgtctgtggatcgctatgtggccattgtgcattcacggcgctcctcctccctcagggtgtcccgccaacgcgctgctgggcgtgggccttcatctgggcgctgtccatcgctatggcctcgccggtggcctactaccagcgcctttttcatcgggacagcaaccaaaccttctgctgggagcactggcccaaccaactccacaagaaggcttacgtggtgtgcactttcgtctttggttaccttctgcccttactgctcatctgcttttgctatgccaaggttctcaatcatctgcataaaaagttgaagaacatgtcaaaaaagtcagaggcatccaagaaaaagactgcacagactgtcctggtggtcgttgtggtatttggcatatcatggctgccccatcatgtcatccacctctgggctgagttcggagcattcccgctgaccccagcttccttcttcttcagaatcactgcccactgcctggcatacagcaactcctcggtgaaccccatcatctacgcctttctctcagaaaacttccggaaggcgtacaagcaagtgttcaagtgccgtgtttgcaatgagtcgccgcacggcgatgctaaagaaaagaaccgaatagataccccgccctccmccaactgcacccacgtgtgaaggttggccagagcctcctgtcctccgctcccatgtgtgttagagaggggaggacacagtgaattatcaagtaacatggcagctcgttctcctgccagcaattcctatcattctaacaacattccacagcggtgaaagcactttgattgtccagggaactcctcggtctactgaagattatttcccaattttatttcattttatgattgtatttatgaagcaaaagaaacttccatatagcttctatcttttaagggatgaaagtccaacagcgcactgcagatatgttctgatctccatgatacaaaccaagttctaggaagcaatgaagattatttgaaatccacattttaaggccagttaatatagggaaacagttctctttcttttaatgatgtagtattctagttttgaaatacatttgtgggcccagaatagtgaattttattttactgaacctttgtggactggcacctcttccgagtcaggggaggcttttcaaagtctgttcccataggtgtacagagttctgtctgggaacgtgagactcaccaagttcatctcaggagatcattggtgactccactttgaagtaatcctgtggactaagacaccagggagtctgctgtggacggctacaaacctgcctgttgtagctttaaggatgttcttggcaaattattagctgggcctccaaagaacccaggaaaccagtcagccaacagtttccacggggttgaaaactggacaaaacttagccacgtagttaatattcatgccgcatggagaaagcaggaaagatgcttgattccgaatgagcaaagacaaaggtatcctgtgggagaatagataaacacttagagacgtgatgccttatgcagacttgtaccgacaactgtttaatgattgttttccccaaacattattccctggggcaattaatttagaattaaaatcaccaccacgtgacttgcaaatgtaaaaaaaaaaaaaaaaaaaaaaaaaaaaaaaaaaaaaaaaaaaaaaaaaaaagggcggccgc

SEQ ID NO: 3191 - DNA, 1111 bp, Rattus norvegicus
  misc_feature (445)..(445): n is a, c, g, or t
ggagggggcgggggaccggctggaggtgccgaggacctggcggagctggaccagctgctgcggcagcggccgtcgggggccatgccgagcgagatcaaagggctggagttctccgagggcttggcccaaggcaagaagcagcgcctgagcaagaagctgaggaggaagttacagatgtggctgtggtcacagaccttctgcccggtgctgtacgcgtggaacgacctaggcagccgtttttgggcgcgctacgtgaaggtgggcagctgcttcagcaagcgctcctgctctgtgcctgagggcatggtgtgtaagccatccaagtctgtgcacctcaccgtgctgcggtggcgctgtcagcggcgcgggggtcagcgctgcggctggattcccatccagtaccccatcatttccgagtgtaagtgttcctgctagaactcggggncccctgcccgcgcctagacamwygatggatccccaccaacgccccccacccccaccgcctccaaccagttccaccaccctctagcgagggttttcaatgaactttttttttcttcttggmtacagagacctggctttctggttcatgtaatgcactgtttaactgtgtaggaatgtatatgtgtgtatatacggycccagttttaawttacttattaaaaggtcagtattatacgtcaaaagttacccggcttctactgtatttaaaaaaaataagcaagcaaagtgaaaaaaawaaagagcagagaaaagagagacttattctggttgttggtaataatgttamcctgctatttatatcccaatgcccttcgcatggcgaagcaggggggaaaagttatttttttcttaaaagtacaaagagagggggaactttkgtagaaggacttttaaaaaagctattttccatyctycggaaatgtttgktttcctagacctcgagagtatgagtcatgtatttacagtatgwawtwgagacaatggatgatatcatkgtaaattaagagtatctgctatttattctttataatatcccgtgtagtaaataagaaagaagtgcagaacaggattaaagaaaaccactaaaaccgaaaaaaaaaaaaaaaaa

SEQ ID NO: 3192 - DNA, 1512 bp, Rattus norvegicus
gcgggggcagcagcaggcacgagaagagcctggggttgctcaccaccaagttcgtgtcgttgctgcaggaggcgcaggacggcgtcctggatctcaaagcggctgcagatactttggctgtgaggcaaaagcgaagaatttatgatatcaccaacgtcttagaaggaattgatctaattgaaaaaaaatcaaagaacagtatccagtggaagggtgtaggtgctggctgtaatactaaagaagttatagatagattaagatgtcttaaagctgaaattgaagatctagaattgaaggaaagagaacttgaccagcagaagttgtggctacagcaaagcatcaaaaacgtgatggaagactccattaataacagattttcttatgtaactcacgaagacatctgcagttgctttaatggtgatacactgttggccattcaggcaccctctggtacacagctggaagtacctattccagaaatgggacagaatggacaaaagaaataccagataaatctgaagagtcactcaggaccaatccatgtgctacttataaataaagagtccaactcatctaagccggtggtttttcctgtccccccacctgatgacctcacacaaccttcctcccagtcctcaacttcagtgactccaccgaaatccaccatggctgctcaaaacctgcccgagcagcatgtttctgaaagaagccagaatttccagcagacaccagctacagaaatatcttcaggatctattagtggagacatcattgatgaactgatgtcttctgacgtgtttcctctcttacggctgtctcctaccccagcagatgactacaactttaatttagatgataatgaaggagtttgtgatctgtttgatgttcagatactaaattattagattccacggaaacttgggactgttatctacctctaactgtaacattttagaattcttaataacctaagtatttaaaattatgmaygwrrcacctttttagttcactgactytaaagtgttttcctaacattttacttttacttcacaaaacttgaaagggcwctgaskgcttcagggggggataattaactgtccmccagcatgcccctccagtgattacamtcagtttcattcagtgctgaattctgtagcttcttcttagaggacagttacagcaggcttcagttcatcataacaraacattgtccaaaagatcacttacttgtcttatgtttttamtgccaaarctgtttctatgtatccttcaaacagacattcactgccatatataaagtgaaggatatcwctgttgagtgaacagattttgtgaagtgccttctgttttagcactttaagtctatcagtttgttgattcwgacaytccactttcctagagtataggaaagatctgtttatgtagtttgtttttaaaatgtgccaatgcctgtacattaacaagatttaaagaaataaagttgtatgaaacattgaaaawaaaaaaaaaaaa

SEQ ID NO: 3193 - DNA, 198 bp, Rattus norvegicus
ctggccgtccaagatctcaagaagcaacctctacaggatgtggccaagagggtggaggaaatctggcaagagttcctagctcccggagccccaagtgcaatcaacctggattctcacagctatgagataaccagtcagaatgtcaaagatggagggagatacacatttgaagatgcccaggagcacatctacaagctg

SEQ ID NO: 3194 - DNA, 198 bp, Rattus norvegicus
gaggcgtgtgaggagctgcgctttggcggacaggcccaggtccccaccctggtggactctgtttaccagcagttcctggcccctggagctgcccgctggatcaacattgacagcagaacaatggagtggaccctggaggggctgcgccagccacaccgctatgtcctagatgcagcacaactgcacatctacatgctc

SEQ ID NO: 3195 - DNA, 2925 bp, Rattus norvegicus
atggcggcagaagcagctggtgggaaatacaggagcacagtcagcaaaagcaaagacccctcggggctgctcatctcggtgatcaggactctgtctaccagtgatgatgttgaagaccgagaaaatgagaaaggtcgccttgaagaagcctatgagaagtgtgaccgtgacctggatgaattgatcgttcagcactacacagaattgacaacagccattcgcacataccagagcatcacagaacgcatcactaactccaggaataaaatcaagcaggtaaaagagaacctgctttcctgcaagatgctgttgcattgcaaacgggatgagcttcgtaaactatggattgaaggaattgagcataagcatgtcctgaaccttctggatgagattgaaaacatcaagcaagtgcctcaaaagctggaacagtgcatggccagcaagcactacctcagcgccacggacatgctggtgtcagcagtggagtctctggagggtccgctgctccaggtggaaggactcagtgacctcaggctggaacttcacagcaagaagatgaacctgcacttggttctcatagaggaactgcaccgacatctgtacatcaaatccactagccgggttgtacagcgtaacaaggaaaaagggaagatgagttctcatggcaaagatgcttctcctggtcctctgattgatgtttcaaacatctctactccacgcaaattccttgatgccactcaatattctgctgctggaagctcaagtgtgagggagatgaacctgcaggacatcaaagaggacttggactgtgatcctgaggagaacagcactcttttcatgggaattcttattcaggggctggccagactgaagaagatccctgagaccgttaaagccattaaagagcgtttggagcaggagctaaagcagattgtgaagaggtcaaccacccaggtggcagacagtgcctatcagaggggagagagcctcactgtggacaaccagccaaggttacttctagaactgctggaactgttgtttgataagtttaatgctgtagccagtgcacattctatagtcctggggtaccttcaggactctgtggggacccagccaacacagcaggaagagatcaaattatacgatatggcagatgtgtgggtgaagatccaggatgtgctgcagatgctgttgactgaatacttggatatgaagaacacacgtactgcgtcagagccgtcagctcaactaagctatgccagtactggacgagagttcgcagccttttttgccaagaagaaaccacaaaggccaaagaattctcttttcaagtttgaatcatcctcccatgctatcagtatgagcgcctatctccgagaacagagaagggagctgtacagtcggagtggagaacttcaaggaggtcctgatgacaacttaattgaaggtggaggaacaaaatttgtctgcaaacctggagccagaaatattaccgtcatattccatccactgctgagatttattcaggagattgagcatgccctgggacttggccctgccaaacagtgtctccttcgagagtttctcactatatatatcaagaacatcttccttaatcaggtcttgactgagatcaacaaggagatcgaaggtgtcaccaaaacctcagaccccttgaagatcctagctaatgcagacaccatgaaggttctgggcgtgcagaggcctcttctacagagcaccatcatcgtggagaagacagtacaagacctcatgaacctgatgcatgacttgagtgcatattcagatcagttcctcaacatggtgtgtgtgaagctacaggaatacaaggacacatgctccacagcctacagaggcattgtccaatcagaagagaaacttgtcatcagtgcatcttgggcaaaagatgatgatatcagcagactcttgaaatcactgccgaactggactaacatggctcagcccaaacagctaaggcctaagagagaggaggaggaagacttcataagggcagcctttggcaaggagtctgaggttctgattggaaaccttggtgacaaactcattcctccacaagatattctccgtgacgtcagtgacctcaaagccttggccaacatgcatgaaagcctggaatggctggcaggccgaacaaagtcagctttctccagcctttctgcatcccagatgctttcccctgctcaagagagccacgtaaacatggaccttcctccagtgtctgaacagatcatgcagacgctgagtgaacttgccaagtccttccaggacatggctgaccgctgcttgctcgtcttgcatctggaagtgagagttcattgtttccactatctcatccctctggcaaaggaggggaactatgccattgtggccaatgtggaaagcatggattatgaccctttagtggtcaagctcaacaaagacatcagtgccatggaagaggccatgagcgccagcctccagcaacacaagttccagtacatcttcgaaggtctgggacacctcatctcctgtatcctcattaatggggctcagtacttccggcgcatcagtgagtctggcatcaagaaaatgtgtagaaacatttttgttcttcagcagaatttgaccaacatcaccatgtcacgggaggcagacttggactttgcaagacagtactacgagatgctgtacaacactgctgatgagctcctgaacctggtggtggaccagggtgtgaaatacacagagctagagtacatccatgccctgaccctgctgcaccgaagccagactggcgtgggggaccagaccacccagaacaccaggctgcagagactcaaggagatcatctgtgagcaggctgccatcaagcaagccaccaaggacaagaaaataaccactgtg

SEQ ID NO: 3196 - DNA, 2573 bp, Rattus norvegicus
atgtgcaaagattctgcctgcttttcgactatgaaggagacagacctggaggctgttgcaacagcagtccaaagggtggctgggatgcttcagcgcccagaccagctggacaaagtggagcagtatcgcagaagggaggctcggaagaaggcctctgtggaggccaggctaaaggccgcaatccagtctcaactagatggcgtccgcacaggcctaagccaactgcacaatgcactgaatgatgtcaaggatatccagcagtcactggctgatgtgagcaaggactggaggcagagcatcaacaccatcgagagtctcaaggacgtaaaagacgcagtggtgcagcacagccagctggctgcagctgtggagaacctcaagaacatattctctgtgcctgagattgtgagggagacccaagatctcatcgagcaaggggctctcctgcaggcccaccggaagctaatggatctggagtgctcccgggatgggctaatgtgtgagcagtaccgcatggacagtgggaacaaacgggacatgaccctcattcatggctacttcggtagcacacaggggctctctgacgagctggccaagcagctgtggatggtgctgcaaagatcgctggtcactgtccgccgggatcccaccttgctggtctccgtggtcaggatcattgaaarrraaraaaaaawwracaggcggatacttgatcgaaaaaagcaaactgggtttgttcctcctggaaggcccaaaaactggaaggaaaaaatgtttgccgtcttggacagaactgtgacgactagaatcgaaggcacgcaggcggacaccagagaatctgacaagatgtggctcgtgcgccacctggagatcattaggaagtacgtcctggatgacctcgtcatcgccaagaacctgctggtgcagtgcttccctcctcactatgacatctttaagaacctcctgagcatgtaccaccaggccttgagcattcggatgcaggacctcgcctcagaggaccttgaggccaacgagattgtgagcctcttgacctgggtcctaaatacctacaccagtgcagagatgatggggaatgtggagctggccccagaggtggacgttaatgccctggaaccgctcctctcaccaaacgtggtctctgagctgctcgacacatacatgtcaacactcacgtccaacatcattgcctggcttcggaaagcactggagacagacaagaaagactggagcaaagagacggagccggaagcagaccaggacggctattatcagacgacacttcctgccattgtattccagatgtttgaacagaatcttcaagttgctgctcaaataagtgaagatttgaaaacaaaggtattagttttgtgtcttcagcaaatgaattctttcctaagtagatacaaagaggaagcccagctttacaaagaggagcacctgagaaaccggcagcacccacactgttacgtgcagtacatggtcgccatcatcaataactgccagaccttcaaagaatccatcatcagtctgaaaagaaaatacctaaaacccgaaacagaggaaagcctgtgtcagagtcagcccagcatggatgggattctagatgccattgctaaggaaggctgcagcagtctgctagaggaggtcttcctggatctagagcaacatctgaatgagctaatgacaaagaagtggatgttaggatcaaatgctgtggacatcatctgtgtcaccgtagaagactacttcaatgacttcgccaaaattaaaaagccatacaaaaagaggatgacagctgaggcacacaggcgtgtggtggtggaatacctgcgggctgtcatgcagaagcgtatttcctttcggagtgctgaagagcgcaaggagggtgctgagaagatggtcagagaggcggaacagctccgcttcctgttccggaagctggcatctggatttggtgaggatgcagatggacactgtgacacaatcgttgcagtggcagaggtcattaagctcacggacccgtststgctstacctagaagtctcaactstggtcagcaaatatccagacatcagagaysrcsrdrktggtgcgmtgctggcactgcgaggagacgccagccgggacatgaagcagaccatcatggagacactggagcagggccccatgcaagcgagccccaastatgtgcccatcttccaggagattgtggtgcccagtctgaamgtggcaaagctccttaagtagccctgtcctccctgctgtcctgtgtgtctttactttgtggctttcctattgtcactgtattaaaacaaaagtccktswmwwrdrmwmmrwrwrawrrmarwwacacgttcctgacttgtgtggcatctctactgtgagaaaaaaaggtgtttagtgagcgtcactttttcctccctattaaagtcttgctccacttaattaaaaaaaaaaaaaaaaaaaaaaacacatgcggccgcaagcttattccctttagtgagggttaattttagcttggcactggccgtcgttttacaacgtcgtgactg

SEQ ID NO: 3197 - DNA, 2208 bp, Rattus norvegicus
  misc_feature (2192)..(2192): n is a, c, g, or t
cggcggtggctcaggtgacctctcccatggctttcccccatcgactggacgcccctgagcttcccgacttctctatgctcaagaggctggctcgggaccagctcatctatctgctagaacagcttcctgggaaaaaggatttgttcattgaggcagatctcatgagccctttggatcgaattgctaacgtctctatcctgaagcaacatgaagtagacaagctgtacaaggtggaaaacaaacttactctcagctccaatgaacaattgtgcttcttggtcagacctcgaatcaagactatgcgctacattgccaatcttgtcaatgctgacaaactggctggccgagttagaaaatacaaaatcatcttaagtcctcagaagttttatgcatgtgagatggtgcttgaggaagagggagtctatggagatgtgagctgtgatgaatgggccttttctctgctgcctcttgatgtggatctgctgagcatggaactgccagaatttttcagggattacttcctggaaggggatcagcgttggatcaacacggtggctcaggccttgcaccttctcagtactctctatgggcccttccctaactgctatggcattggcagatgcacgaagatgtcatatgacctgtggaggaaactggaggaggaagaggacagtgaaacgaaaggtcggagaccagagattggacacatctttctcttggacagagatgtggactttgtgacagcactttgctcccaagtggtttatgagggcttggtagatgacaccttccgaatcaagtgtggaagtgtcgactttggcccagaagtcacatcctctgacaagagcctgaaggtgctgctcaacgctgaggacaaggtgttcagtgagatccgcaatgagcacttctccaatgtctttggcttcttgagccagaaagcccggaacttgcaggctcaatatgaccgccggagaggtatggacataaagcagatgaagaacttcgtgtcccaagagctcaagggactgaaacaggagcaccgccttctgagtctccatattggagcttgtgaatcaatcatgaagaagaaaaccaagcaggacttccaggagctaatcaagaccgagcatgcactgctggagggcttcaacattcgagagagcactagctacattgaagaacacatagaccggcaggtgtcgcccatagaaagcctacgcctcatgtgccttttgtccatcactgagaatggtttgattcccaaggattatcggtccctgaaaacacagtatctgcagagctacggccccgagcacctgctaaccttctccaaccttcggagagccgggcttctaacagagcaggcttcgggggacaccctcactgcagtagagaataaagtgagcaagctggtgactgacaaggccgcaggaaaaatcactgatgccttcagttctctggccaagaggagcaattttcgtgccatcagcaaaaagctgaatttgatcccacgtgtagatggggagtatgacctgaaagtgccccgggacatggcttacgtcttcagtggcgcctacgtgcctctgagctgccgaatcattgagcaggtgctggaccggcgsaskwggcagggcctagatgaagtggtccggctgctaaactgcagtgactttgcattcacagacatggctaaggaagacaaggcttccagtgagtcacyccscctcatcttggtggtgttcttggggggctgcacgttctcrgagatatcagccctgcgcttcctgggtagagagaaagggtacagatttatttttctgacaactgctgttacaaacagtgctcgcctcatggaagccatgagtgaggtgaaatcctgatgctttcctggccagtgcggaagtaattcctgattgtggaccccagtgagaagctggtgtttcacatctaccttytaagactcccccaacacacacatcctacctcccagctatactcttcagaactgggaacttcagaactaattttcrggagagaattcgatatcmwgtcccccaggatactcctcttgcttatwaagtgtatatagttcatgctgctaaggtatgaggggagaggtattccttgctaaatcccgtttaaatattgtaaataaagcctctcttctmaaatrcaaawrwaawwawwwrranaaaaaaaaaaaaaaaa

SEQ ID NO: 3198 - DNA, 1951 bp, Rattus norvegicus
cggggatctgagtgcctagtccagcttggcacctgggccggacccgaccccctcggggcagcaggatcccagtgtgcggcggtccagacccccccgccccgccccgcccccggcctgtgagccttgcgcccttcagcatagcggttgcgcggatctacgtggcctttcagcgctcaggtcccgagcactctcagacgcagactggttttgcagagcccatttggccgggaaagggcccctgcccttcacttcgaaagaagattctgtccagaggtgccgcaccatggccagcccaagaaccagaaaagttcttaaggaagtccgggcacaggacgagaataatgtttgctttgagtgtggtgcgttcaatcctcagtgggtcagcgtgacctatggcatctggatctgcctggaatgctctgggagacaccgtgggcttggggtgcatctcagcttcgtgcgctctgtgacaatggacaagtggaaggacattgaactggagaagatgaaagctggtgggaatgctaagttccgagagttcctggaggcacaggacgactatgagcctagctggtcactgcaggacaagtatagcagcagagctgcagcgctcttcagggataaggtggctactttggcagaaggtaaagaatggtctctggagtcatcgcctgcccagaactggaccccacctcagcccaagacgctgcagttcactgcccaccgacccgctggccagccacagaatgtaactacctctggggacaaggcctttgaggattggctgaatgatgatctgggttcctatcagggtgctcaggagaatcgctatgtggggtttgggaacacagtgccacctcagaagagagaagatgacttcctcaacagcgccatgtcatctctgtactcgggctggagcagttttaccactggggcgagcaagtttgcgtctgcagcaaaggagggtgctacaaaatttggatctcaagcaagtcaaaaggcttcggagttgggccacagcctgaatgagaatgttctcaagcctgcacaggagaaggtgaaagagggaaggatttttgatgatgtgtccagtggggtctctcagttggcatccaaggtccagggagttggcagtaagggatggcgtgatgtcacgaccttcttttctgggaaagctgaagacacttcagacagacccttagagggccacagctaccagaacagcagtggagacarctctcagaacagcaccatagaccagagcttctgggagaccttcgggagtgctgagccccccaaggccaagtccccaagcagtgacagctggacctgcgcagatgcctcaacgggaakgaggagctcggrcagctgggacatttggggctcasgttctgcatccaacaacaagaacagcaatagcgatggytgggagagctgggagggagccagtgggsasgrrrgggcaaaggctaccaagaaggcagctccatctacagccgscsacgagggctgggacaaccagaactggtaggagccttgctgcaccctaacccagccctgctgggagacsgcygkgtttgcactttacccttgttcctccttcatttgacctcagtgtgaagacagtggctcaggcaggacttgagttggtgctgcctgcctggtgtggggtggctttctcttagacctcaggggacatgtcatccacctgcctcttgggtcctctgagcagccttcctggattctgggttcttgggacccaggcactgtctctgcagccctagcatagcctgggactgcagccctgtgcaatgtcagctaagccagamawmwrmwwwmrwwraaatgtctttttaaacttgaaarrwmwrmwarwwmwwtcttcttgaagaaagtgcctggagccttaaagctggaaatgaaacgacaaaagcaaaaaaaaaaaaaaaaa

SEQ ID NO: 3199 - DNA, 2173 bp, Rattus norvegicus
gccttggagtaccagtatgtaatgaaaaacccaaaacaattaagctttgagaagttcagccgaagattatcagcgaaagccttctctgtcaagaagctgctaactaatgacgaccttagcaatgacattcacagaggctatcttcttttacaaggcaaatctctggatggtcttctggaaaccatgatccaagaagtaaaagaaatatttgagtccagactgctaaaactcacagattggaatacagcaagagtatttgatttctgtagttcactggtatttgaaatcacatttacaactatatatggaaaaattcttgctgctaacaaaaaacaaattatcagtgagctgagggatgattttttaaaatttgatgaccatttcccatacttagtatctgacatacctattcagcttctaagaaatgcagaatttatgcagaagaaaattataaaatgtctcacaccagaaaaagtagctcagatgcaaagacggtcagaaattgttcaggagaggcaggagatgctgaaaaaatactacgggcatgaagagtttgaaataggagcacatcatcttggcttgctctgggcctctctagcaaacaccattccagctatgttctgggcaakgtattatcttcttcagcatccagaagctatggaagtcctgcgtgacraaattgacagcttcctgcagtcaacaggtcaaaaraaaggacctggaatttytgtccacttcaccarasaacaattggacagcttgktctgcctgraaagcgctattcttgaggttctgaggttgtgctcctactccagcatcatccgtgaagtgcaagaggatatggatttcasctcaragagtaggagctaccgtctgcggaaaggagactttgtagctgtctttcctccaatgatmcacaatgacccagaagtcttygatgctccaaaggactttaggtttgatcgcttcgtagaagatggtaagaagaaaacaacgtttttcaaaggaggaaaaaagctgaagagttacattataccatttggacttggaacaagcaaatgtccaggcagatactttgcaattaatgaaatgaagctactagtgattatactkttaacttattttgatttagaagtcattgacactaagcctataggactaaaccacagtcgcatgtttctgggcattcagcatccagactctgacatctcatttaggtacaaggcaaaatcttggagatcctgaaagggtggcagagaagcttagcggaataaggctgcacatgctgagctctgtgatttgctgtactccccaaatgcagccactattcttgtttgttagaaaatggcaaatttttatttgattgcgatccatccagtttgttttgggtcacaaaacctgtcataaaataaagcgctgtcatggtgtaaaaaaawrwmawrrmaatcatttcaggataaggtaaaataacgttttcaagtttgtacttactatgatttttatcatttgtagtgaatgtgcttttccagtaataaatttgcgccagggtgatttttttwaattactgaaatcctctaatatcggttttatgtgcygccagaaaagtgtgccatcaatggrcagtataacaatttccagttttccagagaagggagaaattaarccccatgagttacgctgtataaaattgttctcttcaactataatatcaataatgtctatatcaccaggttacctttgcattaaatcgagttttgcaaaagattaaatgtcccaacttcctttcaatatttaatcatccataaatgctctttataactttgtattctacagctcaatagaacccaattaattgttatgtaagattgctcatgttcaagttagatattgttaaattttaatgtatatgaaaacccaaagcctattccatagtcagcagttactctaaacattagtattaggtttattgtggaggtaaatgttgaagttacaatagcactgatggtagaattggtctgtagtataaactgtgttagctgatgctgcaatgaaccctttaccaaacatttccatttctataaacagagaaattaggtagcattatttatccmcaaccttttggacttgaagttaagtttattattttaaactattaaattaaactatccaaaat

SEQ ID NO: 3200 - DNA, 1574 bp, Rattus norvegicus
gcggctacggcgtgcggggagctgaggtaaagccggggctagtacggtaccaggcggtgcacgagctggctaagccagatttgtaaaaatggagtttcaagccgtagttatggccgtcggtgggggatctcggatgacagacttgacttccagcattcccaagcctctgcttccagttggaaacaaacctttaatttggtacccgctgaacctgcttgagcgagttggatttgaagaagtcatcgtggttacaaccaaagatgtccaaaaggctctgtgtgcagagttcaagatgaaattgaagccagatattgtgtgcattcctgatgaggcagacatggggactgcagattctctacgccacatatatccaaaacttaagactgatgyrckrgkcctgggctgcgatctgataacagatgttgccttacacgaggttgtggacctgttcagagcttacgatgcatcacttgccatgttaatgaggaaaggacaagagagcacagaaccagttccaggtcagaaggggaaaaaaaaaacagtggagcagcgtgacttcattggagtggacagcacaggaaaaaggctgctctttatggctaatgaagcagacttggatgaagagctggtcattaagggatccatcctgcagaagcaccctaggatacatttccagacaggccttgtggatgctcatctctactgcttgaagaaatatgttgtggatttcttaatggaaaataagtcaatcacttctatccgaagcgaactgattccgtacctagtaagaaaacagttttcctcagcctcctcacagcaaaggcaggaagacaaagaagaggatctaaagaaaaagkagcccaagtctttagatatttacagttttataaaaaaagacaacactctgactttggctccctatgatgcctgctggaatgcttttcgaagagacaagtgggaagatttgtctagatcacaggttcgctgctatgtccacatcatgaaggaaggactttgctctcgagtaagcacactgggactctacatggaagccaacagacaggtacccaaattgctgtytgttctttgtcctgaggaatcaatgakccatccatcagcccagattgccaacaaacacytgattggagccgacagccttatcgggtcagatacacaagttggagwgargtcatctattrarcgatctgtcattggctcatcctgtgtcatcagagacagagtaactgttaccaactgccttctcatgaactmtgtcrccgtggragaagggagcagcayccatggmagcgtcatytkcaacaackccgtggtcgaggcgggcgcggagatcagggactgtttaattggaagtgstcakaggattgaagccaaagctaaacgcatgaacgaggtgatcgtgggaaatgrccagctcatggagatctgaatcctgaacaagtctgacccmwyccttttggccccaaaamtacagatgttggctggcccacctgtttgactctgtatttatttttcaataaagaagaatktscmggcwrwamaawwaaaaaaaaaaa

SEQ ID NO: 3201 - DNA, 2863 bp, Rattus norvegicus
gaattcggcacgagcggaactgtgaagggctcccwtctrggctcccgactgacagagagctagaaggcacagagaaacctgaggattctcatttaactctgggaactgcttcaagaagctatagtaccagagaacacctgggaagtgtgagaattcctgcagctgggaccaaaatgtctttcatagatccttatcagcacataatagtggaacaccagtattcccataagtttacagtagtggttctacgtgccaccaaagtaaccaaggggacctttggcgatatgctggacactcctgatccttatgtggaacttttcatctctacaacccctgacagcaggaagcgaacaagacacttcaataatgatataaaccctgtgtggaatgagacctttgagttcattttggatcctaatcaggaaaatgttttggagatcacattgatggatgccaattacgtcatggatgaaaccctaggcacagctacatttcctgtatcttctatgaaggtgggagagaagaaagaagtcccttttattttcaaccaagtcacagaaatgattctggaaatgtctcttgaagtttsstcatgcccagacctacggttcagcatggcactgtgtgatcaggagaaaacattcaggcrgcagaggaaagagaacataaaagagaacatgaagaaacttttgggtccaaaaaagagcgaggggctttattccacacgtgatgtgcctgtggtggccattttgggttccggcgggggtttccgggccatggtgggattctccggtgtgatgaaggcgctctatgaatcagggattttggattgtgcgacctacgttgctggtctgtccggctccacatggtacatgtcaaccttgtactcccaccctgattttccagagaaaggtcctgaggagattaatgaagagctaatgaaaaatgttagccacaaccctctcttacttcttacgccacagaaagttaaaagatatgttgagtctttatggaagaagaaaagttctggccwwcctgtcacctttactgacatctttggaatgttaataggagaaacactaattcaaaatagaatgagtaccgaccttgagtagcttgaaggaaaaggtcagcgccgcccggtgtcctctgcctctcttcacctgtctccatgtcaaaccggacgtgtcagagctgatgtttgccgattgggtagaatttagtccatacgaaattggcatggcaaaatatggtacctttatgactcctgacytgtttggaagcaaattttttatgggaacagttgtaaaaaaatatgaagaaaaccccttgcatttcttratgggtgtctggggcagtgccttttctatactgttcaacagagttttgggagtttctggctyacagaataaaggytctacaatggargaggaattagaaaatattacagcaaagcacatygtgagtaaygacagctcygacagygatgaygaggcycaaggacccaaaggcaccgagaatgaagawgckgaaaragagtaccaaarygacaaccaagcaagttgggtccatcggatgctaatggccttggtgagygactcrgctttattcaatacccgagaaggacgtgctgggaaggwgcataacttcatgttgggcttgaatctcaacacatcgtatccactgtctcccctgagagacttcagcccccaagattccttcgatgatgatgaactcgacgcagcggtagcagatccagatgaatttgaacgaatatatgaaccactggatgtcaaaagtaaaaagattcatgttgtagacagtgggctcacgtttaacctgccgtatcccttgattctgcgacctcagagaggtgtggatctcatcatttcctttgacttttctgcaaggccaagtgacaccagccctccattcaaggaacttctgcttgcagagaagtgggctaaaatgaacaagctcccttttccaaagattgatccttacgtgtttgatcgggaaggattgaaggaatgctatgtgtttaaacctaagaatcctgatgtggaraaggattgcmcaaccattatccactttgttctggccaacatcaacttcagaaagtacaaggccccaggtgttctgagggaaaccaargaagagaaagaaatagctgactttgacattttcgatgaccccgaatcgccattttcaaccttcaacttccagtatccaaatcaagcattcaaaaggctacatgatctgatgtacttcaacacactgaacaacattgatgtgataaaggatgccattgttgagagcattgaatacagaagacagaacccatctcgttgctctgtttccctcagtaatgttgaggcaagaaaattcttcaacaaggagttcctaagtaaacccacagcrgagtccatttgaattccatgactactggagttcagagcacatgagagatcatcttactatgcacaagagactgactgctactcasagttgytggggacggaggcgtgtgttaggtgaaaayggtgttgattatgcaatacttggcaacagtttctgacagtatgaattttttkkacataagcatagggctatatactgtawtttaaacattcctcacatttttacctgagcawttttatatatatataaaaatatcctttccttttataaatatttaatagtttaactcagtaaaaaaaagcttcccattgtgtgtgaatgttattctgaactagatttgttcatgccatgttacaacactatttttatttaaatgttcatatctacacatgcgaaataaatactttgatatacaaattgccaaaaaaaaaaaaaaaaaaaa

SEQ ID NO: 3202 - DNA, 3827 bp, Rattus norvegicus
actataggcgaattggccgacgtcgcatgctcctctagactcgaggaattcctgagaagccacttaccctttctttggggtaagactacctattccctctcagacggaaacctaaagtccaaacgtgtcagcccaagagctataaaactgctggctcggaccagtggactgtttttgtactttttttttccctcagacaagtgggtttttttttctttttgttttcttttcctcagacaagtggtttggaaacctttctctcttgtactttccccaccatcttgaagaaatgcgccactgagctccattttcacacgaacctctctctccactgggctgtggcatcacttgatcctccattaactccataaacgagagcaccacatactttcattcccagttgtaagatgcatagacagaggctgatctaaccatgataaaacttgactgactcaatatgccaagcccctggctcttatgtcatggccctgagtttctatactcatgcatggacttatgcagcaaaactaacctcactgaagtaaaatcttttatgattgtacttcacaaaagaaaacattttcctagaagctattaggcttgtmmtattgacacaacacaccaatgctctgaccaagaaactcgagttcctgtcccttcatctgtaccgtgggtttgtgtttgtttcagcttcagaaacagcgccccctgctgtccttggtagcattctctcaccagagttggacagctgctggagtctctagggtgtttgtctccacagctggactcagaaggcccgagcaaataactaattactggaggcgggagtagtcttcttttcttccttccaagtgcctcgttccctctccctgactatagacagasacagacagacagacagacacagacagacagacagacacgctgcksgcacacacacacacacacacacacacacacgacagagatgtacagagaggagggagagggagagacagagacagacactgagacagagaaagacagacacacacacagaggaaacagaaacagagacaaagatgcacagagggagagacggagacagagagacagcatagacacacagaaagggggtgtggaggggcagtggcaggcaggcaggcaggcaggcaggcaggcaggcagacagacagacagacagacagacagacagatggaggtagacaggcagaccagacactgatcctcagctctctccgtctgctccaagaaatgtcagcaggatttagtcatttaactggaaatgtctccaccaaccagtgcagcccagctcttgtcccctgcagctttgggaattggacttcctagggaaatgtccaccgtttcgggttcccactcagcgtatggagtcagcacggtagattacacacacccagcaagaggactgaagggtacaagtgagtgggcctttcctgtccgcgaamgaaagcagggtgaggaagtcaccagagagggaagtcacgcgatttttatccccaaagtgcaggggcaaaccgtgtggggaataaaatcagcccgagcgaccagcctaaggaaccgtgcgcaccgggsagggaacctcagggctgggcagaccccaagtccaaagtctaagggtgctgagttcgcagggacagcagacgattttactacacctgttgacgcgctacctggctttacattcacttataaaggaggctggagaaaatcctaagagcccagagaagtttggggcagctcgggaaagcatcctgctctgcagaggaatccaggagtctcagctccacccctgcagcagtgaggcaaaagggacaaatcaccaacgacttggagggggtggggggtaggggattggggacggtctccagccactaggacgtgagggagcgcgtsskgrggsaatctaagactgcgctgggagctcagagagtgggcccccctgcctcaggaccagacagaagtagggacatgtttgaatatcccatttaaaaccactctgcacgcaccggattgcgcacgctagagacggagggagggaaggaaggacagagcgcagagcttagaactcggatcctccggtcctcggtggagaggaggaagcagcccacggggcagggcctcccaggctctgtacggacagcatgagtttcccgcgaggctcccaggatcggtccgtgggcaactccagcccgtggtggcctctaaccaccgagggctccaacggcagtcaggaggcagccaggcttggggaaggtgacagcccgctgggggacgtacgcaatgaggagctggccaaactggaaatcgctgtgctggcagtgatttttgtggtggctgtgctgggcaatagcagtgtgctgctggcgctgcatcgcacgccacgcaagacatcccgcatgcacctctttatccgacacctcagcctggcagacctggcggtcgccttcttccaagtattaccgcagctatgctgggacatcacctccagcttccgcgggccggactggctgtgccgcgtggtgaagcacctgcaggtgtttgccatgttcgcgtctgcctatatgctggtggtgatgacagccgaccgctacatcgccgtgtgccacccgctcaagaccctgcagcagccggcgcgccgctcgcgcctcatgatcgccacctcttgggtgctgagtttcatactaagcacgccacagtactttatattctctgtgatcgaaatcgaggtgaacaatggcactaaaacccaagactgctgggctaccttcatccagccctggggtacccgcgcctacgtgacctggatgaccagcggtgtcttcgtggcacctgtggtcgtcttgggtacatgctatggcttcatctgctaccacatctggcgcaacatccgcggaaagacagcgtcctcgcgacacagcaagggtgacaagggctctggggaggccgtgggtccctttcataaggggcttttggttacaccttgtgtcagcagcgtgaagagcatttcccgcgccaagatccgcactgtgaagatgacctttgtgattgtaagcgcctacatcctttgctgggcgcctttcttcattgtccagatgtggtcagtctgggatgagaatttcatctggaccgattcagaaaacccttccatcacraksacggcgttgctggcttccttgaacagctgctgcaacccgtggatatacatgtttttcagtggccatctcctgcaagactgcgtccaaagtttcccatgctgccacagcatggcgcagaaattcgccaaggatgactccgatagcatgagccgaagacagacttcttattctaacaaccggagcccaacgaacagcactgggatgtggaaggactcgcccaaatcttccaaatccatcagattcattcctgtctccacttgagccccacgttcacgcagcccgactcttgggagggacttttgtgtccagctagagatcgtaagagcagatgtgtttatgtgggataggcagacataaatcaactcagtgtatacactgtttctagctgtgtttttcccattgctgtgaccaaaacctgaatccttttacatagaatactaatgaaaatgtgctacaccagaaatgtgtaggcccggttcgcaagcatactgactttatattttgtggctgaattttttgtgtgtgttttattgtatttttatgtcccacataagtgaggctttgacgtggtaagcactgtttctaaacaaagtgaactcgttcatgatttaaaaaaaaaaaaaaaaaaaaaaaaaaaaagtatggcggccg

SEQ ID NO: 3203 - DNA, 3857 bp, Rattus norvegicus
gctgcagcgaacggcggcgggaggmgccrrkyttgcrwgcmygcarrwcsackgtgctcgrtccccagcggyasyggsarytckgacakyggcccgtgcgctgtgtctccaccgtgccctgcatccctcatcccacatccgccgcgctccccgattcctcacaaacgccggtgcccatcatggggaagcccacgagctcgggatgcgactggcgccgcttcctgcggaatcactggctgctgctctccaccgtggccgccgtggtactgggcatcgtggtaggagtcttggttcgaggacacagtgagctctcgaatctggataaattctactttgcgtttcctggagaaattctgatgcggatgctgaagctcgtmattmtgccactgattatatccagcatgatcacaggtgtcgctgcactggattccaacgtatctggraaaattggtcttygtgctgtagtatattatttctccaccaccgtcattgctgtaatcctaggtattgtgttagttgtgagcatcaagcctggtgtcactcagaaagtgaatgaaatcaacaggacaggcaaaacccctgaagtcagcactgtggacgccatgttggatctgatcaggaacatsttssstgagaacctggtcsargcstgttttcagcagtacaaaaccaagcgtgaagaagtgaagcctgccagtgatcctggggggaaccagacagaggtgtctgtcaccacggccatgacaacaatgtctgagaacaagacaaaggaatacaaaatcgtkkgcctgtactcagacggcatcaacgtcctgggcctgattatcttctkcctcgtctttggacttgtcattggaaaaatgggagaaaarggrcagattctggtggatttcttcaatgcgttgagtgacgccaccatgaaaatcgttcagatcatcatgtgttacatgccgatcggtattttgttcctaatcgctgggaagatcatagaagttgaagactgggaaatwttcygcaagttgggcctttatatggccactgtcctgagtgggcttgcaatccactccctcgtagtgctgccactgatctatttcatagtcgtkmsgaagaaccctttccgctttgccttgggcatggcgcaggctctcctgacagctctcatgatctcatctagctcggcaacccttccagttacattccgctgtgcggaagaaaagaaccacgtggacaagaggatcacaagatttgtgctgcccgtcggcgccaccatcaacatggacggcactgcgctctatgaagccgtggcagctgtgttcattgcgcarstgaacggcatggacctgagcattgggcagatcatcacgatcagcatcacagccaccgctgctagcattggagctgccggtgtgccccaggctggcctggtgaccatggtsrkcrygwkgagtsccgtgggsctgcytgctgaggacgtcaccctcatcattgccgtcgactggctcctggaccggttcaggaccatggtgaacgttctgggtgatgcgtttgggacgggcatcgtggagaagctgtccaagaaggagctggagcaggtggatgtctcctctgaagtcaacattgtgaacccctttgccttggagcccacaatcctggataatgaagactcagatacgaagaagtcttacgtcaatgggggcttctcggtagacaaatctgacaccatctcgttcactcagacctcgcagttctagatgcctggccttagatgcctgggactgtgaagggcatctccgagggagccatctcttagccaactccagcgwkraggagcgagaaggacacaaagaatcaactgtacatttagtttgataaacagacctccagattattttctawawwwrrmwmwawarmctttgttctctgggtttgggaacgtggggtgggatgaaccgaagggaaattaagaaagctgtgttatctggactttctaattctgtaaaacaaagtttagaagtatatgacgtagtaactgttaggattaggtcatgggtctgggagaaaaattgctttctcaagcacagaccaatatttggggtttttaaacaatattattggctacaaatttttactcaggctttctattggcggggcttcctttgccttctcactttttatagattataattcagctcaaaagccccacccagtcaactagtgmchwattwtmsattwtrayctcakctcmarmrmctcwcmmastamtwktgssaaahwwwmmawwwwrammtcatctccagcaactstcaaactacttttgggaaaaaaaaaaaagcaaaaaggatcagcatwgtctgcaataacagtttcaagatattgtggggcttaggggaagggaagggtttwttattcaatgtactgtattgggacgctggatgtcagtgttcggtatagaactatatgtatatgtgtgtatatttattattttcatgtaattttcaagacagagatcagtaatgaactatcaatgtgaacgaramrwwwwmmwtgtacttgaatcagggctctagctccagccttgctgtgcttcagagctcacgaggacgctctcaggcgctctggggtgagaaatcaagttgctgggttactgtggttcaagccctaaagcagaaactctagggtggcccagccatccattgacaacatctaaggtcaagctccctggagggtgggaaacccttgtcgggcatggaataagtacatttacaaagggaccgtagaggcaagatgtgctccgatagcaacagaaggcttcattcttcaagtacacttcaaggcccacttcacaaggctgtcacctttctgcccttggttttctctgaccaccagggccaaaccagcagtggcgagccatcacctaagctgtttcaaaatgggctgcataaattgaataagcttcatcggaaggtgaccaagctattctaatactgtagtctttttattttagcttttgttattttatttttttagttttttgagacagagtttgtctacatagccctggctatcctggaactcactatgtagactagactggcctcaaactcacagagatcctcctgcctctgcctccttagtgctggcctgaaaggcaagtgccaccatgcccagctctatgctgaattctwmcagaataaaaaccataaaagccgggccacaagctactgataccagtggttcaggggaaatgcttcagtctgtctctggagaagactgttctgaaaatctcggccttgtggcttagaatcctctgcctgtctttctcctgctaattyctgaagatggactattaaaattctacacttctgtccccatcctgtaaataaaacccaacaaaaactcgttcttaatgtggacggattcagaacagccatgtttctgtagtgcccttaactcatcttaaacccgtgcttttatatttgagaagccagaaatcgtgccaaagataacagaaaggtaaacgagtgttgaccatggccacctgaagctacagcctgaccctcacagtgaccagtgactccgaactttgaagtacaaatatccctattctttataggaagcaaatctaaatctaaatgaggttggatgaatactttatgtaggaatggctggttctgtcccctwatcaggtggttcttgtctgtggcactgaattaattggcagagctgtccacgagttcactggggtcatccttgtaaccagctgcttaacacactgtgctgttatctcaagaggacgcgttccatttttctcaataaacatctcccacactttctcccttaaaaaaaaaaaaaaaaar

SEQ ID NO: 3204 - DNA, 1334 bp, Rattus norvegicus
caggtgaagctgcaggagtcaggacctggcctggtggcgccctcacagagcctgtccatcacttgcactgtttctgggttttcattgaccagctatggtgtacactgggttcgccagcctccaggaaagggtctggaatggctgggagttatatgggctggtggaaacacaaattataattcggctcacatgtccagagtgagtttcagtaaagacaattccaagagccaagttttcttaaaaatgaacagtctgcaaactgatgacacagccctgtactactgtgccagagatcatggggtttactggggccaagggactctggtcacagtctctgcagccaaaacgacacccccatctgtctatccactggcctctggatctgctgcccaaactaactccatggtgaccctgggatgcctggtcaagggctatttccctgagccagtgacagtgacctggaactctggatccctgtccagcggtgtgcacaccttcccagctgtcctgcagtctgacctctacactctgagcagctcagtgactgtcccctccagcacctggcccagcgagaccgtcacctgcaacgttgcccacccggccagcagcaccaaggtggacaagaaaattgtgcccagggattgtggttgtaagccttgcatatgtacagtcccagaagtatcatctgtcttcatcttccccccaaagcccaaggatgtgctcaccattactctgactcctaaggtcacgtgtgttgtggtagacatcagcaaggatgatcccgaggtccagttcagctggtttgtagatgatgtggaggtgcacacagctcagacgcaaccccgggaggagcagttcaacagcactttccgctcagtcagtgaacttcccatcatgcaccaggactggctcaatggcaaggagttcaaatgcagggtcaacagtgcagctttccctgcccccatcgagaaaaccatctccaaaaccaaaggcagaccgaaggctccacaggtgtacaccattccacctcccaaggagcagatggccaaggataaagtcagtctgacctgcatgataacagacttcttccctgaagacattactgtggagtggcagtggaatgggcagccagcggagaactacaagaacactcagcccatcatggactcagatggctcttacttcgtctacagcaagctcaatgtgcagaagagcaactgggaggcaggaaatactttcacctgctctgtgttacatgagggcctgcacaaccaccatactgagaagagcctctcccactctcctggtaaatgatcccagagtccagtggcccc

SEQ ID NO: 3205 - DNA, 1909 bp, Rattus norvegicus
tgagagcctgctggatatcagccatgcttgtcacagcgggttccctactaggggccatttggaccgtgctccatctccggattttgctgctggctgctgtcacctttctgttcctggctgatttcctcaaacaccggcgccccaagaactacccgccagggccttggcgcctgcccttagtgggttgcttgttccatttggatcctaaacagccacacctatcccttcagcagtttgtgaagaaatatgggaatgttttaagcctggattttgctaacattccttcagtggttgtaactggcatgcccttaatcaaagaaatctttactcaaatggagcacaattttttgaatcgccctgtcactcttctccgaaaacatctctttaacaaaaatggattgatcttctccagtggccagacatggaaggagcaaaggaggtttgccctgatgactctgaggaactttggactaggaaagaagagcttagagcagcgaatacaaggggaagcctaccaccttgtggaggccataaaagatgagggaggactgccttttgaccctcacttcaatatcaacaaagcagtctctaatatcatttgctctgtcacctttggggagcgctttgagtaccatgacagtcagtttcaggagatgctgaggctactggatgaggccatgtgtttggagtcatcaatgatgtgccagctctacaatatctttccaaggatacttcagtatcttcctggatcacaccaaacacttttcagcaactggagaaaactgaagttgtttatttctgatattattaagaatcaccggagagactgggatccagatgagggaagggacttcattgatgctttcctcaaggaaatggcaaagtacccagacaagactactacaagtttcaatgaagaaaacctcatctgcagtactttggatcttttctttgctggtacagagacaacatccactacactgcgctgggctctgctctgcatggccctgtacccagaagtccaagaaaaaatgcaggctgagattgacagagtgattggccaaggaagacagccaaacctggcagaccgagactccatgccctacaccaacgccgtcattcacgaggtgcagagaataggcaacatcatcccctttaatgttcccaggaaagtggcagttgacacctatttggctggatttaacttgccaaagggtactatgattctaaccaacttaactgcactgcacagggaccctaaagagtgggccaccccggacaccttcaacccagagcactttttggagaatggacagtttaagaagagagaatcctttctgcctttctcaatgggcatacttaagatgaagacgaagagaacaaagatgaattaaatacattgcttgaacacacaggaaagcgagcatgtcttggagaacaactggccaggtccgagctgttcatttttatcacttctcttatccaaaaatttaccttcaagcccccggtcaacgagaagcttagtctgcaattcagaatgtccgtcaccatttccccagtcagtcaccgcctttgcgcaattcctaggctgtgatgtcgaagaggaaagtatgaagaaatggcatctgcatggaggacactggtgtctgctcacmttraggggatagaattaaagatgactgagggagtgtgtgcaatgagactaaggaaattgaatcaagttatgggttcattaagtagaaagccacttgtgagctcaatggtacagcttcacgactgacatcttgcagagaaaaatgattcttccagaaaagaaaatgattacgggatcatggagaatggattaagtgactatgtaaatcataaaaacgatcataaaatttawammwwwaaaaaaaaaaaaaaaaaa

SEQ ID NO: 3206 - DNA, 3350 bp, Rattus norvegicus
acttccgggtttagccggcagcgcagccatttgtgtgtgtgtgtgtgtgtgtgtgtgtgtatgtgtgagtgtgtgtgtgtatgtgtgtgtgcgtgcgtgtgtgtgtgtgtgtgtatgtgtgtgaaggcgccttcagtggcccggctttgtggctgggctcagtctgcacggagcgacctagcggatgctgactcgaagtggaggccagaccccggccactcgaatcatgtcggatgtgcttcaggatcggggcaggaagcgcttggcaccacgccacacccggaggggaccatggagcagcaagatgatgagtccccggagaccctgcaggcctgtgtggagaactttgttctaccccaagagatgatcatcgaagtggagggagaagatgctgggtcactggacatcttgcctcaggagagcacagacttcaagattgtgactgtggacctcacggaggagggacagagcacttggagcaaggcccagagaaccccagagagacctgtgaccctggcaggccctggaagggacctgtgggattcgacagctgtacacagaacagaagaaacaacctcaaagcagaccgtctttgatgaagaaccatcccatggatcgaagccagaggtgttggcaagagatgatccttggctttcttcatgtgaggagcagttggagaaacaacaggacaagcaagaggagggggtcttgacccagggtagtgctggtcctcccgagactgtctatggggatcctggctttgacaggagttgcctgagtaccagccggccttcattccccatgatacctctcagaaaccattttcataaacaagcgtcacatgttaaaaagttacatggtgatgttgcaaatagtcaccaacagatcaacaacaatgcggatttctttgaagatgacaaatctgggaaagttcctcagagtcttcatcccactcagtgtataagaaccccgaaaggaaagaaagcctgtgaatttaatggtcgtgttcaaccctttggccaaggtgtgcccctaaatctaaatcaaaaagttcatttggaaggtaaaagctttggctttaaagggcgcgggcaagttttgaaccgtaacatagtcctcaatgagcaacagaagcttctcattaaagaaggccagtataaatgtagcaaaaccgccccaagtccgtctcttccccaaaacctgagaaactactctgaggagaaacgctttgaatgtaagtactgtggcaagtccttcagctggagctcccatctcattgctcaccaaagaacccatacgggggaaaagccgtacaaatgcaacctgtgtgggaagttcttcacccggagctcacacgtcgtttctcatcagaggattcatactggagagaaaccatacaggtgcaatctgtgtgggaagtctttcacccasaggtatgtgctcgtggtgcatcaaagaactcacactggcgagcgtccttatgaatgcaaccagtgtgggaagtcgttccgccagagctacaaactcattgcgcatcaaagaacccacacaggagakaagccgtacgaatgcacccagtgtgggaagtcattcatccagagttacaagctcatcgcgcatcagaaaattcactctggagaaaaaccttatgagtgcagtcactgtggcaagtccttcagccaaagctataagcttgttgcccatcagaggactcacacakgagagaaacccttcgagtgtaactactgtgggaaatcattcagctggagctcmcagctggtgtctcatcaaagaacccacacsgkagagaagccttackagtgtaacgagtgtgggaaatcattcaaycgcagctcacaccttgtcatgcaccagagaactcatactggagagaagccgtatcagtgcaagcagtgcgggaaatctttcagtcagagttacgttcttgtcgttcaccagaggacacacactggggaaaagccctacgagtgtggccagtgtgggaagacattccggcagagctcctgctttacccagcatcagaggactcacaccggagagaagccctatgagtgtaatcagtgtgggaagaccttcagcctaagtgcccggcttatcgtccaccagcgaacccacactggggaaaagccctacaaatgcagccagtgtggcaaagcctttattagcagttctaagcgcagtaggcaccaggctactcacagcgaggagtcctgcaagtcctgaccagttgagagtctgagctggagttgactcctgtcagtccaatcctctgaagttccgtctgaaggaatgcacwkgaccagaagtgtcagtgtgagaagaatgyacacaggcctttcctcaccccgtgwcagtgacagaaaggagtaagtraggccttcggtttggcagatgtggataagaggtccctgtagaagaaaagctgttacaccctggcagtggcgcgtactaggatgactgcaggcatcgtccctaagccaatctcaaaaggccacctttaackgtcagaaatcgwttcccaaagcactctgtgtacagagaaggcwgaagctmgacttagaaaaactgawtgctagatcaaatactgcaagcttagtgcagaakccctcttgttggtgwgttcggcctggtccttgagagcacagcttctctgttgcaaagctgsmacyctgtakatttcgttcaggaggtgtgcattctaaatgctcttacttagggaagttaactgctggccagcagctttgctctcctcctgctggctcttttccttcatgctactaggtggctaagccacgacctcycgscttatccccccgtgcagagtcctcatacctactcacttcaggcaggtgagccattcgatccctcatttatgcargcttaaccagtcaggttccagtcatagccaaacgtaagctcacttcggagtaccctactgctcttcaaaggagctgcttttctatcgcaaagatttctcttatgctgtccttactagtcattccgtgccatcaggagacaacataggagtcactgccttagagtgacaggtggccattgagttgtckgggccctagtctgctaaaccaagctcatctgagccaaggaatggactcccttgtcctcaaagccccctacagtattgctgtggatgctggccatgagctggaagggtyaggaaatccacaagcagggttaagcttggaccagcatggaggtgaacctgtgctaaaaacccatgactagtgaggctgagtcaagaggcttgttcaagccagcctgtgttacatagcaaaactgtcttgaaaraaararaaaaaaaaaaaaaaaaa

SEQ ID NO: 3207 - DNA, 2060 bp, Rattus norvegicus
cctgtgccagagttgacccatgccctttcttttctctttcccctttgacattcccacaggtttctttcctacctatcacattacttacagaggagtgtgtgtttattccgctgtgataactagctcccagacaagggagtcctggatttgaaagcaagcctgtgggtacagaggccaatttctacccttaatggttctgttctctggagaagattggtggtacttggagctctgaaggggtattttttttaaatagctcttgtgaaagaagaggaagaggagagagaggaaaaggaggaagaggaagaagaggagaaggaggaagaggaggaggaggaggaggaggaggaggatcataggcctgtacctttctcccccctttttttctcctacagagtagggagcaggggcaggaagtcagaatgatgggtgaaatcctctcaggaagctgtgtgaccttgggcaagtcacttcccctctctgggcctcaagtggagataataatcataccactgcacaaggccacagccaaagacaactagattcattaagtttgccgccattatgatggcgatttggagaacagccagtgccagtcagggctcctcttgaggctgagagcctggggcaaagacgccggcaggaagctcctccttagctgaccctcctcccccagagccagctccaactctttctgggtttctaggtgacttggctggcccctctggatgagttctactttaaacctgctgctgctgcctcctctgtattgggggggctcccacaggggccaggcaggagcccccccccggccaagccctgcggaggggctgcagccaccccggctggtgcccatgtgtctgccccttccgttcctccgatcgctggaacacagatttcagggcacctgctatgggccaggagctgcacaacccctcctttggggacacccacgaggcttctgcccctctgggcaaacaaccatccttcactgtgcggttttctgctacgaggctcactgaggctggctcccatctcagggtcagcagcgccaagaactgcggcaaggttttctctggaaaaccaggatgcctgggtcctcaaaggaggtggcagctccaggcctccagggctagggacgggggaggggcgcctgccggcggaggcccattagccagctaagtgctccctgggaggtgggggggggggactgctctgcagcagcagggggtgaggcgaagtgagggcacgcgggtggagtgggatggagagagatgcggtgatatttcctgagttcagctaagtgcggtaggagtgggttggggacaggggtctgtgtcccccagccttattatcttcgccttttccacctggagtcctcaactagctgaccttggcatgtcttcggtagttcgaacacccgtctttccaggtgcaccctcaatagccccgggctcccaagctctcctactttatctaagactccggaaaacttgagacctactgagccggccaacaaagaccccccccccccccaattccgctctatcatccctttggctgcagtcgccgccccgaccgccaagggggcgccgcgcgggtcgggcgacccctccgcggtgggagggggcggcacgccgacggggcggggctcggcgggggcggggccgggcgccgagtctcccgtccgtccgggacagactggctggcgggcgggcgctgacgccgcggggccagagcgggccgcgcgggagcgtgtggagaaagcagtggcaccgtccgttcccgtcggggttccataggtccccgagccgcccctggcttggccatggcgggcgcgaggcccggcgtccacgcgctgcagctggagccgcccaccgtggtggagaccctgcggcgcgggagtaaattcatcaaatgggacgaggtaagagagtggctgtaccctactctgccctgatcgaaggattccttcagtcacattcggctagatgccagggacccccacttcagtgtagcctgaccactgcaccctattcagccttgctgcactccggaaa

SEQ ID NO: 3208 - DNA, 6375 bp, Rattus norvegicus
cgggccggcgggagtagaagagccactgagccatgggcgcaggcagttccaccgagcagcggagccccgagcagccggcggggagcgacacgccgagcgagctggtgctcagtggccatgggcccgcagctgaagcctcgggagcagctggagaccccgccgacgcggaccccgccaccaagctcccacagaagaatggccagctgtcttctgtcaacggcgtagctgaacaaggagatgtccatgtccaagaggaaaaccaggaggggcaggaggaagaagtcgttgatgaggatgttggacagcgagagtcagaagatgtgagagaaaaagaccgagttgaagaaatggcggccaactccacagctgttgaagatatcacaaaggatgggcaggaggagacatcagaaataattgaacagatccctgcttcagaaaacaatgtggaagaaatggtacagcctgctgagtcccaggctaatgatgttggcttcaagaaagtatttaaatttgttggttttaaattcacggtgaagaaggataaaaatgaaaagtcagatactgtccaactactcactgtcaagaaggatgaaggcgaaggggcagaagcctctgtcggagctggagaccaccaggagcccagtgtggagactgccgtcggagagtcagcatccaaagaaagtgagctgaagcaatccacagagaagcaagaaggcaccctgaagcaagaacagagcagcacagaaatcccccttcaagccgaatctgatcaagcggctgaggaagaagccaaagatgaaggagaagaaaaacaagagaaagagcccaccaagtccccagaatccccgagcagcccagtcaacagtgagacaacatcttccttcaagaagttcttcactcacggttgggccggctggcgcaagaagaccagcttcaagaaatcaaaagaggatgatctggaaactgccgagaagagaaaggagcaagaggcagaaaaagtagacgaggaagaaaaggaaaagacagagccagcctcggaggagcaggagccggcagaagacacagaccaggccaggttgtcagcagactacgagaaggtggagctgcctttggaagaccaggttggtgacctggaggcatcgtcagaggagaagtgtgctcctttggcaacggaagtgtttgatgagaagatggaagcccaccaagaagttgttgcagaggtccacgtgagcaccgtggagaagacagaggaggagcagggaggaggaggagaggctgaagggggcgtggtggtagaaggaacaggagaatccttgccccctgagaaactggctgagccccaggaggtcccccaggaagctgagcctgctgaggagctgatgaagagcagagagatgtgtgtctctggaggagaccacactcaactgacagacctaagtcctgaagagaagacgctgcccaaacacccagaaggcattgtcagtgaggtggagatgctgtcctctcaggaaagaatcaaggtacagggaagtcccttgaagaaactcttcagtagctcaggcttaaagaagctgtctgggaagaagcagaaggggaaacgaggaggtgggggagacgaagagcctggagaataccaacacattcacaccgaatccccagagagtgctgatgagcagaagggagagagctctgcgtcgtcccccgaggagcctgaggagaccacgtgtctggagaaagggccgctggaagcaccccaggatggggaagctgaggaaggaactacttccgatggagagaagaagagagaagggatcactccctgggcatccttcaaaaagatggtgacacccaagaaacgggtccgaagaccttctgagagtgacaaggaggaagagctggagaaggtcaagagcgccaccttgtcctccactgatagcacagtgtcagaaatgcaagatgaagtcaaaactgttggtgaggaacaaaagccagaggaaccaaagcgtagggtggatacttcagtgtcttgggaagcactgatttgtgtcggatcatccaagaagagagcaaggaaggcatcctcttcagatgatgaaggagggccaaggacactgggaggggacagtcacagagcagaggaggccagcaaagacaaagaagccggaacagacgctgttcctgccagcacccaggagcaggaccaagcgcaaggaagttcctcacccgagccagcgggaagcccttccgaaggggaaggtgtctccacttgggagtcatttaaaagattagtcactccaagaaaaaaatccaagtcaaaactggaagagaaagccgaagactctagtgtagagcagttgtccactgagatcgaaccgagtagagaagaatcttgggtttccattaagaaattcatccccggacggcggaagaaaagggcagatgggaagcaagaacaagccactgtggaagactcagggccagtggagataaatgaggacgaccctgatgtcccagccgtcgtgcctctgtctgagtatgatgcagtggagagggagaagatggaagcccaggggaatgcggagctgccccagctgctgggggctgtgtacgtgtccgaggagctcagtaagactctggtccacactgtgagtgtcgcagtcattgatgggaccagggcagtcaccagtgtcgaagagcggtctccttcgtggatatccgcttccgtaacagaacctcttgaacacacagcgggagaagccatgccacctgttgaagaggtcactgaaaaagacatcattgcagaagaaactcctgtgctcacccagacgttaccagagggtaaagatgcccatgacgacatggtcaccagtgaagtggatttcacctcagaagctgtgacagccacagagacctcagaggctctccgtactgaagaagttaccgaagcatcgggggccgaagagaccacagacatggtgtccgcagtttcccagctgactgactccccagacaccacagaggaagccaccccagttcaggaggtagagagtggtgtgctagatacagaagaagaggagcgccagacgcaggccatcctccaagccgttgcagacaaggtgaaagaggagtcccaggtgcctgcaacccagactgtgcagagaacggggtcaaaagcactggagaaggttgaggaggtagaggaggactccgaagtgctggcttcggagaaagagaaggacgttatgccgaaaggacccgtgcaggaagctggagctgagcatcttgcacagggctctgagactggacaggctactccagagagccttgaagttcctgaagtcacggcagatgtagaccatgtcgccacgtgccaggttatcaagctccagcagctgatggaacaggccgtggcccctgagtcatccgaaaccttgacagacagtgagacaaatggaagcactcccttagcagattcagacactgcagatgggacacagcaagatgaaaccattgacagccaggacagtaaagccactgcagctgtcaggcagtcacaggtcacagaagaagaggcggctactgctcagaaagaggagccttcgacactacctaataatgttccagcccaggaagaacatggggaagaaccaggaagagatgttcttgaacctacacagcaagagcttactgctgcagccgtgcccgttctggcaaagactgaggtgggtcaagagggtgaggttgactggttggatggagaaaaagtcaaagaagaacaggaggtgtttgtacactctggacccaacagtcaaaaggctgctgatgtgacatatgacagtgaagtgatgggagtggccgggtgtcaggaaaaggagagtactgaagtgcagagtcttagcctggaggagggagagatggaaactgacgttgaaaaggagaaaagggagacaaagccagagcaagtgagtgaagaaggtgagcaggaaacagccgctcctgagcatgaaggaacctacgggaagccagtcctgacacttgacatgcccagctcagagagggggaaggcactgggaagccttggaggaagcccttctctcccagaccaagacaaagcaggttgcatagaggttcaagttcaaagcctggacacaacagtcactcaaacagcagaagctgtggaaaaggtcatagaaacggttgtgatttcagagacaggtgaaagtccagagtgtgtaggtgcacacttattaccagctgagaagtcctctgcaacgggtggccactggactcttcagcatgcagaggacacggtacccctggggcctgagtctcaggcagaatccatcccaatcatagtaactcctgctcctgaaagcaccctacatcctgacctacaaggagaaataagcgcatcccagagagagcgatcagaggaagaggacaagccagatgctggtcctgatgctgacggcaaggagagtacagcaatcgaaaaagtcctcaaggctgaacctgagatcctggaacttgagagtaagagcaacaagattgtgctgaacgtcattcagacagccgttgaccagttcgcacgtacagaaacagcccccgaaactcatgcttatgattcacagacccaggttcctgcaatgcaggctgacagcagggagcccaacagatgctggacaaaaatgaaagttgccaagatgaaacacccagtgccgcagcccagagaggacttgcaagtcctgaccgttctggaggcatgggctcagcctcggaaatgcttgccgcgcttgcagttgaaagcgccggtgtcaaagtaagcattgagaagctgcctcctcaacccaaagatcaaaaggagcatgctgctgatggccctcagctccaaagcttagcccaggcagaggccagtgcctctggaaacctaaccaaagaatccccagacaccaacggaccaaagctaaccgaggagggcgatcgcccaaaagttgaggtccaggaagaagaaatgtctaccaagtcagtcaaagagracaaggcccaggywgaagaggacctgcakgagccaaagggagacctggcagaatcctaagatgttagttgctcattgtacatctgtaagaccagaatgtgaaaacaagtcacagaacaagatgctgctgttgggaccttgagaccaagatttcagagcccatgagatccagagagcagggccgtccaatgatttccacccagtagagcaccccgacratcctgaggcttcatcgggagctagagccagctaacatttcctcgtttcaagactgcctttgatttgccccttgatgccgtccgtgtatttcggatwtaaggtcctgcgttctcaacctggaaccaatgtctgccatacctagttccacttctcaaactggagcatcctcctttatgtatttatatgtatgtkytatgtagkcctcctcctgtacctattgtatatttttttctaacgtttaagcacatgctttttgtattatgcaatatataacgggtgtgcagccatagcgacgckttgaaaagctycaagcctcaactgtaacctgcagcaaacarataacattycttggcaagaagagacaagtcttttttaaagkttactgatgcttagatctgtgggcttctagtcctctgaaagwggtgwtttcctatgcacagcgagctcagaaataaaaaccccattttgaaacatccaggatgtcccaatattaccatgattttttcccccctttttgctaatccagtccaggttggaaagaagtctcctctgtgtcagattaagccctgtctcttaatgatatggacaaatgagtgtgcctaaggccatgrgatgtttcctaatgcagaaggaatctgwtgtacgtttttttgattgtactcttctatgctggaccgaattcatatgcagatcgaagtgaktcctgwtcttwacagatggtattttgatagatactggagttwgwctgwgttatatctgtgccccttctttaagaacaatgttgcattatgttcctttggataaawtgwgrttwgwccaactgatttaaataracatatttgcctcacttaaaaaaaaaaammmmmamacacccactacacacccaaacacaccataaactcacaattacataactaaaaaaaaaaaatcttagggggtggcccccggaacccaatttcgccttataggggaggcgtaataccaattcactggccgccgttatacaacgtttggactgggaaaaaccttggggtaccccacttaaaacccttttgagcaaaatccccttttgccacttggcgaaaaacccaaaaggcccgaccgaacgccctttcaaaaag

SEQ ID NO: 3209 - DNA, 3493 bp, Rattus norvegicus
ccggagagctgatctcgggattcgggtgcggacgccttggcctggaggcgatatgggtggtccgtggcccggttcagtcgtttgcagccgcctagggaacaggcctgtctggccctaagggagccctctttcgaagtggtggtgctcggacgacctgctctctgcgtggctgggcacctgtaggtgtccctcgagagctcagttttgaggttcaagccagtgtggccatgaagtggctgcctattgggctgatgctgtgaccccggagtcttcctctcctgccagtccccctgcccggaacatgtggctgcagctcggcctgccctcgttgtccctgagccccacgcccacagttggccggagcctgtgcctcatcctgtggttcctcagtttggtgctgagggccagtacccaggccccggcacccacagtcaatactcactttgggaaactaaggggtgccagagtaccattgcccagtgaaatcctgggtcctgtggaccaatacctgggggtaccctacgcagctcccccgatcggcgagaaacgtttcctgccccctgaaccacccccatcctggtcgggcatccggaacgccacacactttcccccagtgtgcccccagaacatccacacagctgtgcccgaagtcatgctgccagtctggttcactgccaacttggatatcgtcgccacttatatccaggagcccaacgaagattgcctctatctgaatgtgtatgtgcccacggaagatgtaaagcggatttccaaggaatgcgcccgaaagcccaacaagaaaatttgtaggaaaggaggatccggcgctaagaaacagggcgaggacttagcggataatgacggggatgaagatgaagacatccgagacagtggtgctaaacctgtcatggtctacatccacggaggctcttacatggaaggaacaggcaacatgattgacggcagcgttcttgcaagttatggcaacgtcatcgtcatcacactcaactaccgggtcggggtgctaggtttcctgagcactggggatcaggctgccaagggcaactatgggctccttgatcaaatccaggcccttcgctgggtgagtgagaacattgccttctttggaggagatccccgtagaattactgtctttggctctggcattggtgcatcctgtgtcagtcttctcacactgtctcatcactctgaggggcttttccagagggccatcatccaaagtggctcagcgctatctagctgggctgtgaactaccaaccagtgaagtacaccagcttgctcgcagacaaagtgggctgtaacgtcctggacactgtggatatggtggattgtcttcgacaaaagagtgccaaggagctggtagaacaggacattcagccagcccgctaccatgtggcttttggccctgtgattgatggtgatgtcattcctgatgaccctgagatccttatggaacagggagagttcctcaactatgatatcatgctaggcgtcaaccagggtgagggtctcaagtttgtggaaggggtggtggaccccgaggatggtgtctctggcactgactttgactactctgtctccaattttgtggacaatctatatggctatcccgagggtaaggacaccctgcgggagactatcaagttcatgtatacagactgggcagaccgagacaaccctgagacccgccgtaaaacactggtggcactcttcactgaccaccagtgggtggagccttcggtggtgacagctgatctgcatgcccgctatggctcacccacttacttctacgccttctaccatcactgccagagcctcatgaagcctgcatggtcagatgcagcacacggggatgaagtaccctatgtttttggtgtccctatggtaggtcccactgaccttttcccctgcaacttctccaagaatgatgttatgctcagtgctgttgttatgacctattggaccaactttgccaagaccggggatcccaacaagccggtaccccaggataccaagttcattcacaccaaggccaaccgctttgaggaagtagcctggtccaaatacaatccccgggaccagctctaccttcacatcgggctgaaaccaagggttcgtgatcattaccgagccacaaaggtagccttttggaagcacctggtaccccatctgtacaacctgcatgacatgttccactatacatccacgaccacgaaagtgccgccgccggacaccacccatagctcccacatcacccgtaggcccaacggcaagacctggagcaccaagaggccagcsakctcacctgcctacagcaatgagaatgctcctgggtcctggaatggggaccaggatgcagggccactcctggtcgagaaccctcgagactactccactgaattaagtgtcaccatcgctgttggggcctctctcctgtttctcaatgtgttggcctttgctgctctctattaccgtaaggacaaacggcgccaggagcccctgaggcagcctagcccccaaaggggaactggtgccccagaattgggaactgctccagaggaggagctggcagcattacagttgggtcccactcaccatgagtgtgaggccggccccccacacgacacactgcgcctcacagcattgcccgacyacaccctgaccctgcggcgctcccccgatgacatcccactcatgactcccaacaccatcactatgattcccaattccctggttgggttgcagaccttgcacccctataacacctttgccgccggattcaacagcaccgggctgcccaactcacactccactacccgtgtatagctctatcccagagcacaacccatctcccagatccctccctcccagatccacaaacacacatgcacacacatacacatatatgtacacgcacgcacccacaccctacagcagacccatctgcacaaacacagacagatgtggacatgcacccgcatgtacaaaaaaacacggaggcagcctagcccccaaaggggaactggtgccccagaattgggaactgctccagaggaggagctggcagcattacagttgggtcccactcaccatgagtgtgaggccggccccccacacgacacactgcgcctcacagcattgcccgactacaccctgaccctgcggcgctcccccgatgacatcccactcatgactcccaacaccatcactatgattcccaattccctggttgggttgcagaccttgcacccctataacacctttgccgccggattcaacagcaccgggctgcccaactcacactccactacccgtgtatagctctatcccagagcacaacccatctcccagatccctccctcccagatccacaaacacacatgcacacacatacacatatatgtacacgcacgcacccacaccctacagcagacccatctgcacaaacacagacagatgtggacatgcacc

SEQ ID NO: 3210 - DNA, 3252 bp, Rattus norvegicus
tgaggatggagcagcggtcgggccgcggctcctaggggaggcagcgtgctagcttcgggggcgggccagtagcgggagcgagggccgtacggacaccggtcccttcggccttgaagttcaggcgctgagctgccccctcgcgctcggggtgggccggaatccatttctgggagtgggatcttccaccttcatcagggtcacaatggcagctacagtaaggaggcagaggccaaggaggctactctgttgggccttggtggctgtcctcttggcagacctgttggcactgagtgacacactggctgtgatgtctgtggacctgggcagtgaatccatgaaggtggccattgtcaagcctggagtgcccatggagattgtattgaacaaggaatctcggaggaaaactccggtgactgtgaccttgaaggaaaacgaaaggtttctaggtgacagtgcagctggcatggccatcaagaacccaaaggctacgctccgttatttccagcacctccttggaaagcaggcagataaccctcatgtggctctttaccggtcccgtttcccagaacatgagctcaatgttgacccacagaggcagactgtgcgcttccagatcagtccgcagctgcagttctctcccgaggaggtgctgggcatggttctcaactactcccgttccctggctgaagattttgcagaacaacctattaaggatgcagtgatcaccgtgccagcctttttcaaccaggccgagcgccgagctgtgctgcaggctgctcgtatggctggcctcaaggtgctgcagctcatcaatgacaacactgccacagccctcagctatggtgtcttccgccggaaagatatcaattccactgcacagaatatcatgttctatgacatgggctcgggcagcactgtgtgtaccatcgtgacctaccaaacggtgaagactaaggaggctgggacgcagccacagctacagatccggggcgtgggatttgaccgcaccctgggtggcctggagatggagcttcggctgcgagagcacctggctaagctcttcaatgagcagcgcaagggccagaaagccaaggatgttcgggaaaacccccgagccatggccaaactgcttcgggaagccaatcggcttaaaaccgtcctgagtgccaatgctgatcacatggcacagattgaaggcttgatggacgatgtggacttcaaggcaaaagtaactcgagtggagtttgaggagctgtgtgcagatttgtttgatcgagtgcctgggcctgtacagcaggccctgcagagtgctgagatgagcctggatcaaattgagcaggtgatcctggtgggtgggcccactcgtgttcccaaagttcaagaggtgctgctgaagcctgtgggcaaggaggaactaggaaagaacatcaatgccgatgaagcagctgccatgggggccgtgtaccaggcagcggcactgagcaaagccttcaaagtgaagccatttgttgtgcgtgatgctgttatttaccccatcctggtggagttcacaagggaggtggaggaggagcctgggcttcgaagcctgaagcacaataaacgtgtgctcttctcccgaatggggccctaccctcagcgcaaagtcatcacctttaaccgatacagccatgatttcaactttcacatcaactacggtgacctgggcttcctggggcctgaggatcttcgggtatttggctcccagaatctgaccacagtgaaactaaaaggtgtgggagagagcttcaagaaatatcctgactatgagtccaaaggcatcaaggcccactttaacctagacgagagtggagtgctcagtttagacagggtggagtccgtattcgagaccctggtggaggacagcccagaggaagagtctactcttaccaaacttggcaacaccatttccagcctgtttggcggtggtacctcatcagatgccaaagagaatggtactgatgctgtacaggaggaggaggagagccctgctgaggggagcaaggatgagcctgcagaacagggggaactcaaggaggaagctgaagccccaatggaggatacctcccagcctccaccctctgagcctaagggggatgcagcccgtgagggagaaacacctgatgaaaaagaaagtggggacaagtctgaggcccagaagcccaatgagaaggggcaggcagggcctgagggtgtccctccagctcccgaggaagaaaaaaagcagaaacctgcccggaagcagaaaatggtggaggagataggtgtggaactggctgtcttggacctgccagacttgccagaggatgagctggcccattccgtgcagaaacttgaggacttgaccctgcgagaccttgaaaagcaggagagggagaaagctgccaacagcttagaagcttttatctttgagacccaggacaaactgtaccaacctgagtaccaggaagtgtccactgaggaacaacgggaggagatctctggaaaactcagtgccacttctacctggctggaggatgagggatttggagccaccactgtgatgttgaaggacaagctggctgagctgagaaagctgtgccaagggctgttttttcgggtggaagagcgcaggaaatggccagagcggctttcagctctggataatctcctcaatcactccagcattttcctcaagggtgcccgactcatcccagagatggaccagatcttcactgacgtggagatgacaacgttggagaaagtcatcaatgacacctggacctggaagaatgcaaccctggccgagcaggccaagcttcctgccacagagaaacccgtgctgctttcaaaagacatcgaggccaaaatgatggccctggaccgggaggtgcagtatctactcaataaggccaagtttactaaaccccggccacggcccaaggacaagaatggcacccggacagagcctcccctcaatgccagtgctggtgaccaagaggaaaaggtcattccacctacaggccagactgaagaggcgaaggccatcttagaacctgacaaagaagggcttggtacagaggcagcagactctgagcctctggaattaggaggtcctggtgcagaatctgaacaggcagagcagacagcagggcagaagcggcctttgaagaatgatgagctgtgaccccgcgcctccgctccacttgcctccagccccttctcctaccacctcta

SEQ ID NO: 3211 - DNA, 1486 bp, Rattus norvegicus
ctcgttgagaagggagacgtagcctttgtgaagcaccagactgtcctggaaaacacgaacggaaagagcggacaggtcttctgtgggttgagatgtctatgattttatccgcctcagtcgtgcgtgtcagggatggattaccgctgtctgcatccactgattgtgaacagagtgcaggagtgcaggagtgcaggaagtactttaagatgctctcgaggaagcttgctcaatttcctgatagatgtacactgaaaactggacgccataatattaattttattagctctctcggcgtgagctacatgatgttgtgcactgaaaattatccaaatgttctcgccttctctttcctggatgagcttcagaaggagttcattactacttataacatgatgaagacaaatactgctgtcagaccatactgtttcattgaatttgataacttcattcagaggaccaagcagcgatataataatcccaggtctctttcaacaaaaataaatctgtctgacatgcagatggaaatcaagctgaggcccccttaccaaatcccaatgtgtgaactgggatcagccaatggagtcacgtctgcattttctgttgactgtaaaggtgctggtaagatttcttctgcccaccagcgactagaaccagcaactctgtcagggattgtggcatttatccttagtcttttatgtggagctctgaatttaattcgaggctttcatgccattgaaagcctcctgcagagtgatggtgaggactttagttacatgattgcatttttccttgggacagcggcctgcctttaccagatgatttgcctttgccttcaggggagaaaggagaggacataattaactgccactgtgatgaagaaaccagtcacaacacatgagaagctctgctttccttctctgcccatcttccccttttgttttacaaatcagcctggcatgcctgcgagtgtgagacctggtaagaaaactcccacaaggatcctgcagtggaacgcaggcgcatcacagtagaagttcagcatcacctgaagactgactggcaggcagcaytgaatcctcactagagagctaagcamagcttggttgtgggaccgtgctmtgaggwccaagccgwaatgcwaccacctgagtttgcctttgtsaggcattagtgtagaccaatgaagaagatgctgcaggaattggkaagcwaccctctaaarcagccactgtgytaagtttcagattatttgcacaattatagtaccaagagtttatgaagtctagaaatggcaagaratttgtttttttactctttgtttctgccaccttctaactmtgsaggccacctggtgtggagagggctgtgatgcgcatctccataacatcacaagtcctgacaacagtgatggcgtgtttcctttctagaccatgtttatcatttcttttgaaatcactaaaaatacatgattcattgactatcagtc

SEQ ID NO: 3212 - DNA, 668 bp, Rattus norvegicus
  misc_feature (436)..(436): n is a, c, g, or t
ggcacgaggggcatcactgctgtttggssagsmkwskgccgggccgacaggatggcgggcasgggtaaactaatcgcastgattggagackaggacacggtgactgktytcctgttgggcggcatargggagcttaacaagaaccgccaccctaatttcctggtagtggagaaggataccaccatcaatgaaatcgaaracactttcaggcagtttmtaaacagggatgacatcrrcrtcattstsatcaaccartmcmtcgmagagatggttcggcacgccctckatgcccaccagargtscattcyadccgwsctggagatcccstccaakgagcatccctacgacgcakccaaagactccatcctgcgcaggrccaagggcatgttcactgctgaagacctgcgctagggstgctcagcccttaacscwyswnksgsttycaggcctytcccagtttgccaccctbtayttaagtttcaagccttkgttkycagcccctycyttymtcwtcamtgagtggttcctaagctgttggggttmtgatgktcargtmcargbtgggtwgggaaagaaaggscaaccatytbtbyabtwmctatgccattgrgcagtatcattgttaacattaaaggaatattmtytcmrdraaaaaaaaaaaawaaaaa

SEQ ID NO: 3213 - DNA, 5972 bp, Rattus norvegicus
ggatgagactggaacgaactgagactgctggatttgctactgtcattgctgttttctcttccccaccggccctctcccatctctcgggttagaaggagaaggaggagccggaggaagagggctgcctctgaagaaaggagaatggcgttcagcaaaggatttcgaatctaccacaaattggatcccccaccgttcagcctcatagtggaaactaggcataaggaagaatgtctcatgttcgagtctggggccgtggcagtgctctcatctgcagaaaaggaggccattaaaggcacatatgccaaagtgctggatgcatatggacttttgggagttttacgattaaatcttggtgataccatgttgcattatctggtcctagtcactggatgcatgtctgttgggaaaattcaagaatctgaagtcttccgagttacttccactgagtttatatcacttcgagttgatgcttcagatgaggaccgcatttcagaagtacgaaaggttttgaactcaggaaacttttattttgcatggtctgcatctggagtcagcttagatctgagtctgaacgcacatcgaagcatgcaggagcacacaactgacaataggtttttctggaatcagtctttgcatctgcatctcaagcactatggtgtgaattgtgatgactggttgttacggctcatgtgtggaggagtagagattagaacaatttatgctgcccataaacaggcaaaagcttgcctcatttcaagactaagctgtgagcgagctgggacaaggttcaacgtccggggaacaaatgatgacggtcatgttgccaactttgtagagacagagcaggttatatacttagatgactgtgtctcctccttcatacaaatccgaggatctgttccgttgttctgggagcaaccagggttgcaagtgggatctcatcgtgttcgaatgtcaaggggatttgaagccaatgcgcctgcctttgacaggcatttccgaacccttaaggacttatatggtaaacaaatagtagtaaatctgcttggatctaaggagggtgagcatatgctgagcaaggccttccagagtcacttgaaagcctctgaacacgcttctgatatccacatggtgtcctttgattatcatcaaatggttaaaggaggaaaggcagaaaaattgcacagtgttctcaaaccacaagtccagaagtttctagattatggatttttttatttcgatggcagtgcagttcaaaggtgccagagtggtacagttcggacaaactgcctggactgtctggatagaacaaacagtgtgcaggcgttccttggcttagagatgctagctaaacagctggaagctctgggcttggctgaaaagcctcagttggtgactcgctttcaagaagttttccggtccatgtggtctgtgaatggcgattcaatcagtaaaatatatgcaggcaccggagccctggaagggaaggccaagttaaaagatggtgcgcgatctgtcaccagaaccattcagaataacttcttcgacagctccaagcaagaagccattgatgttctgcttctgggaaacactctgaacagcgacttagccgacaaagcccgggcacttctaactactgggagtttgcgtgtgtctgaacagacattacagtcagcatcttccaaagtcttaaagaacatgtgtgagaacttctacaagtactcaaagcccaagaagatccgagtgtgtgttggaacctggaatgtgaacggcgggaaacagttccgcagcatagcattcaagaaccagaccctcaccgactggcttcttgatgcacccaagttagctggcatccaggagtttcaagataagagaagtaagccaactgatatatttgcaattgactttgaagaaatggtggagctgaatgctgggaacattgtgaatgcaagcacaacaaaccagaagctgtgggcagtggaactgcagaagaccatctccagagacaacaagtatgttctcctggcctcggagcagttggtgggtgtctgcctgtttgtctttatcagaccgcagcatgctccctttatcagggatgttgcagtcgatactgtgaaaactgggatgggaggcgcgactggaaataagggcgctgttgcaatccggatgctcttccacaccaccagcctttgctttgtctgcagtcactttgctgcaggccagtcccaagtcaaagagagaaatgaagatttcgtagaaatagcacgaaaattgagtttccccatgggaagaatgctcttctcccatgattacgtattctggtgtggtgatttcaactatcgaatcgatcttcctaatgaagaagttaaagagctcataagacagcaaaattgggattctcttatagctggagatcaactcatcaatcagaaaaatgcaggacagatctttagaggatttttagagggaaaagtaacgtttgctccaacctataaatatgacttgttttccgaagactatgacaccagtgaaaagtgccgcacccctgcttggacagaccgagtcctctggagaaggaggaagtggccttttgacagatcagctgaagacttagatcttctgaatgctagtttccaagatgaaagtaaaatcctgtatacatggactcctggcaccttgctgcactatggaagagccgagctgaagacttctgaccacaggcccgttgtcgccctgatcgatatagatatatttgaagttgaagctgaagagagacaaaaaatttataaagaagttattgcagtccagggcccaccggacggcacagtactggtctcaatcaaaagttctgcacaagagaatactttctttgacgatgctttaatcgatgagcttctgcagcagtttgcacacttcggcgaagttatacttataagattcgtagaagataaaatgtgggttacatttttggaggggagctctgccttgaatgttctgagcctaaatggtaaagagttattaaatcggactataacaattactttaaaaagtccagactggatcaaaactttggaagaagagatgagtttagagaaaatcagtgtcacattgccctcatcaaccagttccaccctgctcggtgaagatgcagaggtctcagcggactttgacatggaaggtgatgtcgacgactacagtgctgaggtggaggagcttcttcctcagcacctccagccatcctccagctctggcctcggcacctctccaagctcttcgccccggaccagtccctgccagtcacccacagcaccagagtactccgcaccttctcttcccatcagacctagtcgagcaccatcaagaactccaggacctctaagttcacagggtgctccagttgacacccagccagcagcccagaaggagtcttcccagaccatagagcccaagaggccaccccctccccgcccagttgctcctccagcacgtcctgccccaccacagaggccacctccaccttcaggggctaggagtccggcacctgctagaaaagaatttggagcacccaaaagcccgggaacagcacggaaagataatatagggcgtaatcagccttcccctcaagccggacttgcaggcccaggaccttctggatatggtgcagctagaccgacaattccagctcgtgctggagtgatcagtgcccctcagagccaggctcgggtgtctgctggaaggctgactcctgaaagccaaagcaaacccttggagacatcgaaaggtcctgctgtccttccagaaccactgaagcctcaggctgcatttcctccgcagccttctctgcccacacctgctcaaaagttacaggacccacttgtccccatagcagcacctatgcctccctccattccccaatcgaatttggaaactccacccctgcccccacctcggagcaggtcatctcaaagcttgccttcagactcctcaccacagctacaacaggagcaaccaacagggtaacagcaggtaaaaataaatggagcttgtggtgtcaaacaagagccaacattgaagagtgacccatttgaagacctctcacttagtgtgcttgctgtatccaaggctcagccttctgctcagatttcacctgttctaaccccagacccaaagatgttgattcagttgccttctgcatcgcaaagtaaagttaactctttgagttctgtaagttgcatgctaaccatgcctccagttccagagcaaagcaagtcacaggaaagtgtggggagttctgcaaacccatttcccagcctgcctaccaggaacccttttacagacaggactgctgcccctggaaacccatttagagttcagtctcaagaatcagaggcaacttcttggctatccaaagaagagcctgtttctaacagtcctttccctcctctcatgcctctcagtcacgacatgagcaagccttcaagttcactagatggttttgaggacaattttgatctgcagagccagtctacagtaaaaacaagcaaccccaaaggatgggtaacatttgacgaagatgaagactttcctacaaaaggaaagtcaaggtcggtttatccagactccctgggtaatacagcagcttcatttgatgatgactggagtaaaggtacaaacgtttctttctgtgtgctgccagccagaaggccaccacctccaccacctcctgtccctctgctaccacctggcaccacctcatctgcaggacctagcacaaccctgtcatctaaggcatctcccacattggacttcacagaaagataatgacatggrgggawgkgagkttctcctggtgtggkgkgactgtttgtttctgtttgtcagggtagacccaagagaatggggcattaattagttgttatgtgcaataaataatcagtaagtgcactgatatctatataaaataccactagaggatgtggacaaagctggagtttgtgtatatcagaaatagcaaagacatcctcttaactggagktctggcmykwbkcttcagatgaatggaagagaataggaaccatttttwaaagtgcttaaaactactctagaatagtccttactcagatactcacataksaatcacgtraagcccacacaactgyagctgacagtactgycagsccattgtgctgttgacgattggtattcgtggatacttaccaaagagcytycagagwtctggtgagattgctttgaacrgcattactttagscaaaaggkctgtgkatatatacactgtgtgtgtatgtctgtatgtatgcacaaacacacatgtgtrcatycacatacttataaaawctgksttkrtataattyagatcaaawtttayctaacagwtctgacaawgkcctttttttcaatatmtyamtatcaagaagctggctgccactgggtgtgsktcattahgtsactaactgsstyccagaawggaagggtcagwmcctytacasarctgccatctcstgttacgctgcacctcagaccttcacattcatcstactaccttcctcctstggtatgccttycmctgggcatttacaatgggcagtacagacgtggtcagtcatgtgmcagatactcaaamcagtaggcacctgccaccagattccaggaggaacactatcagtgtgctcctttctctgcacagccctttcccttcagacctttstgtttgccaattgcctggagctttgctctcagctgttgagtggtccgaattaggaacatgtcyagtataggttctctcccatgtaagaggctacataacatatccatgatgctgctttaaggttttagaggctatacctcaaattagctgtggattttgtctcctgcactgccagtatgcaactgatcttgcatttattaattttgtgaaaaaatmsrtggaattttkmcaaaaaaaamaaaarraa

SEQ ID NO: 3214 - DNA, 2118 bp, Rattus norvegicus
agcagccttatatgtatcaagatgcattttattaagtcttcatgggtatctggggaagaataaattgtttgtttggcctgagcaccaattagtgtccacatctctgagaaagaacatggatctacaactatccgtgaaagcccaatgcatgggggcaacatcaattagtactcgtgccgaattcggcacgaggggagctcagcacgttcagsmmtkcmaagggcagtacacaaaattgagagtaaagctcgaagagagacttgtttaaagaaaacggcaatggatttgatcccaaacttttccatggaaacctggctgctcctggttatcagcctggtgctcctctacctatatggaactcattcacatggaatttttaaaaagttgggaattcctgggcccaaacctttgcctttcttggggacgattcttgcttacaggaagggcttctgggaatttgacaaatactgccataaaaaatatgggaaattatgggggttgtacgatggtcgacagcctgtgctagcgatcacggatccagacataatcaaaacagtgctggtgaaggaatgttactctaccttcacaaaccgacggaactttggtccagtgggtattttgaaaaaagccatctccatctctgaggatgaagaatggaagagaattcgagccctgctgtctccaaccttcaccagtgggaagctcaaggagatgttccccatcattaaccagtatacagatatgttggtgagaaacatgaggcagggatcggaggaaggcaagcccaccagcatgaaagacatctttggggcctacagcatggatgtgatcacagccacctcatttggagtgaatgttgattcccttaacaacccacaggacccttttgtggaaaaagtcaagaagctcttaaaatttgatatctttgatccattgttcctctcagtgacactttttccattccttaccccactatttgaagcactaaatgtctccatgtttccaagagatgtcattgacttttttaaaacttcagtagaacgaatgaaagagaatcgcatgaaagagaaagaaaagcaaagaatggactttcttcagctgatgataaactcccagaattccaaagtcaaagactctcataaagcattatccgatgtggagattgtggcccagtcagttatcttcatttttgccggctatgagaccactagcagtgctctttcctttgttttgtatttgctggccattcaccctgatatacagaagaaactgcaggatgaaattgatgcagctctccccaataaggcacatgccacctatgataccctgctacaaatggagtatctagatatggtggtgaatgaaaccctcagattatatccaattgctggaaggcttgagagggtctgtaagacagatgttgaaatcaatggggtgttcattcccaaagggactgtggtgatgataccaacctttgctcttcacaaagacccgcattactggccagagcctgaggaattccgccctgaaaggttcagcaagaagaatcaggataacatcaatccttatatgtacctgcccttyrsgarkggacccaggaactgtattggcatgaggtttgctctcatgaacatgaaagttgctctkktcagagtcctgcagaacttctccttccaaccttgtaaggaaactcagatccctttaaaattgagcaaacaaggacttcttcaaccagaaaagccactgcttctaaaagttgtgtccagagatgagactgtgaatggagcttgatgtagaatggcctatagtggtgttgtatcacatggaccagaaaccagttcatattgtgaatgaatccagagatgaagattgcagtaattttgttcactcctggggrttttgggtgttctttgagctttctcagcctctgtgcaagttgttttctgtggaacataaggatctaatgacataaatccaagataaatatattcaactcgtggttcttgtgggatggcctatgttaccttcattgttaccaccaaatactctgatttctgatgagaaaataaataaacatcaattamwarwwmwawmammawwwmmmmaraaaaaaaaaaa

SEQ ID NO: 3215 - DNA, 1683 bp, Rattus norvegicus
tggagaaagctctgagcatcggatttgagacctgcaggtatgggttcatagaagggcacgtggtgattccccggatccaccccaactccatctgtgcagcaaacaacacaggggtgtacatcctcacatccaacacctcccagtatgacacatattgcttcaatgcttcagctccacctgaagaagattgtacatcagtcacagacctgcccaatgcctttgatggaccaattaccataactattgttaaccgtgatggcacccgctatgtccagaaaggagaatacagaacgaatcctgaagacatctaccccagcaaccctactgatgatgacgtgagcagcggctcctccagtgaaaggagcagcacttcaggaggttacatcttttacaccttttctactgtacaccccatcccagacgaagacagtccctggatcaccgacagcacagacagaatccctgctaccatccaggcaactcctagtagtacaacggaagaaacagctacccagaaggaacagtggtttggcaacagatggcatgagggatatcgccaaacacccagagaagactcccattcgacaacagggacagctgcagcctcagctcataccagccatccaatgcaaggaaggacaacaccaagcccagaggacagttcctggactgatttcttcaacccaatctcacaccccatgggacgaggtcatcaagcaggaagaaggatggatatggactccagtcatagtacaacgcttcagcctactgcaaatccaaacacaggtttggtggaagatttggacaggacaggacctctttcaatgacaacgcagcagagtaattctcagagcttctctacatcacatgaaggcttggaagaagataaagaccatccaacaacttctactctgacatcaagcaataggaatgatgtcacaggtggaagaagagacccaaatcattctgaaggctcaactactttactggaaggttatacctctcattacccacacacgaaggaaagcaggaccttcatcccagtgacctcagctaagactgggtcctttggagttactgcagttactgttggagattccaactctaatgtcaatcgttccttatcaggagaccaagacacattccaccccagtggggggtcccataccactcatggatctgaatcagatggacactcacatgggagtcaagaaggtggagcaaacacaacctctggtcctataaggacaccccaaattccagaatggctgatcatcttggcatccctcttggccttggctttgattcttgcagtttgcattgcagtcaacagtcgaagaaggtgtgggcagaagaaaaagctagtgatcaacagtggcaatggagctgtggaggacagaaagccaagtggactcaacggagaggccagcaagtctcaggaaatggtgcatttggtgaacaaggagtcgtcagaaactccagaccagtttatgacagctgatgagacaaggaacctgcagaatgtggacatgaagattggggtgtaacacctacaccattatcttggaaagaaacaaccgttggaaacataaccattacagggagctgggacacttaacagatgcaatgtgctactgattgtttcattgcgaatcttttttagcataaaattttctactctta

SEQ ID NO: 3216 - DNA, 3868 bp, Rattus norvegicus
tgggccttttattattatcaggactttattcatgtccggggtgggttcctatcagagaaagtcaagctggtccatctgtgttccagcgagtggtcctccttaaacatccacttcatggcggcgggaagcgacggagccggctctttgaggcgcagacttcggcgaagcgaccacaacaacaacggcggcggcggcggcagcggcagcagcatcagcagcacgggcaccgtggccgccgctcccagctccagcttcccgggagcagccgccgagcgccgctcgctgctccgagactccggccgcttggccgccagctcctccccgccgcgcccgggaccgccggcggctcggcgccccgcttggtccgcagcgtcagcgccgcccgccgcggcccgggctcccggcagtgcgagcagctaagggctggccgccgcctccctgagctcccccggagcagccgacccctggtcgcggcgttcacctcgccgatgcgcggttggtaggagtgaccggagccattctctcctcgttgataagattccctaccaggataggagcctatctccctttccacagcaggacacagaaatctggccttcagtactttgggaaaaggatctgagacctcctggagctctgaccactggctgtcatctgtggctctggcctgtgtgggccactgagctctactcaaacattaaagaggaggaggggagatctgtggaatgggccaccccgttggcctgctgcattactgaacctgcgctgtccacacgtgcccagatcatgggacccagggcctgctagggctaggagcggggcccagtattcatgggtctctaggcctttccgaaatgtccgggaagggaggctgggcctggtggtgggcccggctgcccctctgcctactcctcagcctttatgccccctgggtgccttcatccttgggaaagcccaagggtcacccccacatgaactctatccgaattgacggggacatcacactgggaggcctgtttcccgtccacggccgtggctctgagggtaaggcctgcggggagctgaagaaggagaaaggcatccaccgcctggaggccatgctgtttgccctggaccgcatcaacaatgacccggacctactgcccaacatcacgttgggcgcccgcattctggacacctgctcgagggacacccacgccctggagcagtcactgacctttgtgcgggcgctcatcgagaaggacggcacggaggtccgctgcggcagcgggggcccgcccatcatcaccaagcccgaacgagtggtgggtgtcattggagcttcggggagctccgtctcgatcatggtggccaacatcctccgcctcttcaagatccctcagatcagctatgcctccacggcccctgacttgagtgacaacagccgctatgacttcttctcccgggtggtgccctcagacacataccaggcccaggccatggtggatattgtccgagccctcaagtggaactatgtgtccacactggcctcagagggcagctacggtgagagtggtgtggaggcctttatccagaagtcccgagagaacggaggtgtgtgcattgcccagtcggtgaagattccacgggaacccaagacgggggagttcgacaagatcatcaaacgcctactggaaacatccaatgccaggggtatcatcatctttgccaacgaggatgacatcaggagggtgttggaggcagctcgcagggccaaccagaccggccacttcttttggatgggttctgatagctggggctccaagagtgcccctgtgctgcgccttgaggaggtggccgagggcgcagtcaccattctccccaagaggatgtctgttcgagggttcgaccgatacttctccagccgcacgctggacaacaacaggcgcaacatctggtttgccgagttctgggaggacaacttccattgcaagttgagccgccacgcgctcaagaagggaagccacatcaagaagtgcaccaaccgagagcgcatcgggcaggactcggcctatgagcaggaggggaaggtgcagttcgtgattgacgctgtgtacgccatgggccacgcgctgcacgccatgcaccgtgacctgtgtcccggccgcgtaggactctgccctcgcatggaccccgtggatggcacccagctgcttaagtacatcaggaacgtcaacttctcaggcattgcggggaaccctgtaaccttcaatgagaacggagacgcaccggggcgctacgacatctaccagtaccaactgcgcaatggctcggccgagtacaaggtcatcggctcgtggacagaccacctgcacctcagaatagagcggatgcagtggccagggagtggccagcagctgccgcgctccatctgcagtctgccctgccagcccggggagcgaaagaagactgtgaagggcatggcttgctgctggcactgcgagccctgcaccgggtaccagtaccaagtggaccgctacacctgtaagacctgcccctacgacatgcggcccacagagaaccgcacgagctgccagcccatccccatcgtcaagttggagtgggactcgccgtgggccgtgctgcccctcttcctggccgtggtgggcatcgccgccacgctgttcgtggtggtcacgtttgtgcgctacaacgatacccccatcgtcaaggcctcgggccgggagctgagctacgtgctgctggcgggcatctttctgtgctacgccactaccttcctcatgatcgcagagccggacctggggacctgttcgctccgccgcatcttcctagggctcggcatgagcatcagctacgcggccctgctgaccaagaccaaccgcatttaccgcatctttgagcagggcaaacggtcggtcagtgccccgcgtttcatcagcccggcctcgcagctggccatcaccttcatcctcatctccctgcagctgctcggcatctgcgtgtggttcgtggtggacccctcccactcggtggtggacttccaggaccaacggacacttgacccccgctttgccaggggcgtgctcaagtgcgacatctcggacctgtccctcatctgcctgctgggctacagcatgctgctgatggtcacgtgtactgtgtacgccatcaagacccgaggcgtgcccgagaccttcaacgaggccaagcccatcggcttcaccatgtacaccacctgcattgtctggctggccttcatccccatcttttttggcacctcacagtcagccgacaagctgtacatccagacaaccacactgacggtctccgtgagtctgagcgcttcagtgtccctggggatgctctacatgcccaaagtctacatcatcctcttccatatttttccattctgctcctggccttcccctgccatctgccctgccccctgcccctcctccctgagctgccccatccccgccatcattttctcttctgttccccctcgatctcatttcctaccagccttccccctacttggcttcatccaccaactctttcaccacgttgcaaaagagaaaaaaaaaggggggggggaatcaccccctacaaaaaagcccaaacaaaaactaatcttgagtgtgtttcgaagtgctgcgtcctcctggtggcctgtgtgtccctgtggcctgcagcctgctcgcccgccctacccgtctgccgtgtgtcctgcccgcccgcctgcccgccttgcccttcctgctaacgacacggagttcagtgcctgggtgtttggtgatggtctctgatgtgtagcatgtctgtttttataccgagaacatttctaataaagataaacacatggttttgc

SEQ ID NO: 3217 - DNA, 1991 bp, Rattus norvegicus
ctgaggcggagggtgcgccgcgcgggtccggagaactgcacatcgaatccttcgaaccatgagcaactacaatgtgtcattggttggcccagctccttggggtttccggctccaaggtggcaaggatttcaacatgcctctgacaatctctagtctgaaagatggtggcaaggcatcacaggcacacgtcagaataggcgatgtggttctcagcattgatggaatcagtgcccagggaatgactcatctcgaagcgcagaacaagattaaggcttgtacaggctccttgaatatgactctgcaaagagcttctgctgctgccaagtctragccagttgctgtccagaagggggaacctaaggaagtagttaagcctgtgcccattacatctcctgctgtatccaaagtcacttccacaaccaacatggcttacaataaagtgccacggccctttggctctgtgtcttcaccaaaagtcacatccatcccatcgccatcgtccgccttcaccccagcccatgccgccacgtcatcacacgcttcccctccacctgtggctgctgtcactccccctccactcksyrcakccggactgcatgctagtgccaatcctagtgctgcccagtgttcgtctccaccaaacactggtaaacctgcagttcatgtcccacggcagcccacagtcaccagcgtgtgttccgagtctgctcaggagctagcagagggacagagaagaggatcccagggtgacattaaacagcaaaatggcccaccaagaaaacacatcgtggagcgcaacacggagttttatcacatacccactcacagtgatgccagcaagaaaaggctgattgaggacactgaggactggcgcccacggactggaacgacacagtctcgttccttccgaatcctcgcccagatcactgggactgagcatttgaaagaatctgagaatgacaatgcgaagaaggcaaatagcactccggagccttctcagcagtcagcttcamctctgagcgcggcggagagcctggagagcccaggttcaaacaggccagtggtggctggcctcaggtccgctgctgctttyaagcctgtaggatcmaccagtgtcaagtcacmaagctggsarcgtccaaaccaagcagcaccttctactgggagaatttcaaacagtgcaagctcttcaggtacaggggcacccatgaagccagctgtggggccaccccagccaagtgaccaagacactcttgtgcagagagctgagcacattccggcgggcaagcggactcccatgtgtgcccactgcaaccaggccatcaggggaccttttctcgtggctctggggaagtcctggcatccagaagaattcaactgtgctcactgcaaaaacacgatggcctatataggctttgtggaggagaagggagcactgtattgtgagctatgttatgagaagttctttgctcctgaatgtggccggtgccagaggaagatccttggggaagtcatcaatgctttgaagcagacctggcacgtgtcctgttttgtgtgtgtggcctgtsgrmaacscakscgtaataatgttttccacttkgargatggcgagccmtactgtgagacagactattatgcactttttggaacaatatgtcgcgggtgtgaattccccatagaggctggtgacatgttcctggaagctytgggctccacctggcatgacacttgctttgtgtgctccgtgtgttgtgaaagtttggaagggcagacatttttctccaagaaggacaagccactttgcaaaaaacatgctcattctgtgaatttctgaaaatcaacagttccaggaaagagaagaaatttgaaraaaaarrarraaaawwaaaawwammatttaatttttagttttaatatttatacggagttctaaaataataataatagccctgaagggataaactcaaacattaaaaatcaaatctgaaaat

SEQ ID NO: 3218 - DNA, 3147 bp, Rattus norvegicus
gtcataggaggatctggacccaatctttaaaaaaaatacaagaactggggccgtagcttatcagtagagagtatttgcctagctattagtagagtacttgccgaggaagtacaaggctttgggggtgggggtgaggcggggataggcactggagatttcgggtgtgacagcccctttaagtctttcagagagattgccttagaagctagtcaaatttagtctctgtagcctcggtgcaggggagctaggaactgatcgttctgcagtcccagagagcaggcctgttcaggttctggcaggttaggacttgctcaagcgtgtcctagctggagccgagaagcagtctcagccccagctctaacccccacggtttgctttcataagcaggatcaaactctgagagtggctgtaaaacaatttactaacagatactagaggccggctggttcctactaccgagcttcatttaattccgagttcaaatcatacagaaaataaaattttctccttaaaaggttctgcggaaaaatgctgtcggtcgcatgcggccgcctccgtgactgtgtttgtgtctgaagaaaggactagtctgacaggaagaattacaaatctggagctcattttggcatccagagggaaggtgggtggagcgtctcacagtaaattaggaattcagaatgaaagcgcgtagagtttatttgggtttttagtgacacctcgaaattattacacaggcgtgtcggagcagctctaagtacctatgactgctcccgcttcgccccgaatcccccatcattcaaaacccgtagcctctccgcttccacgcgggtcaggaaggtgggagggaaggagagcggcggggacccacagtctgtttatactgccgagagacacaggccactcaggggtgtgtctgagctccgcctcgggattcagaatctgggctccgactttgggactggaatttgaggagggcaagactaggtctggggcggccatagagtgcgggaagaaatcgggttatctttgcggggaggctgggaattgaggagcgggtctagggagaagaagttgaaccgcggaccgtattgagggtcggagtggcgatagttgagctttgccggtgcaggactgtgcagggaaagtcagggtggggttggagtagaagaaaagagcgagcaacgtccacagtctttccctgagcaactcttacgggcacacccagcgcttagtccggactgcgggctccctcgggcgcgcaggctggaccctgcccccacccgccggtagagtacgagctaccctgctgtggctggagtataggcgcccagcggtgagggggcgtggcagaggcccagcagtgcggaggcgtggttagaggcagaagtccagggccgctcattggccgcccagggcccgagggcggggctctccgctgggtccctctagggcgctcgcgggcggcgggggaggcggggtcggcgggagccgggcagccaatgcgtgcgcccctcgagcagttacaaagggccggagcgaggccgcggcggcggcggggaggtggggcgaggagaggcgaggcttgttgaggagaagctgaggccggggccgggccgggccacaaacagtggcagcgggaccatggaggcggcgtcggctgctttgcgtcgctgcctgcttctcatcgtgttggtggcggcggcgacgctgctcccgggggcgaaggcrtkaswgkskkkckgsyrsctstgkrsmmmggacmrkkktacttgtgagacagatggtctctgctttgtctcagtcaccgagaccacagacaaagttatacacaatagcatgtgtatagctgaaatcgacctaattccccgagacaggccatttgtttgtgcaccatcttcaaaaacaggggcagttacgtattgctgcaatcaggatcactgcaataaaatagaactcccaactacaggacctttttcagaaaagcagtcagctggcctcggtcctgtggagctggcagctgtcattgctggtccagtctgcttcgtctgcattgcacttatgctgatggtctatatctgccataaccgcactgtcattcaccaccgcgtgccaaatgaagaggatccctcactagatcgccctttcatttcagagggcaccaccttaaaagatttaatttatgatatgacaacatcagggtctggatcaggtttaccactgcttgttcaaagaacaattgcaaggaccattgtgctacaagaaagcatcggcaaaggtcggtttggagaagtttggcgaggcaaatggcggggagaagaagttgccgtgaagatattctcttctagagaagaacgttcatggttccgagaggcagagatttatcagactgtaatgttacgccatgaaaatatcctggggtttatagcagcagacaacaaagacaatggtacatggactcagctgtggttggtgtcggattatcatgagcatggatcccttttcgattacttgaatagatacactgttactgtggaaggaatgatcaaactcgctctgtccacggcaagtggtcttgcccatcttcacatggagattgttggtacccaaggaaaaccagctattgcccatagagatttgaaatcaaagaatatcttggtgaagaaaaatggaacctgttgtattgcagatttgggacttgctgtgagacatgattctgccacagatacaattgatattgctccaaaccacagagtaggcactaaaaggtatatggcccctgaagttctagatgattccataaatatgaaacattttgaatccttcaaacgtgctgacatctatgcaatgggcttagtattctgggaaatcgctcgacgctgttccattggcggaatccacgaagactaccagttgccttactatgatcttgtaccttctgatccatccgttgaagaaatgagaaaagtagtttgtgaacagaagttaaggccaaatattcccaacagatggcagagctgtgaggccttgagagtgatggccaaaattatgagagaatgttggtatgccaatggagcagctaggctgacagctttgcgaattaaaaaaacattgtcacagctcagccaacaggaaggcatcaaaatgtaa

SEQ ID NO: 3219 - DNA, 5464 bp, Rattus norvegicus
gaattccgcacccggggcgggacaagaggtctgctttccaaagagaaggcttcgcgtctgtctgcagcaggcgacagtcccgggcgccacctgcgcttcgggcgcgggccaggctggtgcgcgccgggcccccagcgcccgctactgagagcgtgaagtgaccgaccgtgagtcctccggcttgcgtccccttccagcaccagggactcacgccccaattactgcttgctcaagggtggacgagctccggccgagccgctgccccgccccgtactacctggcagctgcccgggtgcagcgcacagcgccccgcgcggccccagcagagcccctgccctcccacctgcgccgcgcgcccgccgctccgtgctcccgagacaggagacgcggccccgctcccgctcgcgcccgcgcactcggcgcagcgcgcgcgcccgccgctccgcccgccccccgcgctctccccgccccctccctcccccgcaggcacgagcgaatgtagcccgcgagagaaaatggcggcggcggcgggcgatcgcgcctcgtcgtcgggattcccgggcgccgcggcggcgagccccgaggcgggcggcggcggcggagctctccagggaagcggcgcgcccgcagcgggcgcggggctgctgcgggagactggcagcgcgggccgcgagcgcgcggactggcggcggcagcagctgcgcaaagtaaggagtgtggagctggaccagctgccggagcagccgctcttcctcaccgcctcgccgccctgcccatctacttccccgtcgccggagcccgcggacgcggctgcaggagcgagtggcttccagcctgcggcgggaccgccacccccgggagcagcgagtcgctgcggctcccactctgccgagctggcggccgcgcgggacagcggcgcccggagccccgcgggggccgagccgccctctgcagcggccccctccggtcgagagatggagaataaagaaaccctcaaaggattgcacaagatggatgaccgcccagaggagcgaatgatcagggagaagctcaaggcgacctgtatgcctgcctggaagcacgagtggttagaaaggaggaacaggagaggccctgtggtggtgaaaccaatccctattaaaggagatggatctgaaatgagtaacttggcagctgagctccaaggagagggccaggcaggctctgctgcaccagctcccaagggccgacgaagcccgtctcctggaagctccccatcagggcgctcagggaagccggaatccccakgagtgagamggaaacgagtgtccccagtgcctttccagagtggcagaatcacaccacctcgaagagccccgtcgccagatggcttctcaccgtacagcccagaggagacgagccgccgtgtgaacaaagtgatgagggccaggctgtacctcctgcagcagataggacccaactctttcctgattggaggagacagtccagacaataaataccgcgtgtttattgggccacagaactgcagctgtgggcgtgggacattctgcattcacctcttgtttgtcatgctccgggtgttccagctagaaccctccgaccccatgctatggagaaaaactttaaaaaattttgaggttgagagtttgttccagaaataccacagtaggcgtagctcaagaatcaaagctccatctcggaacaccatccagaagtttgtctcacgcatgtcaaactgtcacacattgtcatcgtctagcacatccacatctagttcagaaaacagcatcaaggatgaagaggagcagatgtgtcccatctgcttgttgggcatgctggatgaggagagcctgactgtgtgtgaagacggctgcaggaacaagctgcaccaccactgcatgtcaatctgggcagaagaatgtagaagaaatagagaaccgttaatatgtcccctttgtagatctaagtggagatcccatgacttctacagccatgagttatcaagccctgtggattcccctacctccctgcgaggtgtacagcagccctcctccccgcaacagcctgtggccggatcacagcggaggaatcaggaaagcaattttaaccttactcattatggaacccagcagattcctcccgcttacaaagatttagccgagccatggattcaggcattcggaatggagctcgttggctgcttattctctagaaactggaacgtaagggagatggcccttaggcgcctttcccacgatgttagcggggccctgttgttggcgaacggggagagcactggaacttctggaggcggcagcggaggcagcctaagtgctggcgccgccagtgggtcttcccagcccagcatctcaggggacgtggtggaggcgttctgcagcgtcctgtctatcgtgtgcgctgaccctgtctacaaagtgtacgttgctgctttaaaaacactgagagccatgctggtatacackccttgccacagcctggcagaaagaatcaaacttcagagacttctccggccagtggtagacaccatcctagtgaagtgcgcagacgccaatagccgcacgagtcagctgtccatatcaacactgttggagctctgcaagggccaagcgggggagttggcagttggacgagaaatacttaaagctggatccatcggtgttggtggcgttgattacgtcttaagttgtattcttggaaaccaagctgaatcaaacaactggcaagaactcctgggtcgcctctgtcttatagacagattgctcttggaawttyctgcggaattttatcctcatattgtcagtaccgatgtctcacaagccgagcctgttgaaatcaggtataagaagctgctgtccctcttagcctttgccttgcaatccattgacaattcccactctatggtcggcaaactctcgcggaggatttatctgagctcagcacgaatggtgaccacagtgcccsccctgttttccaagctggtaaccatgctaagtgcttctggatcctcccacttcgccaggatgcgccggcgtctgatggccattgcagacgaggtagaaattgccgaggtcatccagctgggttcggaagacactttggatggccagcaggacagctcgcaggcattggcccctccccgctatccagagagcagctcccttgagcacacagcccatgtagagaaaactggaaaaggattaaaagctacgagactgagtgccagctcagaggacatttctgacagactggctggcgtttctgtaggacttcctagttcagcaacaacagaacaaccaaagccaacagttcaaacaaaaggcagaccccacagtcagtgtttgaactcctctcctttgtctcctcctcagttaatgtttccagcaatatcagccccatgttcatctgccccgtctgtcccagctggctctgtaacagatgcttctaagcatagacctcgggcgtttgttccctgtaaaataccctctgcgtctccccaaacacagcgcaagttttccctacagttccagaggacctgctctgagaaccgagactcagaaaaactctccccagtctttactcagtcgagacccccaccctccagtaacatacacagggcaaaggcatcccgacccgttccgggtagcacaagcaaactaggggatgcctcaaaaaacagcatgacactcgacctgaacagtgcttcccagtgtgatgacagctttggcagtggcagcaacagtggcagcgccgtcatacccagtgaggagacggcattcaccccagcagaggacaagtgcaggttagatgtcaaccccgagctcaactccagtatcgaggaccttcttgaagcatctatgccttcaagtgacacaacagtcactttcaagtccgaagtcgccgtcctctctcctgagaaggccgaaagtgatgacacctacaaagatgacgtcaatcacaatcaaaagtgcaaagagaagatggaggctgaggaagaggaggcgctcgcgattgccatggcaatgtcggcttctcaggacgccctccccatagtccctcagctgcaggtggaaaatggagaggatatcatcatcatccagcaggatacaccagaaaccctaccagggcataccaaagcgaacgagccctacagagaagacaccgagtggctgaaagggcagcagataggcctcggagcattttcttcttgttaccaagcacaggatgtgggcactggaactttaatggctgtgaaacaggtgacctacgtcagaaacacatcttctgagcaggaggaagtggtggaagccttgagggaagagatcaggatgatgagccacctcaaccatccgaacatcatcaggatgctgggggccacgtgcgagaagagcaactacaacctcttcatcgagtggatggcgggagcctccgtggctcacctcttgagtaaatatggagctttcaaggagtcagtggtcattaactacacagagcagttactccgtggcctttcctatctccacgagaaccagatcattcacagagacgtcaaaggggccaatctgctcattgacagcaccggtcagcggctsagarktgcasacttcggtgctgccgccagsttggcatcyaaaggaactggtgcakgasagttccagggacagttactggggacaattgcattcatggcgcctgaggtactaagaggtcagcagtacggtaggagctgtgacgtctggagtgttggctgcgccattatasaaatggcctgtgcaaaaccaccctggwacgcagaaawgcastccaatcatcttgctttgatatttaagaktgcgagtgcarctactgcaccatccatcccgtsacacctgtccccgggcctgcgagacgtggctctgcscwgtttagaacttcaacctcargacagacctccgtcaagagagctactgawgcatcctgtcttccgtacaacatggtartcaactgctcagggtgcgcaacaaggaaagawaactcgcgggcagccacgttgatagtctgctgkcctcataccactgaccagaagaggggccagtggggagcccgcacctaagcatgtgactgacaaatcatgactgcacctgagctccgtctgcagacggbtacaactcgtgcaggagctgtaaaccgtgcctttcacaggacgctyttaggtgagcaggaaggcggtggagtttgcatgattaaatagcataaatttatttttggagcacttttgcagcaatattagcagctgggggctcaggatcaactttactgtgtcacttcttctatttcacstagggccacagcagggttstgcagttccgtctcggtttgkttgtttgtttgattttattgggkttttttttwttttgtttttttgtwtttgttttttatyactggctgtaaaaaaaaaaaaaaaaaa

SEQ ID NO: 3220 - DNA, 1975 bp, Rattus norvegicus
cgcgagcagctgaagcgctggatcggctccgagacggacctcgagcctcccgtggtgaagcgccagaagaccaaggtgaagttcgacgatggcgccgtcttcctcgccgcctgctccagcggcgacacggacgaggtcctcaagctgctgcaccgcggcgccgacatcaattacgccaatgtggacggactcaccgccctgcaccaggcttgcattgatgacaatgttgatatggtgaagtttctggtagaaaatggagcaaatatcaatcaacctgacaatgaaggctggattccactccatgcagccgcttcctgtggatatctggatattgcagaatttttgattggtcaaggagcacatgtaggagctgtcaacagtgaaggtgacacacctttagatattgcagaggaggaagcaatggaagagctacttcaaaatgaggttaatcggcaaggtgttgatatagaagcagctcgaaaagaagaggaacgcataatgcttagagacgcgaggcagtggttgaacagtggtcacatcagtgacgtccggcatgcaaagtccggaggcacagcactccacgtggcagcggccaaagggtatacagaagttttaaaacttttaatacaggcaggctatgatgttaatattaaagattatgatggctggacacctcttcatgctgcagctcactggggtaaagaagaagcatgtcggattttagtggacaatctgtgtgatatggagacggtcaacaaagtgggccaaacagcctttgatgtagcagatgaagacattttgggatatctagaggagttgcaaaaaaaacaaaatctgctccatagtgaaaagcgggataagaaatctccactgattgaatcaacagcaaatatggaaaataatcaaccacagaagaattttaaaaacaaggaaacgttgattattgagccagagaaaaatgcatctcgaatcgagtctctggagcaagaaaaggctgatgaggaggaggaaggcaagaaggatgagtccagctgctccagtgaggaggatgaggaggatgactccgagtccgaagcggagacagataagacaaaacccatggcttctgtaactaatgctcacactgccagcactcaggcagctcctgccgctgtgacaacacctactctgtcttccaaccaggggacccctacatcacctgttaaaaagtttcctacatcaactacaaaaatttctcccgaagaagaagaaagaaaagatgaatctcctgcatcctggaggttaggacttagaaagactggcagttatggtgccctggctgagatcactgcatctaaagaagctcagaaggagaaagacactgcaggcgtgatacgttcagcttcgagtcccagactctcgtcctctttggataataaagaaaaggagaaagacaataaaggaacaagacttgcatatgtcgcccctacaatcccaaggcgactaggcagtacgtctgacattgaagagaaggaaaacagagagtcttcaaatttgcgaacaagtagttcttacacaagaagaaaatgggaagatgatcttaaaaaaaatagttcaatcaatgaaggatctacttaccatagaagttgctcctttggtagaagacaagatgatttgattagttgtagtgttccaagcaccacatcaacaccaacagttacctctccagctgggcttcagaaaagcttcctttccagcacaagcactactgcaaagactcccccgggttcctccccagcaggcacacagagcaggtcatacctcactcctgttagggatgaagagtctgaatcccacaggaaagcaagatctagacaagcaagacagtctagacggtcaacacagggggtgacactgactgacctccaggaagccgaaaagacaataggaagaagccgttctacgagaaccagagaacaagaaaacgaagaaaaag

SEQ ID NO: 3221 - DNA, 1563 bp, Rattus norvegicus
cgcctcgggggctggagccacttggtagaagaacagcttctttggattttttttccccggtgggatactggcagttcaaagcgaaaccgttgaaatgcataacctgcaaacactgccccctaaaccacccaagcccacttctatagccaacaacagcatgaacaacaatatgtccttacaggatgctgaatggtactggggagatatctcaagggaagaagtaaatgaaaaactccgagacactgctgatgggacctttctggtacgagatgcatccacymamrygsrsggygwctamactmtsrmwcymmggrmwgsaggaawyrrcamrwswatcaaaatctttcaccgagatgggaaatacggyttctctgatccattaaccttcaactctgtggttgaattaataamccactaccggaatgagtccttagctcagtacaatcccaagctggatgtgaagttactctacccagtgtctaaataccagcaggatcaagttgtcaargaagataatattgaagctgtagggaaaaaattacatgaatataatactcaatttcaagaaaaaagtcgggaatatgatagattatatgaggaatacayycgtacttcccaggaaatacagatgaaaagaacagctatcgaagcatttaatgaaaccataaaaatattcgaagagcagtgccaaacccaggagcggtacagcaaagaatacatagagaagtttaaacgcgaaggcaacgagaaggaaattcaaaggataatgcataatcacgataagctgaagtctcggatcagcgagatcatcgacagcaggaggagactggaggaagacttgaagaagcaggcagccgagtatcgcgagatcgacaagcgcatgaatagcattaagccggacctcattcagctgagaaagacaagagatcaatacttgatgtggctgacgcagaaaggggtccggcagaagaagctgaacgaatggttgggaaacgaaaacacagaagaccaatactcactgstagaagatgacgaggatttgccccaccatgwtgagaagrcsysgaawstggggagcagcaaccgaaacaaagccgagaacctattgcgagggaaacgagatggcactttcctggtccgggagagcagtaagcagggctgctatgcctgctctgtagtggtagatggcgaagtcaaacattgcgtcatcaacaagactgccaccggctatggcttcgccgagccctacaacctgtacagctccctgaaagagctggtgctacattaccaacacacctccctggtgcagcacaatgactccctcaatgtcacactagcatacccagtatatgcacaacagaggcgatgaagcgctgccctccctcggatacagttcctcaccttcaagccacccaaggcctctgggaagcaaagggctcctctccagcccgacctgtgaactgagctgcggaatcgaagccggatgtctgcacatgggactagagctttcttggacaaaaagaagtcggggaagacatgcagcctagggctgttggatgaccg

SEQ ID NO: 3222 - DNA, 1208 bp, Rattus norvegicus
gaattccgccccgcccgggctgagaaccatcttgttttccacgcagatccgcagggctacacgcgtcgtgtcccgggagcgcctcctttctcctcgcggccgctacaggcttggtaakcctttttctccctccggccggcaggctgggcgcgcaggggtgccggcccctgccgggcgcgcagtggcaccatgggcacggtgctgtccctgtcccccagctatcgaaaggccacactgtttgaggatggmgcggccaccgtgggccactacacggycgtgcakaacagcaagaacgccawggacaagaacctgaagcggcactccatcatctcggtactgccttggaagaggatcgtggcggkgtcagcgaakaabaagaactccaagaaggcgcagcccaacagcagctaccagagcaacatcgcscacctcaacaatgagaacctgaagaagtcgctgtcgtgtgccaacctgtccacgttcgcccagcccccgccggsccagccksccgcacccycagccagccagctttctggctcccagactggggtctcctcttctgtcaagaaggccccgcaccctgccatcacctccgcaggaacacccaaacgggtcatcgtccaggcgtccactagtgagctgctgcgctgcctgggtgagtttctctgccgccggtgctaccgcctgaagcacttgtccccaacggaccccgtgctctggctgcgcagcgtggaccgctcccwscttctgcagggatggcaggaccagggtttcatcacaccggccaatgtggtcttcctctacatgctctgcagggatgttatctcctctgaggtgggctcggaccacgagctccaggctgtcctgctgacctgtctgtacctctcctattcctacatgggcaatgaaatctcctacccgctcaagcccttcctggtggagagctgcaaggaagccttttgggaccgttgcctctcagttatcaacctcatgagctccaagatgctgcagatcaatgctgacccacactatttcacacaagtgttctctgacttgaagaatgagagtggtcaggaggacaagaagcgactcctcctggggctcgatcggtgagccccctgtagctggtatcctggctcaaggattccattcgtttttaaaatttattattaaagaatcaagtttgtgtacagtatgtgtctagcaga

SEQ ID NO: 3223 - DNA, 4616 bp, Rattus norvegicus
ggcacgagcctgttcttaagataataaactctgaatgacaatatgattaacactattaaaggtttattcttaactattaataactctattaaggacttcttatgaagtccatttcattttggttagctcataagctgattcaacctatagcctctcttacatagtacctttgtagcaatttcaggttatgatacaagaacatttaatgagtggaaggatgggtgggtgggtgggtggatgggtggatgggtgggtggatgggaggttgggtggatggataggtagatgtgattggtagataaatgaatggatgtaaatccatgtgattgttcatagactctgggatctgaggcctttaagttgtctgtatgtgcgcttaatctcatacctactatgacaacactcggtttctttcagtagtcattttaatattagaagcatcaaaacagattgtacaactgagttataatagagaccaatatgattagctaccataaatgattgatagaatctccagagaataactgtcaattaaatgtgggctggaggaattggtgtgggaaggactaaagctctttcatactatacttgtaaaaaaatggataaccattgttccccaatactaagatgacatttccagtcattgcctgtgtctgcagtgtaaccttgagtcttttcggatggtacatagtaccacaagtagttgatggctcagtattttgtaaatatgaatattatagtcaccctcttttcagatgttataattggctctcagggaaaggcagcatttggtggcatttaactttgccttttgttttcagtgatttttagtgtcattgttctttatcagctggtggacatggaaacaacttaataaagtttgggtaatttagtgttcagtttaaattttcaactggcaattgaccgaaattcccatctgaagacatgagcgcccaaatgccattttgtgatttggctactgactacccgacataggaaggagccaccgagattaatggaataactagctctcaaacggaagtcaagggataatcttaaacttccatcacaagaagactgtagaggtccctcccgcaccaagaaccttctgcagatcttttcagtgttcttggaggcsrgstgwragckcrgwmrgcaggysarcccsykgykcwmtaamgttacaaattataatactgtggtagaagcaaattcagattcggatgatgaagacaaactccatattgtggaagaagaaagtgtcacagatgcagctgactgtgaaggtggtgtgccagatgatgagctgccaacagaccagacagtgttaccaggaggcagtgacagggcgggcagtgccaagaactgctggcaagacgacgtaaaagatgacgaatgcgactcagatgcagaaaacgagcaaaaccatgatcccaacgtggaagagttcctgcagcaacaggacaccgcggtcatctaccctgaggcacccgaggaggaccagcggcagggcacgccagaagccagcggtcatgatgacaatggaacaccagatgcattttcccagttgctcacctgcccgtattgtgatagaggctacaagcgctttacctctttgaaagaacacattaagtaccgccatgagaagaatgaagacaacttcagctgctccctgtgcagttacacctttgcatacagaacccagcttgaacgtcatatgacatcacataagtcaggaagagagcaaagacatgtgacacagtctggaggtaaccgtaagttcaagtgcaccgagtgtgggaaagcgttcaagtacaaacaccatctgaaggagcacttacggatccacagtggagagaagccatatgaatgcccaaactgcaagaaacgtttttcccattctggctcttatagctcacacataagcagtaagaagtgtattagcttgatgcctgtgaatggtaggcccagatcaggactcaagacatctcagtgttcctcgccatctctttcaacatcaccaggcagtcccacacgcccacagatacggcagaagatagagaataaaccccttcaagaaccgctttctgtaaaccaaatcaaaactgaacctgtggattatgagttcaaacccatagtggttgcttcaggaatcaactgttcaacccctttacaaaatggggtttttagcggtggtggccaattgcaggcaaccagttctcctcagggtgtggtgcaagctgttgttctgccaacagttggtttggtatctcccataagtatcaacttaagtgacattcagaatgtacttaaagtggctgtagatggtaacataatacgacaggttttggagaataatcaagccagtcttgcatccaaagagcaagaagccgtgagtgcttcatccatccagcagggcggccattctgtcatttctgccatcagtcttcctttagttgatcaggatggcacaaccaaaatcatcatcaactacagtcttgagcagcccggccaacttcaggttgttccccagaatctaaagaaagaaaacccagcccctccaaagagctgcaaaagtgagaagtcaccagaagatcttactgtcaagtcagagaaggacaaaagctttgatggggctgcggatgagagcacttgccttttgtgtgaggactgcccaggagacctcaatgcacttccagaactaaagcactatgacccagagcaccctgctcaacctccaccccctgccccagccaccgagaagccagagtcctctgcttcatcagccggcaatggagatttgtctcccagtcagccacctttaaagaaccttctgtcgctcttaaaagcctactatgctctgaatgcacagccaagcacagaagagctcaccaagattgccgattctgtgaacctgccgctggatgtagttaaaaagtggtttgaaaagatgcaagctggacagattcccgggcagtctcttgaaccaccttctccaggaccggggtcaggaaacatccctgcaaaaactgaggagcagcctcaacctgtggatggaaatgagccccaggaagacagcacacgtggacagagtcctctcaagatgacaagctctccagttttaccagtaggatcagccattaacggttccagaagttgcacatcatccccatcccctctaaacctttcctcagccaggaacccgcagggttactcttgtgtgtcagagggtacccaggaggagccccaagtagaacctcttgatctctcactaccaaagcaacagggagagttactggaaaggtcgacagtcagtagcgtttaccagaacagtgtttattctgtccaggaagaacccttgaacttgtcttgtgcaaaaaaggagccacaaaaggacagttgtgttacagactcagaaccagttgtaaatgtagtcccaccaagtgccaaccccataaacattgctattcctacagtcactgcccagttacccacaatcgtggccatcgctgaccagaacagtgttccgtgcttacgggcactcgctgccaacaagcagactattctgattccccaagtggcatatacatactccgctacagtcagcccagccatgcaggagccaccagtgaaggtgatccagccaaatggaaaccaggatgaaagacaagacactagctcagaaggagtctccgtggaggaccagaatgactctgactgcacgccacccaaaaagaaaactcggaaggcagagaatgggatgtacgcatgtgacctgtgtgacaagatatttcagaagagcagctccctgctgagacacaaatatgagcatacaggtaagaggccccacgagtgcggaatctgtagaaaggcatttaaacacaagcatcatttgattgagcacatgcgactgcactctggggaaaagccctaccaatgtgacaagtgtggcaagcgcttctcacactcggggtcttactctcaacacatgaatcaccgctactcctactgcaagagaggagctgaagacagagatsccatggagcaggaagacactgggccggaagccctgccggaagtcctgcccactgagcttgttggtgcccgggcatctccctcacaggctgactcggacgagagagaaagtttgacaagggaagaggatgaagacagtgaaaaggaggaggaggaggaggataaagagatggaagaattgcaggaagacaaggaatgtgrgaacccacaggaggaggaggaggmggamgaggagkwmgaagamgargaggaggrggaagaggaagaggaggcagaggaagctgagcatgaggcggcagcagccaagactgggggtgcagtggaggaggragcggctcakcaggcaggcagcttccagcagaaggccagcgggagcgagagcawgcgactgtctgaagagaagacaaatgaagcctaggagctcttccaaaaggaagtcctgcttggtaatgaaatttgctctatattacccacgcttttcatggaaacatggctcctgtgctatggttcctgctcactactgtgtaatstcagaactgaaaaacaaawtmctraaaaaaaaaaaaaaaaaaaccctcgtg

SEQ ID NO: 3224 - DNA, 3289 bp, Rattus norvegicus
gaattcggcacgagcttatctggcctccttgagtgttcccggcttctgtcctttgatcccctggcgtccccaactcccatccggtgaccgattcttctccgttgccgccctcagtttccctaacttcctaaatcaacccatcccccaatcattgcccgactttcaccctggacggtccactgtccccagctcctccctctgcgcttctgagtggccctgattttctgcctcattgcccgatttcccccccaacaccacctgtttcctgcgtccctccctttatgcccaccccccaacgcccatttctaactctctgcttatcttgtgcctccgcgtttcttctgctcccacgtgttttctagcgtccagtcctgggttcacctctagctcccacagatgacctggaagctggtggcagggagctgtgacccagagcacaggggcaggctgggtcgcctacctgtcccacataggatgcagttctttggacgcctcgttaacaccctcagtagtgtcaccaacttgttctcaaacccattccgggcaaaggaggtgtccttggctgactatgcctcaagtgaacgtgttcgagaggaagggcagctgatcctgttgcagaatgcttccaatcgtacctgggactgtgatctggtcagccctaggaacccacagagtgacttccgactcttccaactggagtcagaggcagacgycctggtgaacttccagcagtattcctcccagctgccaccgttctatgagagctctgwgcaggtcctgcatgtkgaggtgctgcagctgacggacctcattcggaaccaccccagctggacagtracgcacctggccgtggaacttggcattcgggagtgtttccatcacagccgcatcatcasstgcgccaacagcacagagaatgaggagggctgtaccccactamatctggcctgccgcaagggtgacagtgagattctggtggagttggtacagtactgccacgcccagatggatgtcactgacaacaaaggagagaccgccttccattacgctgtgcaaggggacaatccccaggtgctacagctcctaggaaagaatgcctcagccggcctgaaccaggtgaacaaccaagggctgacgccgctgcacctggcctgccagatggggaagcaggagatggtgcgtgtcctgctgctctgcaatgcccgctgcaacatcatggggcccggtggcttccccatccacacagccatgaarttttcccagaaggggtgtgctgaaatgattatcagcatggacagtaaccagatccacagcaaggatcctcgctatggagccagcccgctccactgggccaagaacgctgagatggcccgaatgcttctgaagaggggctgtgacgtggacagcacaagtgcctcggggaacacagccctgcacgtggctgtgacgcgcaaccgstttgactgtgtcatggtgctgctgacctatggggccaacgcaggtgcccgaggagagcatgggaacacaccactgcatctggccatgtcgaaagataacatggagatggtcaaagccctcattgtatttggggcagaagtagacaccccgaatgactttggggagactcctgcattcatagcttccaagatcagcaagcagcttcaggacctcatgcccgtctcccgagcccggaagccagcgttcatcctgagctccatgagggatgagaagcgaacgcatgaccacctgctctgcttggacggagggggcgtgaagggcctggtcatcatccagcttctcattgccattgagaaggcctcaggtgtggctaccaaggacctcttcgactgggtggcaggaaccagcacaggcggcatcctggccctggccattctacacagtaaatccatggcctatatgcgtggcgtgtacttccgtatgaaggatgaggtgtttcggggctcacggccctatgagtctgggcccctggaggagttcctgaagcgtgagtttggggagcacaccaagatgacagatgtcaagaaacccaaggtgatgctgacagggacactgtcagaccggcagccagcagagctccacctcttccggaattacgatgccccagaggccgttcgggaacctcgctgtaccccaaacattaacctgaagccgcccacccagcctgcagaccagttagtatggcgggcagcccggagcagtggggcagccccaacctatttccggcccaatggacgcttcttggatggtgggctgctggccaacaaccccacactggatgccatgactgaaatccatgagtacaatcaggatatgatccgcaagggccagggcaacaaggtgaagaaactctccatagtcgtgtctctgggkacaggaaagtcccctcaagtgcctgtaacctgtgtagatgtctttsgtcccagcaacccttgggaactggccaagactgtttttggagccaaggaactgggcaagatggtggtggactgttgcacagatccagatgggcgggctgtggatcgtgcccgggcctggtgtgagatggtcggtatccagtacttcaggctgaacccccagctaggctcagacatcatgctggacgaggtcagtgatgcagtgctggtcaacgccctctgggagaccgaggtctacatctatgagtaccgggaggagttccagaagcttgtccagctgctgctatctccctgagcccggcctgctggcaggagtggccggcgtggcacactgcggccaggctggcctgccgctccatgtccatctgagactagggctcggagcrrrcagttccccatgaggyacctctcctgatccatccgcactttactamtccagcygarrgscmmgagktccctcggccccttcccctgactatgaaggacaactgattccatctactacccatatatcagagatcaacactaagggccagtgtcsagagggccctcccaggctccctggccactgctgcccaccccctctcccacttcctgatgtcagggattagagaaatgttccaccccgtcatcaggtgaaatccaggctaatgaaacccagcgccattcygccattcgactttgcccctcgcacctgcagcctctccaccctgcagccgccccacaaggagcgctcctagctcccaaaggtcaatcctgtgcacatgctcttctctggaaggagagtggggagggctcaaggccacctcaactgtgaaataaacggttttacactcaaaaaaaaaaaaaaaaaa

SEQ ID NO: 3225 - DNA, 2056 bp, Rattus norvegicus
atgcatgctcgagcggccgccagtgtggtggaattcccggagcccggcgtgaacgccagtggaggggggtgcgagtggcgggaggcgggtcggggcgaagggggaccggggagatttactattgtctctggcagccgccgcgggagctcgggaggggggcggaggcgagaggaggcggtagcaccggccagcgcaccattcgctccacctgatctgggcgctgtgcgctgagccaagcgcgcgagcagcagcagcagcagcgaggcaggcatcccctgcagccagagccaccaccatgtcctaccagggcaagaagaacattcctcggatcacgagtgaccgtcttctaatcaagggagggagaatcgtcaacgatgatcagtccttttatgctgatatttacatggaggatggcttgataaagcaaattggagacaatctgattgtccctggaggtgtgaagaccattgaggccaatgggaagatggtgatgcctggaggcattgatgtccatacccacttccagatgccttacaaggggatgaccacagtggacgatttcttccaagggacaaaggctgccttagcgggaggaaccaccatgatcattgaccatgtggtacctgaacctgagtctagcctgaccgaggcctatgaaaagtggcgtgagtgggctgacgggaagagstgctgtgactatgctttgcatgtggacatcacccactggaatgacagcgtcaagcaagaggtgcagaacctcagtaaggaaaaaggcgttaactccttcatggtttacatggcatacaaggrtttatatcaagtgtccaacrcagarykstawgagatcttcacctgcctgggagaactgggggccattgctcaagttcatgccgagaatggagacatcattgcccaggagcaggcacgaatgctggaaatgggaataacaggcccagaaggtcatgttctgagcagaccggaagagctggaagctgaggctgtgttccgtgccatcaccgtcgccagccagaccaactgccccctttatgtcaccaaggtcatgagcaagmrygmggctgatctcatctcacaagccaggaagaaaggaaatktggtctttkgcgagcccatcactgccagcctgggaatagatggaacccattactggagtaagaactgggccaaggcagctgcatttgtgacatccccacctctgagccctgacccaaccacacctgactacatcaactccttgctggccagtggagatctgcagctctctggaagtgcccactgtaccttcagcactgcccagaaagccattgggaaggacaacttcacggctatccctgagggcaccaatggcgtggaggagcgtatgtctgtcatctgggacaaggctgtggccacagggaagatggatgaaaaccagtttgtggctgtgacaagtaccaacgctgscamgakrttcaacctgtaccctcgcaaggggagaatagctgtgggttctgacagcgaccttgtcatctgggatccaratgccgtgaagatcgtctctgccaagaaccaccagtcggttgcggaatacaacatctttgaagggatggagctgcgtggggcacctctggtggttatctgccagggcaagatcatgctggaagatggtaacctgcacgtgacccagggggccgkccgcttcattccctgcagcccattctctgactatgtctataagcgcattaaagcaaggaggaagatggcggacctgcatgcagtcccaagaggcatgtatgatggaccagtgtttgacttgaccaccacccccaaggggggcaccccagctggmtstactcgaggctctcccactcggccaaacccaccagtgaggaacctccatcagtcgggatttagtctgtcaggcacccaagtggatgagggtgtccgctcagccagcaaacgcattgtggcgccccctggaggccgttctaacakcacatccctgagttaagcaagccstcccaaagagggaggcagaagcaaraaaaaaaaaaaaaaa

SEQ ID NO: 3226 - DNA, 2895 bp, Rattus norvegicus
ctcattgcccagcagcccccagccagtgacaggttccattcaccctctttgccccttyccccgcgacccttttccagaggctactagatcctttggtttcatcctgcacatcatggacaaggtttggtggcacacagcttggggactactttgcctcttacagttgagcctggcacagcagcagatcgatttgaatataacctgccgttacgcaggtgtattccatgtggagaaaaatggccgctacagtatctccaggactgaagcagctgacctctgcgaggctttcaacaccaccttgcccaccatggctcagatggagttagccctgagmamggggtttgaaacatgcaggtatgggttcatagaaggacacgtggtaatcccgaggatcmaccccaacgctatctgtgcagccaacaacacaggagtgtatatcctcctcgsatccaacacctcccactatgacacatattgcttcaatgcctcagctcctcttgaagaagactgtacatcagtcacagacctacccaattccttcgatggaccagttaccataactattgtcaaccgtgatggcacccgctacagcaagaagggcgagtatagaacacaccaagaagacatcgatgcctcaaacattatagatgaggatgtcagcagtggatccaccattgagaagagcaccccagaaggctacattttgcacaccgaccttcccacttcacagcctactggagaccgggatgacgccttctttattgggagcaccctggccaccagtgatggagactcatccatggaccccaggggtggtttcgacactgtgactcatggatccgaattagctggacactcaagtgggaatcaagacagtggagtgaccacaacttctggtcctgcgaggagacctcagattccagagtggcttatcatcttggcatccctcctggcgctggctctgattcttgccgtctgcattgctgtcaacagtaggagaaggtgtgggcagaagaagaagctggtgatcaacagtggcaatggaacagtggaagacaggaaaccaagtgaactcaacggggaggccagcaagtctcaggaaatggtgcatttggtgaacaaggaaccaacagagactccggaccagtttatgacagctgatgagacccggaatctgcagagtgtggatatgaagattggggtgtagtgcctatgccactaacttgaaaagacacaacaattggagacatgtcattactgggagctgggacccttaacagatgcaatgtgctactgattattttttattggggattattttgggcataaaatttccytttttwtgttttttaaaagtttgttttccaatttatgaaaatagcattgctttctgaaatgagggtctcttccagttcctccttagaggccttgcattaccagggtatgctaccataggcttctaccaaatgaatrctcttggtcccgattgaacccaaagtcccaggtaacatccaccagctaaggatttccccagaacttagagagattggtctctgggaggaaatttgaatgggtccatattgcctcccagcagtccaatctgtaggcattgctttgcagtggatgggagatcaggtgtactggttacacactctctttatagactcccttctgctggaaaatttccacatgcttctgagagattccccaaaggtgacgctatttatctttagtaagctatttatctttgtttttgaaatatcaaaccctggaggtccttttttcagtatgactttttttattttgtttttttttattttgttttttaggttactttgtcagaagcataacagggtataagttgattcataataaatacctgtccatcttccatcttgammwrwwrwrmwrwrawccttcagtttctaaatcagcaaggtctgagtctttgtagcacatcaatgtgaccttagtatggtcctctgaaactcatgttagagcatccgtgccctgcttgggtttacccagctgaatctcagaagatcaaggacaggagcactgttttcattctaggactatcaaaggggtttctctcctgttcaagaatctgaattgggagtaggagagcttctgtcccttttatgtttcgataaccacccatttctctttcttaaagggcacattaagtttttatatcttacaacattcgcggtcctgtttcatagacactgatcttattggcactttcacaaaacaktgtggaggggacttskgacaccttatagtrraaggagaagccaacagaaatgaaagtgtggacagagagcagtagattggcatgaggaggcatgatgtacaacccccagaccactctttycatcaccacatttgttgatgctttcgcaagccagttggtacttakaatcagttccccagggaatccttcaaaaagccataagaatgcccacccctggaatcttaccaccaccagatgagcaggtttatggtttagcaaaaggagaatgctgtcaccctctgacctcatagktttcacatactgggcaagtgttcatctgscaggatgccccawtgctcctargtcttyccaggtaccttgkagaagaacttaaatctataaaataaggctttctctaaaatggaacttycyttctaaggctccmatttttactsktgactaaawttatatgkttaatagttttttttyaaataaaaacaaacmcmaaaaggggaaatggttccacctgacacaagtttgagtggatgtggaggctttggtttaaggaaaaacaccaaacttttcggaggttatttgtgacccctaagtctccttttaaaaaatttaaaccttctttttttcttgcccagttttttaag

SEQ ID NO: 3227 - DNA, 357 bp, Rattus norvegicus
tactgctacatctgccacagcctccagtacaatgcggatcttcagcctgctaacacttgcatctatctggttgttacctgggtcatgactgttctggatgtcctgcctaatgtgtacattggcaccattgagtatgaccctcgcacctacacctgctacttcaactatgtgaacaaccctgcctttactgtgaccattgtctgcatccacttcgtcctccctctcatcatagtcggttattgctacacaaaaatctggatcaaagtgctggcagaccgggacccagctggacagaatcctgacaaccagtttgctgaggttcgaaattttctaaccatgtttgtgatcttcctcctt

SEQ ID NO: 3228 - DNA, 2093 bp, Rattus norvegicus
ggttgcaaagaaatgcttcwmaggactccagggctgcctaggaggagcggcatggcctcaggcgtgaccatcaccctagccattgcaatctttgccttggagatcaatgcacaggccccagagcccactccccgggaagagccatcagcagacgccctcctaccaatagactgcagaatgagcacatggagtcagtggtcacagtgtgatccttgcctcaaacaaaggtttcgctcaagaagcatkgaagtctttggacagtttcagggraaaagctgtgctgatgctttgggagacagacaacattgtgaacccactcaggagtgtgaagaggtacaggaaaactgtgggaatgactttcagtgtgaaacaggcaggtgcataaagaggaaacttctgtgtaatggtgacaacgactgtggagatttttctgatgagagtgactgtgaaagtgacccrcgcctcccgtgccgtgaccgrgtggtagaagaatcrgaactgggacgaacagcaggmtatgggatcaacatcttagggatggatcccctgggcacgccttttgacaatgagttctacaatggactctgtgaccgggtacgggacggaaacactttgacatactatcgcaaaccttggaacgtagcatttctggcctatgaaaccaaggctgacaaaaatttcagaactgagaattatgaagaacagtttgaaatgttcaaaaccatcgtccgagacaggaccacgagttttaatgcwaatttagctctaaaattcacaatcactgaagcacctataaaaaaagttggagttgatgaagtcagcccagaaaaaaactcttcaaagcctaaagactcttctgttgattttcaattttcatatttcaagaaagaaaattttcaacgattgtcatcctacttgtcacagacgaaaaagatgtttctgcacgtgaraggaatgattcaactggggagatttgtcatgaggaatcggggcgttatgctgacgacaactttcctggatgatgtaaaggctttaccagtttcctatgaaaagggmgaatattttggrtttttggaracytatgggactcactacagtagctctgggtccctgggagggctctacgaactgatctatgtcttggataaagcttccatgaaagagaaaggtgttgaactcagcgacgtaaagcggtgtcttgggtttaacctggatgtttctctatatacgcctctacaaactgccttagaaggaccatcattgacagccaatgttaatcacagtgattgcttaaagacaggggatggtaaagtagtaaacatcagccgcgatcacatcatagatgatgttatttcattcataagaggagggaccaggaagcaagcagttctcctgaaagagaagcttctcagaggagccragrcgattgatgtgaaygacttcatcaactgggcctcatccttggatgacgctccagctctcattagtcaaaaactgtcccctatctataatctcattcctttgacaatgaaagatgcatacgcaaagaaacagaatatggaaaaggctattgaagactatgtkaatgaattcagtgctagaaagtgctacccatgtcaaaacggaggcacagcaattcttctggatggacagtgcatgtgctcctgcacaatcaagtttaaggggattgcctgcgaaatcagtaaacaaagatagccttcaggaaacaaagcaaaacctggttcacatggaaggtggaaaaaaggacaaaaaaagaagaagagagaggagagagaagagagagagaaaagaaaaaaccccaggactttccaacttagcatcctaccctagagcgaatcctcactgccaagtagaaagcagcttgcttcatggaaatcctaccaacctctgatgtcgtctctgtttcaggtctacagtgcctttctcccctctttaatgcctataatgcttccatttttttttttatccctaatgaagaatcggcagtgagatatgccaggactgccttttcccacaggcaatgccaatctctcgytaataaaacararttaaattaaaaamaaaaaaaaaaa

SEQ ID NO: 3229 - DNA, 2052 bp, Rattus norvegicus
gcgcgcgcggccagcgagacctcccggctccactggcsrcgmgggcggcggtaaaatgwcggctccaggaccttaccaagcagctgmaggmccttctgtaatgcctactgmacccccaacctatgaagaaacagtgggtgtcaacagttactacccaacgcccccagcacctcagccgggaccagccacagggctcattacgggmccggatgggaagggcatgaatccaccttcgtactacacccagcccgtgcctgtccccaacgccaacgcaattgcagtgcagacggtttatgtgcagcagcccatctccttctacgaccgccccatccagatgtgctgtccttcctgcaacaagatgatcgtgacccagttgtcctacaatgcaggagccctcacctggctctcctgtggmagtctgtgtctgctgggatgcgtcgctggmtgctgcttcattccgttttgcgtggacgccctgcaggatgtggaccattactgccccaactgcaaagcgctcctgggcacctacaaacgtttgtaggactcggscagccacagggraggtagacaagtgctcccggaagtcacccaacccttgcccagcgcagccagaagacgtcccttccttgatctcttcatgagctcgtcttcgtgtcttttagggggtggggaaagtckgwaaastwacaaacccccaaacccagaaactgctgmtggarttgtgccctgcacatgcaaagacgtggaccttgggtgttgctttaagggtttaccgcctgatctcgttaccccactaactgtgattgttactccatttgcatctcgtctgctgatttgccactgcctgccccctcttcctcaagaagaggccytcctggtgccaggctcaaaacccgaagstacagtttgcmtwatttttcactgtttggcttgatctgtaccatctctcccagccctaatgacagagaccttgccttaaaramwwwrmrrwwmwrtaattgcagamwwmwmmarmamwmagaatcactttcaattccatagagttgttcctctccacacacacccctcccccggtgcacagaagggctgccgacacccaccagactcatacagagaaggtcacaagtactaaatgaaaggctcccagcccaccttgtctcagcccctgtcctgtgaagggactccttcctcacacagtttctgtgacttccttttgttcttaaacacatggaagttacttggcagggagacatttctagaataatttttgtgatcacgatacacccttcattctccrwwwrmwrrwawrwwwwtagttggtttggttttagttttccacatacagtctagctcgtggccagccttgagctccgaggagatcctccatcttctcctctcaaatacccagggcccagacatttgcctctgcacctgctgggctttttctctcatttttccttaaccagaaaaacaaacgggtaatttcatcgactgcctatgtaggtwtggtgtggttttgaaamccttgtttccaygrggccctttgggrgagtcagggggcccctgcacgagcccatgcttcaatgccragagattggctgctggaaccccbtgaagcatgatttcatgttttagagatgarcwtctgtggtacggtcatcatggtcwccaacatcaacagacaaggtagaaggatgtcawcgmcmaagataagttcagggctctttctagggtcaccactmtgtcctgtgtaacactgacacagtctggccagcctttcaggaggtcctggctccctcctaaacccatgtaggwyytgctgcaagtaacagtgtatgaagtcaacctgacctggracagaagtctgcatattggktaagatacagcctatgkmtcttcatacaacgatccagaagtactagacatcatttttgcagtgaattatgggkrccatacatgactttgatgatatctgcttttaaacaaataaaatctttgatcactcarwraamaawwmarwwmammwrttwggaaraaaaaaaaaaaaaaaaa

SEQ ID NO: 3230 - DNA, 3643 bp, Rattus norvegicus
gaattcggcacgagagcggcggcggcggcgtggaaactggcgtgggctggggggtccgagccgcggggggcagtgccatgcacaagcaccagcactgctgtaagtgccccgagtgctatgaggtgacccgcctggccgccctgcggcgcctcgagcctcctggctatggggactggcaggtgccggacccctatgggccaagtgggggcaatggggccagctccggttatggaggctacagctcgcagaccctgccttcacaggcaggggctacccccacccctcgcaccaaggccaagctcatccccacaggccgagatgtggggccagtgccccctaagccagtacccggcaagaacaccccaaaactcaacggcagtggccccagctggtggcccgagtgcacctgtaccaatcgggactggtatgagcaggccagccctgcacccctcctagtgaaccccgaggctctggagcccagcctatcggtgaatggcagtgatggcatgttcaagtatgaggagatagtcctggagcggggcaactctggcctgggcttcagtatcgcaggtggcatcgacaaccctcatgtccctgatgaccctggcatctttattaccaagatcattcctggtggagcagctgccatggatgggaggctgggggtgaatgactgtgtgctacgggtgaatgaggtggacgtgtccgaggtggtgcacagccgggccgtggaggcactgaaggaggcaggccctgtggtgcggttggtggtgcggaggcgacagcccccacctgagactatcatggaggtcaacctgctcaaagggccaaaaggcctgggtttcagcattgctgggggcattggtaaccagcacatcccaggagacaacagcatctatatcaccaagatcattgaaggaggagctgctcagaaagatggacgcctacagattggggaccggcttcttgcggtgaacaacaccaatctgcaggatgtgaggcatgaggaagctgtggcctcactcaagaacacatcagacatggtctatctgaaggtggccaagccaggcagtctccacctcaacgacatgtatgctccccccgactatgccagcactttcactgccttggctgacaatcatataagccataattccagcctgggttatcttggggcagtggagagcaaggtcacctaccctgctcctcctcaggtgccccctactcgttactctcccattcccagacacatgctggctgaggaagactttaccagagagccccgcaagatcatcctgcacaaaggttctacaggcctgggcttcaacattgtaggaggagaggatggagagggcatttttgtttcattcatcctggcaggaggcccagcagacctaagtggggagttgcgaaggggagaccggatcttatcggtaaatggagtcaacctgaggaatgctacccatgagcaggcagcggctgctctaaaacgggctggccaatcagtcaccattgtggcccagtatagacctgaagagtacagtcgctttgaatccaagatccatgacttgcgagaacaaatgatgaacagcagcatgagctcggggtccgggtctctccgaaccagtgagaagaggtccttgtatgtcagggccctgtttgattatgatcggactcgtgacagctgcctaccaagccagggactcagtttctcttatggtgacattctacacgtcattaacgcctctgatgatgagtggtggcaagcaaggctggtgactccacatggagagagtgaacagattggtgtgatccctagtaaaaagagggttgaaaagaaagagcgagctcgattgaaaactgtgaaattccatgccaggacagggatgattgagtctaatcgggacttccctgggttaagtgacgattattatggagcaaagaacctgaaaggacaagaggatgctattttgtcatatgagccagtgacacgacaagaaattcattatgccaggcctgtgatcatcttgggcccaatgaaggaccgagtcaatgatgacctcatctctgagttcccgcataagtttggatcctgcgtgccacataccacccgacctcggcgtgataacgaggtagatggacaggattaccactttgtggtttcccgggaacagatggagaaggatattcaggacaacaagttcatcgaggcaggccagttcaatgataatctctacgggaccagcatccagtctgtgcgggcggttgcagagaggggcaagcactgcatcttagacgtgtccggcaacgctataaagagactgcagcaagcacaactttatcccattgccattttcatcaagcccaagtccatcgaagcacttatggaaatgaaccgacggcagacatacgaacaagcaaataagatctttgacaaagccatgaaactggagcaagaatttggagaatactttacagccattgtacagggtgactcactggaagagatttataacaaaatcaaacaaatcattgaggaccagtctgggcactacatttgggtcccatcccctgaaaaactctgaagaatcccctccaaccattctcttgtgaacagaagaaatcaagtccctcttccctccttcctcttcattcctgtccccacggggagaacaaatgactactgttcttgtccccctttttagatatgtcaaaaattgagttttctagtcctgttcttttttaaaaatgttgtttggttttggtttattttttgggatgatgccatctcactcatcatgtgaccgtgcccattcctgcatggacctttcccgcgctagcacaggtgcaaacccatcagagttgttgttctcataaacacccagcagaagcgcagagaagagacgaggactgacggaaagacagactctggacaactgcacagcttgtgaagtgagcgaaacagcccacgtgatgaggtgcccctgggcatttctaccctgtactgctggcttgcagctctgaacagtgcaacgtaacggctacagaaagtatcttatttatatatagatatatatatgtaatttatataaaatatatagaaattattatatatatatattatacactcttctataatatatatatatattcacatacattgggactagaaaaatctatggagatgtccatcaatggtactatgttattagagaaatgctttaattttcatattccaatcagatgacatcctatgttccactggttgggaaggggttgrcamsagyasymrgysckayacsamagsacttggatttgstcattctcttcagagctaaggtttgctccaggtggggccaacctacagcgcaagagaaggggctytggctgggagcttgagcttggagacttgactgaaagcagttgctscccctgcagggcagccattcctgtgcagaaagagagartgaatggctaatgacgctccggatgaaattgcctattgttctatgccgcctgacgtgtctgcatgagaggtttccwwwttgttcatttktaagctgctgttaaaccaaaaccatgttgtgctactgwrwmarmmwwwwmawwawtccaaattttacttttacmtcgtgccgaattc

SEQ ID NO: 3231 - DNA, 616 bp, Rattus norvegicus
ggcggggtggggaggcgggcacggccaagcccggagagcgggaagcagcggggcggggcggcaggtgcggggatgcgggcggaggccgggtagcagagccccgcgttcagggcgccccgtgtggcgagcgcgcggcatgtcgcaagggccccccgcgggcggcgtgctgcagagcagcgtggcggcgcctgggaaccagccgcagagccccaaggatgatgacaggaaggttcgaagaagagagaaaaaccgggttgcagctcagaggagccgaaagaagcagacacagaagtctgacaagcttcacgaggaacatgagagtctggagcaggagaactctgtgctgcgcagggagatcgcgaagctgaaggaggagctgcggcacctgactgaggcgctgaaggagcacgagaagatgtgcccgctgctgctctgcccgatgaactttgtgcagcttcggccagaccccgtggccagctggtctgcccatgatgccccagatcacccctcttttatctggctcggaaccttggtttgacactcaggagtttctctacacatctgtgtccaggggtacggcgtccctccgagcatgcatctagagggcccgcatcag

SEQ ID NO: 3232 - DNA, 795 bp, Rattus norvegicus
gaattcggcacgaggctttccaccgcctccttgctctgggcggtcagagagggcmsgagsgagaagatggcgaagacgtacgattatctgttcaagctgctgctcakcggcsrctccggcgttggcaagacctgcctcctgttccgcttctcagaggacgccttcaacaccacctttatctccaccatcggaattgattttaaaatcagaacgatagaactcgacggaaagaaaattaaacttcagatatgggacacggcgggccaggaaagattccgaacaattacaacagcatactatagaggagccatgggaattatgctggtctatgacatcaccaatgaaaaatcctttgacaatattaaaaattggataagaaacattgaagagcatgcctcttcagatgytgaaagaatgatcctgggtaacaaatgtgatatgaacgacaaaagacaagtgtcgaaagaaagaggggagaagttagcaattgactatgggattaaatttttggagacaagtgcaaaatcgagtacaaatgtagaagaggcattttttacacttgcacgggatataatgacaaaactcaacagaaaaatgaatgacagcaattcatcaggagcaggtgggccagtgaaaataacagaaagccggtctaagaagaccagtttcttccggtgwtctctgctttgatgaactcctcacttctgagagactgcagaatacctagagggcccttccccgcctctctgaaagcacaggctacccagcctcagagtcacctcacccggctgctgg

SEQ ID NO: 3233 - DNA, 1385 bp, Rattus norvegicus
  misc_feature (1014)..(1014): n is a, c, g, or t
  misc_feature (1061)..(1061): n is a, c, g, or t
  misc_feature (1130)..(1130): n is a, c, g, or t
  misc_feature (1236)..(1236): n is a, c, g, or t
gaattcgttcttgaagggcggcggtggcggtgggggaggcgggggtctgggcgggggcctgggcaatgtgctcggaggcctgatcagcggagctgctggaggcggcggcggtggaggcggcggtggcggcatgggactgggaggaggtggcggaggcggtggaacagccatgcgtatcctgggcggagtcattagcgccatcagcgaggctgctgcgcagtacaacccggagcccccgcccccacgtakscattaytcyaayattgaggccaacgagagtgaagaggaacgtcagttcaggaaactttttgtccagctggctggagacgacatggaggtcagcgctacagaactcatgaatatcctcaacaaggtcgtgacccgacacccagatctgaaaactgatgggttcggcattgacacttgtcggagcatggtggctgktatggatagkgacaccacaggcaagctgggctttgaggagttcaagtacctctggaacaacattaaaaagtggcagggtatatacaaacgctttgatactgaccgatcagggaccattggtagcaatgaactcccaggggcctttgaggcagcaggattccacctgaatcagcatatctacagcatgatcatycgscgctactcggacgagaccgggaacatggatttcgataacttcatcarctgcttggtcaggctggatgccatgttccgtgctttcagatctcttgacaaaaatggcactggacagatccaagtgaacatccaggrgtggytgcagctgackatgtaytcctgaswsgargtcacagacctgccgcctcactgctcactgtggagccttgaacctgatcctgtcwgcarccacgtttttacggtcatgtcctgctacccaraggccttccttttccmtatghtggtacscagmkksscvrtcggcagccagagctcaacgtgccccagywtghtgmascmtgagttcccytggbthtgagacaagmwagcwtghtntvmcgaagtgtcayycstrchcscagtsacacccagkscgcacccdnyrykmsswscwtycdgthtstgtvmcaagcytagcactcbtattgcttccatgtcccaagggccctgtntcagttbtgggaggatcacgcytgtccytacacaccktgtwacacactcacacagwtacctcccaggcagccaaataaackscaggccakccagtgccacmcmmmnwarwrmmwawrmhwrmamkgwdttccccmtgcacagctgtcgggcccargaggaaataaactctccaktcgmtgcthvmwhmaramwmwrarwrmrgagagggggcgctgagttcaggaaggagagctctgtaaaaaaaaaaaaaaaaa

SEQ ID NO: 3234 - DNA, 2475 bp, Rattus norvegicus
ttggactatgggggccgggaacaggcgatcttgagccgggtgtccggggtctcagggactgtcacgtgttcccgaggtgcttctaaaaccctggcggctccggagcccctccttcccaccaccgcctccaggtcctgctcctgccgccaccgcttccatctggagcagaagcgaccgcgctcagccacgtrcmycgkwstycargcrcymryrgcgkcckskkcwtcccsaggattytagtatggagtttaagcttgaggagcattttaacaagacatttgtcacagagaacaatacagctgctgctcggaatgcagccttccctgcctgggaggactacagaggcagcgtagacgatttacaatactttctgattgggctctatacattcgtaagtcttcttggctttatgggcaatctacttattttaatggctgttatgaaaaagcgcaatcagaagactacagtgaactttctcataggcaacctggccttctccgacatcttggtcgtcctgttttgctcccctttcaccctgacctctgtcttgttggatcagtggatgtttggcaaagccatgtgccatatcatgccgttccttcaatgtgtgtcagttctggtttcaactctgattttaatatcaattgccattgtcaggtatcatatgataaagcaccctatttctaacaatttaacggcaaaccatggctacttcctgatagctactgtctggacactgggctttgccatctgttctcccctcccagtgtttcacagtcttgtggaacttaaggagacctttggctcagcactgctgagtagcaaatatctctgtgttgagtcatggccctctgattcatacagaattgctttcacaatctctttattgctagtgcagtatatcctgcctctagtatgtttaacggtaagtcataccagcgtctgccgaagcataagctgtggattgtcccacaaagaaaacagactcgaagaaaatgagatgatcaacttaaccctacagccatccaaaaagagcaggaaccaggcaaaaacccccagcactcaaaagtggagctactcattcatcagaaagcacagaaggaggtacagcaagaagacggcctgtgtcttacccgccccagcaggaccttcccaggggaagcacctagccgttccagaaaatccagcctccgtccgtagccagctgtcgccatccagtaaggtcattccaggggtcccaatctgctttgaggtgaaacctgaagaaagctcagatgctcatgagatgagagtcaagcgttccatcactagaataaaaaagagatctcgaagtgttttctacagactgaccatactgatactcgtgttcgccgttagctggatgccactccacgtcttccacgtggtgactgacttcaatgataacttgatttccaataggcatttcaagctggtatactgcatctgtcacttgttaggcatgatgtcctgttgtctaaatccgatcctatatggtttccttaataatggtatcaaagcagacttgagagcccttatccactgcctacacatgtcatgattctctctgtgcaccaaagagagaagaaacgtggtaattgacacataatttatacagaagtattctggatctgaatgccagttcgtaatctacgtaagatcatcttcatgttataatatggttaattcaatcagttgtgcagagtcaatgtccatctaatacaatttcatgtgttgaagtagtttacattattttccattttatgtcattggtaataagttgagtgatactctgtggtttagtgtaaaagatatagctatccaaattgttacgttgtacaaaaaatgtatgaagtgacaagttgtcccaaagagcatttaactacagatttaaggaatttctattatctgggtatcttcatttctatttcacaggcttcttaacatttttttgtaaaagtacaaaaatattcaaaagtcagaactctattacagatgtatgcataaaagatgattataattttgtaggagaaagatctgctcctattagtgaagattggtaaaattgtcagtttaacccggctgtcctactactaatatttaatttttcaaatatgaaaaggtttcagattttgtttagatttatatcacattaaacactgtcaaataaaggctgtttttatatgcatcgttgatgttccaaaatgtgaagtctaaatggtgtctgtatttccaattattaaataacttctaagatcatttttaaaagtctgtagatggtatggatagctagttgtttgttaatataaagtaaaagtagatagctgatttatgttgtacctatgtcgtatgtatattaggtatcgtgttgtctcactaaagtgaaagcaaacgaaaaaaaaaaaaaaaaaaaaaaaaaaaaaaaaaaaaaaaaaaaaaaaaaaaaaaaaaaaaaaa

SEQ ID NO: 3235 - DNA, 1962 bp, Rattus norvegicus
ccgcggcagcggcggctgagcctcgcttttagcgatggccgcggagctgagcatggggccagagctgcccaccagcccgctggccatggagtacgtcaacgacttcgaccttctcaagttcgacgtgaagaaggagccactggggcgtgcggagcgtcccggccggccatgcacacgcctgcagccggctggttcggtgtcgtccaccccgctcagcacaccgtgcagctccgtgccttcttctcccagcttcagtccgactgaacagaagacccatctcgaggacctgtactggatggcgagcaactaccagcagatgaatcccgaggcactcaacctgacacccgaggacgcggtggaggcgctcatcggctcgcacccagtgccacagccgctgcagagcttcgacggcttccgtagtgcgcaccaccatcaccaccaccaccaccctcatccgcaccacgggtacccaggagccggtgtgactcacgatgagctgggcccgcacgctcacccgcaccatcaccaccatcaccaagcatcaccgccgccgtccagcgctgccagtccggcgcaacagctgcccactagtcacccggggccgggaccgcacgcggcagccgcggcgacggctgcgggcagcaacggtagtgtggaggaccgcttctctgacgaccagctggtgtccatgtccgtgcgtgagctgaaccgccacctgcggggcttcaccaaggacgaggtgatccgcctgaagcagaagcggcggaccctgaagaaccggggctacgcccagtcgtgcaggtataaacgcgtccagcagaaacatcacctggagaacgagaagacgcagctcattcagcaggtggagcagcttaagcaggaggtgtcccggctggcccgcgagagagacgcctacaaggtcaagtgcgagaaactcgccaactccggcttcagggaggcgggctccaccagcgacagcccctcctctcctgagttctttctgtgagtcgtagcgggtcccgacccccgccattgccctggcccggactccctatcctgtgtccccagccctggactccctgtccctgccatggccccggccttgacctgcctgactcgagctagaggsasgarggacgcgcgggccgcgggagacgggcgggagcacgggcgggtagagcaccttggctaagaagagggcagcgcagcctcttagacttgggcagagttagagagacccgggcggtgggaggtcccggagtaacttttctccaagctggaagcccgcgaggcatattccaaggagtcgccaaggccgtccggacacttctggctctgagaactttgtgagtgccagggccgccgctttgcagcccagaactcagttcgcccccaggaakagcagaggagaggakagggactctggagtccccrtgggcrcgaggcaaggctgagctaaggaaggaaaaacggacagctctgtctgtccagagtatggtgaacactggctctcagccggagacgcgggcctcagttaggactttcggcgcgcgaaggaaaaaaaaaatctcatcagttttaatgcctgctcgattatatagaaaaaatacgaaaatctgcattaaaaatattaatcctgcatgctggacatgtatggtaataatttctattttgtaccatttttcttgtttaactttagcatgttgttgatcatgaatcataayyybyttktttytttkkrwgwgwagggatgcaggttcctgcggctgcggctgcgarcgarcaagcgagcggagtttcagttcgccggccggcttgtaaattacccgcccggccaaaccwcattgagaaggtagcagcaagctgagtctatgtttgggtttattawtatggcatttttttgtttgtaagtaaaaataaaggaaagaamgaaaaaaaaaaarwrarmggcccctcgtgccg

SEQ ID NO: 3236 - DNA, 1964 bp, Rattus norvegicus
ggttgggccatgctgctacctgggctgctgttgctgctgctgctgctgctgctagctggcacccgctggctgtggggtcagtggaagctctggaaactccgcctcccgcctctggccccggggtttctgcactttctacagcccaaccttccggtctacctgtttggcctggctcagaaacttgggcccatctacaggatccgcttggggctacaagatgtggtggtgttgaactctaacaaaaccattgaggaggccttgatccaaaagtgggtggactttgctggccgaccccagatactagatggaaagatgaactttgacctctccatgggggattattctctaacatggaaagcccacaagaaactctctcgttcggccctggtgctgggcatgagagactccatggaacctctggtagagcagctgacccaggaattctgtgagcgcatgagagcccaggccggtgcctctgtggccatccataaggaattctccttactcacctgcagtatcatcagctgtctcactttcggagacaagcaggacagcactttgctgaatgccactcacagctgtgtccgggacttgctgaaagcctggaatcactggtccgtccaaatcttggatataattccctttctcaggttcttccccaatccaggcctctggaaactgaagcagttccaggagagtagggaccatatcgtaatgcaggagctgaagaggcacaaggacagcctggtggcagggcagtggaaagacatgattgactacatgctccagggtgtggagaagcaaagagatgccagagacccagggcagctccacgagcggcacgtgcatatgtcggtggtggacctttttgtcggtggcacggagaccacggctgccacgctctcctgggctgtggctttcctgcttcaccaccctgagatccagaagcggctgcaggaagaattagacctcaagctggcccccagctcccagctcctgtacaagaaccgaatgcagctacctctgctcatggccaccattgctgaagtgctgcgtttgcggcccgtggtgcccatggccttgccccatcgtgcaactaaggctagcagcatctctggctatgatatccccaaggatacgatcatcatccccaacatccaaggcgccaacctggatgagatggtttgggaactgcccagcaagttctggcctgatcgcttcctggaatccggcaagagtcccagaataccgacctttggctgtggggcacgcgtgtgcctgggcgagcctctggcgcggctggagttcttcgtggtgctggctcgcctgctccagaccttcacgctgctgccgccaccagatggtaccctgccctccctgcagcccctgccgtatactggcatcaatctcttaattcctcccttccaggtgcggctgcagcccaggaacctggcaccccaagaccagggccagaaatcctcgacaggataggacgagccttgtgcctcagtttctcctttattgctccattcccctcccctcccccctgtaaacatggtgctgtgagactgtggcagagaaggcttcctcggtgagctaggcacagtagagacacactggctcttctctgggcacaacccctcagtgctcggcagtcataccagggtgtgagtgaggtgggcagcaggctcaggtgcccctggtgggggcctggaagtttctgggtctcagcttcatttccgtgaagggcaccgagaactcgaagcccttccagtggtaccagctcactccctgagggaagggttgtcaagggaggagagtcaagacaacgccacatctatgccaccttatccatcccaaccctggctcctctaggtgactcccagagtgcagccatctccccccatgatccctgaagtgatgtcctctcccacccgctaataaacggtcttttcaagattccc

SEQ ID NO: 3237 - DNA, 2183 bp, Rattus norvegicus
ggttgggccatgctgctacctgggctgctgttgctgctgctgctgctgctgctagctggcacccgctggctgtggggtcagtggaagctctggaaactccgcctcccgcctctggccccggggtttctgcactttctacagcccaaccttccggtctacctgtttggcctggctcagaaacttgggcccatctacaggatccgcttggggctacaaggtaagccagtcttctgtctttgtgtgagcccttcttccctgctgacattgcggtttccccttagatgtggtggtgttgaactctaacaaaaccattgaggaggccttgatccaaaagtgggtggactttgctggccgaccccagatactagatggaaagatgaactttgacctctccatgggggattattctctaacatggaaagcccacaagaaactctctcgttcggccctggtgctgggcatgagagactccatggaacctctggtagagcagctgacccaggaattctgtgagcgcatgagagcccaggccggtgcctctgtggccatccataaggaattctccttactcacctgcagtatcatcagctgtctcactttcggagacaaggacagcactttgctgaatgccactcacagctgtgtccgggacttgctgaaagcctggaatcactggtccgtccaaatcttggatataattccctttctcaggttcttccccaatccaggcctctggaaactgaagcagttccaggagagtagggaccatatcgtaatgcaggagctgaagaggcacaaggacagcctggtggcagggcagtggaaagacatgattgactacatgctccagggtgtggagaagcaaagagatgccagagacccagggcagctccacgagcggcacgtgcatatgtcggtggtggacctttttgtcggtggcacggagaccacggctgccacgctctcctgggctgtggctttcctgcttcaccaccctgagatccagaagcggctgcaggaagaattagacctcaagctggcccccagctcccagctcctgtacaagaaccgaatgcagctacctctgctcatggccaccattgctgaagtgctgcgtttgcggcccgtggtgcccatggccttgccccatcgtgcaactaaggctagcaggtgattccccagggtaagggttgagaaaggaaggcctcgctgggcactcctgactccatgccttcctcagcatctctggctatgatatccccaaggatacgatcatcatccccaacatccaaggcgccaacctggatgagatggtttgggaactgcccagcaagttctggcctggtatgaagcagaagggaaagggagtgggagagacccagcctctgctgggacaaacttctctagttatctgtctactacccacagatcgcttcctggaatccggcaagagtcccagaataccgacctttggctgtggggcacgcgtgtgcctgggcgagcctctggcgcggctggagttcttcgtggtgctggctcgcctgctccagaccttcacgctgctgccgccaccagatggtaccctgccctccctgcagcccctgccgtatactggcatcaatctcttaattcctcccttccaggtgcggctgcagcccaggaacctggcaccccaagaccagggccagaaatcctykwywkkwtwkkwykwkyyttktgcctcagtttctcctttattgctccattcccctcccctcccccctgtaaacatggtgctgtgagactgtggcagagaaggcttcctcggtgagctaggcacagtagagacacactggctcttctctgggcacaacccctcagtgctcggcagtcataccagggtgtgagtgaggtgggcagcaggctcaggtgcccctggtgggggcctggaagtttctgggtctcagcttcatttccgtgaagggcaccgagaactcgaagcccttccagtggtaccagctcactccctgagkgawssrytgtsmwkssakragagtcaagacaacgccacatctatgccaccttatccatcccaaccctggctcctctaggtgactcccagagtgcagccatctccccccatgatccctgaagtgatgtcctctcccacccgctaataaacggtcttttcaagattcccaagc

SEQ ID NO: 3238 - DNA, 496 bp, Rattus norvegicus
ctgagggcctacgatggcttgtctctgcccgaggatgcggagacagtcacggtgggccgggctggctggagctactcagacctctctgatgacgaggacttgctggcagacgatgcctctggagatggcctggggagcggggacctgggcagtggggactttcagatggtttatttccgggccctggtaaacttcactcgctccatccactacagtcctcagctggaggatgcaggctccgaggagttccgggaggtgtccgaggctgtggtagacacgctcgagtcggagtacttgaagattcccggagaccaggttgtcagtgtggtgttcatcaaggagctggacggctgggtctttgtggagctggatgtgggctctgaggggaacgcggacggggctcagattcaggaggtgctgcacacagtcatttccagcggctccgtggcctcctacatcacctctccccagggattccagttccgacgcctgggca

SEQ ID NO: 3239 - DNA, 862 bp, Rattus norvegicus
ccaggagaaccgggtcggcaaggaatgaaaggtgatgcaggagagccagggcttccaggccggacaggaaccccaggattacctggcccgccaggaccaatggggccaccaggagacagaggtttcactggaaaagatggtgcaatgggaccgagaggcccacctggaccaccgggaaccccaggctctccaggagttgcagggccaagtgggaaaccagggaaacctggagatcatggccgacctggtcaatctgggttaaaaggagaaaaaggtgataggggagacattgcttcccagaacatgatgcgagctgttgcaagacaagtgtgtgaacaactgatcagtggccagatgagcagattcaaccagatgctgaatcagattcccaacgattattactcaaatcgaaaccagcctggcccaccaggacctccagggccccctggagctgcgggagccagaggagaaccaggcccaggaggcagaccaggattccctggacctcctggagtccaaggacctccaggcgaacgaggtttgccaggagagaaaggtgaaaggggtatgtgtgggcaaggaccccgaggacctccaggtcccccaggtccacaaggtgaatccagaacaggtccaccagggtctacaggtttaagaggccctcctggtccccctggtcgtccaggaaactcaggtatccgaggacccccaggtcctcctggatattgtgattcatcccagtgtgccagcattccatacaacgggcaaggctatccaggttccggctaacaaactttctaagtctccagtgctgcttacagtttgaatactgagaatcctgtttctgaaaaaaaaaaaaaaa

SEQ ID NO: 3240 - DNA, 467 bp, Rattus norvegicus
aactacgtcgatggttacaacaaagcgaaagcctacatcgccacccagggacctttaaagtccacctttgaagatttctggaggatgatttgggaacaaaacacaggaatcatcatcatgatcacgaaccttgtggagaaaggacggagaaagtgygrcmagtaytggccaacggagaacactgaggagtatggaaacattattgtcacactgaagagcacagaagtacacgcctgctacaccgttcgtcgcttttcagtcagaaatacaaaagtgaaaaagggccagaagggaaaccccaagggtygtcagaatgagaggacagtgatccagtatcactacacacagtggcctgacatgggagttcctgagtatgccctgccagtcctgacctttgtgagaaggtcatcggcagcccggatgccagacatgggccccgtgttggtgcactgtagcgccggtaccgg

SEQ ID NO: 3241 - DNA, 421 bp, Rattus norvegicus
cagtttccttgatggatatagacaacagaaagcctacattgctacccaggggcccttagctgagacgactgaagacttttggcgcatgctttgggaacacaactccactattgttgtgatgctcaccaagctgagagaaatgggcagagagaaatgtcaccagtactggccagccgaacgatctgcaagataccagtattttgttgtagatcccatggctgaatacaacatgcctcagtacatcctgagggaattcaaggtcacggatgccagggacggccagtctcgaacagtgaggcagttccagttcactgactggccagaacaaggagtgccaaagtctggagaaggatttattgacttcatcggccaagtccataaaacaaaggaacagtttggccrmgatggtcccatttcggtg

SEQ ID NO: 3242 - DNA, 1991 bp, Rattus norvegicus
gaattccgggcgcgtggggcgggggcgcgcggggccggggtgcaggcggggacgcgggcccgggccgctgtagcacacaggggctcggtctctcggcttcaggcggagtccggctgcactaggctgggagcgcggcgggacggaaccgggaggctggcagcccgcgggcgagccgcgctggggggccaggccggggtcggggccggggagccccgagactgccgcagcggggtcccggggccgcggaggggccatggctgccggcagcatcacttcgcttcccgcactgccggaggacggcggcggcgccttcccacccggccacttcaaggatcccaagcggctctactgcaagaacggcggcttcttcctgcgcatccatccagacggccgcgtggacggcgtccgggagaagagcgacccacacgtcaaactacagctccaagcagaagagagaggagttgtgtccatcaagggagtgtgtgcgaaccggtacctggctatgaaggaagatggacggctgctggcttctaagtgtgttacagaagagtgtttcttctttgaacgcctggagtccaataactacaacacttaccggtcacggaaatactccagttggtatgtggcactgaaacgaactgggcagtataaactcggatccaaaacggggcctggacagaaggccatactgtttcttccaatgtctgctaagagctgactctctttagacactgtcactgagagaaaagaaaagaatgtatacagctaagtttggatgccttttatgtaacaataagacacttagccattaccysartwmagaaaaacaacaatttttggaaaatatttggacttccccattttatatagctttggttgtgacccagtgwwwwttytwkyywywwtytttgkcacgtatttcctttatttgaaaagaggatttaaacatatattcacaaaattcacatttgtgaatttctaccctggaaacacaagtatgtgaggaaggctggcattcaatctgttcccatttcagccttgtacctctcaggcagtcccctgtggtagagcttgtagaacaggcctgtgtatactgcagggagttcctccatgctgaggtcaatcttgtcaaacccttccctgtgtccgtatagtagtagcctagccaccctgctggtgatgggggttgtgtgtttagtcctggccaggctttctagatccatccattcacacttcaagcattcctgctggcagaagttgatggtgaasgaacgcggctgcaggcggcagatcaggtacatgtctgacatcccaaaggccccarggctcctgtgttgctgccggatgctcaacagagacctgaattctgacttgacaccagtctcttcaaacacctctcggactgctgtgtctccaatatcttctccaggctctgacaggcctcctggaaacttccacatgtttttcaatttatttcgatcttgtacaaccagtactttcctggtgctaacatcaaatacggcacctgcaacccctacttggtgtgtggcataccccgggagtctgctgggtccttctcccaaccacagagtcagcgttgacaagtgcggttctgcgtggtggaagcagaagcccagagaggcagcaggggcgatgaagtggctctgcaggatggggatgtgcagccatgcagcgatccttccttccgctcgccactgctgaatggcggcctgcaagagcctccggaaggcggcggcatccagccggtgcagggtgcggtgccgcgacaagtgcaccgagatgcccccaaatctgtccagctcgccttgtagctcgcccccgcaggagcccgtgatctccaggccgctcgaggcagtgcgccgcctagcccggagtccgactccgcccacgtcgagcaaagccgagaacaaccatcgcgctctgctcgcccaccacattgttgcaccttgcctttcagctcgtgccgaatt

SEQ ID NO: 3243 - DNA, 6244 bp, Rattus norvegicus
gaattctatgctgttagcgctagtgatgggactgaaggctgccattggggaagctgggtctttgcctgctaggtaactgctgtactgagctccacatttagctctggtgtgtgagagtgaaaggaatagagttagtcagagagtgtgcacagaatactaagtgtcctgtagggtgtggggagccagatggggaaggaggtggaggggaggtgcgcgaacttttgaggaaggggctcatgactctcagctgtgcaattggcactgccactttctactgttttcttaaacactgtgggtccccacggaccaatccacattgagtggcaagtggacaatgaccttttgaccatgcagcatgtaatatgggtgtaggctgatgctaagtttgaacacggttggtttgaaggggtgcgagtgttgagtgccggcttagcagtgacaggatggataagtagttgctatgagatccggcagaagagcaggtcattactactcaaaccgccccttctgctttctgttctgaacacaggcccttctttaccagaggcaactctctggacttaaacctctcaaccctcaaaattcctcgaagccaaaaaaaaaaaaaaaaaaaaaaaagctcttacattacccaggttcaggtatcctgtcatagcaacagaaaacagactgcagtcagtttgctatgttgaacttcttcttaatctcatatccttattccaaagacaagtgattttttttaacgtaaaatctttgtctatgtgctaacagaagctacagtaatccaagctcacctgtcaggacagctaaggaaagtcctaagaatatctgagactcctgtccactgcagccctctattgaaggccctgctacaaaagcctcctgggttttgaacgcttacacttgaatgtatttattccacagaaatcacttgatgcaacaccaaataatcaagggggaaaggtccaggccagtcacccaatcgtgaatcagggtcctgttgcctgatgtgtttatacatataaataccacaaggttaactagccccagcctcctgacttaaatctctacgagtcagttctggccttatcatccccaggaatgccatgtcctggggacacgaggttgacacactgcatcccaatagcactacttagcagaaagcctctttccacatttctccgcaccccagcacccagagaagcccttcttgatcagccttatatcaactcattccaaaacactggctgttttcagattgccctttgagcccttccagacatcccttaaaagcctggggaaggaaagacccttgtttgaaaaggctggggtgactatgggtgcttcgtgccctctgtggagttcccgttcccagattctcaaaactccccaagttggcagaactgaggcctgctaattccagggcaggggtaaatcacttcccaggtggtcaaacctgagtctaaatcacatccacagatttgactttaccaagagttaggctgcaggtgggcagttgccaggctggtcttttggcaaggtgagagagtaccagcttggccacatgttgatgctcctcccagatgctaatctttttattccaaagcaagagagactccagagcattacataacattatataacacgcaccgtgcacccttcccttcagagacaattgggaactgtttgccttctcaagaacttaattgcagatttccttcttatggcccgaggtggaggcattcccagggggcagatcagaggaccacagcctgagatccatcctagcttccatcaggagtgaagtcaacactctagttccagattcactcgacaatgtgaagggggaaatgcggcgtgactttaaatgctttccgatttaatcgcctcgcgtatttatatgttttcttgcttcccaaagctcttcccaaagctgatcccgcaattttgagaatctagccaccctaccaagaagtctgaaatcccagttcatgacgtcaaccaaaaagggatagtaccttgtgttgactcagctcagattataaaatcccatgggtaccagagtacaaacgtcgggtgttaaggtgttggtactggagtcaaaaagtctgaagcgtcattctctgagttctttctacgcggggtgggggttgggggtggggcggtgtcatttactccggacttaatgttgccctaaacttctcctttatactcagaactcatcgcatccttttccttagctgggattgggaactgtgtgtgtccaactggtccttggcgttggcagttacagccacaaaccttcccttccttyccccatccactgcacttgagggagagagagcacagctctgcgsaagaacagcgcccagagagcctttctgacagatgcgcactctgctccmgcaatccgcctggctgcaaagtttcctctaataactaacacccacttcctattccccaagctgtcattctggccgggtcccctcgcgatcagggaagagcyaggctgcctgatggcagaaccagtctcacagctaaattctcyaatcccagcagataggctgtccaaggcatctccggaacgccagcaagtttcccttctagctaccaggaaccatgcactagaggtagaaaggcgagggcgctacggggcgccgaagggaaacgsgcgctcttgcgggagcggcaaaatgagagctgggtgctagggcaagcggacaccacttgggcggtgggggtgggcacaggaggccggcggggcaccssagagggcgcagcagaccagactctggaagaagcctgagcaggaaagggcgcgctcgctgcagcccgtgggtgccggctgcgtagtccacccgcaatctttggagcctttcaatcgcggtaggagggggtgctgggtgttgggggtggggacaccattgttcgggggcgtgccttggacgacgattggctgcgggagcctgacgcgcggccccgggggctggctggggggtagggagcgaggtgggggggaggtgctgggtgttggagccgccggccccgcgcgctcagaaacatgctgaggtcccggcrrctcttccagcagcgacagcsgctccagcagcagcggcggcggcggcggcggcgacassgcttggctacggaggagaaggcgcccggcgtccatgcctccggccccaagccgcggctgccctgacctggccgcgacctccccgcgtccccgcgcgcgcccscagccccggctcctggggtgcttcccaggcgcggcccagtcccgccacaccccccgcscccggcctccgaagctcggcatgggcgcgggggcgctcgccctgggcgcctccgaaccctgcaacctgtcgtcggccgcgccgctgcccgacggcgcggccaccgcggcacgactgctggtgctcgcgtcgcctcccgcctcgctgctgcctccagccagcgagggctcagcgccgctgtcgcagcagtggaccgcgggtatgggcctactcctggcgctcatcgtgctgctcatcgtagtgggcaacgtgttggtgatcgtggccatcgccaagaccccgcggctgcagacgctcaccaacctcttcatcatgtccctggccagcgccgatctggtcatgggactgctggtggtgcctttcggggccaccattgtggtgtggggccgctgggagtacggctccttcttctgtgagctctggacttcggtagacgtgctatgtgtgacggccagcatcgagaccctgtgtgtcatcgccctggaccgctacctcgccatcacgyygccctttcgctaccagagcctgctgacgcgcgcgcgagcgcgggccctcgtgtgcacagtgtgggccatctccgcgctggtgtccttcctgcccatcctcatgcactggtggcgggccgagagcgacgaagcgcgccgctgctacaacgaccccaagtgctgcgatttcgtcaccaaccgggcctacgccatcgcctcgtccgtcgtctccttctacgtgcccctgtgcatcatggccttcgtgtacctccgggtgttccgcgaggcccagaaacaggtgaagaagatcgacagctgcgagcgccgcttcctcassggcccgccccggccgccctcgcccgcgccctcgccatcaccagggccaccgcgccccgcagactcgctggccaacgggcgctccagcaagcggcggccgtcgcgcctcgtggctctgcgagagcagaaggcgctcaagacactgggcatcatcatgggtgtgttcacgctctgctggctgcccttcttcctggccaacgtggtgaaagctttccaccgcgacctggtgccggatcgcctcttcgtcttcttcaactggctgggctacgccaactcggccttcaaccccatcatctactgccgcagccccgacttccgcaaggctttccagcgcctgctttgctgcgcgcgccgggccgcctgcagacgccgcgcagcccacggggaccggccgcgcgcctcgggctgcctggcgagagctgggccgccgccgtcccccggggctccttcggacgacgacgacgatgacgccggggccaccccacccgcgcgcctgttggagccctgggccggctgcaacggcgggacgaccactgtggacagcgattcgagcctggacgagccgggacgccagggcttctcctccgagtccaaggtgtagagggccaggctctccgggcgcacggacgccgctccccatagtcccgggctggacacgggctctgcatccctagaggaagagagcccgcctgggcgcccctgagccgctccccaggggagagaggagatttctgtttactcaagaccgaaagcaggtgaatgcgaagcccacagatcttttgaatcatccgagacgtacagaaaagccccggaccgagcgttgcgcaaaaaggaaagtttgggagtagttgggagagtgtggcttagtgtggcttactggcttgtcttgagttcctttctctctgaggttcggcctttcgtgtgtttaatgcacctttaggcaccccccccccgtgggttttgacactttctgcaaggacccgagtggaaactaggaggggaggggaagggggagggtggagtctatcacctggccttctgacttcacacctaggaacctaagtgttcagctctggtttggggtgggsscaggagcggtgataattagccaggaagtgtttccttttgctttctaaagaaattgcatattaattccggagtattggtgtctccttaaagcaaaggggggaaaggtggcygagaaacagaccaatctggtttcgagaaactatttgtggagcacggttyaccttgctttctcctggagggcaaaccctgtcccctgcgcgcctcggtggtcctgctgtgggtcctctacctcactctgtgcatattgcacagcaagatagaaagacttgtttatattaaacagcttatttatgtatcaatattagttggaaggaccaggcgctgagtctctctctgtgacatgtgattctgtcaactaaagataggacagaacaaaaggaaacagttgggattattgcacatgtggctaaaaacaaagatgacaaaaaaaaaaggcagtggttgaaaggccattttgcrcagtgttagacattgtaaaatccatagaagttgttaacttgcacaaaaaattaaatatttttaatgggacggggaggtgggcagatctttaaaatgctaaaaaataaaattcaaactcagtwwmwmwwrwmwawwawrwwattgagttgatgatttattgggaaatcactttttatactcttatcatggtactgtaactgtatccatattataaatattattatcttacgtatttttattataattttttaatgtccaagtgcccacgtgaatctgctggtaaaatttagcattcgtgtgtatattcaatctcttcttgtgtgtgtgaccaagtatttatactctggtgcgactaagtaccatgtggggaattggtccatgtgcaataaagcagcagtgcagcgcaaccgaggttatgtgccgtgtgtctgtctgtaaggggtccgtgatgacagaagagactgagtgtctgcttcaaagcacagactggcagccttttaatgtctcttcatgactcaatcgcagagcaaaatgcctctaaaccaaataaggcggtcaccaacagagagccccagatct

SEQ ID NO: 3244 - DNA, 2260 bp, Rattus norvegicus
cggmmkyccgrcttccagcgagatcgccatgcccggcgaggwgaaggccgaccccgccgcgctcatggccwcgctgcagctcctgccgtcacccacgcccaacctcgagatcaagtacaccaagatctttattaacaatgaatggcagaactcagagagtgggagagtgttccctgtytgtaatccagccacaggagagcaagtgtgtgaagttcaagaagcagacaaggtggatatagacaaggcagtgcaggcggyccgcctggccttctctcttggttctgtgtggagaaggatggacgcttctgaaagaggacgtctgctggacaagcttgcagacttggtggaacgggacagggcaactcttgcaactatggaatcactaaatggcggtaagccattcctgcaagctttttacatcgatttgcagggagtcatcaaaaccctgaggtattatgcaggctgggctgataaaattcacggaatgaccattcctgtagatggagactattttaccttcacgagacatgagcccatcsgagtgtgtggacagattatcccgtggaatttccccctgctgatgttcacctggaaaattgctcccgcactgtgctgtggtaacactgtggtcatcaagcctgcagagcagacaccactcagtgcactgtatatgggagccctcatcaaggaggctggctttccacccggggtcgtcaacattctgccagggtatgggccaacagcaggggcagcaatagcgtctcacattggcatagacaagattgcattcacaggctctactgaggttggaaagcttattcaagaagcagctggaagaagtaatttgaagagagtaactctggaacttggagggaaaagccctaatattatttttgcagatgctgacttggactacgctgtggagcaggctcaccagggtgtgttcttcaaccaaggccagtgctgcactgcggggtctcgaatctttgtggaggagtccatctatgaggaatttgtgaaaagaagtgtggaaagagccaagaggcgcattgtggggagcccctttgatcccactactgagcagggtcctcagattgataagaagcaatacaacaaaatcctggagctcatccagagcggtgtggccgagggcgccaagctggagtgtggaggcaaaggactgggaaggaagggcttcttcattgagcctaccgtgttctccaacgttacagatgacatgcggatcgccaaggaggagatttttggaccagtccaggaaattttgaggtttaagactatggatgaagttatagaaagagccaataactcagacttcgggcttgtagcggctgtcttcactaatgacatcaacaaggctctcatggtgtcctctgcaatgcaagctgggacagtttggatcaattgttacaacgccttaaatgctcagagccccttcggggggttcaagatgtctggaaatgggagagaaatgggtgagtttggcttacgggagtactcagaagtaaagaccsygacggtgaagatcccccagaagaactcctaagaggcccaggccgaagagcaccagtgtgccaagactgccacctatcaccaggcctcctycgtcatgccctgtggcccgcccgacgtcggtttaccactcttgcctcacaacaagtgagcttcagcctgcagaagggagctgtgamgmaagcctgactctccttccttccaaccccacccccttccctctgccttccaatgaaccccattttgtgtgagcagcactggcttccttcccttctctcctgagctgccaaatcgrmrcsagkstctaacctgggtgaataccatttatttaataatgccaaacataacytaggtgtagaatatggtcatgtatctattgccttctctatttaatggttttttgctttctaaccaaaccagttttcagttttctattwataacctgcctgtccacgatgttttcaagcaagcsctccatactgttactgacaaatgaggacaacgcgctcagcagacagcccctgacatgggctttgagtccttccagcaggcgccytgctcttcctacagcgcacccatgtgaacacacgattaaccagctagctcccttcaacccacagtatagaatgtgaaawggmagatttatgacttttaatttacttcaaaagaaacctcgtgctmgcaataaagcatttrtrttgtgymvrmmwhvraaaaaaaaaaaaaaaaa

SEQ ID NO: 3245 - DNA, 5575 bp, Rattus norvegicus
gtataagaggaagaacacaaaggtttgcagcagccaggcagaacaccaagggatcaagatgccgcctacagtgaggtggtcagcctggtgcacaggatggctgtggatctttggggcagctctgggccagtgcctggggtatggctcagagcagcaaagggtagcatttcttcagcatccagggcaaaaccatctgcaagcaagttatatggagcttagacccagccagggctgtcgcccaggatactatcgagacatcaaaagcttccctgcgggaaggtctgttccctgcaattgcaacggacattcaaatagatgccaagacggctcgggagtgtgcattaactgtcagcacaacacagctggggagcactgtgagcgttgcaagaggggttactatggaagcgccatccatggatcctgcagggtttgcccctgtcctcacaccaacagctttgccactggctgtgctgtggatggaggagctgtgaggtgtgcctgcaaacccggatacacaggagcacagtgtgagaggtgtgcaccaggatattttgggaacccccagaaatttggaggtagctgccaaccatgcaattgcaacagtaatggccagtttggcacttgtgatcccctaactggagactgtgtaagccaagaacccaaagatggcagccctgcagaagaatgtgatgactgtgacagctgtgtgatgactctcctaaatgacttggtccccatgggtgaggaactcgccctggtgaaatcaaaacttcaggggctgagtgtgaacactggttctctggaacagatccggcatgtggagatgcaggccaaggacctgaggaaccagctgcttggcttccgttccgccatctccagtcacgggtcccaaatggacggcctggaaaaagaactcagtcatttgtaccaggaattcgaaactttgcaagaaaaggcgcaggtcaattccagaaaagcacaaacattatataacaacatcgatacgacaatccaaaacgccaaagagttggacatgaagattaaaaacatacttacgaatgtgcacattctcctgaagcagatcgctcggccaggtggagaaggaatggacttgccggtgggcgactggtccagggagtcggcggaagctcagcgcatgttgcgggagctgcgaggccgagactttaaaaagcacctccaagaagcagaggcccagaaaatggaagcccagctcttactgaaccgaatcaggacctggctggaatcccaccaggtggagaacaatggactgctaaagaatattcgggattcattaaatgattatgaagccaaacttcaggacctgcgttccgtgcttcaggaggcggcagcccagggaaagcaggctacaggcctcaaccacgaaaatgagggggtcctaggagccatccagagacaaatgaaggaaatggattccctgaagaagtacctcaccgagcacctggccacagcagacgcttccctgctgcaaaccaacagtctactgcagcggatggacacgagccagaaggagtatgaaagcttagctgctgctttaaacggagcaagacaggaactgaatgaccaagtgcgggaactctccagatccggaggcaaagcacccctggtggctgaggccgagaagcacgctcagtctttacaggagctggcaaagcagctggaagagataaagagaaacaccagtggggatgagtcggtgcgctgtgtcgtggacgctgccactgcctatgagagcatcctcaacgccatccgagcagcagaggatgcagccggcaaggccgacagtgcctcagagtccgccttccagacagtgataaaggaagatcttccgagaagagccaaaaccctgagttctgacagcgaggaactgttaaacgaggccaagatgacacggaaaaggctacagcaagaaatcaatccagctctcaacagcctacagcaaaccctgaagactgtatcagttcagaaggacctgctagatgccaatgtcactgctgtccgtaatgaccttcgtgggatccagagaggtgatattgacagtgtggtgagtggagcgaagagcatggtcaggaaagccaatgggataacgagcgaggtcctggacgggctcagccccatccagacggatttgggaaggattaaggacagctacgggagcacacggcatgaggacttcaacaaagctctgattgacgccaataactcagtaaagaaattaaccaagaagttgcctgatctttttgtcaagattgaaagcatcaatcaacagttgctgcccctgggaaacatctctgacaatgtagaccgaatccgagagctcattacgcaggccagagatgctgcgaacaaggttgcaattcccatgaggttcaatggtaaatctggtgttgaagtccgtctgccaaatgacctagaagacttgaagggatacacgtctctgtctttgttcctccaaagaccagacttaagagagaatggaggcactgaggacatgtttgtaatgtaccttggaaacaaggatgcctccaaggactacatcggcatggcggttgtagatggccagctgacgtgtgtctacaacctgggggaccgagaagctgaagttcagatcgatcaggtcctgacggagagtgagtctcaggaggcagttatggaccgggtgaagttccagagaatatatcaatttgccaagcttaattacaccaaagaagccacgtccaataaacccaaagctcccgcggtctacgacctggagggtggcagtagcaacacgctccttaatttggatcccgaggacgctgtgttttatgtcggaggttacccaccggattttgaacttcctagcagactgcggttccctccatacaaaggctgtatcgaactagatgacctcaatgaaaacgttctaagcttgtacaatttcaagacaactttcaatctcaacaccacggaggtggagccttgtaggaggagaaaggaagagtcagacaaaaattactttgaaggtacaggctatgctcgcatccctactcaaccaaatgctcccttcccaaacttcatacagaccatccagactactgtggacagaggtttactgttcttcgcagaaaaccaggataacttcatatctctgaacatagaagatggcaatctcatggtgagatacaaactaaattcagagccacccaaagagaagggaattcgagacaccatcaacgatgggaaagatcattcgatcttaatcacaattggaaaactacaaaaacgcatgtggataaatgtgaacgaacgcagtgtacgaatcgaaggggaaatatttgatttcagcacatattatttgggcggaattccaattgcaatcagagaaaggtttaacatctcaacgcctgctttccaaggctgcatgaagaatctgaagaaaaccagtggggttgtcaggttgaatgatactgtgggtgtaaccaagaagtgctcagaagactggaagcttgtgcgaaccgcctcgttctccagaggagggcagatgagctttacaaacttggacgtgccctcgactgaccgcttccagctctcctttgggtttcagacctttcaacccagtggcacactgctcaatcatcagacgcggacaagcagcctgctggtcaccctggaagatgggcacattgagttgagcactagggacagcaacatcccaattttcaagtctccagggacctacatggacggtttactgcatcatgtatctgtaataagtgacacctcaggtctccgccttctcatcgatgaccaggtcctgagaaggaaccagaggcttcctagcttctctaacgcccagcagtcgctccgccttggaggaggtcatttcgagggttgtatcagcaatgttttagtccaaaggttttcacagagtccagaagtcctggatctggccagtaaatctaccaagaaggatgcatccctaggaggctgcagtttaaacaagccaccttttcttatgttgtttaaaagtcccaagagatttaacaagggccggattttcaatgttaatcagctgatgcaagatgcacctcaggccacaaggagcacagaggcttggcaagatgggaggtcctgcctaccacctctgaacaccaaggcctctcacagagccctgcagtttggagacagccccaccagccacttgctactcaagcttccccaggaactgctgaaacctaggtcacagttttctttagacatacagacaacttcccccaaaggactggtgttttacgcaggcaccaaggactccttcctggctctttatgtcgcagatggccgtgttgtctttgctttgggggcaggagggaagaaactgagactcaggagcaaggagagataccatgacgggaagtggcacacggtggtgttcggactaaatggaggaaaggcacgcctggttgtggatgggctaagggcccaggaaggcagtttgcctggaaattctaccatcagccccagagaacaggtttacctagggttgccgctatcaagaaagccaaagagcctaccccagcacagttttgtggggtgcctgagagatttccagttgaactcgaaacccctggattctccttctgcgaggtttggggtatctccctgcttgggtggctctttagagaaaggcatttatttctcccaaggaggaggccatgtgatcctagccaattctgtgtccttggggccagagcttaagctcactttcagcattcgcccacggagtctcactggggtcttaatacacgtcggaaswcarkctggwcarcgcttaagtgtgtacatggrggcaggaaaggtcacaacctctgtgarcastgatgcakgaggaagtgtgacatcaattacaccgargcaktctctgtgtgatggacagtggcactcggtggcagtctccattaaasakcgcatcctgcatctaraactggatacagacagtagctacacagtcgsaccactttccttctcaccaaacarcacscgagggtcactgcacgtcggwggtgtcccagacaaattgaaaatgcttacactccctgtgtggaactcattttttggctgtctgaagaatattcaagtcaaccatgtccctgtccccatcacagaagccacagaagtccaaggttctgtcagcctgaatggctgccctgaccactaaccctacayagsawgattcacctttggargtaccaccagccaagtgtmcccctcccccatcaaagccatcaagccggcacagmmcacactgacagagcawtgtcattttgagttccaaccacacagacccatyactctgtytttcagtgacacatatgcattttctatcaaaccccaattcatgaagaaaatgagcaaattgtcattcaaacattcgcacaaggcttttgttaatattatttttccactaagaattaaatgccttttagagaacctttttccccaamwrmwaaaaaraamawcttgtttagagcactttatgaatacaaaactttaaaac

SEQ ID NO: 3246 - DNA, 1428 bp, Rattus norvegicus
atgcgaagtctcagcctggcgtggctgctgggaggtatcacccttctggcggcctcggcctcctgcaaccggaccgtgaatgcaccgggacccaacagtaaagggagaagtctgattggcagattggacacgccgcctcccatcactgggaaaggggctccagttgaaccaggcttttccgttgatgaattctctgcatccgtcctcaccgggaagctgaccaccgtctttctcccggtcatctacatcattgtctttgtaattggtttgcccagtaatggtatggccctctgggtcttcttcttccgaacgaagaagaagcaccctgctgtgatttacatggccaacctggccttggcagacctcctctctgtcatctggttccccctgaagatctcctaccacctccatggcaacgactggacctatggggatgcgctctgcaaggtgctcattggctttttctacggcaatatgtactgctccatccttttcatgacctgcctcagcgtgcagaggtactgggtgatcgtgaaccccatgggacactccaggaagagggccaacatcgctgttggcgtctccctggccatctggctcctgatttttctggtcaccatccctctgtacgtcatgaggcagaccatctacattccagccttgaacatcaccacctgtcacgacgtgctgcccgaggaggtcctggtgggggacatgttcagttacttcctctccctggccattggagtctttctgttcccagccctccttactgcgtctgcctacgtgctcatgatcaaaacgctccgctcttccgccatggacgagcactcggagaagaaaaggcggagggctatccgcctcatcatcacggtgctgtccatgtacttcatctgcttcgctcccagcaacgtgctgctcgtcgtgcattatttcctcatcaaaagccagaggcagagccacgtctacgccctctacctcgtcgccctctgcctgtccaccctcaacagctgcatagacccctttgtctactactttgtttcgaaagatttcagggaccaggccagaaacgcgctcctctgccgaagcgtccgcaccgtgaaacgcatgcagatatcgctcacctccaacaagttctccaggaaatccagctcttactcctccagctcaaccagtgttaaaacctcctactgagctgggtctgaggatatggagccagcttgatgatgatgctggtgatgatgatgatgatgatgatggtgatgatgctgatgatgctgatgatgctgatgatgctgatgatgatgatgtatgtgtgtgcaattgtgcgtgcatgcgtgtgtgtgtgtgtgtgtgtgtgtgtgtgtgtgtgttagggatgccaccacaacgcacggggctgtcatttccattccaagttgcactata

SEQ ID NO: 3247 - DNA, 2364 bp, Rattus norvegicus
ccccgggctgcaggaattcggcacgagggccgcggcggcgctggccgcgccgggtcccggtccccgcccccgccccgcccccgcccggcgctccggtcccttcccggcaagatggcaaccccggccgccgtcaaccctccggaaatggcttcagacatacctggatctgtgaccttgcctgttgcccccatggcggccacgggacaggtgagaatggcaggggccatgcctgcccgaggaggaaagcggcgatccggaatggactttgatgacgaagatggtgaaggtcccagtaaattttcaagagagaaccacagtgagattgagcggcgcaggcggaacaagatgactcaatatattacggaactctccgacatggttcccacctgcagtgcactagctaggaagccagacaagctcaccattctacgcatggcggtctcacacatgaagtccatgaggggcaccggcaacaaatctactgacggcgcatataagccttccttcctcactgagcaggaactgaagcatctcatccttgaagctgctgacggatttctgtttgtggtggctgccgagacagggagagtaatctacgtgtctgattctgtcactcctgtcctgaaccagccacagtcagagtggtttgggagcacactctatgaacaggtgcaccctgatgacgtggagaaactgagagaacagctgtgcacttcagaaaactccatgacaggccgcatcctagacctgaagactgggacagtgaagaaggagggacagcagtcgtccatgcgcatgtgtatgggctcccggcgctccttcatctgtagaatgaggtgtggaaatgctcccttggaccacctgcctttgaacagaataaccaccatgaggaaaaggttcaggaatggccttggccctgtgaaagaaggagaagcccaatatgccgtggtccactgcacaggttacatcaaggcttggccaccagcaggaatgagcatacccgaagaagatgctgatgttggacaaggcagtaaatattgccttgtggcaatcgggaggctccaggtgaccagctctcctgtgtgcatggacatgagtggcatgtcagtgcccacggagttcctgtctcggcataactctgatgggatcatcacgtttgtagacccaagatgcatcagtgtgattggctaccagccccaggaccttctgggaaaagatattttggaattctgccaccctgaggatcagagccacctacgggagagcttccagcaggtggttaaactgaagggccaagtgctgtcggtcatgtacaggttccgcaccaagaaccgggagtggctgttgatccgcaccagcagcttcaccttccagaacccctactctgatgagatcgagtatgtcatctgcaccaacaccaacgtcaagcaacttcagcagcagcaggcagagctggaggtacaccagcgagacgggctgtcatcatatgacttgtctcaggtcccggtacccaacctacccactggtgttcatgaggcagggaagcctgtggaaaaggcagatgcgatcttctcccaagagagagaccctcgttttgctgagatgtttgcaggcatcagtgcatcggagaagaagatgatgagctcagcctcagcatccggcagccagcagatctactcccaaggaagtccattccctgccgggcactcgggcaaggccttcagctcttctgtggtccatgtgcctggagtgaatgacattcagtcctcctcctcaacgggccagaacatatcccagatctcccggcagctgaaccagggccaggtggcatggacaggcagccgtccacccttcccagggcagcccagcaagacgcagtcatctgccttcggaattggatcaagccacccctacccagccgacccttcatcctacagtcctctctccagcccagctgcctcctcaccaagcggaaacgcataccccagtcttgccaacaggactccagggtttgctgagagtggacagagtggagggcaattccagggccggccctcagaggtctggtcccagtggcagagccagcatcacggacagcagagcggtgagcagcactcccaccagcagcctggccagactgaagtgttccaggacatgctacccatgccgggcgacccgacgcaggggactggcaactataacatcgaggactttgctgacctgggcatgttccctccattttctgagtagcttcaggcaaagccaggcttctactgcccaggcgctattatcataccatagatgcccatgttcaaagagtgccccctcacccagcttgccctgctgcagaacccctctcgtgcc

SEQ ID NO: 3248 - DNA, 1690 bp, Rattus norvegicus
gaattcggcacgagaccagaggtggtggtgaggcatcccaagcgcaagatgtcgggagaggwcgagttttacctgtttcagaatatctcctcagtggggccctgggatgggcctcagtaccacattgctcccgtctgggccttccacctccaggcagccttcatgggatttgtcttctttgcagggaccccactcaatgccacagtgttggtggccacactgcactacaaaaagttgcggcagcccctcaactacrttctggtcaatgtatccctcggaggcttcctcttctgcatcttctctgtcttcacagtcttcatcgccagctgtcatggatacttcctctttggtcgccaygtttgtgctctggaggccttcttgggctctgtagcaggtctagtgacaggatggtccttggctttcctggcctttgagcgctaccttgtcatctgtaaaccctttggcaacatccgcttcaactccaagcacgcactgacggtggttctgattacttggaccattggcatcggggtgtccatcccrcccttctttkgctggagcmggytyatccctgagggcctgcagtgctcctgtggcccggactggtacaccgtgggcaccaagtatcgaagcgagcactatacctggtttctgttcatcttctgtttcatcattcctctttccctcatctgtttctcctacttccagttgctgaggactctcagagctgtggcggcccagcagcaagagtcagctacaactcaaaaggctgaacgggaggtgagccatatggtggtggtgatggtgggatccttctgtctctgctacgtgccctatgctgccctggccatgtacatggtcaacaatcgtaaccacgggytgkacttacggcttgtcaccatyccygccttcttttccaagagttcatgtgtctacaaccccatcatctactgcttcatgaataagcagttccgggcctgcatcctggagatggtgtgcaggaagcccatgacagacgaatctgacatgtctrgctctcagaaaacagaagtttctactgtttcttccagcaaagttggccctcactaaggaccctcagttggcctgctggcagcaaccatggggccacattgaattatctacatctccattagaattcaaaccattaacaatgtagggaacagacaggagcagtggcatctggccggtcagtttcattttcctgttactctctccctgtcagcagggccacacgggccatttcaacagtcacagtttctaagtgataccttcatctctggagaactgtgagagaagggccgtgcctctggtgtatgggtaacacctggttgttcttttattccgtgctgggatctgagttgatatatcctgttagaataagcttggcatggggcagtgtgaagaaaaagcagcagacaccaaacacctgcagtgagctgaagctttcctatgcggcctctcccagttgctgccgtctgggctatggctgccctgcccagaactgccccwcctcactcatctgacagttattctaagtcttctcccctccatttggctaaatgtatccatttaaagctgtgtgttgattaaagttagtgtcttaatctcttgacgacctcaaaaaaaaaaaaaaaaaactcagagtacttctagagcgccgcggcccatc

SEQ ID NO: 3249 - DNA, 339 bp, Rattus norvegicus
cggagaaaatgcatgccagggacttcacagtttctgctctggtaagagttgttggatttagtaatgctaattatagccattaagcaggattttactacaatatggctgctcagtgctgtgttgtcgttccccctgctcagaacaattgtttcttaactatacctgtctgctgtctacctgtagcagccagggacgcttggtctcatacatgatagaaagaaattaaatgaatgcctgacctgaatagggattgctgaattgagttgttgtatttgcagcatggtgacatggaccagaaggaaagagatgtcatcatgagggaattccgatcagggtcaa

SEQ ID NO: 3250 - DNA, 1255 bp, Rattus norvegicus
tggaattaagtgaggagcacagctggatgagcaacaggacagaccttcagtacgagctgaaccccggagaggtggccacagccagcattttctttggcgctttgtggttgttctctatctttggcaattcccttgtgtgtctggtcatccataggagccggaggactcagtccaccaccaactaccttgtggtctccatggcgtgtgctgaccttctcatcagtgtggccagcacaccgtttgtcgtgctgcagttcactaccgggaggtggaccctcgggagcgccatgtgcaaggtggtccgctacttccagtatctcaccccaggcgtccagatctacgtgctgctctccatctgcatagaccgcttctacaccatcgtctaccctctgagcttcaaggtgtccagagaaaaggccaagagaatgatcgcagcctcctggatcttggacgcagccttcgtgacgcctgtcttctttttctacggctctaactgggatagccactgtaactacttcctcccaccctcctgggagggaactgcctatactgttatccacttcttggtgggctttgtgattccctctgtcctcataatcctgttttaccagaaagtcataaagtatatctggagaataggcacggacgggcggaccctgaggaggacaatgaacattgtccccaggaccaaggtgaagacggtcaagatgtttctgctcttcaaccttgtgttcctgttctcctggctgcctttccatgtggctcagctctggcatccccatgagcaagagtacaggaagarytcscwygkkttcacagcagtcacgtgggtgtctttcagctsttcggcctctaaacccactctgtactctatttataacgccaattttcggagagggatgaaagagactttctgcatgtcctcaatgaaatgttaccgcagcaatgcstamaccatcacgaccagttcaaggatggccaaaagaaactatgtgggcatttcggaaatccctcccgtgagcaggacgataaccaamgactcsatctatgactcattwgaccgtgaggccagggagaagaagctcgcctggcccatcaactcaaacccaccaaacacttttgtctaatttctaagaactccttcactgttatgtgccagagatttaaaaaaaraaraaaaaaagctttaactataaagagaattgatttacttagttttcactaaacttcctttttgtaaaaaaaaaaaaaaaaa

SEQ ID NO: 3251 - DNA, 2529 bp, Rattus norvegicus
ctccgtgctgccagagcaggcaacctggacaaagttgtggagtatctgaaaggaggcattgacatcaacacttgcaatcagaatggactcaacgcgctccatctggcagccaaggaaggccacgtgggcctcgtgcaggagctgctgggaagagggtcctccgtggattctgccaccaagaagggaaacaccgctcttcacattgcatcactggccggacaagcagaagttgtcaaagttctagttaaggagggagccaacatcaacgcccagtcgcagaatggcttcactcctttgtatatggctgcccaggagaatcacattgatgttgtaaaatatttgctagaaaatggagctaaccagagtactgctacagaggacggttttactcctctagccgtggcactccagcagggacacaaccaggcggtggccattctcttggagaatgacaccaaaggaaaggtgaggctgccggctttgcatattgcggctcggaaagacgataccaagtccgccgcccttctgcttcagaacgatcacaatgctgatgtgcaatccaagatgatggtgaacagaacaaccgagagtggcttcacccctttgcacatagctgcacactacgggaatgtaaacgtggcgactcttcttctaaaccggggagctgctgtagacttcaccgccaggaatggaatcactcccctgcatgtggcttccaaacggggaaataccaacatggtgaagctcctactggatcgaggtggtcagatcgatgccaaaactagggacgggctgacaccacttcactgtgctgcacgaagtgggcatgaccaagtggtggaactgctgttggaacggggtgctcccttgctggcgaggactaagaatgggctgtctccccttcacatggctgcccagggagaccacgtggaatgtgtgaagcacctgctacagcacaaggcacctgttgatgacgtcaccctggactacctgacagctcttcatgttgctgcacactgtgggcactaccgtgtaaccaaactccttctggacaagagagccaatccgaacgcaagagccctgaatggttttactccactgcacattgcctgcaagaaaaaccgcatcaaagtcatggaactgctggtgaaatatggggcttacatccaagctataacagagtctggcctcacaccaatacctgtggctgccttcatgggccacttgaacattgtcctccttctgctgcagaacggagcctctccagatgtcactaacattcgtggtgagacggcacttcacatggcagcccgggctggcgaggtggaagtggttcgatgtctcctgaggaatggcgctcttgtggatgccagagccagggaggagcagacgcctttacatattgcctcccgcctgggtaagacagaaatcgtccagctgctgttacaacacatggctcatccagacgcagccaccacaaatgggtacacaccactacacatttctgctcgggaaggacaggtagatgtggcctctgtcctgctggaagctggagctgcacactcattagctaccaagaagggcttcactcccttgcacgtagcagccaagtatggaagcctggatgtggcaaaacttctcttgcaacgccgcgcagccgcagattcagcagggaagaatggccttaccccgctccatgttgctgctcattatgacaaccagaaggtggcgctgttgctgctggagaagggtgcttcccctcatgccactgccaagaatggctatactcctttacacattgctgccaagaagaaccagatgcagatagcttccacactgctgaactatggagctgagacgaacactgtgacgaagcaaggggtcactccactgcatctggcctcacaagaggggcacacagacatggtcaccttggttctagagaagggagccaacatccacatgtcaaccaagagtggactcacctctttacacctcgcagccgaagaagataaagtgaatgttgccgacattctcaccaagcacggggctgatcaggatgcctacacaaagcttggttacacacctttaatcgtggcctgtcactatggaaatgtgaaaatggtcaactttcttctgaagcagggagcaaatgttaacgcaaaaaccaagaatggctatacacctttgcaccaagctgcccagcagggacacacacacatcattaatgtgctgctccagcacggggccaaacctaatgctaccactgcgaatggtaacacagccctggcgattgctaagcggctgggctacatctccgtggttgacaccctgaaggttgtgactgaagaggtcaccaccactaccacgactatcacggaaaaacataagctaaatgctcctgagacaatgacggaagtcctggatgtttctgatgaagagggtgatgacacagtgacaggtgatgggggagaatatctcaggccagaagatctcaaggagcttggtgatgactcactacccagcagt

SEQ ID NO: 3252 - DNA, 1358 bp, Rattus norvegicus
caaaagctggagctccaccgcggtggcggccgctctagaactagtggatcccccgggctgcasgaakycggagcmcsagacgcgcacaggscgccgcagcagctccggtgttcagcaggatgtcccggtggctaatgcaaatkttgatgctgcccctattgctgctccctttgggtcaagctgcccccaaggatggagttgcaaggctggaccctgaggcacaacagcagctcacaaccaaccccttccagccaggccctgagcagctccgacgtctgcgggattatctcaagggactggagaagatggaagaggaccctgaacaaatgaaccgggagcaagtcctgctatatctctttgctcttcacgactttgaccagaacggacaactggacggcctggaactcttgtccatgctgacagcagctctggcccctggagctgcacacttccccatcaacccggtgatcctggtagtagacatggtgcttgagactcaggacctggatggagacgggctcatgactcctgcagagctcatcaacttcccaggagaagcccccaagcgcgcagagtcccttcccccagctctccargagccacaacctgccggaagtcagccgcttttagccaacagyccgstgcaatcagaaacccagcaatccstggggactaaagaagaaattacaagtcaggtagagsccaaaagggccttggagcytgaacaggaggctggacatcacatagagactaaagtagatgctctaagccctraaggggaggctaggggtcaggcagagtytgaaggagatgccccaggtccccrmgaggatgctgagagacaggtggagagcaagkacaacgarrgggaagccaaagacctgccagcggaaacactagagacccaaracactccaaatgtggttgaggctcayrgcatcsarstggaaaacgacgagatatgagctagacacacaggctcatgcccctcaggatctcagtgcagaacagaagcatsaagtgtgaatacagtgggtctggagccacctctgacatgggtatggtggtccaagctcgtactcccagaagcactgagagctccaggctagcctaggccacttagcaagtttgragccaggctgggctacttcgtgaggccctgtcttgaggaggggaaaagaaacgcwctcccacgtctcctttctggccctcagtagraagcaggacttttcttcgcagctcaggggagaccacaagctgagaggcagatttcaggccccaaacaatcaataaaaaacaaaatggawwwrdmwmmmwwaaaaaaaaaaaaaaaaaaacaattgcggccgcaagcttat

SEQ ID NO: 3253 - DNA, 1627 bp, Rattus norvegicus
cggtgagtctgagaacaccatcactgtgctgttgaggccggcccagggccgaggagcacccatcagtgcctaccaggtggttgtggaggaagagcggccacggcgcttgcggcgcgagcctggaggtcaggactgcttctcggtacctctgacctttgagacggccctggctcgcggcctggtgcactactttggggctgaactggctgccagcagcctgcttgaggccatgcccttcactgtgggtgacaaccagacctatcgtggcttctggaacccaccgcttgagcccaggaaggcctacctcatctatttccaggcagcgagccacctggaaggggaaacccgactgaactgcatccgaattgccaggaaagctgcgtgcaaggagagcaagcgacccctcgaagtgtcccagaggtcggaggagatggggctcatcctgggtatctgtgcaggtggccttgtcgtcctcattctcctcctgggcgccatcattatcatcatccgtaaagggagggaccgctatgcctactcttactacccgaagccagtgaacatggcaaaagccacggtcaactatcgccaggagaagacccacatgatgactgctgtggaccgtagcttcacagatcagagcactctgcaggaggatgagcggctgggcctgtccttcatggatgctcctggctacagccctcggggagaccagagaagcagtggggtcactgaggccagtagcctcctggggggctctcctcggcgcccctgtggccggaagggctccccgtatcacacagggcagcttcaccctgcagtacgagtggctgacctgctgcagcacatcaaccagatgaagacagccgagggctacggcttcaagcaagagtacgagagtttctttgaaggctgggatgccaccaagaagaaagacaagctgaagagcggccggcaggagccagtgtctgcctatgaccgacaccgagtgaagctgcacccgatgctgggagaccctgatgccgactacatctctgccaactacatagacggctaccacaggccaaaccacttcatagccactcaagggccaaagcctgagatgatctacgacttctggcgcatggtgtggcaggagcagtgtgtgagcgtcgtcatgatcagcaagctggtagaggtgggcagggtaaagtgctctcgatactggcccgagcactcagacatgtatggggacatcaagatcacgctggtaaagacagagacactggctgagtacgtggtgcgcacctttgccctggagcggagaggttactcagcccggcatgaggtccgccagttccacttcacagcgtggccagagcatggtgttccctaccatgccacggggctgctggccttcatccggcgcgtgaaggcttccactccacctgatgctgggcctgttgtcattcactgcagtgcaggcactggccgcacaggctgctacatcgtcttggatgtgatgctggacatggctgagtgtgagggggtcgtggacatttacaactgcgtgaagaccctctgttcccggcgggtcaacatgatccagaccgaggaacaatacatcttcatccacgatgcgattctggag

SEQ ID NO: 3254 - DNA, 285 bp, Rattus norvegicus
aaatgctgcaaatactggccggacgacacggagatctataaagacataaaagtcacgctaatagacacagagctgctggcagaatatgtgataagaacctttgccgtggagaagagaggtattcatgaaatacgagagatcagacagttccacttcactggctggccggatcacggcgtcccctaccacgccaccggcctgttgggtttcgtccggcaggtcaaatccaagagcccacccaacgcaggcccactggtggtacactgcagtgccggcgccgggagg

SEQ ID NO: 3255 - DNA, 5127 bp, Rattus norvegicus
tgcttctgcgatgatggagaacctaatacggggaaggaatcccccacaatatcagagaagtccttgtaaggaggcccgtgcagcacttcggaagaggcctgaagaagagtgagcccgctacatgaaaagaatgcaagtcaaagtgcccacagcctagaagtcttcagagacaggagtgactagcaatgcagtgcctggagatgaccaccaaacggaagctcatcggccgcctggtgccatgccgctgcttccgtggcgaggaagagatcatctcggtgttggattactcccactgcagcctgcaacaggtgcccaaggaggtcttcaacttcgaacgtacactagaagagctctatctagatgccaatcagattgaggagctacccaagcaattgttcaactgtcaagctctaaggaaactaagcattcctgataatgacctctcaagtctgccgacctccattgctagcctagttaatctgaaagaactcgacatcagtaaaaacggtgtacaagaatttccagaaaacataaagtgctgtaagtgtttaaccattattgaagccagtgtcaatcccatttctaaactacccgatggcttcacgcagcttcttaacctgacccagctctacctgaatgacgccttcctcgaatttcttccagctaattttggaagacttgtcaaattgcgaatcttggagttaagagaaaatcacttgaaaactctaccaaagtcaatgcacaagctggcccagctggaaagacttgacctaggcaataatgaattcagcgagctgcctgaagttctggatcaaattcagaatttgagggagctgtggatggataacaacgcattgcaagtgctgcctgggtctatagggaagttaaagatgttggtatacctggatatgtcaaaaaacaggatagaaacggttgacatggatatttctggatgtgaagccctcgaggacctcttactatcatccaatatgttgcaacagctgccggactctataggattgctgaaaaagttaacaactctaaaagtagatgacaatcagcttacaatgctacccaacacaatcggaaacttatctttattagaagaattcgactgcagttgcaatgagctggagtccctccctcccaccattggttacctgcacagcctgcgaaccttagctgtggacgagaatttcctcccagagttgcccagagaaattggaagctgtaagaacgtcaccgttatgtctctacgctccaataagctagaatttcttcctgaagaaatcgggcagatgcagagacttcgagtcttaaatctaagtgataataggttgaagaacttgccattctccttcaccaaactcaaagagcttgcagcattgtggctttctgacaatcagtccaaggccctcatccctctgcaaacagaagcccatccagaaaccaagcaaagggtactgaccaactacatgtttccccagcagccccgtggtgatgaagatttccagtcagacagcgacagcttcaaccccaccctgtgggaggagcagagacaacagcgcatgactgttgcctttgaatttgaggataaaaaagaagatgacgaaagtgctgggaaagttaaggctctctcctgccaagccccctgggacaggggccagcgtgggattactctccaacctgccaggctgtctggcgattgctgcacaccatgggccaggtgtgatcagcagatccaagatatgcccgtcccccagagtgacccccagctggcatggggttgtataagtggcctccagcaggagaggagcatgtgtgctccattaccagtggcagcccaatccaccactcttccctctctaagtggcagacaggttgaaataaacctaaaacgatatccaactccttacccggaggatttaaagaacatggtaaaatctgttcaaaatctggtgggtaagccaagccatggagtgcgcgttgagaacgcaaacccaacagctaacacggagcaaactgtgaaagaaaagtttgaacacaagtggccggtggccccaaaggagattacagtggaggattcttttgttcatccagctaatgaaatgaggattggggaacttcacccttcattagctgagacccctctgtacccacccaaacttgttctgctagggaaggacaaaaaagaatcaactgatgagtctgaagttgacaaaactcactgtctgaataacagtgtctcctcaggcacctactcagactactcgccctcccaggcttcctcagcatcctccaacacccgggtgaaagtggggtccttgcagccaacaactaaagatgccgtgcataactctttgtggggtaacaggattgcaccacctttcccacagcctctagatgcaaagccattactcacccaacgggaggctgtccctccagggaacctcccccagcgtcctgatcggctgccaatgagtgatgctttccctgacaactggaccgatggctcccattacgataacacaggttttgtctccgaggaagccacaggcgagaatgccaacaataaccctctcttaagctccaaggctagaagcgtacctgctcatgggcgcaggcctttaatcaggcaagaaaggattgtcggtgttcccctggaactggagcagtccacccacagacacacaccagaaacagaagtgcctccttccaatccctggcagaattggaccagaacccccagtccatttgaggacaggactgcttttccctccaaattagaaacaacccctactaccagtcccttgcctgaaagaaaagaccacatgaaggagcctacagagacaccaggtcccttttctccgggagtgccatgggagtaccacgaccccacccccaaccggagtctcggtaatgtcttttctcaaatccactgccgcccagattcgtctaaaggtgttattgcaattagcaaaagcacggagaggctttccccgctcatgaaagatataaagtccaacaagttcaaaaagtcccagagtattgatgagattgacgtcggtacctacaaggtctataacattccactggaaaactatgcctctggaagcgatcacttaggaagccacgagcggccagacaagttcttgggaccagagcacggcatgtccagtatgtccaggagccagtcggtacccatgctggatgacgaaatgctcatgtacggaagtagtaaaggcccaccccaacaaaaagcatctatgactaagaaggtctatcagtttgaccaaagcttcaatccacaaggagcggtggaagtaaaagcagagaagaggatcccacccccttttgcacacaattctgagtatgtacaacagcccggtaaaaacatcgccaaggatctcgtcagccccagagcctatagaggatacccacccatggagcagatgttctccttttcccaaccatctgtaaatgaggatgccatggtgaatgctcagttcgccagccaggggcccagggcaggcttcctaaggagggctgactccctggccagctccacagagatggccatgttcagaagggtcagtgagccccacgagctgccccctggtgacaggtatggccgagcagcctataggggagggctggaaggccagagcagcgtttcaatgactgatccccaattcctcaagaggaatggcaggtacgaagatgagcacccttcatatcaagaagtgaaagcgcaggcgggaagttttcctgctaaaaaccttacccagaggaggccactgtctgccaggagctacagcacagagagttacggggcctcccaaaccaggccagtttcagctaggcctaccatggcagccctcctggaaaaaataccatctgactataacttgggtaactatggtgacaagacatcagataacagtgatataaagacaaggcccacccctgtgaagggagaggagagctgtggcaaaatgccggcagactggagacagcagctgcttagacatatagaagctagaaggttagacaggaccccgtcccagcaaagcaacattttagacaatggacaagaagatgtctctcctagtggccaatggaatccttacccacttgggaggcgggatgtacctccggacaccattactaaaaaggcaggcagccacattcagaccctgatggggtcacagagccttcagcaccgcagccgggagcagcagccatatgaagggaacatcaacaaagtgaccattcagcagttccagtcgccactgcccatccagatcccctcatcacaggccacccggggaccccagcctggacggtgcttaattcaaacgaaagggcagaggagtatggacggttatcccgagcagttctgtgtgagaatagaaaagaaccctgggcttggatttagtatcagcggtggaattagtgggcaaggaaatcctttcaaaccttccgacaagggtatctttgttactagggttcagcctgatggaccagcatccaaccttctacagcccggggataaaatccttcaggcaaatggacacagttttgtgcatatggaacacgaaaaagctgttttactactgaagagcttccagaacacagtagacctagttattcaacgtgagctcactgtctaaatgtttttataaatagtgaagatatgtcaggccagagataatgtttaaaaataaatttatacatagaaacaaattttgccagttgctgaccaatggcaaacatcagtgccaggtgtataatattgtacgttagccttgaccaccctggaaaatgttacttataatcacggcgtttgcgcggttctgtatcagttccagcggagcctctggctgtgcattggtgcggttttgtttctgtttttgtttttgtttttgtttttttaaaatcaaataagttgtcttctcaaagtggatttcctatcatttyggagcacggaagcacacacaagctctttacaagttatgctctccatcagagatactgcctcaaaaaaaattgtatataaagagttgtaaccccataaagtatttctagcacaaggtatatgttggcatrtaaacaaaaaaaaaaaaa

SEQ ID NO: 3256 - DNA, 4742 bp, Rattus norvegicus
gaattcgcggccgcctgcagtccaccaggcagggctctcgacgcatgcccgtcttccccggcgtttagtggtgtcaacttattaatttccatcttcgacttcaggcctgttagttttcctgtctgaaagcattattacttttgtccatgtggcaaaataattagcatacagatgagaagtggccccgtgtctgcgcgccgatagagagaagatgtgcggttcgaagttgattggatgaatggagaacaaatggtgggcgttcaaaagcattagaagagttttgtagtcgcgcgacgaggctggagaattttctgggggttccacagaggctgcagctgaggtccagaagtgtgcaattctcagctgcgctttgcccttcccagggtgacgactgaagaatcagagtgtggaaaagaacggtaggaattggtgagaacatccagctagcatcttcaagtcctgtggtgagaggcagcagtgctggtccaaagaggacccagagagtgaactcagagtgaccacatctggtagaagaggggaagatgtagttactgagtccagtccagtgtttgtgtctctcacattgccaacaaaagaaagactccagctggccccacagacatatggatattccaggagccacgtaaagatggagaaatggaggcacagagaaattaagtgacttggccacagtcacaagctggggaggaccagggaaagcctaaagagagctggctctgggcctcgatcctgcccacggagtcaccctgcctccgttcttgggagagaaggcttcctacaagatggacgtggacgctgaggagaagcgccatcgcacacggtccaaaggggttcgagttcctgtggagccagccatacaagagctgttcagctgtcccactccaggctgcgacggcacgggtcatgtcagtggcaaatatgcacgacacagaagtgtatatggttgtcccttggctaaaaagagaaagacgcaagataaacagccccaagaacctgctcccaagcgaaaaccatttgcagtaaaagcagatagttcttcagtagacgaatgctatgagagtgatggcactgaagacatggatgataaggaagaggatgatgatgaggagttctctgaagacaatgatgagcaaggggatgatgatgatgaagatgaggtggatcgggaagacgaggaggagattgaggaggaagatgatgaagatgatgaagatgatgatgatggtgatgatgtagaagaggaagaagatgatgatgatgaagaggaggaagaagaggaagaggaagaagaaaatgaagaccatcaaatgagttgtactcgaataatgcaggacccagaaaaggatgataacaacaatgacgagtatgataactatgatgaactggtagctaagtcactattaaatcttggcaaaattgctgaggacgcagcataccgggccaggactgagtcagaagtgaacagcaatacctccaatagtctggaggatcatagtagcaaaaacgaaaacctcggtcggaaaagcgaactgagtctagacttagacagtgatgttgttcgagaaacagtggactcccttaagctgttagcacaaggacatggtgttgtgctatcagagaacatcagtgacagaagttatgctgaggggatgtcacagcaggacagtagaaatatgaactatgtcatgctagggaagcccatgaacaatggactcatggagaagatggtggaggagagtgatgaggaggtgtgtctaagtagtcttgagtgcctgaggaaccagtgctttgacctggccaggaaactcagcgagaccaacccgcaggacaggagtcagccacccaacatgagtgtgcgccaacatgtccggcaagaggacgacttccctgggarkwcgscacgasggagctactcggatatgatgaaccttatgcggctggaggagcagctaagccccaggtctagaacgttctccagctgtgccaaggaggatgggtgtcatgagagggatgatgacaccaccwcagtgaactcagacaggtctgaggaagtatttgacatgaccaagggcaacctgactctgctagagaaagccattgccttggagacagagagagccaaggccatgcgagagaagatggccatggatgctgggagaagggataacctgagatcctatgaggaccagtctccaagacagctggctggggaagacagaaaatccaaatccagtgacagccatgtcaaaaagccatactatgatccctcaagaacagaaaagagagagagcaagtgtccaacccccgggtgtgatggaaccggccacgtaamtgggctttacccgcatcaccgcagtctgtctggatgcccgcacaaagatagggtccctccagaaattcttgccatgcatgaaaatgttctcaagtgtcccactccaggctgcacagggcgagggcatgtgmatagcaacaggaactcgcacagaagcctctctggatgccctattgctgctgcagaaaaactggcaaaggcccaggagaaacatcagagctgtgatgtgtccaaatccaaccaggcctcagaccgagtcctcaggccaatgtgctttgtcaaacagcttgagattcctcagtatggctacagaaacaatgttcccacaactacaccgcgctccaacctggccaaggagcttgagaaatattccaagacttcgtttgagtacaacagttacgacaaccatacttatggcaaaagagccatagctcccaaggtgcaaaccagggacatatcccccaaaggatatgacgatgccaagcggtactgcaagaatgccagccccagcagcagcaccaccagcagctatgcacccagcagcagcagcaacctcagctgtggtggtggcagcagtgccagtagcacgtgtagcaagagcagctttgactacacacatgacatggaggccgcacacatggcagccacagccattctcaacctgtccacacgttgccgggaaatgccacagaacctgtccaccaagccacaggacctgtgcactgcccggaacccagacatggaggtggatgagaatggsaccctggacctgagcatgaacaagcagaggcctcgagacagctgctgcccagtcctgacacccctggagcccatgtccccccagcagcaggcagtgatgassagccgatgcttccaactgagcgagggggattgttgggacttacccgtagactacaccaaaatgaagcctcggagggtagatgaggagsacsmsraagagattaccccagaagacttggacccattccaggaggctctggaagaaagaagatatccaggggaggtgaccatcccaagccccaaacccaagtaccctcaatgcaaggaaagcaaaaaggacttaataactctgtctggctgccccctggcggacaaaagcattcgaagtatgctggccaccagttcccaagagctcaagtgccccacccctggctgtgacggttctggacacatcactggcawytacgcttctcatcgaagcctttccgggtgcccaagagcaaagaagagtggtatccggatagcacaaagcaaagaagacaaggaagaccaggagccaatcaggtgtccggtacctggctgtgatggtcagggacatatcactgggaagtacgcatcccaccgcagcgcctctgggtgcccyttggcagccaagaggcagaaagatgggtaccttaatggctcccagttctcctggaagtcagtcaagacagagggcatgtcctgccctacacccgggtgtgatgggtcaggacacgtcagtgsyagcttcctcacacaccgcagcttgtcaggatgtccaagagccacatcagcaatgaagaaagcaaagctgtctggagaacagatgttgactatcaagcagcgagccagcaacggtatagaaaacgatgaggagatcaagcagttggatgaagagatcaaggagctcaatgagtccaattcccagatggaggccgacatgatcaaactcagaactcagatcaccacaatggakagcaacctgaagacgattgaggaggagaacaaagtcattgagcagcagaatgagtcgctcctgcacgagttggccaacctgagccagtccctgatccacagcctcgccaacatccagctgcctcacatggatccaatcaatgaacaaaattttgatgcttacgtgactactttgacggaaatgtatacaaatcaagatcgttatcagagtccagaaaataaagccctactggaaaatataaagcaggctgtgagaggaattcaggtctgaacagctgctstagtggtgactcatgcttaaaaaggatgcctcttgttwcttgctgctgtaacttaccagaaagtgttatatatwtatttctgtcggaacagtgttatgctacaagacttcataatgrttttgtgtgctctcgagatagtacctgcagaytagttttggatacattcacatwttgtacgttttcatataagctgacatagtgtgatttcccatgtaatgttkatagctgctgctgtctgcacatktggggrtctcymtmktkctgaagaggtaagctgacgaaaataaatagagtgtaaattctttttaatgctttagtgattaaatgttttagtattttgaactgaaatggacaaaaaaaaaaaaaaaaaa

SEQ ID NO: 3257 - DNA, 1647 bp, Rattus norvegicus
ggaattcggcacgagggaaagcgtgtgcgctgtccatttctgttgtccgatacatggaggaaatgctgtccttctgggatgtggccattgatttctctccagaagagtgggaatgcctggagcctgttcagtggaatctgtacagggacgtgatgttagagaattacagcaactttgtgttcctgggtctaactttctctaagccattcttggtaacattcctggagcaaggacaagggccttgggatatgcagagacaagcagccgccgctgtgcacccaggaatagcactcaatgatcctaactgttacagcaagaccactaactgtaaatcactccttattaaacgacgaaaacttcatataggggagaaaccctacaagtgtgaagaatgtggtaaggcccttggttctcttaaaacactttctatacaccagagacttcatactggagacaaaccctacaagtgtaaagagtgtcataaggcctttagtactcgctcagcactttttatacacatgaaaaatcatactgatgaaaaaacccacaagtgtgaagaatgtggcagattattttactatccttcaatgctgaaacaacatcagagaattcattctagagtgaaaccctacaagtgtcaagaatgtggaaaagcttttactgatccttcattccttaagaagcatcaaaaaattcattttcgaaaacatacctaccagtttaaagaatgtgtcaaaagattttctcctcctatacaccttcaggaacaaatccatactggacagaaacctttcaaatgtggagaatgttttaaagcctttcataatcacttagcccttaggaaacaccagacagttcattttggagagaaaccttacaagtgcgaagagtgtggccgatgttattccacatctttctaccttagaagacatcaaacaatccactctaaatacaagtcctacaagtgtgaacattgtggcagatgttattcctcaacttcctgccttaaaagacatcaaacaattcactctgaagacaacyccwacaagtgtgaagartgtggcaratrtttttcctcatctwcttgycttagaaswcatcaaacarttcattctgwrgacaaswcctayaagtgtgatgagtgtggcagatattattcctcatctttwtcccttasacgacatcaartaatccattctgaagayaatccctataaatgtgaagaatgtgrcaaaaggtttwcttrttmtgcaagycttcaggaacatcaaacaatccatacwggagagaaaccatacragtgtgaaaattgtcacaaagcctttcgtcatcamtcatccctyaggaaacataagayagtscatactggagagaaaccttacaagtgtgaaragtgtggcagatktttttccagayattcmtrccttagaakmcatcaagmawttcaytcwgawggcaaaatcccaagtgtgtggaatgtggwaaacctttsttaatgtyatckycttactcgacacatraaagttcmtmytagagagaaatcytwcwaagdtcttaaaaartstgtccttattcaggccttahwagacatcaawtamttcatactgaataaaatykytgtgactgtvmaaaaaaaaaaaaaaaaaa

SEQ ID NO: 3258 - DNA, 2700 bp, Rattus norvegicus
  misc_feature (257)..(257): n is a, c, g, or t
  misc_feature (407)..(407): n is a, c, g, or t
  misc_feature (414)..(414): n is a, c, g, or t
  misc_feature (464)..(464): n is a, c, g, or t
gaattccgcggagagagcgcgcggctgcggtccctctgcagagggctgcgcgctccgcggtctccagggctccccgtggtttgggtccgtgctcctcgacctcgggagcagggctgtcctgagaccgcaacgatctgggtaactagaggcaagaccagaagctctgggtcagaatctgatgcactgagcccccggtaacggcgggagacccggggtcctggtcaccagattgtgagggacacggactacaaggtcgncagtcctcaggcgggtccaggttgggctttaaataatggagaagtttatcgacgaaagtgctttcatttaaagagtaaattaagagacaacgccgtgaacagctgataaacaaggcatttgggtcctgaagaggcacagaaacaagtgtnatgtgangggagagtagacacataggaggaatcagacctggtgtgatatttttgtcncaaaagacttgaggaagagagaagccacttttccagagaatgaaagagtgcagtgtcaaaatggagaccagcgtttctgagattcaaatcgagactaaggatgagaagagaccagaagcagccagtcctcagaaagagaggcaggagagaaaaacagccacactgtgcttcaagagaaggaagaaagtgaacaagaagaaggccaaagctggttccaagactgctgaggagacagagaagcatgccccagaagctgggggttctggtcagcggcaaccagcgggggcctgggcctccattaaacgccttgtgacacacaggaaaccgtccgagtctgcagagaagcagaagccatctgaggctgaaatgcagcctgaggatggagctcttcctaagaagaagacaaaatccaaacttaagattccttgcatacgattctcaagaggggcaaagagaagtcgtccttccaaactcacagaagattcaggctatgtccgagtccagggagaggcagacgatttggagataaaagcccagatccagcccgatgagcaggcaacccaggctaagtccacccagggcctacaggaagatgtgatagtgagagatggtaaggagatccaagaatcacacataagcaacaacgtcatatcgggagagcatgtgattggcatagaactggaattagaaaaggaatcttctgctctccggatgagaactccagggagtgaaaaggaggctaaagtgattctggtaaagcagggtgttcaggtacaggaagcaagtgtgcttgagaattcagcagcagacrgccctcagccagtgacttctactgctcctctctcaccagcaaccacacatcaactcggtctggaagaacccagtgacagcatccgggaaagtgcaccaagtggaaaagatgacggaaggagaaagactgctgctgaagaaaagaaatcaggagagactgcgctgggccaggcagaggaggcttcttcwgtcagccaggcagacaaaagtgtactaagccaggcagaagaagctacagtgggccacacagaggaagctactgtgatccaggcacagagtcaggcaaaggaaggtaaactgarccaggcagaggaagctacagtggcccaggcaaaggaaactgtattgagtcaggcagaggaagttaaactgagccagatagaagaacctgcaattagccaggcaaagaaagctacagtaggacaagcaaaggaagctatagttagccaggcagaggaagctatagttggtcacacagagaaagccaccatgggtcaggcagaggaagctacagttggccacatagagaaaaccacagtgggccaggcagaggaagctacagtgggtcaagcagaggaagccacagtgggtcaagcagaggaagccacagtgggtcaagcagaggaagctacagttggacaggcagaggaagctacagttggtcaggcaggggaagctacagttagccacatagagaaaaccacagtgggccaggcagaggaagctatagttggtcaggcagaggaagccacagtgggtcaagcagaggaagccacagtgggtcaagcagaggaagctacagttggccaggcagaggaagccacagtggatcaagcagaggaagctacagttggccaggcagaggaagctacagttggtcaggcaggggaagctgcagttggccaggcagaggaagctatagttgctcaggcagaggaagccacagttggtcaggcaggggaagctacagttggccaagcagagaaagccacagttggccaagcagaggaacccatagttggccaggcagaggaaactgtattgaggcatgcatcagatctgaaagtaaatggagttgatgcagagaaaccaagatcagaagaaagcaaaagaatggagccaattgctattatcataacagacactgaaatcagtgaatttgatgttaagaaatctaaaaatgtccctaagcaattcctaatttccatggaaaatgagcaagtgggggtttttgctaatgatagtgatttcgaggggagaacttcagaacagtatgaaacactcttaatagaaacagcttcttctctcgtcaagaatgctatcgagttgtctgtagaacagctggttaacgaaatggtttctgaggataatcaaataaatacgctgttccagtgactccatttccaggtcacgggaagaggaattc

SEQ ID NO: 3259 - DNA, 4524 bp, Rattus norvegicus
gaattccgagtgacatctggttaacgccatcaaggacagcaacaatctgaagtcggggtctcctgtgttggaagctcggaaaaataaaaacccagagagtgagcgtcaaaggttacatctgctctggggtttgctgagtgtcacctgaaggcccctgtgtctgcttcagagtgctgctgttgaatgacaaagacgctaagaacagtctttgcccaagacgggtctggaacttaacggggttcccatgacccctgtgattgcttccagtcagcaatgaaagggttatcgggtagccgcagccaccaccatgggatcacctgtgagtcggcctgtgactccttgtcacaccattcagaccacaagccgtacctgctgagcccggtagaccaccaccctgcggaccatccctactacacccagcggaattctttccaggccgagtgtgtggggcccttcagcgaccctctggccagcagcaccttcccgcgcaggcactacacctctcagcaggagctgaaggacgagagtgccctggtgccgcgcacactggccaccaaggcgaatcgcctccccaccaacctgctggatcagtttgagaggcagctgcccctcagccgagatggctatcacacgctacagtacaagcgcaccgctgtggagcatcgcagcgatagccccggccgcatccggcacctggtccactcggtccagaagctcttcaccaagtctcattccctggagggggcatccaaaggcggcgtcaatgggggcaaggccagccctgacgggtcgcaaactgtgagatatggcaagcgcagcaagagcaaggagagacggtcagagcccaaggctagatccaatgcctctaacgcctccccgacctctcccagctggtggagctcggatgacaacctggatggggacatgtgcctctaccacacgccatcgggtgtgatgaccatgggtaggtgccctgaccgctctgtttctcagtacttcatgggggcctacaacaccatcagcgagcaggcagtgaaggcctcccggagtaacaacgacgtcaagtgctccacctgtgctaacctgccagtcacgctggatgccccacttctgaagaagagtgcctggtcctccactctcaccgtgagcagagcccgagaggtttatcagaaagcctcagtgaacatggatcaggccgtggtgaagtcggaggcttgtcaacaagagcggtcatgccagtacctacaggttccccaggatgaatggacagggtacacgcctcgcgggaaagacgacgagatcccgtgccggaggatgcgcagtggcagctacatcaaagccatgggggatgaggacagcggggactcggacacgagccccaagccatctcctaaggtggctgcaagaagagaaagctatctcaaggccacacagccatcccttacagagctcaccaccctcaagatctccaacgaacactcccccaaactccagatccggagtcacagctacctgagggcagtaagtgaagtctccattaacagaagcctggacagcctggatcctgcaggcttgctcacgtcaccaaagttccgctccagaaacgagagctacatgcgagctatgagcaccataagccaggtgagcgagatggaggtgaacggacagttcgaatccgtatgcgagtctgtgttcagcgaactggagtcgcaggcggtggaagcgctggacctgcccatgcctggctgcttccgcatgcggagccatagctacgtgcgggctatcgagaagggctgctcccaggatgatgagtgcgtgtcgctgaggtcgtcctcccctccacgcacaaccaccaccgtgaggaccatccagagtagcaccggtgtcataaaactgagttctgccgttgaagtgtcatcttgcattacaacatataagaagacaccacctccagtcccacccagaactaccacgaaacctttcatttctatcacagcccagagtagcacagagtccgcgcaggatgcctacatggacgggcaaggccagcgcggggacatgatcagccagtctggcctcagcaactccaccgaaagtctggacagtatgaaggctctcacggctgccatcgaggctgcaaacgcgcagatccacggcccggcaagtcaacacatgggcagcaacgctgctgccgtcaccaccaccaccaccatagccactgtcaccaccgaggacaggaagaaagactttaagaaaaacagatgcctatctattgggatacaggtggacgacgccgaagagtcagagaaaatggcagagagtaagacgtccagtaagttccagtccgtgggagtgcaagtagaagaggagaagtgcttccgcaggttcactcggtccaacagtgtaacgactgcagtacaggctgacctggacttccatgataatctggaaaattctctggagtctatagaggacaattcgtgtcccggcccaatggccagacagttctcgcgagatgccagcacctctaccgtcagtatccagggttcaggaaaccactaccatgcctgtgcagccgacgatgactttgacacggattttgacccctctatcctgcctcctccggacccctggattgactctatcacagaagaccctctggaggccgttcaaaggtccgtgtgccaccgggacggccactggttcctgaagcttctccaggcagagcgagaccgcatggaagggtggtgcaagcaaatggagagagaagagagggaaaacaacctcccagaagacattctagggaaaatcagaaccgcggtgggcagtgcccagcttctcatggcgcagaaattctaccagttcagagaactgtgtgaagagaacctgaatcccaatgctcacccgagacccacttcccaggatttggcggggttttgggacatgctgcagttgtccatagaaaacattagtatgaaatttgatgaacttcatcagttaaaggccaataattggaaacagatggatcctcttgacaagaaggagcgaagggcccctcctccagtgccaaagaagccggcgaagggccccgcgccgttgatccgggagcgctcgctggagagctcgcagcgccaggaggcccgcaagcgcctgatggccgccaagcgcgcagcatcagtccgccagaactcggccaccgagagcgccgagagcatcgagatctacatccccgaggcgcagacccggctctgagcgcggccgacgaggaccgtcccgcatccctgccctcggccgtctccccgccccctccgtctctgagctcagtgaccgccaccgtcgtggcgtagttgtccacctcgcaggagccgtccccaggccgccccgcttcctggaccactttgcccatcttctccaccgagcttcgctccccagtcctgaagcctcatgcagacatccaaaccctttattttctgggccaagcaaacttgtgtagaaacgacacctgtaggtcactcaccctcctcagttctctcaagctagtgtgcccctagaactcagcaatataaaaccatagggtatttcagaaacccagtattacatagggtgatcctttgggacttaccgtcttccacgcgaaagaaacgagggctccgactccctttatttgcccccaaacggttatttttacaagcaaagagcgctttatttctaatctcagaaatcctaccatctcattggaatcaaagtgacagaggggaccaagctggcctagggttgggggcctgggtatgtaggagagaagggcggagcgcgcaggtgccctgcatctgtgccctcgcagctgtacaaactgcctcactggtacttcatcaaccgcagcttcaaatgtttcaatcagcagaagattgtaaattcgatctttcagggaaattaatctattctgaaaggcaataaaacgaagaaagttaaggcaaaaggaaacaccggtggtttaagatcctctataaggaatccatttatttatcttaagaaaatttagacctgaattttttttttaatcaactcttcttgtactctgtgtattataatggcatggcaatgattttcaaatgggarrktsggmasgarktggttctgttagtttcgtgttcatcckggwgggscmayttargatttcacacmcggaagaaagmttctgcttccgaggggcggcaaggccatttccagaggagagttcccgtactcccgccacactttgaatgctacacatccgtctagttcaacccagcccttcacatttcgggggcattttctccttcggtctcctctcactccagtacggagttcacctgttccccagcacaggatttttgttctatgtcaaatgaataaaataaaaggttttctaccccaaaaaaaaaaaaaaaaaaaaaaaaaaactctagcggccgctgccgcccatgggccgcacgccccggcgctgagcctcaaaatgcagcccacggccaccatggccacaggccg

SEQ ID NO: 3260 - DNA, 3718 bp, Rattus norvegicus
tttcgattcgcctgaacagatgcggatcgacgcacagacccaaggatctcaagcttgggagctggcggcagtgctgtgcgcgccgcctggcctgaggggtggccaccttgccatgtcgctccgcacccactgaactaggaaagcccaaggatgtccgctctgaggaaggcttccccaccatctgaggcccggccatagtactacgcgatctcacagcagcttgcgaaccccagcctgcaccttgccagccaaaatggggacggctcaggttctgcccggcattctgcagaagcattgctgcatcttaccagacaggaacacagagtctcagtgcaccctttgcggagagccagaagaggaggaaggaggagacttggcccagccgggcctcagcttcccgggcccggcagaagaggacatagaccagcagtactcatggtccccaacgcagcacttcagtgaagagaggtactcacccgcacccaggaacatgaaagggttaactggaagccggaaccagcctcagctgtgtgtgggtcacacctgtggcctgtcgcccactgacgagtgtgagcacccccatgatcacgtgcgtcatgggccagacgtgcggcaaccttatcttctcagcccagccgagagctgcccaatggaccaccaccgctgctcacccaggagctccgtccactcagagtgtatgatgatgcctgtgatgttgggcgaccatgtgtccagcagcaccttccccagaatgcactacagttcacactacgacacgagggatgactgtgccacgtcccacgcgagtaccaaggtaaaccgcattcccgccaaccttttagaccagtttgagaaacagctacccctgcaccgggatggtttccacacactgcagtaccacagggcctcagctgccacagaacagcgaaatgagagtccaggcagaatcaggcatctggtccactccgtccagaaactctttaccaagtctcattctttggagggatcgtccaaaagcaacatcaatgggaccaagagcgagggtcggatggatgaccaccaccagagtcacctttccaaacacagcaaacggagtaagagcaaggagcggaagccagagagcaagcacaagtctggtatgagcagctggtggagttccgatgacaacctggacagtgacagcacataccggacacccagcgtggcccaccgccaccacatggaccacatcccacactgctaccctgaggcactgcagagcccgtttggggacctctcactaaagacttccaaaagcaacagtgatgttaagtgttccgcctgtgaaggcttggccctcacgccagacaccaggtacatgaagcgtagctcctggtccacgctcacggtgagccaggctaaggaggcctaccgcaagagctccctgaacttggacaagcccctggtccacccagagatcaagccttccttgcagccatgccactacctccaggtgcctcaggacgattggggtgcataccctacaggcggcaaagaggaggagatcccctgccgtaggatgaggagcggcagctacataaaagccatgggtgacgaggagagtggggaatcagactccagccccaaaacatccccgacggtggccctccggccggagccgctgctgaagtccatcatacaaagaccacttggagaccaccaaacccagagctacctgcaagctgccactgaggtgcctgtcggtcacagcctggacccatcagtcaactacaactctccgaagttccggtccagaaaccagagctacatgcgggctgtgagcaccctgagccaagccagctgtgtgagccagatgagtgaagcggaagttaatgggcagttcgagtcagtgtgtgaatctgtcttcagcgaagtcgaatctcaggccatggatgcccttgaccttcccgggtgtttccgaacaaggagtcacagctaccttcgagccatccaagctggttactcccaagacgatgaatgtattcccgtgatgacaccgtccaacatgacgtcaaccatcaggtcaacagcagctgtctcctacacaaattataagaagacgcctcccccggtgcctccacggaccacctccaagcctctgatctctgtgacggcccagagcagcacggaatccacacaggatgcctaccaggacagccgtgcccagaggatgtccccatggccccaagacagccgtggcggcctctacaactccatggacagtctagacagcaacaaggccatgaatttggctctggagtcagcggcagctcagcgccacgcggctgacactcagagcagctccacaaggagcattgacaaggcggtcctggtatccaaggctgaagagctcctcaaaagccgttgctcctccatcggggtccaggattctgaattccctgatcatcaaccctacccaaggtcagatgtagagacagccacggattccgacacggagagcagaggcctacgggagtaccactctgtaggcgtgcaagtggaagacgaaaaacggcacggccgtttcaagcgttccaacagcgtcacagctgctgtgcaggctgacttagagttggagggcttccctgggcatgtcagcatggaggacaagggcctgcagttcggatcctccttccagcgacattcagagcccagtaccccgacccagtatggggcactgaggactgtgcggacgcagggcctcttcagttacagggaggactataggacacaggtggacacttctactctgccgccaccggatccctggctggagccatccctggacacagtggagaccgggaggatgtctccgtgccgaagagatggctcgtggtttctgaaattgctgcacacagagacgaagaagatggaaggctggtgcaaagagatggagagggaagcggaagaaaatgacctctccgaagaaattctaggaaagatcaggagtgctgtgggaagtgcccagctgctcatgtcccagaagttccagcagttttattggctttgtcagcagaacatggaccccagcgccatgccaagaccgacatcacaggatctagctggctactgggatatgctgcagctgtctgtggaagatgtcagcatgaagttcgatgaactgcaccagctgaagctcaatgactggaagataatggagtcgcccgagagaaaggaagaaaggaagatcccccctccaataccaaagaagccccccaaggggaaattccccatcacaagggaaaagtccctggacctgccagacagacagcgccaggaagcccggcgccggctcatggcagccaagagagctgcctcgttccgccagaactctgccacggagagggcagacagcatcgagatctacatccccgaggcccagactcggctctgaggaccagaggtggccacacgcacctggttttgttctttttcacaaaatgcttgtacagtttattgcctacctggtagtttctgtctcaccctccaccggattcgcccttgccgtgctctctgcactgtagacagtggacgctccaattcctagtttgctgagctcgagctcctggcaagactgactctgaaggacatcgggctccgaggaacaggcctggtgagccctgacgtacgtccctgttctcagaagggccgccaagtggcctcttgaaaatggacccta

SEQ ID NO: 3261 - DNA, 3298 bp, Rattus norvegicus
gcggccgctcagcactcgctcggggctccgcagccggcgcagcccctccgccgggggctccgcagtgccgggtccgggagcccgcactcgctcccgcagccgcagcgcccccggcccgggccgccggcaccatgtaaccccgaccggagcccgaccgggccaggagccagtggtcctgcgcctgctgaagttagrattctgcctggtggyggggatcctgacatcawggatgggacgccccggatggrggttcctggggcctggsccccaacagtatgaagagcctttactgaggscatgaggggttaccatggcgaccgaggcagccatccccgcccagcccgctttgctgaccaacagcatatggacgtgggcccagctgccagggccccgtacctgctgggctccagggaggccttctccaccgagccccgcttctgtgccccgagagctggcctgggacacctttctccagaagggcccctgagcctgagtgagggtccatcatctgtaggccccgaaggaagcccagggggggtgggggctgggggaagcagcagtaccttccccaggatgtacccgggccagggccccttcgacacctgtgaagactgtgtgggccacccacagggcaagggtgccacccgcctgcttcccacattcctggatcagtttgaaaagcagttgccagttcaacaagatggcttccacacactcccataccagcgaggtccagcagggcctggtcctggacctggatctggcgctgcccctgaggctcgcagcgagagtcctagccgcatccggcacctggttcactctgtgcagaagctctttgccaagtcccactctctggaggcacctgggaagcgagactataatgggcctaaggccgagggaagaagtagctctgggggagacagctactctggtccaggctcaggaggcccccccacctcccaccaccaccatcaccaccaccaccatcaccaccaccagtcccgccatggcaaacggagcaagagcaaggaccgcaagggggatgggcgacaccagaccaaggccacaggctggtggagctctgatgacaatttggacagtgacagtggctttctgggtgggaggccccctggagagcccggaggtcccttctgcctggatgctccagatgggtcctaccgggacttgagcttcaaggggcgttcgggcgggtcagaaggccgctgccttgcctgcactggcatgtccatgtccctggatggacagtcagtcaagcgaagtgcctggcataccatgatggtcagccagggccgggatggatacccaggggccgggccaggcaaggggctcctgggtccagagaccaaggccaaagccaggacttatcactatttgcaggtgccgcaagatgactgggggggttaccccacgggtggcaaggatggggagatcccctgccgcaggatgcggagcggcagctacatcaaagccatgggggacgaggagagcggagattcagatggtagccccaagacgtctcccaaagcacttgcccgacgctttgcctcccgccgttcctccagcgtggacacagccaggatcaactgctgtgtcccaccccggatccatccccggagttccatccctggctacagccgttcccttacaactggacagctaagcgaagagtttaaccagcagctggaggccgtgtgcgggtccgtgtttggggagcttgagtcccaggccgtggacgccctggacctgcccggctgtttccgcatgcggagccacagctacctccgggccatccaggccggctgctctcaagacgacgactgcctacccctccttgctgcccctgcctctgtctcagggaggcccggctcctccttcaacttcagaaaggccccgccccctatcccgccgggaagccaggccccaccccgcatctccatcaccgcccagagcagcaccgactctgcccacgagagcttcactgcagcagagggcccggcccggcgctgcagctccgcggacggactggacggccccaccatgggcgcacgcaccctcgagttggcaccggtgccaccccgggccagccccaagccccccacactcatcatcaagaccattcctggccgggaggagctgcggagcctggcgcgacagcggaagtggcggccgtccattggggtgcaggtggagacaatctcagactcggacaccgagaacaggagccgaagagagttccactccattggcgttcaggtggaagaggacaagaggcgggcgaggttcaagcgctccaacagtgtgacagccggtgtgcaggcagacctggaactggagggcctggctggcctggccactgtggccacagaagacaaagccctgcagttcggacgtcccttccagaggcaagcctctgagccccagcccggaccccgggcccccacctactcagtcttccgcacggtccacacgcagggccagtgggcctaccgcgagggctacccactgccgtatgagccgccggccaccgatgggtcgcctggccctccccctgtccccgcccccggccccgggtccggccgccgtgattcctggatggagcggggttcgcgtagcctccccgactcaggccgcacgtccccctgcccacgggatggcgagtggttcatcaagatgctgcgggcagaggtggagaaactggaacactggtgccagcagatggagcgggaggcggaggactatgagctgccggaggagatcttagagaagattcgaagcgccgtgggcagcacacaacttctcctgtctcagaaggtccagcagttcttcaggctgtgtcagcaaagcttggaccccactgcgttccctgtgcccaccttccaggacctggccggtttctgggacctcctgcagctctccaytgaggacgtgaccctcaagttcctggagctacaacaactcaaggccaacagctggaaactcctggagcctaaggaggagaagaaggtccctccgccgataccaaagaagccctcgcgggggcggggcgtgccggtgaaggagcgctccctggactcggtggaccggcagcggcaggaagcgcgcaagcggctcctggcggccaagcgcgccgcctcgttccgccacagttcggctactgagagcgcggacagcatcgagatctacatccccgaggcccagaccaggctgtgacccgcccgggccgccaagcccgacccgggcccgcggttttctacccgtactgtacacccagcgtcga

SEQ ID NO: 3262 - DNA, 3389 bp, Rattus norvegicus
gaattcggcacgagcggcagcgtgctggagggatgtgtgtcgcagtcctcagtcccacacccgcttccgaggtgtcatctgcagcatacttgccggctaccatttttcctgtgcacgcgtctccctggttggacagctgctgcctgggacaggtgacaccagtgcccaactagggcaaaggcccccgccccgtgggccaggatcatgaaaggcctcggtgacagccgcccccgccacctctccgacagcctggacccacctcatgagcccctctttgccgggcctgaccgcaacccctacctgctgtcgcccaccgaggcctttgcccgggaagcccgtttccctgggcaaaacacactgccgggggatgggctcttcccactcaacaaccagctgcccccaccaagcagcacctttccccggatccactataactcccactttgaggtgcccgaggaaagtccgttccccagccatgcccaagccaccaagatcaaccggctgcctgccaacctcctggaccagtttgagaaacaactgcctatccaccgggatggtttcagcaccctccagttcccccggggcgaggccaaggcccggggtgagagtcctggccgcattcgccacctggtccactccgtccagcgtctcttcttcactaaggcaccctcgatggagggcaccacgggcaaggtgggtggcaacggcggcaagaaaggtgtcctggaggacgggaaaggccggagggccaaaagcaaggaacgggccaaggctggggagcccaaacggcgaagccgctccaacatctcgggctggtggagttccgatgacaacctggacggtgagggtggtgccttccgcagcggccctgcctcggggctgatgactctgggccgccagccagaacgtacccagccccgctacttcatgcacgcctacaacaccatcagcggacacatgctcaaaaccaccaagaacactaccaccgagctgactgccccaccacccccgcctgctccccctgctacctgtcccagccttggagtgggcactgacaccaactatgtcaaacgtggttcatggtccactctgaccctcagccatgcccacgaggtctgccagaagacctcagccactttggataagagcctgctgaagtccaaatcctgtcaccagggtttggcctaccattacttgcaggtgcccggcggagggggagagtggagcaccacgctgctgtcccctcgagatatggatagcaccgctgaggggccgatcccgtgccggcgcatgcgcagtggcagctatatcaaggccatgggcgacgaagacagtgatgagtctggaggtggtagccccaagccttctcccaagactgcggcacggcgtcagagctatctgagggccacgcagcagtccctgggagagcagagcaacccccgcaggagcttggaccgcttggattcagtggacatgccgctgccgtccaagtaccccagctgggaagaggactacaaccccatcagtgacagcctcaatgactccggctgtatcagccaggtttttggacaggcttccctgatccctcagttgtttggccatgatcaacaggtccgggaggcagacctgagtgaccagtatgaggcagcctgtgagtcggcctgcagtgaggctgagtcgacagccgcagaggcgctcgacttgtcgctgcccagctacttccgctcacgcagccacagctacctgcgagccatccaggcgggctgctcgcaggaggaggacagtgtctccctgcagtccctctccccaccgcccagcaccggcagcctcagcaacagccgtacacttccaagttcatcatgcctagtggcatataagaagaccccaccaccggtccctccacgtaccacatcgaaaccgttcatctcagttaccgttcagagcagtactgagtctgctcaggacacctacctggacagtcaagaccacaagagtgaagtgacaagccagtcgggcttgagtaactcatcagacagcctggacagcagwrsccggccacccagtgtgacacggggtggaattacgccaggccctgaggctccagagccaccccctaagcatgcagctctgaagagtgaacacgggacactgacgagctctgagtcccactccgaggccgtccccaaaaggaaactgtcatcaataggaatacaagttgactgcattcagccagtgccaaaagaggagcccagtcccgctaccaaattccagtccatcggggttcaggtagaggacgactggcgaagcagcgccccctctcacagcatgtcctcccgtcgggacactgactccgatacccaggacgccaatgactccagttgtaagtcatctgagaggagtctcccagactgtacctcacaccccaattccatcagcattgatgctggcccccgacaggcccccaagattgcccagatcaagcgcaacctctcctatggagacaacagcgaccctgccctggaggcatcttcgctgcccccacccgacccttggmtggagacttcctccagctccccagcagagccagctcagccaggggcctgccgcagggatggctactggttcctgmwgctscktcaggctgaaacggagaggctggaaggmtggtgctgtcagatggacaaggagaccaaagagaacaacctctctgaagaagtcttaggaaaagttytcagtgctgtgggcagcgcccagctcctgatgtcccagaaattccaacagttccgtggcmtbkgtgagcagaacttgaaccctgatkccaacccccgtccgacagcccaggacytggcagggttytgggacctgctgcwkckgymcrwkgaggacatcagcatgaagttcgatgagctytaccmcctcaaggccaacagytggcagytggtgsmgmmccmygmsmasakgaaggaaragaagaawccmcccccyccagtcccgaagaagccagccrrmwcsarggcggcagtgagccgcgacaaggcctcagatgcgggggacaagcagcggcaggagsccagaaagagactcytggccsccaagcgggcagcatytgtgcggcagaactcggccacagagagtgcagacagcatcgagatttatgtccctgaggcccagaccaggctytaaggccacaaaggagaaagcactcattttaaatcattaaaaactcaatgcaaacggaamarmrwwwmwmammmtttggtatggttattatctctagagaccctgagccaactttccaattgacacgtacaagggctcacaaggtggcttttctskcgtsccsmawkctttaggttatgaagacttgactcaaaaaaaaaaaaaaaaaa

SEQ ID NO: 3263 - DNA, 4592 bp, Rattus norvegicus
agacagaggcgacagaaactctgcagccagctcttgcccccgaggagctcaggttcctgcaggagtcattttagcttagtcttctgaaggacacagataccatggaagagaacacgtttggggttcagcagatccaacccaatgtaatttctgttcgtctcttcaaacgcaaagtgggaggtctgggcttcctggtgaaggaacgggtcagcaagcctcccgtgatcatctcagacctgattcgaggaggtgctgcggagcagagcggccttatccaagctggagacatcattctcgcagtcaacgatcggcccttggtagacctcagctatgacagtgccctggaggttctcaggggcattgcctctgagacccacgtggtcctcattctgaggggccctgagggcttcactacacatctggagaccaccttcacaggggatggaacccccaagaccatccgggtgacccagcccctcggtcctcccaccaaagccgtcgatctgtctcaccagccttcagccagcaaagaccagtcattagcagtagacagagtcacaggtctgggtaatggccctcagcatgcccaaggccatgggcagggagctggctcagtctcccaagctaatggtgtggccattgaccccacgatgaaaagcaccaaggccaacctccaggacatcggggaacatgatgaactgctcaaagagatagaacctgtgctgagcatcctcaacagtgggagcaaagccaccaacagagggggaccagccaaagcagagatgaaagacacaggaatccaggtggacagagacctcgatggcaaatcgcacaaagctccgcccctgggcggggacaatgaccgcgtcttcaatgacctgtgggggaaggacaacgttcctgtggtccttaacaacccgtattcagagaaggaacagtcccctacctcggggaaacagtctcccaccaagaacggcagcccttccaggtgcccccgtttcctcaaggtcaagaactgggagacggacgtggtcctcaccgacaccctgcacctgaagagcacactggaaacggggtgcacagagcacatttgcatgggctcgatcatgctgccttcccagcacacgcggaagccagaagatgtccgcacaaaggaccagctcttccctctagccaaagaatttctcgaccaatactactcatccattaagagatttggctccaaggcccacatggacaggctggaggaggtgaacaaggagattgaaagcaccagcacctaccagctcaaggacaccgagctcatctatggcgccaagcatgcctggcggaacgcctctcgatgtgtgggcaggatccagtggtccaagctgcaggtgttcgatgcccgagactgcaccacagcccacggcatgttcaactacatctgtaaccatgtcaagtatgccaccaacaaagggaatctcaggtcggccatcacgatattccctcagaggactgacggcaaacatgacttccgagtgtggaactcgcagctcatccgctacgcgggctacaagcagccagatggctctaccttgggggatccagccaatgtgcagttcacggagatctgtatacagcagggctggaaagccccaagaggccgcttcgacgtgctgcctctcctgcttcaggccaatggcaatgaccctgagctcttccagatccccccagagctggtgctggaagtgcccatcaggcaccccaagttcgactggtttaaggacctggggctcaaatggtatggcctccccgctgtgtccaacatgctgctggagatcgggggcctggagttcagcgcctgtcccttcagcggctggtacatgggcacagagatcggcgtccgtgactactgtgacaactctcgatacaacatcctggaggaagtagccaagaagatggatttggacatgaggaagacctcgtccctctggaaggaccaagcactggtggagatcaacattgctgttctatatagcttccagagtgacaaggtgaccatcgttgaccaccactctgccacggagtccttcatcaaacacatggagaatgaataccgctgcagagggggctgccccgccgactgggtgtggattgtgcctcccatgtcgggcagcatcacccctgtcttccaccaggagatgctcaactatagactcaccccgtcctttgaataccagcctgatccatggaacacccacgtgtggaagggcaccaacgggacccccacgaagcggcgagctatcggctttaagaaattggcagaggccgtcaagttctcagccaagctaatggggcaggccatggccaagagggtcaaggcgaccattctctacgccacagagacaggcaaatcacaagcctatgccaagaccctgtgtgagatcttcaagcacgccttcgatgccaaggcaatgtccatggaggagtatgacatcgtgcacctggagcacgaagccctggtcttggtggtcaccagcacctttggcaatggagacccccctgagaacggggagaaattcggctgtgctttaatggagatgaggcaccccaactctgtgcaggaggagagaaagtacccggaacccttgcgtttctttccccgtaaagggccttccctctcccatgttgactctgaagcccacagtctggttgctgcccgtgacagccaacacaggagctacaaggtccgattcaacagcgtctcctcctattctgactcccgaaagtcatcgggcgacggacccgacctcagagacaactttgaaagtactggacccctggccaatgtgaggttctcagtgttcggcctcggctctcgggcgtacccccacttctgtgcctttgggcatgcggtggacaccctcctggaggaactgggaggggagaggattctgaagatgagggagggggatgagctttgcggacaggaagaagctttcaggacctgggccaagaaagtcttcaaggcagcctgtgatgtgttctgcgtgggggatgacgtcaacatcgagaaggcgaacaactccctcattagcaatgaccgaagctggaagaggaacaagttccgcctcacgtatgtggcggaagctccagatctgacccaaggtctttccaatgttcacaaaaaacgagtctcggctgctcgactcctcagccgccaaaacctgcaaagccctaagtccagccgatcgaccatcttcgtgcgtctccacaccaacgggaatcaggagctgcagtaccagccaggggaccacctgggtgtcttccccggcaaccacgaggacctcgtgaatgcactcattgaacggctggaggatgcaccgcctgccaaccacgtggtgaaggtggagatgctggaggagaggaacactgctctgggtgtcatcagtaattggaaggatgaatctcgcctcccaccctgcaccatcttccaggccttcaagtactacctggacatcaccacgccgcccacgcccctgcagctgcagcagttcgcctctctggccactaatgagaaagagaagcagcggttgctggtcctcagcaaggggctccaggaatatgaggagtggaagtggggcaagaaccccacaatggtggaggtgctggaggagttcccgtccatccagatgccggctacacttctcctcactcagctgtcgctgctgcagcctcgctactactccatcagctcctctccagacatgtaccccgacgaggtgcacctcactgtggccatcgtctcctaccacacccgagacggagaaggaccagtccaccacggggtgtgctcctcctggctcaacagaatacaggctgacgatgtagtcccctgcttcgtgagaggtgcccctagcttccacctgcctcgaaacccccaggtgccttgcatcctggttggcccaggcactggcatcgcacccttccgaagcttctggcaacagcgacaatttgacatccaacacaaaggaatgaatccgtgccccatggttctggtcttcgggtgtcgacaatccaagatagatcatatctacagagaggagaccctgcaggccaagaacaagggcgtcttcagagagctgtacactgyctattcccgggaaccggacaggccaaagaaatatgtacaggacgtgctgcaggaacagctggctgagtctgtgtaccgcgccctgaaggagcaaggaggccacatttatgtctgtggggacgttaccatggccgccgatgtcctcaaagccatccagcgcataatgacccagcaggggaaactctcagaggaggacgctggtgtattcatcagcaggctgagggatgacaaccggtaccacgaggacatctttggagtcaccctcagaacgtatgaagtgaccaaccgccttagatctgagtccatcgccttcatcgaagagagcaaaaaagacgcagatgaggttttcagctcctaactggatcctcctgcccccgtgcgtgcgatgtggcggctsccccaagtgcccaagtaagggcggccgcaggttgactaaattcggacacacacggctgaa

SEQ ID NO: 3264 - DNA, 1640 bp, Rattus norvegicus
cccgggggagccactagttctagatgcatgctcgagcggccgccagtgtgatggatatctgcagaattcggcttctactactactagaccacgcgtcgactagtacgggggggggggggaggattcgaatccagctgctgcaggaagatgaactccacccaccaccatggcatgtatacttccctccacctctggaaccgcagcagccacgggctgcacggcaatgccagcgagtctctggggaaggggcactcagacggaggatgctatgagcaactttttgtctcccccgaggtgtttgtgactctgggtgtcataagcctgttggagaacattctagtgatcgtggcgatagccaagaacaagaacctgcactcacccatgtactttttcatctgtagtctggctgtggcggacatgctggtgagcgtttcgaacgggtcagaaaccatcgtcatcaccctgctaaacagtacggacacggacgcccagagcttcaccgtgaatattgataatgtcattgactctgtgatctgtagctccttgctcgcatccatttgcagcctgctttccattgcagtggacaggtatttcactatcttttacgcgctccagtaccataacattatgacggttaggcgggtcgggatcatcatcagttgtatctgggcagcttgcacagtatcgggcgttctttttatcatttactcggacagcagcgctgtcatcatctgcctcattaccatgttcttcaccatgctggttctcatggcctctctctatgtccacatgttcctgatggcgaggcttcacattaagaggatcgctgtcctcccgggcacgggtaccatccgacagggtgccaacatgaagggcgcaattaccttgaccattctgattggagtgtttgttgtctgctgggccccgtttttcctccatttactgttctacatctcttgtcctcagaatccatactgcgtgtgcttcatgtctcattttaacttgtatctcatactgatcatgtgtaacgctgtcatcgaccctctcatttatgccctgcggagtcaagaactgaggaaaaccttcaaagagatcatctgtttctaccccctgggaggcatctgtgagttacctggcaggtattaagtggggacagagtgcatactaggtagagacctgcagaatttgtcactcaggcacaacctgagcagtgtacttcccaacagctgcctctactgtatagtgctttggttggaaaatatctactgtataaaatgtaagtttatgacttttgacgtggggaaaaagtctcaacgtgttatgtttattgaccttactttttttgtgtgtaaactgcttatttatgttctacagcgtgggcgctatggagttccataaaagaaaaagacacccttwttaaaamwwwramarwrwwwctttccatgttatttatcaagagtcaacccttgttctttctgtggtagcagaaatcagagccttctgaaaagctgtttccattgcatcacccccacagcacagcagaagcctgattccactgtttatggggaaatatttaaacactggatgctcgatcatttaatgagtcagctctactcgtgaaatttcactcgtgccgaatt

SEQ ID NO: 3265 - DNA, 1427 bp, Rattus norvegicus
tgcttatgggggtcatctattccacacttgcaattgctcctgttcagtttgacagggagaaggtattccgtgtgaaactccaggatgaaaagcaagcaagtatcttgaagaacttgacccaaaccattgagcttgacttctggtatccagatgctatccatgatattgctgttaatatgactgtggatttccgagttactgagaaggaatctcagactatccagtctaccttggaacaacataaaatggactatgaaattctgataaatgacctacaagaagagatagacaaacagtttgatgtgaaagaggaaatcgcaggcaggcacagttatgcaaaatacaatgactggaacaagattgtttcttggactgaaaaaatggtagaaaaacatcctgaaatggtttcaaggattaaaattggatcaactgttgaagataatccattatatgttctcaagattgggagaaaagatggagaaagaaaggctatctttatggactgtggcatccatgctcgtgaatgggtttccccagctttctgtcagtggtttgtctatcaggcagccaagagttatggaaaaaataaaatcatgaccaaacttttggaccggatgaatttttatgttctgcccgtattcaatgtagatggatacatttggtcatggacaaaggatcgaatgtggagaaaaaaccgttccaagaacccaaattcaacctgcattggcactgacctcaacaggaacttcgatgtctcatgggactcttccccaaacaccgacaacccatgcctcagtgtctacaggggacctgcaccagagtccgagaaagagacaaaagctgtcactaacttcattcgaagtcatctgaactcaatcaaggcttatatcaccttccattcctactctcagatgctgttatttccttatggctacacaatcaaactgccacccaaccaccaggacctgctgaaggttgcgaggattgccactgatgttctctcaagtagatatgaaacccgttatatctacggcccaatagcatccacaatttacaagacatcaggttcttctttagactgggcttatgacctgggcatcaaacacacatttgcctttgagcttcgtgataaaggaaaatctggtttccttcttccagaatctcggataaagccaacatgtaaagaaaccatgctttctgtcaaatttattgccaagtatatcctcaagcatacttcctaataagttgcccttggtttgaaatgtgctaattaatccttgggtggagcctttccctggaaagacaaccttctgcatcacctggatccatcctgctcttattcatgaagtcctgcattattttctacttattcttatttacacccaatagccccacaacaataaagctttaagtaaatccaaaaaaaa

SEQ ID NO: 3266 - DNA, 4641 bp, Rattus norvegicus
gcggccgcgargaacggctccccgccgcagtccgcaggagccagtgttcgaacattcactccgctttattttctggtggagccagtagacacactgtcagttagaggctcttctgttatattgaattgctccgcatattctgagccttctccaaatattgaatggaagaaagatgggacttttttaaacttagtgtcagatgatcgccgccagcttctcccagatggatctctattcatcagcaatgtggtgcattccaaacacaataagcctgatgaaggtttctatcagtgtgtagccacggttgataatcttggractatcgtcagcagaacagccaagctcgcagtagcaggtcttccaagatttaccagccaaccagaaccttcctcaatctatgttkgraacagtggaattctgaattgtgaagttaatgcagatttggtcccatttgttakatgggaacagaacagacagccccttcttttggatgacaggattgtcaaacttccaagtggaacactggttatcagcaatgcgactgaargagacgagggactctamcgctgcattgttgaaagtggtgggccaccaaagtttagtgatgaagctgaattgaaagttcttcaagaatctgaggaaatgctagacttggtatttttgatgcgaccgtcttctatgatcaaagtcattggtcagagtgcagtgttgccatgtgttgcctcaggacttcctgctccartcattaggtggatgaagaatgaagacgtgcttgacacagaaagctctggaaggttggccttgctagcaggaggcagtttggagatcmstsrtgtcactgaggatgatgctgggacttatttctgtgtagctgataatggaaataagacaattgaagctcaggcagagcttaccgtgcaagtgcctcctgagttcttgaaacaacctgctaacatatacgctcgtgaatccatggatattgtattcgaatgtgaagtcactgggaagccagctccaactgtgaagtgggtcaagaatggggatgtagttatcccaagtgattactttaaaattgtaaaggaacataatcttcaagttttgggtctggtgaaatcagatgaagggttctatcaatgcattgctgagaatgatgttggaaatgcacaagctggagctcagctgataatccttgagcatgcaccagccacaacgggaccactaccttcagctcctcgagatgtcgtggcctccctggtctctactcgcttcattaaattgacatggcgtacacctgcatcagatcctcatggagacaatctcacctattctgtgttctacaccaaggaaggggttgctagggagcgtgttgagaataccagtcagccaggagagatgcaggtgactattcaaaacttaatgccagcaactgtttacatcttcaaagttatggctcaaaacaagcatggttctggagagagcwcagctcctctacgagtagaaacacagcctgaggttcagctccctggcccagcacctaatatccgagcttatgcaacatcacctacttctatcactgtcacatgggaaacaccattatctggcaatggggaaattcaaaattacaaattgtactacatggaaaaaggaacggataaagaacaggatgttgatgtttcaagtcactcctatactattaatggactgaagaaatacacggaatatagtttccgagtggtggcctacaataaacatggtcctggagtgtctacacaagatgttgctgttcgaacattatcagatgtgcccagtgctgctcctcagaatctgtccttagaagtgagaaattcaaagagtatagtgatccactggcagcccccttcctcagccacacaaaatgggcagattactggctacaagattcggtatcgaaaggcctcccgaaaaagtgatgtcactgagaccgtggtaactgggacacagctgtctcagctgattgaaggtcttgatcgggggacagaatataacttccgagtagctgctctcacagtcaatggtacaggtcccgcaactgattggctgtctgctgagacctttgaaagtgacctagatgaatctcgtgttcctgaagtgcctagctctcttcatgtccgtccacttgtcactagcattgtagtgagctggactcctccagagaaccagaacattgtggttcgagggtacgccattggttacggcattggcagccctcatgcccagaccatcaaagtggactacaaacagcgctattacaccatcgaaaacttggatccaagctctcattacgtgattaccttgaaagcatttaacaatgttggtgaaggcatccctctttatgagagtgctgtgaccagacctcacacagacacttctgaagttgatttatttgttattaatgctccatacactccagtgccagatcccactcccatgatgccaccagtgggagttcaggcttccattctgagtcacgacaccataagaattacctgggcagacaactccctgcccaaacaccagaagattacagactcccgctactacacagtccggtggaagaccaacatcccagcaaacaccaagtacaagaatgcaaacgcaacaacgttaagctatttggttactggtttaaagccaaacacactgtatgagttctctgtgatggtgmccaaaggcagaaggtcaagcacgtggagtatgacagctcatggtgctacctttgaattagttcctacttctccacctaaggatgtgacagttgtgmstaaagaaggaaaaccgagaacgataatagtgaactggcagcctccctctgaagctaatggcaagattacaggttacatcatctattacagcacagatgtgaatgcagagatccatgactgggtgattgaacctgttgtgggaaacaggctgactcaccagattcaagagttaacactcgacacaccatactacttcaaaatccaggcccggaactcaaagggcatggggcccatgtctgaagctgtgcagttcagaacacctaaagcggactcctctgataaaatgcctaatgaccaagccttaggatcagcagggaaaggaggccgactaccagacctaggatccgactacaaacctccaatgagtggcagcaacagcccccatgggagccccacctctcctctagacagcaatatgctgctggtcatcattgtctccatcggcgtcatcaccatcgtagtggttgtgatcattgctgtcttttgtacccggcgcaccacctctcaccagaagaagaaacgagctgcgtgcaaatcagtgaacggctcccataagtacaagggcaattgcaaagacgtgaagcctccggacctgtggatccatcatgagaggctggagttgaagcctattgacaagtctccagatccaaaccctgtcatgactgatactccaatccctcggaactctcaagatatcacaccagtcgacaattccatggatagcaatatccatcaaaggcggaattcatacagagggcatgagtcagaggacagcatgtctaccctggctggaaggaggggaatgagaccaaaaatgatgatgccctttgactctcagccacctcagcaatctgttcgaaatacccccagcacggacaccatgccagcatcctcgtctcaaacatgctgcactgatcatcaggatcctgaaggtgctactagctcttcttacttggccagctcccaggaggaagactcaggccagagtcttcccacagctcatgttcgcccttcccacccattgaagagcttcgccgtaccagcaatcccacccccgggacctcctatctatgatcctgcactgccaagcacaccattactgtcccagcaagctctcaaccatcaccttcactcagtgaaaacagcctccatcgggactttaggaaggagccggcctcctatgccagtggttgtaccgagtgcccctgaggtacaggaggccaccaggatgctggaagactccgagagtagctatgaaccagatgagctgaccaaagagatggcccacctggaaggactcatgaaggacctaaatgccatcacaacggcttgatgaccttcacctggacaggactccaagtctgagtctcgaagtcttggaactgaaccttgaaaacaaggaattgtacagagtacgagaggacagcacttgagagcaggagccagcaaaccagccagtgcctccatgtggggtcggctctgggcacagcacctgccttctggtcagcctggatcatgcttgtgtcgaggcagcttccctctgcctgctgatagcctgcaggactgggcactatgggcaagattttgtgtcagagaagaggcaagaagtacgactgcttttactttgtggtcagtggctgtgtctctgtgctgcaactgcatcacttttatggagtgtagacattggcattatgtacatttgtgtctatttatttacttaaacactatcagagccagtgatgtcctctgcagcagttgacacttgactgctgttcccagttccttacgaagtcatcgacagtgagtgttgacacatgcagcatggctgtctggttcgttc

SEQ ID NO: 3267 - DNA, 768 bp, Rattus norvegicus
gagaggcgcgtcgggggctccgccgctggctaggcgtgatgttgcacgtggagatgttgacgctgctctttctggtgctctggatgtgtgtgttcagccaggacccgggctccaaagtcgtcgccgaccgctacgccgtctactggaacagcagcaaccccagattccagaggggtgactaccacatcgatgtctgtatcaatgactacctggatgttttctgccctcactatgaggactctgtaccagaggataagactgagcgctatgtcctgtacatggtgaattttgatggctacagtgcctgcgaccacacatccaaagggttcaagagatgggaatgtaaccggcctcactctccaaacggaccgctgaagttctcggagaaattccagctcttcactcccttttctttaggatttgaattcaggccaggccgagagtatttctacatctcctctgcaatcccagacaatggaagaagatcctgcctaaagctcaaagtctttgtgaggccaacaaacagctgtatgaaaactataggtgttcgtgatcgtgttttcgatgttaacgacaaagtagaaaattcattagaaccagcagatgacaccgtacatgagtcagccgagccatcccgcggagagaacgcggcacaaacaccaaggatacccagccgccttttggcaatcctactgttcctcctggcgatgcttttgacattatagcacagtctcctcccgtcacctgtcacagaaaacatcagggtct

SEQ ID NO: 3268 - DNA, 2201 bp, Rattus norvegicus
gaattccggcacgaggcgggttgcagtatgagtcgccaatcggacctagtgaggagcttcttggagcagcaggaggcccgggaccaccggaagggggcaatcctcgcccgtgagttcagcgacattaaggcccgctcagtggcttggaagactgaaggtgtgtgctccactaaagccggcagtcagcagggaaactcaaagaagaaccgctacaaagacgtggtaccgtatgatgagacgagagtcatcctttccctgctccaggaggaaggacacggagattacattaatgccaacttcatccggggcacagatggaagccaggcctacattgcgacgcaaggacccctgcctcacactctgttggacttctggcgcctggtttgggagtttggaatcaaggtgatcttgatggcctgtcaggagacagaaaatggacggaggaagtgtgaacgctactgggcccaggagcgggagcctctacaggccgggcctttctgcatcaccctgacaaaggagacagcactgacttcggacatcactctcaggaccctccaggttacattccagaaggaatcccgtcctgtgcaccagctacagtacatgtcttggccggaccacggggttcccagcagttccgatcacattctcaccatggtggaggaggcccgttgcctccaaggacttggacctggacccctctgtgtccactgcagtgctggctgtggacgaacaggtgtcttgtgtgctgttgattacgtgaggcagttgcttctgactcagacaatcccacccaatttcagcctctttgaagtggtcctggagatgcggaaacagcgacctgcagcggtgcagacagaggagcagtacaggttcctgtaccacacagtggctcagctattctcccgcactctccagaacaacagtcccctctaccagaacctcaaggagaaccgcgctccaatctgcaaggactcctcgtccctcaggacctcctcagccctgcctgccacatcccgcccactgggtggcgttctcaggagcatctcggtgcctgggccaccgacccttcccatggctgacacttacgctgtggtgcagaagcgtggcgcttccggcagcacagggccgggcacgcgggcgcccaacagcacggacaccccgatctacagccaggtggctccacgtatccagcggcccgtgtcacacaccgaaaacgcgcaggggacaacggcactgggccgagttcctgcggatgaaaacccttccgggcctgatgcctatgaggaagtaacagatggagcgcagactggtgggctaggcttcaacttgcgcattggaagacctaaagggccacgggatcctccagcggagtggacacgggtgtaatgagtgctgtaccagttccagcctgtcactcagtggtggctgggcgactgcaacccccatgctgctgtgtgctgtcttatgtatgagtgggactcatgggcctgaatcaaaataaaagtttctcagggtagaaaaaaacaaatagggactttggccagtggttatagcagtcaaagccaggggctaggaggggtaagtgggggaggtgswsgmdskactctgagaaagtttaggaaagcasatcaagagtragcatcgccactyttytccccatacacctaytggaaagtgcaccccagacagagtcctaacttgacagtgcacctcagacaggtssctacctggatggacatgctgsccytacagctagakacatgtctaawtagatcctcatgtaaacttgcaatgagctagaaagatctccgtctggtcagggaaatggatcacctagtcaggtaaatagtgtgccatccagaagacagaactgcaagataccgtctttctcaaaatggaagaaaatagatcctcaagaataaatgtatgtacaatgctmtacgccckgatcctgccctgcctcactgccataatgtcacaaacaagtcagggtctatatgacagttgttmmtctagtcagtcctgactgtggcctctgcaggctcagatagtgccttctgcagactcttggaatgcccgtcttgaacttgatgaaagcttctaccgggaacttgyaaacatcattaaaattattaatgtagaattcaawmwagwgtgggtcamaawmwmraawraawwmrwaaaaaaaaaaaaaaaaa

SEQ ID NO: 3269 - DNA, 1929 bp, Rattus norvegicus
gggaggccccgctgccactagagccaaccgcgcacttccgaaggtgtcgcggctggcctcccctcccgccgccccgggaacttcaaagcggcccgcgctgcgtgccgctctgggaccccgaagccttgcaccgccgcggggtggccatgaccccagcrmgccgctccgcactgagcctggccctcctgctggtggcactggcctccgaccttgcggcaggactgaagtgtgtgtgtcttttgtgtgattcctcaaactttacctgccaaaccgaaggagcatgctgggcctctgtcatgctaaccaacgggaaagaacaggtgakcaaatcgtgcgtgtccctcccggaactaaatgctcaggtcttctgtcacagttccaacaacgtgaccaagaccgaatgttgcttcacagacttctgcaacaacatcactcwgcaccttcccacagcatctccagatgcccstagacttggccccacagagctgacrsttgttatcactrtacctgtttgcctcctgtccatcgcagccatgctaacgatatgggcctgccaggaccgccagtgcacatacaggaagaccaagagacacaatgtggaggaaccactggcagagtacagccttgtcaatgctggaaaaaccctcaaagatctgatttatgatgccactgcctcgggmtcaggatctggccygcctctwwtggttcaaagaaccatcgcaaggacaattgtacttcaagaaatcgtaggaaaaggtcggtttggggaagtgtggcacggaagatggtgtggagaagatgtggctgtgaaratattctcctccagagatgagagatcktggttccgtgaggcagaaatttatcagacggtaatgctgagacatgagaawawwmwmgrtttcatcgcggccgacaacaaagataatggaacctggactcagctttggcttgtgtcagagtatcacgagcagggctccttatatgactatttgaatagaaacatagtgaccgtggctggaatggtcaagttggcgctttcaatagcgagtggtctggctcacctacacatggagatcgtgggcactcaaggtaagcctgctattgctcaccgagatataaagtcaaagaatatcttagtcaaaaagtgtgacacttgtgccatagctgacttagggctggctgtgaaacatgattctatcatgaacactatagatataccccagaatcctaaagtgggaaccaagaggtayatggcycccgaawtscttgatgatacaatgaacgtcaacatctttgagtccttcaagcgagctgacatctattcggtggggctggtttactgggaaatagctcgaaggtgttcagttggaggacttgttgaagagtaccagttgccttattatgacatggtgccttcagatccttccatagaggaaatgaggaaggtcgtttgtgatcagaaactscgaccaaatctcccaaaccagtggcaaagctgtgaggcgctccgggtcatgggaagaataatgygtgagtgctggtatgccaacggggcagctcgcctgaccgccctgcgcgtgaagaagaccatttctcagctgtgtgtcaaggaagactgtaaggcctaaggcgcatacaggcgacgggaaagccctcaccrctctctttcatgtctcctgctttgtgtaaatgttttcgtttcttttytgctgtgttttgttttagttctacctcaaagatgattcactacagtgttgaagtgtccaaaggcagcatgaaaagatarctytaagcatgggcaggtcttgactttcccagtttccatgttgtccgtacttttatttttaaaggtgacactattcatttttctttttatttaaggaggaagatgttatargmtacwtmcaatagtaaaaaaaaaaaaaaaaa

SEQ ID NO: 3270 - DNA, 4643 bp, Rattus norvegicus
ccacctcagcgagcctgggcgcaggagaacccacagcccggtggcctgcgccccgccgccccgcgcacagaccgcaccctcgcctcctttaaagctcggggtgcccccagcacccccccacggccccaccccaccgcgagccccgaccctcatgcatatgcaggtgcgcgggtgacgaatgggcgagcgagctgtcagtctcgtcccgaacttgttggctgcggtgccgggagcgcgggcccagagccgaggccaggacccgccgccgccgtcgccgccgccgccgccgccgccgggtgggagccgtgccgccgccggagagcgtgcagtaagccggagccgccgcctcccctgcgcgcgcgccgacgcagccgcggcactgctcgaccccgcccgcgccgcctgtgccggcgccgccgcctgtgcgccgccgggctcggagggcgggcgggcgctggaggccggcgcggcggctatagcgggcgcgggcggcggcggcggcggcggggccgcggcggggtcgaggcggcgatgcgggcacgcggctggggacgcctgcctcggcggctgctgctgctgctggttctatgcgtgcaggtgagcggggcgcgcggcggcgacgggcgcggacggggcgcaccgggccgggccgctcctccgggccaggcggcgcacaagcggccgcggtccggagccttaggaacggcgcgagggtgggggcggggtggagtcggcgaccccggcccgcgcctccctgcactctgagctgccttatttttaggcgacgcggcccatgggctatttcgagctgcagctgagcgcgctgcggaacgtgaacggggagctgctgagcggcgcctgctgtgacggcgacggccggacgacgcgcgcggggggctgcggccgcgacgagtgcgacacgtacgtgcgcgtgtgccttaaggagtaccaggccaaggtgacgcccacggggccctgcagctacggctacggcgccacgcccgtgctgggtrgcaactccttctacctgccgccggcgggcgctgcgggagaccgagcgcgcgcgcggtctcggaccggcggccaccaggacccgggcctcgtcgtcattccctttcagttcgcctggccgcgtwcktkcrccctcatcgtggaggcctgggattgggacaatgacaccacaccagatgaggarctgctgattgagcgggtgtcccatgctggcatgatcaaccctgaggaccgctggaagagcctgcacttcagcggccacgtggcacacctggagctgcagatccgagtgcgctgtgacgagaactactacagtgccacctgcaacaagttctgccggccccggaacgacttcttcssycrykmcamytktgrccagtacggcaacaaggcctgcatggatggctggatgggcaaggagtgcaaagaagccgtgtgtaaacaaggatgtaatttgctccacgggggatgcactgtgcctggggagtgcaggtgcagctatggctggcagggcaagttctgtgatgaatgtgtcccctaccctggctgcgtgcatggcagctgtgtggagccctggcactgtgactgtgagaccaactggggtggcctgctctgtgacaaagacctgaactactgtggcagccaccacccctgtgtcaatggaggcacctgtatcaacgccgagcctgaccaatacctctgcgcctgcccagatggctacttgggcaagaactgcgaacgggctgagcacgcctgcgcctccaacccgtgtgccaacgggggctcttgccacgaagtgctgtctggctttgaatgccactgtccgtcgggatggagtggacccacctgtgcgcttgacatcgatgagtgtgcctctaatccgtgtgcggcgggtggcacctgcgtggatcaggtggacggcttcgagtgcatctgcccggagcagtgggtgggggctacctgccagctggacgccaatgagtgtgaagggaaaccgtgccttaatgctttttcttgcaaaaacctgattggcggctattactgtgattgcctcccgggctggaagggcgccaactgccacatcaatatcaacgattgccatgggcagtgtcagcatgggggcacctgcaaggacctggtaaatgggtaccagtgcgtatgcccacggggcttcggaggtcgtcactgcgaactagagtactacaagtgtgccassagsccctgccgtcggggtggcatctgtgaggacctggtggatggcttccgctgccactgcccacggggcctctctggtccgctctgtgaggtggacgtggatctctggtgcgaaccaaacccctgcctcaacggtgctcgctgctacaaccttgaggatgactactactgcgcctgcccagaagactttggcggcaagaactgctctgtgcccagggagacatgccctggtggggcctgtagagtgatcgatggctgtgggttcgaggcaggrtccagggcgcatggtgctgcgccctccggcgtgtgcggtcctcacgggcactgtgtcagcctgcctgggggaaacttctcctgcatctgtgacagcggcttcacgggcacctactgccatgagaacatcgacgactgcatgggtcagccctgccgcaacgggggcacgtgcattgatgaagtggactccttcgcgtgcttctgccccagtggctgggaaggagagctctgtgacatcaatcccaacgactgcctccccgacccctgccacagccgcggscgctgcyakgacctggtcaatgactyctactgtgkctgcgatgawggctggaaggrcaagacctgccactcacgcgagttccagtgtgacgcctacacctgcagcaacggtggcacatgctatgacagcggcgacaccttccgctgcgcgtgccccccaggctggaarggcagcacctkcacgatcgccaagaacagcagctgygtgcccaatccctgtgtgaatggaggcacctgtgtgggcagtggagactctttctcctgcatctgscgggatggstgggagggscgcacctgcacacacawcaccaatgactgcaaccctctgccctgctacaacggrggcatctgtgtggatggsgtcaactggktccgctgcsagtgtgcacctggctttgcgggwcctgactgccgtatcaacatcgatgagtgscagtcctcaccctgkgcctacggagccacgtgtgtagatgagatcaatgggtaccgctgcagctgcccaccaggacgttccggccccagatgccaggaagtggtcatattcacgaggccctgctggtcccggggcgtgtccttcccacatgggagttcctgggtagaagactgcaacagctgccgctgcctggatggccaccgggactgcagcaaggtgtggtgtggttggaagccttgtctgctgtcccctcagcccagtgctctgagtgcccagtgcccaccagggcagcagtgccgggagaaggccatgggtcagtgtctgcagcccccctgtgagaactggggggagtgtacagcagaggatcctctgccccccagcaccccctgtctgccacggaccactcatttggacaacaactgtgctcgcctcacactgcactttaaccgtgaccaagtgcctcagggcaccaccgtgggcgccatctgctctggaatccgagccctgcccgccacgagggcggcggcacgagaccgcctcctcctgctgctctgtgaccgcgcatcctcaggggccagtgccgtggaggtggctgtgtctttcagccctgcaagggacctgcccgacagcagcctgatccagagcacagcccatgccatcgtggctgccatcacccagagaggaaacagctcactgctgctggctgtcaccgaggtcaaggtggaaacagttgttatgggtggctcttccacaggtctgttggtacctgtgctgtgtagcgtgttcagtgtgctgtggcttgcctgtrtggttatctgcgtgtggtggacacggaagcgcaggaaagaacgtgagaggagccggctaccacgggacgagagcgccaacaaccagtgggctccgctcaatcccatccgcaaccccattgagcggccaggcagcagtggtctgggaaccgggggccacaaggacgtactctaccagtgcaagaacttcacaccgccgccccgcagggcaggcgaggcactgcmtgggccggccagccacggggctggtggggagkacgaggaggatgaggagctgagccgmggagatgggagactctccagaagcagagaagttcctctcacacaaattcaccaaagaccccagctgctccctgggaaggccagcctgctggctccggggcccaaagtggacaaccgcgccgtcagaagcaccaaggatgtgcgctgtgctggcagggagtagccrgcctccaggctggtacccagaacccttgccagcaccacgctgcctcccggaccataggaggccaaggccgtgtgcatagtttctttattttgtgtaaaaaacaaaaccaaaaacaaaaaamaaawrwttattttttacgtttctttaaccttgtataaattattcagtggctgtcaac

SEQ ID NO: 3271 - DNA, 1383 bp, Rattus norvegicus
attaggaagctaacattgatagaagttcaagttgaagccaaaggagtgaactccgggttgtcaaggcaacagaggccaatactatcccacaatatccacttgaatttggttactgaattctatttctctccttctaaccttgcacatagatcaaacaaacaatggccgaggctgagtatttcatctggattgctcctgagggtgactttgaggaagaatttggaaatatcacccgaatgctgcccactggagagtatttcagcccctgtaagagggttccaatgaccaacaggcaggctgtagttgtcttctatgcactggtgttccttcttagcttgctgggaaactcgctggtgatgctggtcatcttatacaggcgaaggacccgatccgtcaccgatgtctacgtgctgaacctagccattgctgatctactcttttcattgactctgcccttcttggctgtctccaaatggaagggctggatttttggcacacccctgtgcaagatggtctcactcctgaaggaagtcaacttcttcagtggtatcttgctgctggcctgcatcagtgtggatcgatacctggccatcgtccatgccacccgcacactgacccgaaagcgctacttggttaaattcgtatgcatgggcacctggggtctatccttggttctgtctctgccttttgccatcttccgccaggcatataaaccataccgttctggaacagtctgctatgaggtcctgggtgaagccacagcagatcttaggataacattgcgtggtctgtcccacatatttggcttcctcttgccgctgttcatcatgctggtctgctacgggctcacactgcgcacgctctttaaggcccacatgagacagaaacgccgggccatgtgggtgatctttgctgttgtgttggtcttcctgctctgttgtctgccctacaatctggttctgctctcggacactctcttaggagcccacttgattcaagatacttgcgagcgccgcaataacattgaccaggccttgtatattaccgagatcctgggcttttctcacagttgtcttaaccccgtcatctatgcctttgttggccaaagttttcgccatgaattcctcaagatccttgctaacctggttcacaaggaggttttgacacaccactctgcttcctttcgcacgtctctcaccactatctattaaacttctgagaattaccagagagtgatcgctctccctcaaagggaaggataactattgtgccaatgtgttgtgtgagtgtgtgtgtgtgtgtgtgtgtgtgtgtgtgtggtgtgtgttgtgtatgtgcgtgcatgtatgtgtgctgtgtgtatgtatgatggatgcatgtgtg

SEQ ID NO: 3272 - DNA, 1050 bp, Rattus norvegicus
  misc_feature (30)..(30): n is a, c, g, or t
  misc_feature (1039)..(1039): n is a, c, g, or t
  misc_feature (1045)..(1045): n is a, c, g, or t
  misc_feature (1048)..(1048): n is a, c, g, or t
agctgctctgctcggcctagcgcctgggcnaccccagccaggaggagtccgtttctggtagaagcctgtccagcctcaaggaacaatgacccagaagaccaccctagtgctcctcgccctggctgtcatcaccatcttcgctttggtttgcgtcttgctagctggcaggagcggagatgggggcagactgagccaacctcttcattgcccttccgttcttcctagcgtccagccccagacacactctggccagagccagccgtttgcagacctgagccctgaggagctgacagctgtgatgagctttctgatcaagcacctggggccagggctggtggatgcagcccaggctcgaccctcggacaactgtgtcttctcagtagagttgcagctgcctgccaaggctgcagccctggcccacctggacagaggggggcccccacccgtgcgggaggcactggccatcatcttctttggtggacaacccaagcctaatgtgagcgagttggtggtggggcccctgcctcacccctcatacatgcgggatgtgactgtggagcgtcatggcggccccctgccctattaccggcgtcctgtgctgaccagagagtatcaggatattcaggagatgatctttcacagagagctgccccaagcgtctggtctcctccatcactgttgcttctacaaacgccaaggacacaacctgctaaaaatgactacagccccccgtggtttgcaatcaggggaccgggccacctggtttggcatatattacaatctctcaggggctgggttttaccctcaccccattggcttagagcttctggtagatcacaaggccctggatcctgccctgtggaccatccagaaggtattctaccaaggccgttactatgagagtctgactcagctggaggacatgtttgaggctggcctggtgaatgtggttttggtcccagacaatggcacaggtgggtcctggtctctgaagtcttcagtgccaccaggccgagctcctcctctgcarttycayccngarggnccnmg

SEQ ID NO: 3273 - DNA, 5285 bp, Rattus norvegicus
gaattctcgcacgaggcgccggctcgccgcggcgctgggctaggaagcgacgggcgcttcgcggttcggagacgtccggcgggcctggcaggttcctcggagagtagattttatcaagattcctccctggaacgctggctccttgctcagtgccctgaagtctctctgcgatgaactgatacattggaaccatggtgcaaaagaagttctgccctcggttacttgactatctagtgatcgtaggggccaggcatccaagcagtgacagtgtggctcagactcctgaacttctgcggaggtacccactagaggaccacccggagtttcccctgcccccagatgtggtgttcttctgccagccagagggatgtctgagcgtgcggcaacggcgcatgagcctccgagatgatacctcttttgtcttcaccctaaccgataaggacactggagtcacccgttatggcatctgtgtcaacttctaccgttcctttcaaaagcgaatgccaaaggaaaaggcggaaggcggagcaggaccccgtgggaaggaaggagctcatgccccctgtgcctcagaagaggccgccaccgagagctcagagagtggctcaaccttgcagcctcctagtgctgactccactcctgacgtaaaccagtctcctcggggcaaacgtagggcaaaagcaggcaaccgctcccgaaacagtaccctgacatccctgtgtgtgcttagccactaccctttcttctctaccttcagagagtgtctgtatactctcaaacgtctggtagactgctgtagtgaacggctcctaggcaagaaaccgggcatccctcgaggtgtacaaagggacaccatgtggcgaatctttactggatcactgctagtggaggagaagtccagtgcccttctgcatgaccttcgagagatcgaggcctggatctatcggttgctacgctccccggtgcctgtctctgggcagaagcgagtggacattgaggtcctaccccaggaagtgcagcaggccctgacatttgctcttccagatccatcccggttcaccctagtagatttccctcttcaccttcccttggaacttctgggtgtagatgcttgtcttcaggtgctaacctgcatcctgttggagcacaaggtggtgctacagtctcgagactacaacgcactctccatgtctgtgatggcgtttgtggcaatgatctaccccctggagtacatgttccctgtcatcccgctgcttcccacctgcatggcttcggcagagcagctactcttggctccaaccccatatatcattggagtccctgccagctttttcctctataagctagacttcaaaatgcctgatgacgtgtggctggtggatctggacagcaacagggtgattgcccccaccaatgcagaagtgctacccatcctgccagaaccggaatcattagagctgaaaaaacacttaaagcaggctctagccagcatgagtctcaacacccagcccattcttaatctggagaaattccatgagggccaggagacaccacttctcttgggaaggttttctaatgaccttcagtctacaccttccactgaattcaacccactcatttatggcaatgatgtagattcagtcgatgttgcaacgagagtggccatggttcgtttcttcaactctgctaacgtgctgcagggctttcagatgcacacacgtaccctgcgactcttcccccggcccgtggttgccttccaagctggctcctttctggcctcacgcccccggcagaccccctttgctgagaaactggccaggactcaagccgtggagtactttggagaatggatcctgaacccttctaactatgccttccagcggattcacaacaatacgtttgatccagccctcattggtgacaagcctaagtggtacgctcaccagctgcagcccattcactatcgagtctatgacagcaattctcagctggctgaggccctgagtgtgccaccggagcgtgattctgagtctgaccccactgatgacagtggcagtgacagcatggactatgatgactcaagctcttcttactcctccctgggggacttcgtcagtgaaatgatgaagtgtgacatcaatggcgacactcccaatgtggatcctctgacgcatgcggccctgggagacgccagtgaagtggagattgatgagctgcagccccagaaggagggagaggagcctggcccagacagtgagaactctcaggagaaccttcccctgcgctccagctccagcaccactgccagcagtagccctagcaccatcgtccacggcgcccactctgaacctgctgattctacagaggtgggagataaggcagcaacaggcatctccaagcccctccctcctgtgcctcccagcatttgcaaatctactgtggacaggagacagacagagactggagaggggtcagtgtgccagcgaacctacgaccatccatattttgagccccaatatggctcccccgctgaggaagatgatgacgagcagggagagagctacacgccccggttcagccaacatgccagtggcagtcgggctcaaaagctgctgcggcccaacagcttgaagctggccagtgactcagacgcagagtcagactcccgagcaagctctcccaactccaccgtctctaacaacagcaccgagggcttcgggggcatcatgtcttttgctagcagcctgtatcggaaccatagtacaagcttcagcctttcaaacctcacactgcccaccaaaggtgcccgagagaagactacaccattccccagcctgaaaggaaacaggagggccttagtggaccagaaatcatctgtcattaaacacagcccaactgtgaaaagagaacctccatcaccgcagggccggtccagcaattctagcgagaaccaacagttcctgaaggaggtggtccacagtgtgctggatggccagggagtcggctggctcaacatgaaaaaggtgcgccggctgctggagagtgagcagctccgagtctttgtactgagcaagctgagtcgtgcagtgcagtcagaggatgatgcccgacaggatgtcatccaggatgtggagatcagtcggaaggtgtacaagggaatgctagacctcctcaagtgcacagtcctcagcctcgagcagtcctatgcccatgctggtctgggtggcatggccagcatctttgggcttttggagattgcccagacccattactatagtaaagaaccagacaaacgcaagagaagtccaacagagaatgtaaataccccagttggcaaggatcctggtctggctgggcggggggacccaaaggcaatggctcagctaagggtccctcagctgggtcctcgggcaccaagtgctacaggaaggggtcctaaagaactggacaccagaagtttaaaggaagagaattttgtagcgtctgtgggaccagaggtcatcaagcctgtctttgacctgggtgagactgaggagaaaaagtcccagatcagcgcagacagtggtgtgagcctggcatctgcttcccagaggactgatcaagactctgtcatcggtgtgagtccagctgttatgatccgaagctcaagtcaggattctgaagtgagtaacagttcaggagagaccctcggagcagacagtgacctgagcagcaatgcaggtgatgggccaggaggcgaaggcagtgcccacttggcaagttctcgggctactctgtctgacagtgaaattgaaaccaattctgctacaagcaccatctttggtaaagcccatagcttgaagccaaaggagaagccggctagtagtccagttcgctcttccgaagatgtaagccagcgagtctatctctatgagggactactaggaagggacaaaggatccatgtgggaccagttagaggatgctgctatggagaccttttctataagcaaagagcggtctactttatgggaccaaatgcagttctgggaagatgcgttcctagatgctgtgatgttggaaagagaaggaatgggtatggaccagggccctcaggaaatgatcgacaggtacctgtccctaggagagcatgaccggaagcgcctggaggatgatgaagatcgcttactggccacactcttacacaacctcatatcctatatgctcctgatgaaggtgaacaagaacgacatcaggaagaaagtacggcgcctaatgggaaagtcccacgttgggctggtgtacagtcaacaaatcaatgaggtgctcgatcagctgaccaacctgaatgggcgtgatctctccatccgatccagtggcagcaggcacatgaagaagcagacgttcgttgtgcacgcagggacggacacaaatggagatatctttttcatggaagtgtgtgacgactgtgtggtcttacgtagtaacatcgggacagtgtacgagcgctggtggtatgagaagcttatcaacatgacctactgtcccaagaccaaggtcctgtgcttatggcgtagaaatggctctgagacgcagctcaacaagttctataccaagaagtgtcgggagctgtactactgtgtgaaggacagcatggagcgtgcggctgcccggcaacaaagcatcaaacccgggcctgaactaggtggtgagttccctgtgcaggacatgaagactggagagggcggcttgcttcaggtcaccctggaagggatcaatctcaagttcatgcataaccaggttttcatagagctgaatcacattaaaaagtgcaatacagttcgaggcgtctttgtcctggaagaatttgttcctgaaattaaagaagtggtgagccacaagtacaagactccaatggcccacgagatctgctattctgtgttgtgtctcttctcgtatgtggccgcagttcgtagcagtgaagaagacctccgaaccccacctcggcctgtctctagctgatakagaggggttacacagctgggccagcccaggggtcacccctcacctcttgctgctcctaagcgctgaagctgcctcgactgagacagagactctgtgtgtgtgtgtgtgtgtgttctctgcaaggtgttctctgcaagctccttcctgcggttgagctggtttcgttttatgtctgagtgtgtccttgtgttcatctgtcatggggctaagctagtctcattaccttctcttcctacaatagcaractagcctactgtcccctcagggctccacctcgtgtcg

SEQ ID NO: 3274 - DNA, 1653 bp, Rattus norvegicus
ctgtttctgctacttgctctttgtttcaaactgccttggagagtttctcacagtaccgtgtgcttcttgctaacttccggtttaagctttagtcgttctctagtctcttcagttttcaccctgagcctcgacactggactactgaaatcgtgtagtgaacgttggatgtgtcccaaaaaggtaatgtggaacacagccgtgcactcggaattcatacatgatcacgtggattacggctttcaaaactgcaagagtaaattcaattggcatgtcatcaaggagaagcgggatgcttacgtgagccgcctgaacaacatctaccaaaacaatttaaccaagtcccacatcgaagtcatccacggctacgcaacatttcgagatggtccccagcccacagcggaagtcaacgggaagaagttcactgctccgcacatcctgatcgccacgggtggtgtgcccacggttcctcatgagaaccagatcccaggtgccagcctggggataaccagtgatgggttctttcagctggaagacttgcccagccgcagcgttattgtgggtgccggttacawwrscgtggagayygsgggcrkcckctcmgmmctgggctccmrgrckkcwskwatsrkcasgmrtgataaggtgcttagaagctttgattcactcatcagttccaactgcaccgaggagctggagaacgctggcggtgttgaggttctcacagttaagaagttctcacaggttaaggaagtaaagaagaccycatcgggcttggaactccatgtggttactgcacttcccggtaggaaacccaccgtgaccacgattccagatgtcgattgcctgctctgggccattggacgggacccaaaytctaagggcctgaatctaaataaactggggatwcagactgatgacaaaggccatatcctagtggacgagttccagaataccaatgtcaaaggcgtctatgccgtgggcgatgtctgtgggaaagcacttctcaccccagttgcgatcgctgctggccggaaactcgcccatagactttttgagggcaaagaagattccasgttggactatgacaacatmcctaccgtggtctyyagccacccgcctatcgggacagtggggctcactgaagatgaagccgtccataagtatggcaaagacaatgtgaaaatctactcgaccgccttcaccccgatgtatcacgctgtgaccacgaggaagacgaaatgcgtgatgaagatggtttgtgccaacaaagaggagaaggtggttggcatccatatgcaggggattggctgcgatgagatgcttcagggcttcgctgtagcagtgaaaatgggggccaccaaggccgacttcgacaatasggtcgccattcatcctacctcttcagargagctggtcacactkcgytgagagccccgggactcgtggctagcggtccgaccagtgggcctctgggaggaaccaatcaagtttacgtcctgcgccagctttatagatttctgtattttaatcaggaacttctggtggtgtaaatttctagttaagcaaaaaatcgaggtcttaagtgtctaatcataaggttgttttgttaatccggggttggttttcatgtgataatatttacactagttagca

SEQ ID NO: 3275 - DNA, 428 bp, Rattus norvegicus
ccgtggtacataatgctacagatgggatcaagggctccacagagagctgcaacaccaccacagaagacgaagatctcaaagctgccccgctccgcactgggaatggcagcttggtgcctgaaggacggagcccccgggacagaacagccccctctgcaggcatgcagccccagccttctctctgctcctcagccatgcgaaaacaggagatcattaagatcacagaacagctgatagaagccatcaacaatggggactttgaggcctacacgaagatttgtgacccaggcctcacttcctttgagccagaagcccttggtaacctcgtggaggggatggatttccataagttttactttgagaatctcctgtccaagaacagcaagcctatccacaccaccatcctaaacccacatgtccatgtcatc

SEQ ID NO: 3276 - DNA, 1426 bp, Rattus norvegicus
cacgggcatcaagaccagaggactccctaaaggctaactcattgtcttcatttccttggtgattgaaaacgcgtgatggtgagttcctcagagaagtgaaagtggcccagagggatycagtaattcctgttatcggccagctttataagtcagcgagccaggcgcctgtcttcatccggcctgaagtcccaagagtgcaaagatgtccctgtacccagcttccccatacctggcctccctgctactcttcatccttgcccttcatggtgccctgtccctgaggctctgctccttcaatgtgaggtcctttggagagagcaagaaggaaaaccacaatgccatggatatcattgtgaagatcatcaaacgctgcgacctcatactgctgatggaaatcaaggacagcaacaacaacatctgtcccatgctgatggagaagctgaatggaaactcacgaagaagcacgacatacaactacgtgattagctctcggcttggaagaaacacatatraagaacagtatgccttcctctacaaggagaagctggtgtctgtgaaggcaaaatacctctaccatgactatcaggatggagacacagacgtgttttccagggagccctttgtggtttggttccaggcgcccttcactgctgccaaggacttcgtgattgtccccttgcacacaactcctgaaacctccgttaaagagatagatgagctggctgacgtctacacggatgtgagaagacgatggaaggcagagaatttcatcttcatgggtgatttcaatgctggctgcagctacgtccccaagaaggcctggaagaacatccgtttgaggacagaccccaactttgtttggctgattggggaccaagaggacaccacggtcaagaagagcaccagctgtgcctatgacaggattgtgcttcgcggacaagagatagtcaactctgtggttccccgctccagtggcgtctttgactttcagaaagcttatgagttgtctgaagaggaggccctggatgtcagtgaccactttccagttgagttwaagctacagagttcaagagcyttcaccaacagccgaaaatctgtttctctaaagaaaargaaaaaaggcagtcgctcstaggtctcatgttgccattttcttttcttaaagtcgtcccttgcttccagataaaatggccytcgtgggtctcagctctctgcacaytcaggaattaagactggctaagctgttttcactgtccactmtggttaattttgcctggagccaagttgggaggagagccttctgttacatcaccctgaccacgggcaccytgcgaaccaccatgggtaacctgaagagacacaaagtctattccataataaatgcgtgtatttattacrccataaammmaaaaaaaaaaaaaaaaaa

SEQ ID NO: 3277 - DNA, 464 bp, Rattus norvegicus
  misc_feature (239)..(239): n is a, c, g, or t
  misc_feature (342)..(342): n is a, c, g, or t
  misc_feature (368)..(368): n is a, c, g, or t
  misc_feature (370)..(370): n is a, c, g, or t
  misc_feature (379)..(379): n is a, c, g, or t
  misc_feature (383)..(383): n is a, c, g, or t
  misc_feature (394)..(395): n is a, c, g, or t
  misc_feature (409)..(409): n is a, c, g, or t
  misc_feature (420)..(420): n is a, c, g, or t
  misc_feature (430)..(430): n is a, c, g, or t
  misc_feature (434)..(434): n is a, c, g, or t
  misc_feature (442)..(442): n is a, c, g, or t
  misc_feature (447)..(447): n is a, c, g, or t
cggagccgggcgcgcggactgcggacgcgggtcctgtgagagccgaagatggcagtgaatgtgtactcgacgtcagtcaccagtgataacctcagtcgacatgacatgctggcttggatcaatgaatctctgcagttgaatctgacaaagatagaacagctatgttcaggggctgcatactgtcagttcatggacatgctcttccccggctccattgccttgaagaaagtgaaattccnggctaagctagaacatgaatatatccagaacttcaaaatactacaagccggcttcaagaagatgggcttgacaaaataattcctgtggataaattagtaaaangaaaattcaggacattttgaattccntncatggttcngaantttttgatgcnnttttgattggaaanattttatcctntcccgccaanaagncaaaacgnatggncctccttgtcccccccc

SEQ ID NO: 3278 - DNA, 1690 bp, Rattus norvegicus
aattctctcttccgcaccctgggttctgtggatgaaacttgcctctgagaatcctgaacatggagaaatagagataaataccccagaagagggggagtaagtgttcacaaccttggtgggtttcgcctcatgtctgtccctccactttaagagatgccggtcacctgagggccacaaactgcgctctaagtaaccagcctgcctttctacccagatctttgtctccagaagtgagaagatggacaacacaacaaccacagaacctccaaagcagccctgcacccggaacaccctgatcacacagcagatcatccccatgttgtactgtgtggtcttcatcacaggggtcctcctcaacggaatatcgggatggatattcttttacgtgcccagctctaagagttttatcatctatctcaagaacatagttgtggctgactttctcatgggcctcactttccctttcaaagtcctcagcgactcaggcctcggtccctggcagctgaatgtgtttgtattcagggtgtctgccgtgatcttctacgtcaacatgtacgtcagcatcgcgttcttcgggctcatcagctttgacaggtactataaaatcgtgaagccccttctggtgtctatcgtccagtcagtgaactacagcaaagtgctgtccgtgcttgtgtgggtgctcatgcttctcctcgctgtccccaacatcattctgacaaaccagagtgtcaaggatgtcactaacatacagtgcatggaactcaaaaacgagctggggcggaagtggcacaaggcgtctaactatgtcttcgtgagcattttctggatcgtgttccttctgctgaccgtcttctacatggccataacgaggaagatcttcaagtctcacctcaagtccagaaagaattccatctccgtcaaaaggaagtccagccgcaatatattcagcattgtgctcgcatttgtcgcctgtttcrcgmskkamcamgttgcsaskwtcycmtrsrccmaswkycmswyksaargwcactacagcwsccaggccaaggagaccctgctctatacgaaagaattcaccctgctgctctcggctgccaatgtgtgtctggaccccatatctatttcttcttatgccagscryktagrgaagtcttgaataagaagttaagaatgtcactaacagtccagaatgacctagagacttccaaaaccagaaggggaaatatgattcaggaaagcacagatactttgmaattctcaccctttccaagtattatggaccttgttacacggtaattaagatgtatgaagtgaaaagcagrmhwgkryrrtaaawayswwagstaagytmymwtgtmmartraawgtmtamarswcgcagaaaagtataataaaaatgaaaggtaagttcccatgtaaagtgaaagtctacagcacgtcacatctttttagaaatcgaatggagaagtggcatgtgggtgctagtctgcgagttaccccaaaactaaactctctcttctattaacgggcttcttagaagacacccaccctttcagaagttcctcctgagtatccttctaagtaatgctcacctctgtttcatgctttgttctgtgtatgygccaataaacaagttgtctttaaaaccmmaaaaaaaaaaaaaaaaaaaagtactagtcgacgcgtggcc

SEQ ID NO: 3279 - DNA, 2500 bp, Rattus norvegicus
atgaagamarrtgattatcaayacgtggcaytcsytcrkammtatcmmsaacgtgkwwgyrycagstaycgaraaggaaattcgacgcatggaaaatggggcgtgcagctcattttctgacaatgacaatggctctctgtctgaagaatcagagaatgaggactctctctttagaagcaactcatacagaaggcgaggaccatcccagagggagcattacttgccaggcaccatggctcttttcaatgttaacaacagcagcaacaaagaccaagacccaaaggagaaaaagaaaaagaaaaaggaaaagaagagcaaggccgatgataaaaaggaaagtaaaaaggrcccagagaagaaaaaaaagaaggaaaaggaaaaagagaagaaaaaggaggagaaacccaargaaaagaaagaagrggagaaaaaagargtkgtkgttattgayccytcaggaaacatgtactacaactggctgttttgtatcactttacctgtgatgtacaactggacgatgatyattgcaagagcatgttttgatgaactccagtctgattacctagaatattggctcatttttgattacgtatcagatgtagtctaccttgctgatatgtttgtacggacaaggacaggttacctggaacaagggttgctagtgaargacraactgaaactcatagagaagtacaaagcaaacctgcagtttaaacttgacgttctgtcagtgataccgaccgacctgctgtatttcaagtttgggtggaactatccagaaatcaggttgaaccggctgttaagaatctctcggatgtttgagttcttccagaggacagagacaaggaccaactacccgaacatctttaggatctcaaaccttgtgatgtacattgtcatcatcatccactggaacgcgtgtgtgtactactccatctcaaaagctattggatttgggaatgacacatgggtctaccctgatgttaatgatcctgaatttggccgtttggctagaaaatacgtctacagcctttattggtctaccttgactttgacgaccattggagaaaccccaccccccgtgctggattccgagtatgtctttgtggtggtagacttcttaattggagttttaatttttgccaccattgtcggtaacataggctccatgatttccaatatgaatgcagcccgggcagaatttcaatcaagagttgatgctatcaaacagtacatgaattttcgaaatgtgagcaaagacatggaaaagagagttattaaatggtttgactacctgtggacyaacaaaaagacagtcgatgagagagaagttctgagatacctccctgacaaactcagggcagagattgccatcaatgttcacctagacacgttaaaaaaggttcgtatctttgctgactgtgaggctggtctgttggtggagttggtgttgaaattacaaccccaggtgtacagtcctggagattacatatgcaagaaaggggacattgggcgggagatgtacatcatcaaggaaggcaaactygctgtggtggcagacgacggaatyacacagtttgtggtgttgagtgacggcagctactttggcgagatcagcattcttaacatcaaaggcagcaaggctggcaaccgaagaacagccartattaagagcattggctactcggacctgttctgccyctcaaaggatgacctcatggaagctsttacagagtacccagatgccaaaactatgttggaggagaaagggaggcagatcttaatgaaagacggtctactggatataaacattgcgaatttgggcagtgaccctaaagacctggaagagaaggtcactcgaatggaggggtcagtggacctcctgcaaacacgatttgcccgaatcttggctgagtatgaatcgatgcagcagaaactcaagcaaagattaaccaaggttgagaaattcttgaaaccacttattgaaactgaattttcagcccttgaggaacccggaggagaaagtgaacccacagagtctckrcasgrskaaaaaaaacctggccaatagcaaaaaccatgcacgccgtgtgatccttttgagcgcttgaccmgrsacrakkgrkaattgggagaaaaagagttytyyggsaarkttttctatattgaaaaagtgtgtgggtagatgacacaaatytgttgtgcaacactgcaacaaaagtatcatcttatcmtgggacttttcacaatggacaytgtgcgaggaswtgaattgattaatgtgtctgtgtcaggatccgtttattctctttcccacagwtgctcyttttatgaagtaatctgtaaaaatgaacacgtatctctcactttcaggccacctgcatcactgagtcaaatgtattcagtgcaactgcgtcccttgtgcttgagacacagttatcagaagaagtagaacgcaataaagtgaaattgattacaaaammaraaaaaaaaaaaaaaa

SEQ ID NO: 3280 - DNA, 2176 bp, Rattus norvegicus
gaattcggcacgagaggggcttggctcaaagtgccattggtttgacaggctggatgaggaggaagtggccgaaaccgaaatattcttcctgaaggtctggatccccgaacagctgtgccactcgattggccccgcccctgtcgccctttgcctgtgacttcccccactcctccagggagatgctgtcccgcgggtggtttcaccgggacctcagtgggcctgatgccgagaccctgctcaagggccggggagtccctgggagcttcctggctcggcccagtcgcaagaaccagggtgacttctccctctcagtcagggtggatgaccaggtgactcatattcggatccagaactcaggggacttctatgacctgtatggaggggagaagtttgcgacgtcgacagagctggtggagtattacactcagcagcagggcatcctgcaggaccgagacggcaccatcatccacctcaagtacccactgaactgctcggaccccaccagcgagaggtggtatcatggtcacatgtctggagggcaggcagagtcactgctgcaggccaagggcgagccctggacatttcttgtgcgtgagagtctcagccaacctggtgattttgtgctctctgtgctcaatgaccagcccaaggctgccccgggttccccgctcagggtcacgcacatcaaggttatgtgtgagggtggacgatacactgtgggtggctcagagacattcgacagcctcacagacctggtggagcacttcaagaagacggggattgaggaggcctcaggtgcctttgtctacctgaggcagccttactatgccactcgggtaaatgcagcagacattgagaaccgggtcttggaactgaacaagaagcaggagtcagaggacacagccaaggccggcttctgggaggagtttgagagtctgcaaaagcaagaggcaaagaacttgcaccagcgtctggaagggcagcggccggagaacaagagcaagaaccgctacaagaacattcttccctttgaccacagccgagtgatcctgcagggacgtgacagtaacatcccagggtctgattacatcaatgccaactacgttaagaaccagctgctaggtccggatgagaactctaagacctacatcgccagtcagggctgtctggacgctaccgtcaatgacttctggcagatggcttggcaggagaacactcgtgtcatcgtcatgactaccagagaggtggagaaaggccggaacaaatgtgtcccatactggcctgaggtgggcactcagcgcgtctatgggctctactctgtgaccaactgtaaagagcatgacacagcagagtacaaacttcgaacattgcagatctccccactggacaatggggacctggttcggsagakrtggcactaccagtacctgagctggcctgaccatggggttcccagtgagcctggaggtgtcctcagcttyctggatcagatcaaccagcggcaggaaagtttgcctcacgcggggcccatcattgtgcattgcagcgctggcatcggccgcacsggcaccatcatcgtcattgatatgctcatggagagcgtctccaccaaggggctagaskgtgacattgacatccaraagaccatccagatggtacgggcacagcgytctggcatgktgcagacagaggcmcagtacaagtttatttatgtggccatcgcccagttcatcgaaacaaccaagaagaaactggagatcatacaatcccagaggggccaggagtcggagtatgggaacatcacctaccctccggctttgaggagtgcccacgccaaagcytccsgtacctcstccaaacacaaggaggaggtgtacgaaaaygtgywtmgcaagaacaagaaggaagagaaagtaaagaagcagcgatcggcagacaaggagaagaacaaaggttctctcaagaggaacatcagccttactccgtgcagaggcctccgctgggcagacagagacctgtagtccacmccacccccatcttgttgtaatttaagtgaccgtggtcctctgaacctgtatatggctcagcaagcctcagggagagtcagacccttctcttcttgtaaataaagcccctggacaactgwrwaaaaaaaaaaaaaaaaaaaaaactcgag

SEQ ID NO: 3281 - DNA, 1689 bp, Rattus norvegicus
tatgcctcaaagacctactaagttataaaacaatttgaaattgtgttaggccagtagctgctttaaactttattaagcgttgtcttttatttattcataggctcttgcaggatggattttcaagggtcgattccaacctatatctatgacatcgattatagtatgtcagcaccctgccaaaaagtcaatgtgaaacaaattgcagcccagctcctgcccccactctactctctggtattcatctttggttttgtgggtaacatgatggtcttcctgatcctgataagctgcaaaaagctgaagagcatgactgatatctacctgttcaacctggccatctctgacctgctcttcctgctcacactcccattctgggctcactatgctgcaaatgagtgggtctttgggaatataatgtgcaaattattcacagggatctatcacattggttatttcggtggaatcttcttcattatcctcctgacaattgataggtacttggctattgtccatgctgtgtttgctataaaagccagaacagtcaactttggggtaataacaagtgtagtcacttgggtggtggctgtgtttgtctctctcccagaaataatctttatgagatctcaaaaagaaggttctcattatacatgcagtcctcattttctacatattcaatatcgtttctggaagcattttcaaacattaaagatggtcatcttgagcctgatcctacccctacttgtcatggtcatctgctattcaggaatcctcaacaccctgtttcgctgtaggaatgagaagaagaggcacagggctgtaaggctcatctttgccatcatgattgtctactttctcttctggactccctacaacattgtcctcctcctgaccaccttccaggaatactttggactgaataattgcagtagttctaatagactagaccaggcaatgcaggtgacagagactcttgggatgacacactgctgcctcaaccctgtcatctatgcctttgttggggagaagttccggaattatctctctgtgttcttccgaaaacacattgtcaaacgcttctgcaaacactgttcaattttccagcaagtcaatcctgatcgtgtaagctcagtctatacccggtccacaggagaacaggaagtttctactggtttatgaactaggttgagtttgtgtatcacttagttttttatgtagcttgagggtagagatggttcttttagaaaagaaattaatatagagggcctaaggtacgtgcattgttttaatatttatttgagatagattgggtctttgaaagctgagtagttttataaacgtgaatgagaatgtattgatgagacagtaatttctggcttcattcctatttaactacaattattcccaaactcttctttagccacaaagtcactattaaaatatcgagcttggattttttagagcttgagtatctgaccaaaaataacatcattttttccctatataaagcaaaattcaggctacttaaatcaggtctttgtcttgccctgagaagaaggatgagaccatgactagttagggaatagataaccaagctatatgaattgctttatagacttgtatgatcagtaagtgctctgtggcctgagaaggctgggaacaagtctttataaaaagagatttgaactggat

SEQ ID NO: 3282 - DNA, 978 bp, Rattus norvegicus
atggcgagcagcagcggctccaaggccgaatttatcgtcggtgggaaatacaaactggtgcggaagatcggatctggttccttcggggacatttatctagcgatcaacatcaccaatggcgaggaagtggcagtgaaactagaatcccagaaggccaggcatccccagttgctgtacgagagcaaactgtataagattcttcaaggtggggttggcatccctcacatacggtggtatgggcaagraaaagactataatgtgctagtcatggatcttctgggacccagcctcgaagacctcttcaatttctgttcaagaaggttcactatgaagactgtacttatgttagctgaccagatgatcagtagaattgaatatgtgcatacaaagaattttatacacagagacattaaaccagataacttcctaatgggtattgggcgtcactgtaataagttattccttattgattttggtttggccaaaaagtacagagacaacaggacaaggcaacacataccatacagggaagataaaaacctcactggcactgcccggtatgccagcatcaatgcacatcttggcattgagcagagtcgccgagatgacatggaatctttaggatatgttttgatgtattttaatagaaccagtctgccatggcaagggctaaaggcygcwmcmaagaaacaaaaatatgaaaagattagtgaaaagaagatgtccactcctgttgaagttttgtgtaaggggtttcctgcagaatttgccatgtacttaaattactgtcgtgggctgcgctttgaggaagctccggattacatgtatctgaggcagctgttccgcatcctcttcaggaccctgaaccaccagtatgactacacgtttgattggacgatgttaaagcagaaagcagcccagcaggcagcctcttccagtgggcagggtcagcaggcccaaacccccacaggtttctaa

SEQ ID NO: 3283 - DNA, 1315 bp, Rattus norvegicus
gcrgccgcccaaatagcaagtggccgagcttcagcagccgygaccacccttaactaactgcggycaggccctcagcgagyggcggcgatccggcttctctmagccgcmtttgcgccctgaaacgccaacaaagccttggwtttargttgcctgccgcgctcctcagatctgccgggtggaamagccccggaggcttccatcctcttccagaggtgtcggggcttggcccccgyctccatcttcgcgtmtcaggatggckagcagcagcggctychmsgcckmrtkymkcstyggtgssaaatacaaactggtgcggaagatcggmtctsgtkccktcggggacatttatctagcgatcaacatcaccaatggcgaggaagtggcagtgaaactagaatcccagaagsccargcatccccagttgctgtwcgagagcaaactgtataagattcttcaaggtggggttggsatccctcacatacggtggtatgggcaagraaaagactataatgtgctagtcatggatcttctgggacccagcctcgaagacctcttcaatttctgttcaagaargttcactatgaagactgtacttatgttagctgamcagatgatcagtagaattgaatatgtgcatacaaagaattttatacacagagacattaaaccagataacttcctaatgggtattgggcgtcactgtaataagtkwttmswatmtysaktkkggaagaggaaaagaagcatgactgttagtccttctcaggacccatctttctcaggattaaaccagttattccttattgattttggtttggccaaaaagtacagagacaacaggacaaggcaacacataccatacagggaagataaaaacctcactggcactgcccggtatgccagcatcaatgcacatcttggcattgagcagagtcgccgagatgacatggaatctttaggatatgttttgatgtattttaatagaaccagtctgccatggcaagggctaaaggctgcaacaaagaaacaaaaatatgaaaagattagtgaaaagaagatgtccactcctgttgaagttttgtgtaaggggtttcctgcagaatttgccatgtacttaaattactgtcgtgggctgcgctttgaggaagctccggattacatgtatctgaggcagctgttccgcatcctcttcaggaccctgaaccaccagtatgactacacgtttgattggacgatgttaaagcagaaagcagcccagcaggcagcctcttccagtgggcagggtcagcaggcccaaacccccacaggtttctaa

SEQ ID NO: 3284 - DNA, 1026 bp, Rattus norvegicus
gccttggtagagcacagtggacactacacgtgcaaagtggaatcgaaccgcatctccaaggccagtagcatcctggtcaacataacagagctgtttcccaggccgaagctagaactctcctccagccgcctggaccaaggggaaatgctggacctgtcctgctctgtctcgggtgcgcctgtagctaacttcaccatccagaaggaagagacggtgttgtcacagyaysagratttcagcaagattgccgaggagagggacagcgggctgtacagctgtacagcaggcatcggcaaagtggtcaagagaagcaatytggtacccgtccaggtgtgcgaaatgctctccaaaccccggatttttcatgatgccaaatttgagatcataaaaggacaaatcataggtatcagctgccagtcagtaaatgggactgcrcccatcacttaccgcctcctaagagcaaagagcaacttccagaccgtccagaagaactccaatgacccagtgacattcacagacaagcccaccagagacatggaataccagtgtatagkkgataattgccactctcaccccgaggtgcgcagcgagatcctgagggtcaaggtaatagccccggtggatgaagttacgatctccatcctgtcgggtaaygatgtacagtctgkagatgaaatggtgcttcggtgctctgtgaaagaggggactggccctgtcacgtttcagttttacaaagaaaaggagggcagacccttccacgaagaaacygtgaatgacacccaagtgttttggcaccatgaacaaactagcaaggagcaggaaggccagtactattgtacagcgttcaacagagccagcattgtgaccagtctccgaagcggccstctaacagtcagagtctttcttgctccgtggaagaaagggctcattgcagtcgttgtcattggagtggtcattgccgccttgatagttgcagccaaatactacttcctgaggaaagccaaggccaagcagaagcccgtggag

SEQ ID NO: 3285 - DNA, 243 bp, Rattus norvegicus
gccaaccagatgggtcaaaatgtctttgggaaattcctaaagtctgaattcagtgaagagaacattgaattctggttggcttgtgaagactataagaaaacagagactgatcttttgcataacaaagcagagcatatatacaaagcatttgtgcactcagatgctgtgaaacaaatcaatattgactttcatactcgggaatcgacagccaagaagatcaaaacaccaactcccacatgtttt

SEQ ID NO: 3286 - DNA, 2977 bp, Rattus norvegicus
gcgattcattaattgctgggcgaggggacacactgactgttataataacactacatcagcaactcctggctccccaacagccggatcccaggcaggagagagtcagtggcagatagccatttttttttcttccttaagaagccaacaacttggttgctagttttatttctgttagaatttttttttttgtgtgtgtgtggatgtgtggtggtggtggtcttttctaagtgtggagggcaaaaggagataccatcccaggctcagtccaacccctctccaaaaacggcttctctggcactccaggtagcgagggagttgggtctccaggttgtgcgaggagcaaatgatgaccgccaaggccgtagacaaaatcccagtaactctcagtggttttatgcaccagctgcctgacagcctctacccggtggaagacctcgccgccccgtcggtgaccatcttccccaatggtgaactgggaggcccctttgatcagatgaacggagtggctggagatggcatgatcaacattgacatgaccggagagaagaggcccttggatctcccatatccgagtagcttcgctcccatctctgcgcctagaaaccagaccttcacttacatgggcaaattctccattgaccctcagtaccctggtgccagctgctacccagaaggcatcatcaatattgtgagtgcgggcatcttgcaaggggtcacccctccagcttcaaccacagcctcttccagcgtcacctctgcctcccccaacccactggccacgggacccctgggtgtgtgtaccatgtcccagactcagcctgaactggaccacctctactctccaccaccacctcctcctccttattcgggctgtacaggagacctctaccaggatccttcagcattcttatcgccgccacccaccacttccacctcctctctggcctaccagccacctccttcctacccatcccccaagccggctatggacccaggtctcattcctatgatcccagactatcctggattttttccatctccgtgccagagagatccacatggcgcggctggccctgatcgaaagccgttcccctgccctctggactccctgcgggtcccccctccgctcacgccactctccaccatccgtaattttactcttggggggcccagtgctggcgtcacgggaccaggggcaagtggaggcggtgagggtccccgactgcctggcagtgggtctgcagcagtgactgctaccccctacaatccgcaccacctgcctttaaggcccatcctgagacctcgaaagtaccccaacaggcccagcaagacgccagtgcacgaaaggccgtacccctgcccagcagagggttgcgacaggaggttctcacgctctgatgagctgaccaggcacatccgaatccacaccggtcacaagcccttccagtgtcggatctgcatgcgaaacttcagccgaagtgaccacctcaccactcacatccgcacccacaccggggagaagccctttgcctgtgactattgtggccgtaagtttgcccggagtgacgaaaggaagcgccacaccaagatccaccttcgccagaaggagaggaagagcagtgccccctcgtcatctgcatccgcccagtcttcagcctctggtcctgggggctcgcaggccgggggcagcctgtgcggtaacagcgccattggaggaccactggcctcctgcacctctcggaccaggaccccgtgagatgaagctccmgctgacacaccagtttcttcaggccccagaggccctctatccactcgagctgcaaacactaccgcccttctgtgttcttccccgtgatcccgtgaacctgtgatcctgggcaaaggaccctaatggagcccagctctgtcccaccttctcacagacggccttctgaaaacttaggccattttaaaggagttgactgtcactccaagaaatggggagccagaagagggctgggcgagggcccctggcctacagggctgtgctctaaccctgacagagagatgtttgactatggtctgcgagcccttccctttgaccctcgatgccagttgctctgagactttttctacaataggttgggagttgttgattcctttgagcaaggacagcgaaaaagactaaattaaagcaaaaccgatgtggcactttaatggcttgggacggacttggggtaggggtggggggttgtacagtgagcacagtttagccctggcctggccgcwgcactctgtggccctagaacagtgaatggaagtttctcgagccatctcarcccttaagcaatatgtcctataaactcaagagaacgaacggaagtgcaatgtcgggraggacaaagccaatattggctcctttttkttgagaaacaaagattattttccagtgtatatccatttagatttttgtgtattttttctttytkgatgtgcactgtttctccgagttctgaacctttgggaaaaaagtgtaaaacatttatgatctcttgaatcgagtcaaaagttaacttatttaaaggggggtgtacataggatgcatgcagtggtgttgcaagtgtcctctgtgccttgtgtgatgtgggcagtgttacagggtctgcatgtgtacaggatgccttactatgaaaaaaaaatcactccctgggtttaagtatggctgtatatttctgcctattaatatttggaatttttttagaaagtatatttttgtatgctctgttttgtgacttgaaagtgttaccttcgcagtcaaatttcagatgagagtgtgcttaacgtcactgcagctgacttgtttggttattagctcttaatagttgtggaaagattaaacaatctattctaacacagaaccactaactggagttcagatatcggacggcttatggcaatggtgtaaaataatacttttcaacaataaaaaaaaaaaaaa

SEQ ID NO: 3287 - DNA, 107 bp, Rattus norvegicus
tgtccggagtgtgggaagtcgtttaaccataatgcacatcttacagtgcacaagagaatccatacgggagaaagaccttacatgtgccaagagtgtggaaaagcctt

SEQ ID NO: 3288 - DNA, 101 bp, Rattus norvegicus
gctttgccggagtgcgggaagtcgttcagagaaagttcacacctcatcagacatcagaaaatccatcttggtgagaagccttaccagtgcaaagagtgtgg

SEQ ID NO: 3289 - DNA, 176 bp, Rattus norvegicus
ctttgtccagagtgtgggaaatcgttcaggcgagcctcacacctgtcccagcatcacactattcacactggtgagaaaccctatgaatgcaagcagtgtgggaaggcctttagtcgtgattcccagctaagtcttcatcagagacttcacaccggtgagaaacctacacgtgcaga

SEQ ID NO: 3290 - DNA, 214 bp, Rattus norvegicus
tcacatcttgcaaatcatcgtggaattcacagtggggagaagccttacaagtgtgaagaatgtggcaaacacttcaatcaaacttcaaatcttgcaagacattggagggttcatactggagagaagccttacaaatgcagtgaatgtggcaaagcttttagtgtgcgttctagcctgactgcccatcaagtaatccacactggtgaaaaacctt

SEQ ID NO: 3291 - DNA, 161 bp, Rattus norvegicus
ctttgtccagagtgtgggaagtcgttagtcagagtgcaaatcttgttgtgccatcaacgaatccacactggggagaagccctttgagtgtcatgagtgtgggaaggccttcattcagagtgcaaccttgttgtgcatcagaggatccacactggcgagaaa

SEQ ID NO: 3292 - DNA, 2403 bp, Rattus norvegicus
cgggtcatccgcctggttctgcaatgggcagccatgtatggtgatcttctccaagaagacgacgtggccatggctttcctggaggagttctatgtgtctgtatcagatgatgcacggatgatggtcgccttcaaggagcagctggctgagctggagaagactgtcaaacagatctcagaagacgcaaaagctccacagaagaagcacaaggtgcttttgcagcagtttaatacaggtgacgagasggcccagaagcgtcagccgattcgtggctctgatgargttttgttcaaggtctactgcattgaccacacckataccaccatccgagtgcctgtagccgcctcggtgaargaagtcatcartgcagtagcagacaaacttggctctggggaaggcctgatcattgtcaagatgaactctggaggagaaaaggtggtgctcaaacctaatgatgtttcagtatttacgacgctcaccattaatggacgcctgtttgcctgcccgcgagagcaattcgactcactgactcccttgccagaacaggagggcccgaccactgggacagtggggacgtttgaactgatgagctcgaaagacttggcgtaccagatgacaacgtatgactgggaactcttcaactgtgtgcwcgagctggagctmmtctrccrcacatttggaaggcataattttaaaaagaccacagcaaacttggatttgttcctgaggagatttaatgaaattcagttttgggttgtcactgagatctgcctttgttcccagctcagcaagcgtgttcagcttttgaaaaaatgtatcaagatagcggctcactgcaaggagtacaaaaacttgaattccttcttcggcatcgtcatggggctcagtaacgtggctgagagccgcctggcattaacatgggagaaactgccgagcaagtttaagaagttctatgcggagtttgagagcttaatggatccttccagaaatcacaaggcgtacaggctgacagcagctaaactggagccccccctcatccctttcatgcccttgcttattaaagatatgacatttactcatgaggggaacaagacattcattgacaatctagtaaactttgaaaaaatgcgcatgattgcaaatactgccagaacggtgcgctactacaggagccagccattcaatccggatgctgctcaagctaataagaaccatcaggatgtccggagttatgtacggcaattaaatgtgattgacaaccagagaactttatcacagatgtcacacagattagagcctcgcaggccatagacatctgcagtgcccagagtgatgctccgtctccagtccacaatctttcaaaagatgctgtgtatgctactactgactgtgttgctactagagaattccccagaatgagcaagagacacctcctgagagcccctcggggccacatcctgctttccgaccacacaggagaaggatctgtcttgtctaacgcggacatgccgtagcttaggaaccatcagctgtagtcatcttcttcacggttggcacaccaccgcaggctcacgtgaaggcataacctggcgaggctacaccaggcccctgacatcccttcccaggctgttgcagcatgagactgtcccgtggataggtttgacttggaatcgctgcaatgatataattgaatgatttgtttacttagcaccttatttggggtctgggttctggggagggtgttgaccataaaagtccaaattatccatcatgttcctccatcgtcataatcttacctctgaaggaatggaacctcatcacaacactatgaaacattatgactgttcagtctgtaatttcggaatgatctatagaataatatgtttacattgtaacttttaaaaacttacaaatcaggattacacacatgagaattccactaagaaacaccaaggttcttaatatcgccagcgttaagatagaaagtaacatttcagaagagcacaatatacacaaaacattttttcaaattgaaatattttcctgggcattaaaaaacctttccactacaaatttattgttactgatgaaaaaaaaagcatattttctggacttaaatgttattacaaaaatcttaattttcagcaattgttttgcactttcagatagattgtaaataggttatgcagtcaatggtatagaattatttatttgctacataatagacattgtgccaaataattcctttttatttattttattcagtatgaaattttggagtacattttttctgttttcttaattagactacatttaatgtataggaattgtatgtacatatctcttctgtaaataacagccagtatcttcattaaatatacttgacaagaaaaaaaaaaaaaa

SEQ ID NO: 3293 - DNA, 4586 bp, Rattus norvegicus
attcagcccgctccccgagcagccttagccatccctaactaatccaactgcttcccagtctgcgggtgctgggctcggtgctgagaagaggctctggctcttggctattgtcaggtcaaacactaagactgtgtccatgttagaactcatagaagttaatggaacccctggcagtcagctctccactccgcgctccggcaagtcaccaagtccatcgcccaccagcccaggaagcctgcggaagcagaggatctctcaacatggcggctcctccacttcactttcatccacaaaagtctgcagctcaatggatgagaacgatggccctggggaagaagagtccgacgaaggtttccagattcctgccacaataacagagagatacaaagtcgggagaacaataggagatggaaatttcgctgttgtcaaggaatgtatagagaggtcgactgctcgggagtatgccctgaaaattatcaagaaaagtaaatgccgaggcaaagaacacatgatccaaaacgaggtctccatcttaaggagagtgaagcatccgaacattgttctcctgattgaagagatggatgtgccgactgaactatatcttgtaatggagttagtaaagggtggagaccttttcgatgccatcacttccactagcaaatacacagagcgggatgccagtgggatgctgtacaacctggccagtgccattaaatacctgcacagcctgaacatcgtccatcgtgacatcaagccagagaacctgctggtgtatgagcaccaggatggcagtaagtcactcaagttgggtgactttggcctggccacaattgtcgatggccccctgtacacagtctgtggcaccccaacttatgtggctccagaaatcattgcagagactggatatggcctcaaggtggacatctgggcagctggcgtgatcacttatatcctgttgtgtggtttccctccattccgtggaagtggggatgaccaggaggtgctttttgaccagatcttgatgggccaagtggactttccatctccgtattgggacaatgtgtcagattctgctaaggagctcatcaacatgatgctgttggttaacgtggaccagagattttcagccgtgcaagtccttgagcacccctgggttaacgatgatggcctcccagaaaatgaacatcagctgtcagtagctggcaagatcaagaagcatttcaacacgggccccaagccgagcagcacggcagctggagtttctgtaatagcaaccaccgctcttgataaggagaggcaggttttccgacgaagacgcaaccaggatgtgaggggccggtacaaggcacagccagctccaccagaactcaactcggaatcagaagactactcccccagctcctctgagactgtccgctcccccaattcgcccttttaataagaccccttcactcgaagtcctagcttaaccctttaagactctgagattccccctccccccaaacttctgtaaaacaggttcatctgatctacctagcactcagtgctgaacggcagaacagaaagtatatttcgggtacctttgtagcaagttccctttactgaatgagaaggcatgtggtgtttgtgacaacggtaatttgctgctaataggggtccttaaagggttgaggctaatttkykwttttttttyttttaacatagaagtaacgaatgttttcatcagtcagactaggatctgcagtatgtaacatagcacatgttagccctctgagtgcatagaatttgcttgagaatccttgctggggaatttttcagacccttgagtgtattcacacatatttcttgattttactgcagaccaaggggcgtcattgagacccaaaatgtccacccaagaagagtattggggaatgacacattgccaattcttctcagtgggcttagacaatgacgggttctacagcatcagcagatgcacccctccttcttagccatcttatgaagaagggaagtccctttccctacatagtaagctgcagagccttctctgctctgattggagggagttaaggtttgtggctgcctatcccaagtgatcgacagtgtctctccctgtctccattcactgctgtgctgaaggcgcccctgaaatgctgcttccccattagctgctgctagtgccaggcagaccctyggggaaccacctagccttggcttgtgctcggtgagttgggatctgtctgctcagggtcagaagagctctagaaacaactggtgagaagagcaataaattatcaggtgctctacggggccgggaatcaaccggcaaggaaaagcaaggctctgtgttgttgttgttgtcattttcttttctcagctgcttttacacaggaccatagccaccagtgcgaaaccaacacagaatggaaaagacccgacccggggcatgtgagagcaagaggcaagtgctttgcaaagaggctgaaaggaaaatacagagaaaacacaatccaaaaggttctaaaatgggattcctagaaccaaacagattccatgagtaactstaggtaccaggaagtcagttycagcaagtctcccagaagatacctcagaggctgaagccaccactcccactcatgattttctttactttatttagcatggkctctagtsctccaggagggatgygktgcttttctggyttggggccaagcctgkctgggattgggttttcactcctgttaggcaatctgyytcggaggcctgggtttccttgggagcccattgtttcagaatgtasgcttgwgcttccttttccttacttycctgctmcactgggatgcasgagtgygtggkagggygtgggaggcaaggccmaasccawgcgtygscctaawgtkwtctcagctktgactcawgagagaacwawtttaawctccagkgwgsytacragttccttattwgctcaktactgctttgaatgtattkcaatgtscygaaagtyatgaacaaccwtsccatagtcrggwygagatatktccgaactccasactgatstgyagstgctgtgtttatacatagtcattaaactatgttcctcacacatgtagatttttaaataacagaatcccatatttcctgctcatttaaatataacatttatttagttttttttccttttttgggagtccagaaatgatacacataaattcacaaaatgctataaatccatatattatttgaattgggtgctgggactagagacagggcacagaccaccaggaaggatgtcgatttgtagatagagtccatataggtaaaggacaagaactgctctaaaattgctactttctctggaacggaaaagcaaagcgctattctaagatcagcgagcaatggcatggctgagccttggctccacgtgtgtgactataaaacaccctacggccaatagcagattgccactttccttgttctgaattactgcykwssccggtcattaacgtagccacagcgtccaggggttacaggaccaaagtgcaaggctctggaatttttccatcaacattctctcatcacgaagaagggcagctcasaagaattcagagcccattcagaaggacgatcgcagcacatccctatagaatttcagtgatcaacgctgaataagtagcggaatgtaacctgtcaagtagaaatattgagcaatcagacggaatgcagtaattcaagagtcttgccagtgtggagccaccaagatcttagacgtcagagttgtaactcagagggcgaagggacagcacacactgaagactgggtgcatccagattgctttgctttcagtcaacacggatatcctccccctcaacattcccagaatagctccagtttgaaataattaagtggtggtgttctttgaatttctataaccaatcaatcttattttttattttgtgtatcatagaacaactatgtgccactatggctgtgtgtcgccgtaattctccactgaactatcatgactgtttgcctatctttgagtattgaatataactcttatggtggtagtctggtgatgggayttgccsttccttaccaacaagaccagtcttgtggtattggaagggktctttcggtttgagagtagagtagttgaacactccttcattacttgcttcctgtaaatcaattctgtagatgagaaccattatactaatgagtacatttccccctcaacattgtagaaggaaccactttatttgtcatgatcaataaatatgtgaattgttccaaactgttagaagaaaacgttaaggtcttcagtccctgggaatgctctgactgtagccccccgctaacccacacgtggtggtggtgtgtattaatatgagtccaggggaaatatgaataaacgacggaaaacacttgatgctctgcgttcctgaggcttccctgcagtctgcttagcccttttatgagtggtggttaacaggcctgtcacatagtgttgagagagcgcagtatatctgtgaaagaaggccaaaattgcaatcttttccccttccaggcatatttaagttggg

SEQ ID NO: 3294 - DNA, 2548 bp, Rattus norvegicus
tggaagcctgtgccattcaagactgggccaagagcaaaagaagtggacactggctacatggagtggacatacaagagttaacaggcggggtgtgaccgggcgaaccgccttcaggaagtgttactcaccgccagaatgtgcacgcctgtgccttgggggttggattctcttcctgagtcccaggagaagctgaaggagctcccagccatggaagaccctggtgagaccgaagcacaccctctgggagccaccagcctgaactttgtacctgggtaccaacaggaagaaaagccatctccagacccactgtatgacacacctgatgccagaggggttcaggcaggcgggtcccaacaaccagcacgcacagtgagcttgcgggagcggctgctgatcacccggcctgtgtggttacagctgcgggccaacgctgcagccgcactgcacgtgctgaggacagagcctccggggaccttcctggtgcggaaatctaacactcgccagtgccagactctatgtgtgcggctgccagaagctagtggcccctcttttgtctccagccactatctccaagagagtcctggcggcatctctttggagggctcagagctcacattcccggacctggtccagctcatctgtgcatactgtcataccagggacattcttctcctccctctcccgctccccagagccattcatcaggcagccacccacaaagagctggaggccatctcccatctgggcatggagttctggagttcctctctcaacaccaagaaccaacagagaccttcagaagctccgcagataccccggctgaaggctcgctcccctcaagagctggatcagggcactggtgcagccctctgcttcttcaaccccctcttccccggggatctgggccccaccaaacgtgagaaattcaagaggagtttcaaagtgcgtgtatccacagagacctccagccctctgtctccacctgctgtgccgcctcctccagtccccgttctgccagggacatcttccagccaaacggaaagactgccccctcgacagctgctgcagagggagagctcagtgggataccgtgtgccaggaagtgcttctggtcctagtcttcctcccctaccttcacttcaggaggtggactgctgctcccccagcagctcagaggaggagggttcttcaggaagccctacaacctccccacgcctaagccgcccaaggcaccggcggcctctgcttcggtccatgagttctgctttctgctctctgctggcaccagagaggcaggtgggccgggcagctacaatgctaatgcaaaaccgatacacagctgtgggtcagctagtgcaggacctattgacccaggttcgtgttggtcctgagtcccgggagttgcagggcatccgacaggccctgagtcgggcacgggccatgctgagtgcagagctgggccctgagaaactgctaccaccagagcggctggaattggtcctggagaaatccctgcatcgctctgttctcaagcctcttcgacccattctagctgcccgcctgcggcgccgactttccacagacggttcccttggccgcctagctgagggcttccgcctggcccggacccaggggcctggagccttcgggtcccacctgaacctttcttccccagtggagatagaaccagtgcgtcagaagctgctgcagctccttcgtgcctactcgcctagtgcccagatcaagtggctcctgcaggcctgcaagttgctatacacagccctgaaaacccaggcaggggagaatgcaggtgctgatgagttcctgcctctcttgagccttgtcttggcccagtgcgaccttcctgacctcctgttagaagctgagtatatgtcagagctactggaacccacattgctcactggggagggcggctactacctgaccagcctctcagccagcctggccttgttgagtggcctaagccaggcccacgcactgccactcagccctgcccaggagctccaacgttctctggccctctgggaacagcgccgcctgccggccacccacaacttccagcacctcctccgagtagcctaccaggaccccagcacaggttgcacctccaagaccttggctgtgcccccggggtcttcgattgccaccctgagtcaactctgtgccaccaagttccgagtgacccaaccggatgcatttggcctctttctctacaaggaccagggctaccatcgcctgccccctgaagccctagtccacaggcttcccacaactggttacctcatctaccgccgggcagagcgccccgagacccagagggctgcaacagagaagaccaagacaggaaatgagaggccagagcgaggagcatgggaggaggagaaagggggtctaaatggtgaagggaaatctgagatagctgttgaccaagaaggcaaggatcaggccagaggaggtcacatgcagctagaggaacaaaaggcagagggatgcccggctttagaagagtagccaggaacagctaaaa

SEQ ID NO: 3295 - DNA, 4332 bp, Rattus norvegicus
gctgatcagcttaaaaccatgccgaagaagaagcccttgtctgcaggcagagcgcccctgtttctcttcctgtgccagatgatcagcgctctggatgttcctcttgatccaaagctccttgatgacttggtacagcctccaactatcactcaacagtcaccaaaagactacatcattgacccacgggagaatattgtaatccaatgtgaggccaaagggaaacctcctccaagcttttcctggactcgtaacggaacacattttgacatagacaaagaccctctggtcactatgaagcctggctcaggaacccttgtcatcaacatcatgagtgaaggaaaggcggagacctatgaaggggtttaccagtgcactgcaaggaatgagcgcggagctgctgtctccaataacattgttgtccgcccctctaggtcacccttgtggaccaaggaaagacttgaaccaataatcctccgaagtggtcagtcactagtactaccatgtaggcctccaattggattaccaccggccataatattttggatggataactcctttcaaagactgccacagagtgagcgggtttcccaaggactgaatggagacctttacttctccaatgtcctcccagaggacacccgtgaggactacatctgctatgccagatttaatcacactcaaacaattcaacagaaacaacctatttctctgaaggtgatttcagtggatgaattgaatgacactatagctgctaatttgagtgacactgagttttatggtgctaaatctagtaaagagaggccaccaacatttctaactccagagggcaatgaaagtcacaaggaagaattaagaggaaacgtgctttccctggagtgcattgcagaaggcctacctactccagttatttactggatcaaggaagatggaacgcttcctgtcaaccggacgttttatcggaactttaagaaaaccttgcagatcattcatgtctctgaagcagactctggaaattatcagtgcatagcaaaaaacgcattgggagccgtccatcataccatttctgtcacagttaaagcggctccctactggattgttgcacctcacaacctcgtgctttccccaggggagaatgggaccctcatctgcagagctaacggcaacccaaaacccagaattagctggttaacaaatggagtcccagtagaaattgctctcgatgaccccagccgaaaaatcgatggtgataccattatgttttcaaatgttcaagaaagctcaagtgcggtttatcagtgcaatgcctctaacaaatatggatatttactagcaaatgcatttgtaaatgtgctcgctgaaccacctcggattcttacctcagcaaacacactgtaccaggtcattgcaaaccggcctgctttgctggactgtgccttctttgggtctcctatgcctaccattgagtggtttaaaggaactaaaggaagcgctcttcacgaagacatttatgttttacatgataacggaacgctagaaattcctgtggcccaaaaggatagtacagggacatatacttgtgtcgcaaggaataaattagggatggcaaagaatgaagttcacttggaaatcaaagatccaaccaggttcattaaacaacctggatatgcagtcgttcagagggggagcaaggtttcctttgaatgcaaagtgaaacacgaccacaccttaatccccaccattctgtggctgaaggacaatggagagctgcccaatgatgaaaggttctctgtcgacaaggaccatctggtggtctctgacgtaaaggatgaagatggtgggacctacacatgtgcagccaacacaacgctggacagtgtttcagccagcgccgtgctcagggtggtcgctcctactccaactccagcccccatttacgatgtcccgaatcctccctttgatttagaattgaccaatcaacttgacaaaagtgttcagctgacatggaccccaggcgatgacaacaatagtcccattacaaaattcatcatcgagtatgaagatgcaatgcatgaggcagggctgtggcgccaccaggcggaagtttctggaacgcagaccacagcccagctgaagctgtctccctatgtgaactactccttccgagtcatggcggagaacagcatcgggaggagtgtgccaagcgaggcatcggagcagtatcttacaaaggccgcggaaccagaccagaatcccacggctgtggaaggactagggacagagccggacaacttggtgatcacatggaagcccctgaatggttttcaatcgaatgggcccggcctccagtacaaagtgagctggcgtcagaaagatggtgacgatgaatggacgtctgtggttgtggccaatgtatccaaatacattgtttctggcacaccaacttttgtcccatacctgataaaagttcaagccctgaatgatgtgggctttgctccagagccagctgcagtcatgggacattccggagaagaccttccaatggtggctcctggaaatgtgcgtgtcagtgtggtgaacagcaccttggcagaggcacactgggaccctgtacctcccaagagtgtccgaggacacttacaaggctaccggatttactactggaaggctcagagctcatctaaaagaaacagacgccacattgagaagaagatcctcaccttccagggcagcaagactcacggcatgctgccagggctgcaaccttacagtcactatgttctcaatgtccgagtggtcaatgggaaaggggagggcccagccagcgccgacagaggcttccatactccagagggagtccctagtgctccctcatctttgaaaattgttaatcctacactggactctctcactttggaatgggaccctccaagccacccaaatggtatcctgactgaatacatcttaaaatatcagccaattaatagcacacacgaactaggccctctggtagatttaaaaattcctgccaacaagacacgctggactttgaaaaatttaaatttcagcactcggtacaagttctacttctatgcacaaacatcagtgggatcgggcagtcagatcacagaggaagcaataacaactgtggacgaaggtaagaaggctggtattcttccacctgatgtaggtgcaggcaaagcaatggcaagtcggcaagtggatattgcgacccaaggctggttcataggtctaatgtgtgctgttgccctcctcatcttaattttgctaatcgtttgcttcatcagaagaaacaagggtggtaaatatccagttaaagaaaaggaggatgctcacgcagaccctgaaatccagcccatgaaggaggatgacggaacgtttggagaatatagtgatgcagaagatcacaagcctttgaaaaarggaagtcgaacaccttcagacaggactgtgaaaaaagaagatagtgatgacagcctggttgactatggcgagggggtgaatggccaattcaatgaggatggctcctttatcggacaatacagtggtaagaaagagaaagaaccagcagagggaawtgaaagctcagaggccccttctcctgtcaacgcaatgaactcctttgtttawgtctttaagctctgtgccaatgtcccatctctctggaatggttttcctgaacacttgtcatccctctcatactatggacatatgggtagaaagaatgttttctgcggtatatgagtattataagaacagagcaagaacataactcagtcagatgatacgttaatatgaactggggtgaaaaggcatactttttgttcagagtgggttttctcaatttccttggaactgattaaaaagaactacaacmtcawmaawarmwwamawwawtccctgtgcaggatacagttcaataagatgcatgaaacatgctgcmcrgrggamawarmwrwrwawrwrattgcgacgtggttgggtacttcgttgacactatcctcagstgaaccctaaatatkaattccgttgtccttgtggagagggttcctgaaggtcccctagggttcatggctcgtggacatgtgtgaactctgacatgtctactgtggtagccttcgggaaccggcgaccgctgttcggacactggccagagtacatacaggggcgcgaaggccggagggtcgaatggccatccagagctaccccggggccaggtccccaaaccgcgccgggggggaacatgaacccgcgggcaaagaaccccaaaatcaaggacaggcaacacctttggccccgggagacgacaagccc

SEQ ID NO: 3296 - DNA, 1411 bp, Rattus norvegicus
tccatcctaatacgactcactatagggctcgagcggccgcccgggcaggtctcctatcagtaagagtctggtggctctgaatcgttttcctgcattggtgacccttttcttcctactggcttgcctcgtccagctttgatgatatgagggtttgtgcctagacttattgcaacgtgctgtgctgtgttcaggatggacgtcagcctcagtctgtgagccagagcaaaccctttcttccagcagttgcttctatccaatattctgtcaccgtcagatctatgtcactaacatagaaagctgatacccaaaatggagcagtctctatcataaatctgacctatttgatatgagttatatgattaatcagataagttctgaggcctttgaggctggcttgcaggacaaacgtggaagggtttggaatgtggggctagcaaacaggtagaaggctgtgaacagagtttgccaggactttctgccaggagtttagaagaccagaatatagggagaagtgtagatcatggagactggctcctgagattctagaggggtacagagattccaccaggaaatcctctaaacaattcgtgttattttctggtgagcaatctggctgtatcttttctatgccctggggaattaagagacattaattactaactcagtggattaattttttggtagaggaaatttcaagaaaggattgtatgtgggttgaggttatggccccagcttgctcctctcacccaacacgcatgggaagccatgccttatgaaaaatgcaaatttggttgaaagacatgggctaaaccgtgactagcactgaagagaaggttcctgactcaaaacccacagcctgtgagggatgctgtacggcactgtggtcctacattctgagatgacaacacttcacagtctcagctgcatggacaatacaagattgaggggttcatgaagtttagggccaaagtccctgagagccactaacaccacgacagggttggagttcctgcaaggaggctctgagaggctgtggcatgaagctgtgaaagtgaagtctgaattgagattgtgattttgctgcagcaacaagaaagagcatagtggaaagttgagagcttttagagacgcatttcaagttcctaatcagcttacttggaaagattatcgtaaatggatctaccctgactgcagagaacattaagtggatctggacctttgctgacactgagaatctggatccacaagaagaagcaagctgttataaatgctacagccagaagaaaggatgagaattctgttctgccctgagggccctcgtgaacttatccttctagattccagccctagcttagagctcagactgttccttacacaatggtctgggcatagcaccccttaagcatgctgg

SEQ ID NO: 3297 - DNA, 3785 bp, Rattus norvegicus
ccacaacccacaccagctcaccacctacaggaggaaccagccccacctccacaacccacaccagctcaccacccataggaggaaccagccccacctccagaacccacaccagctcaccaaatacaggaggaaccagccccacccacagaactcacaccagctcaccacctacaggaggaaccagccccacctccacaacccacaccagctcaccaaatacaggaagggtcaacaccacccacacaacccacaccagctcaccacccataggagaaagcagcaccatttctaccacggatatcagaaccagctctacgcagatggcccacacaacattcgtggggaaaaccagcacgatctctggtcctggaaccagcaccacctccattcctaccagcaccacgggttccagctctcattttgaggtgactcgttccccagtgacggcccactgccagccacagtgcaactggaccaagtggcttgacactgacttcccagttcctggtccacatggaggggacctggaaacctatggcaacatcaagaagagcagagagagactctgtccttggccagaggagatcacacggttggaatgcagggctaaggactaccctgagagagcgatggaggatctgggtcaggtggtgcagtgtgaccccagagtgggcctggtgtgcaagaacagcgaccagggacccacctttgggatgtgcctcaactatgaggtgcgactgctttgctgtcacgttcctgaagactgcctcaggaccgatcggactcctgtgacatcccacaagacctcatttccagttgtgtcatcatcatctgtgtccacatcctcatctaccagtcctagagttcactctaccacccgttgtttctgcaccatgtcaggccaattataccctttgggaaccatcatctacaaccagacagaccttgacggccactgttactatgcgatgtgcagccatgattgtcaggtggtcaaaggggttagtcaggactgcccctccaccatgccaccccgtacaccaactctatccacatctaccgccccacctgtcactgagcgggattggtgcaatgtgtttcctccaaaactgaaaggggagacctggcccatgcctaattgttcccaagccacatgtgagggcaacaatgttgtctctttgagcccacgccagtgtccagaggtgaaggagccatcttgtgccaatggctacccacctctgaaggtggatgaccaggacggttgctgccagcactaccagtgccagtgtgtttgcagcggctggggtgacccccactacatcacatttgacggcacctactacacttttctggacaattgcacatacgtgctggtgcagcagattgtgcctgtgtttggagacttccgtgtgctcattgacaactactactgtgacctgggagacagtgtttcctgcccacagtccatcattgtcgagtaccaccaggaccgtgtggtgctgacccgcaggccggttcacggggtcatgaccaaccagatcatcttcaacaacaaggtcgtgagtcctggcttccagcagaatggcattatcatctcccgtgtgggtatcaagatgtatgtcaccatccaagagattggtgtccaggtcatgttttcaggcctcatcttctcagttgaggtgcccttcaacttgtttgccaacaacacggagggccartgcggcacttgyaccaaygacaaaaaggatgaatgccgcctgcctggaggttccatagcctcctcttgttctgagatgtccctccactggaaggtgcccaaccagccttcctgccaagggcctccaccaacaccaacttcaatggtacccaggtctacacctactccgtgctcaccatcgccactctgtcagctcatcctaagcgacgtcttcaagctctgccatgacatcatccccccgctgcagttctatgaaggctgcttatttgactactgccacatgttggacttggaggtrgtgtgctcaggcctggagctctatgcatcactatgtgcagcccaaggcgtgtgcatcccctggagaagccataccaacaacacctgtccattcacgtgccctgaaaaccaagtataccagccttgtggtccttccaaccctcactactgctacaggaatgatgatatcagcctaagcttggccattcaaaaggctggtcctaagtcagarggctgcttctgtccrgakgrcatgacacttttcagttctaacgactcaatctgcgtgccttcctgccaatggtgtctggggcctcatggggaacctgtggagccgggccacaccatcagcatcaactgccaggactgcatctgtaaggagggcacgctgacctgccaagagaagttatgcccccagcccacctgtccagaacccggctttgtgccggtgtctatagccctggaggctggccagtgttgttcccagttcagctgtgtctgcaactccagccactgccctcctcctttgcactgcccggagagttctagcctgatagtcacatatgaggagggaacttgctgcccaagccagaactgcagcagtcagaagggctgtgacgtcaacgggactctgtaccagcctggtgacgtcgtctcctccagcctatgtgaaagatgcctgtgtgaagtttccagcaatgccttttctgatgtctttgtagtcaactgtgagactgagctctgtaacacccaatgtcctaagggctttgagtaccagacgactccagggcactgctgtggccagtgtgtaccgaagacctgcccctttaaaaacagcaataactccacttccctctacaagcctggtgagttctggccagaacctgggaacccgtgtgtgactcayragkgtgagaaattccaagatgtactcacggtggtgacastgaakatagagtgccccaagatcaactgtccacaagactgggctcagctgagagaagacggatgttgctatgactgtctcgtaccccagcagaaatgtacagtgcaccaaagacagcagatyatccgtcakcaaaactgyasctctgarggcccagtgagcctctcctactgccagggcaattgtggggacagcacctccatgtactctctggaggccaacacggtggaacacacgtgtgagtgttgccaggagctgcagacctcacagaggagtgtgactctgcactgtgatgacggctccagtcggaccttcagctacacccaggttgagaagtgtggctgcytgggccagcggtgccatgctccaggtgacacaagccactcagagtcctcagaacaagagttcaagtccaaggaaagtgaggaacctggccagcagtcagcatccagggtcagcgaggacacccttgggcytttccagtaamccaagcagcactgccgtcccaaccaagaagtcctcctgaggccagcaggacgtgtactttaskscamgwggcttgaattctacctacctgctgcttcctcttcaagagggaccccggatgttcttggaggtgggagaggcccctctccactgattaggagcgtgatggccacgggctccttttgaaagaacttcattatcaccaaagggtcccaggagtgacagtcacttggatgcaggtatcagcctcgctctcacctcagccctgctcctgtgtcccccatccccaggaaatgaccaatatgttttataaatatactcaagagcatttgtggawwmwmaaaaaaaaaaaaaaaaaaa

SEQ ID NO: 3298 - DNA, 3535 bp, Rattus norvegicus
gatcttgcctcaatcatccaatcaatcaatcatccaatcatcaatcaatcaatcaatcagccagccaaccaaccaattgatcctttaatcttttttaaaagttggcttgagaacgttctacctccattagtagctggtgctgttttggtgtgcttcctgtgtagaactggagctctggggatggggaggaaaggaaaggagaggggcaaagtcctggggtacacatgctagccgtaacagtgcacaccttcttagccttagcatctagcacaacaccactctccagttcaccaccccactcttgtccaaggttcttgttcagtgatgctctcctccaagcaacagtaacagccaggagtttcagaatgccgagcctacggttgataagaacattttgttttagggtatgcctctccatctcgcatcttcaaggcagttactaatagcttgggtcaatgaataatagaaagagattggtgggaaagaaaaccagagaattcatcctttctgttagattgtatttgtctttcacagaaggaattatgatatagaggcaggagatctctctctctctctctctctctctctctctctctctctctctctctctctgtccctctctgtctctatgtctctgtctctctctctgttctctctctgtccctctctgtctctatgtctctgtctctctctgtctttctgcctctctctctgtccctctctgtctctatgtctctatctgtctctgtctttctttctgcctctctctctgtccctctctctgtctctatgtctctgtctctgtctgtctctgtctttctgcctctctctctgtccctctctgtctctatgtctctgtctctctctgtctttcgcctctctctctggtgtccctctctgtctctatgtatctgtctgtctctgtctctctctctctgactctctctctctctgtttgtgtgtgtgtgtgaaaatgttaaaatcaagcaaatcaaacaaatcattagttgtctaactaagattctagctttgaaacctcaccgaaaaaaaacctccaaacaaataagaacagaggcagaaagggtgcatacaaacgaggactgggtagaaacctcagttctcctagctttctctgaactgcaaatccttcagccccaactgtcaattatttttctctattggcctctgaccccagtggcggatttctaccttcaactttttcttccctctcgctgcagtgctttggagtccctgcacctaagtcacgcccgcagggggtcactctagcgcttgcacactcactgtccttggggaggggtcggggagcgggaaagggggcacttgagtcagaactcatctcagggtcccgcagtgggcaaacagcgaaggagggagagccagtagcacgcatgtgtccgcacacactcattccacgaacccaggggtggggccctatctttcttctgacacagggacctggagctgcgggaatttccccagcctgaggctccgggctcttccagccatcatgtataaaaggggttcgcggggccctggagccccagatcgcgccagggcacttggcactagctcccgcgctccagactccaaccacacttcagcccagcgccatggcccctcccacccgccggctcctcaatgctgcactgcttctgctgcttctgctgatggccaccagccaccagccttcaggtgggaccccaggctgattttcccggcggaggctcaggtgggcacagtcacccacagcgtggctgacccagtgtcttctcctacagggactgttgtggcccgtgagctgcgctgtcagtgcctgaagaccctaccaagggttgattttgagaacatccagagcttgacggtgacccctccaggaccgcactgcacccagacagaagtcatgtgagtgcctccctgggtagcctctggcattgccagaatagcccagaaccccctgctgccccatgctcaccccagcggaacctcatgccatataatgatccccacttctctctgcagagccactctcaaggatggtcaagaagtttgtctcaaccctcaagctcccaggcttcagaaaatcatccagaagttactgaagaggtgagtggtgtttgcttacacgttgtaaccctcatcagagtacggcttctgtctcttgaaaatcatatcagggaaagtcacagaactacaatcatgattattaattatcatcacaattataataaccgttctgataattaattagcctactggtggtgcctgatatacacatatctccacggaaacttattatctgtgtctttcgagacattttatcttaaaacttaatcgaaacaaagcatagtagtacttcatgagttaagtgagacctggtgtgacagacaaggtgcttcaatagctctagttttggggaccccagaacctgacactatctccatcctatagaagggcatctgcaggcctgaggtgtttactctgtggcagagccttcataggccaaggtcacttaggccaggctgtcctcggcaaactaaggagaacgaagaatgctgtgcacctaatacagacatcttattttctcctgacagtgacaagtccagctgagctgggaaagggggaagtatcttgtacggtgatggaggacctgcctctgaagcagagcagcgatccatccaatgctgcctggatgagcctctgcctgcttgctttgaacaactcctgagagtttatacctatttatttcccccaaattctatgttaatattttacatgtagaaaaaaaaaaccctaagtgtataattgaatctacttgcaagattgcatcttatttaaagtttatttaatgtcaggtctaagtttaaccaatccttattcttaatttgaaggttaaaggtttccagatcccctcagggaattgtattaatatttctgaggcaattttccccggctgaccattttgatggcagctggggtagtcaggaaacagacaaagaaggtcgtctcagtgtaggaagagtgtatgtgcacatctagtttgcaactttacaaggttagcagctaatcttattatttattgaagtggtttttacagcgtcacaggaatgatcgactttgtgttggagctctaagaattgtgatgtactatatattctttagacatgatgactatttaatgcctctttgtcttagaatggagaagtttaaatatttattgttatttttacaaataatttgaaaataaaatattgtaaaatagtgcttgttctgtttccctgagggctgtggctaaaggttaatgcgatgatttatctcactgtttctcaagttttcttcctcttccccaggcatttagttggttagaaaattaaatcacagtctaagtcatggctctgttcatgtggtggtggctctggatccccacccaagaatgtacttttcccagggctgactcaggagaatccccacctctctgctctagttccagggcatgtgatgccctcttctggtcacc

SEQ ID NO: 3299 - DNA, 1399 bp, Rattus norvegicus
gcgagctggtgtctggcaggacgcgggctgcgggaggtcagtggcggtcggtggccggagtcggtcgccggcaccatggaggacgatgacagctatgtccccagtgacctgactgcagaggagcgtcaagaactggagaacatccggcggaggaagcaggagctgctggctgacatccagaggctgaaggaagagatagcagaggttgctaatgaaattgaaagcctgggatccacagaggaacggaaaaacatgcagaggaacaaacaggtagccatgggcagaaagaaattcaacatggatcctaagaaggggatccagttcttaatcgagaatggcctgctgaaaaacacttgtgaggacattgcccagttcctgtataaaggggaagggctcaacaaaacagccatcggtgactaccttggggagagagatgagttcagcatccaggtcttgcatgcatttgtggagctgcacgagttcaccgacctgaacctcgtccaggccttgcggcagttcctgtggagcttccggctccctggagaggcccagaagattgaccggatgatggaggcctttgcgcagcggtactgtcagtgcaatactggggtgttccagtctacagacacttgctatgtcctgtcctttgcaatcatcatgctgaacaccagcctacacaaccccaacgtcaaagacaagcctacggtggagaggttcatcgccatgaaccgaggcatcaatgacggaggagacctgcccgaggagctgctgcggaatctctatgagagcatcaaaaacgaaccctttaaaatcccagaagatgacggcaatgatctcactcacactttcttcaatccagaccgagagggctggctactaaagctcggaggtggcagggtaaagacttggaagaggcgctggttcattctgactgacaactgcctttactactttgaatacaccacggacaaagagccccgcgggatcatccccctggagaacctgagtatccgagaggtggaagactccaagaagccgaactgctttgagctttatatccctgacaataaagaccaggtgattaaggcctgcaagacagaggctgacggacgagtggtggaagggaaccacactgtgtaccgcatctcggcccccactcctgaggagaaggaagactggatcaagtgcatcaaagccgccatcagcagagacccgttctacgagatgcttgcagcacggaaaaagaaggtctcctccacaaagaggcactgagggtgcaccagggcacggccagcccgtgaagctgtggccccttctcctgcctcccctgagggcgctgtggagcccagcagaggagagcagagggcttctctgccagttcctgcccactccgctccta

SEQ ID NO: 3300 - DNA, 1645 bp, Rattus norvegicus
cgcacgctgaggagctcctccgttctccccgcgaccacttctcctagtcccggctttcagcccagtcgctcccgccggctccgggctcgccggctggctgggagtggcctcaagatggacgaaggcggtggcggtgagggcggcagcgtgcctgaagacctgtcattagaagagcgagaagagcttttggacatccgtagaaggaaaaaggaacttattgatgacattgagaggctgaaatatgaaattgcagaagtgatgacggaaattgacaacctgacttcagtggaggagagcaaaacgacacagaggaacaagcaaatagccatgggaagaaagaaattcaacatggatcccaaaaagggcattcagttcctgattgagaacgacctgctgcagagctccccagaggatgtcgcccagtttctgtacaaaggagagggcctgaacaagaccgtcatcggagactacctgggtgagagagatgattttaacatcaaagttcttcaggcttttgttgagctgcacgagtttgctgatctcaaccttgwccaggccttaaggcagttcctgtggagcttcagacttcctggagaggcgcagaagatcgaccgcatgatggaggcctttgcgtcccgatactgcctgtgcaaccctggggtcttccagtccacagacacttgctacgtgctgtcttttgccatcatcatgctcaacaccagcttgcacaaccacaatgtgcgggacaagcccactgctgagcgcttcatcaccwtgaaccsaggcatcwmcgawgrtgrgrrccwtsccgaggagctgctgaggaacttgtatgaaagtatcaagaatgagccgttcaagatcccagaggacgatgggaatgatctgacccacaccttcttcaatccagaccgagaaggctggctgctgaagctgggagggggccgtgtgaagacctggaagcggcgctggttcatcctcacagacaactgcctctactactttgagtacaccacggacaaggagcccagggggatcatccccctggagaacctgagcatcagggaggtggaggaccctcggaagccgaactgctttgagctttataaccccagtcacaaagggcaagtcattaaagcctgcaagacggaggcagatggccgtgtggtggaggggaaccatgttgtataccggatctctgcccccagccctgaggagaaggaggagtggatgaagtccatcaaagcgagcatcagtagggacccgttctatgacatgctggccacaaggaagaggaggattgccaataagaaatagggaaaagtcaagatccagactccagcggatacactggcctcacaagccgcaggactggggacagtgtggaccccatgggtcctccagaagagccagccaaggccggagccctccagcctgtgctctgggacattggccagctgtgagcgtctctttcctgccaccgtcctagtattgacctttggggacccttgtccacaacagcacctggtgatgacagcctccagacctgcacagcccacgtgggactcctgttccggagccagagcctcagccacaccaagccacacctgctctctggggcagcactacatgttctagaagtcgc

SEQ ID NO: 3301 - DNA, 4708 bp, Rattus norvegicus
gaattcggatcctgcttcctccttttcttttactctgtgctcctgactgctagagtagaggagggacccccctacttccagaaatcagtgtttgagcttcatccaaggaaagccccgtatgacattagccaaggataaaactcaagagcatcttcactactggcttgggaatccaggaggctggatgaaggggtgaggtccctagcctcaccagttacaaaagagaaaccccaggcacgttatttatacttctggcctcatttatttttcctagcatgtaaatgggcaccagagttacccacctcaggagcattttcccggaggctttgaagctttcacgcacacaaattggtgtgcaagaagcattcattaaataactgcccattcttttcaccaacaattctcagcggcttctgcatgaagcaccacaagatacagccaggggtcctatttccccaattgatccaccccactacgattccagataccaaaaaacaatgaaacaacatcatagaatgggacagacgaggaggagaggagcagagcttgcagcaaggaaggattccatgcatcaggaaattatgtcccaggcgctcgctgtgaaaaagccagtggaccaaattgttaaccacactaattgcaccctgttgcaggcacatagattcacacttatttgcacattcagaatgtaaagcccagggaatgaactaagtacactcaagacactggatgctgtctcgcagctcatgtgaatggatcagggctcccaaagtttcccgtgtcttgggaatgcagggttccaggcagtgcctcggaaagtcctgctggaatatctgaggtgggatctgaagttttgggaagtctttctagacaatgtggcttttctggagaatacacgctctccgtcagatccaagagcaaagggccagagacactgaggtgggtttgtagcatgggaaaggtgtgtggaggttatggagcctgtcatagaggcagggaggatggcctctgggacaagccgaagaatgtggaacctgaggcttggtgtcatgaggcaagggcagaactgggtaaaatgcttttccatagcaaaccctttcaggagtttaaaaaatgatgcccaataaggtcttcattctcacgattcaagatattaacagctgtgcggcggctcagggctgtgggagtcgccacactgcctgtcactttctaggaacatgggtttccactgtggtctacggatcctggccaagtgggagtcatgcatgagggcccataggtgatggctgttccaacatttaggttctgttcttaagtcaggactgaggaccggggcaggaaggagacatactcaagactggccaggactgactgggcaaagtctggtcagagctctcctttctcctcatgctgggccctgcatcccagcagagcaggaaaccaactctgtggggggaccagttcccacttactgcaagcccgagaatcactgccggtttcagataggtgagggaaagggaagaaggctgaagtagagcttcttccaccacggtgtgtgtgtactggcgtctccaagttctgtctaggcactgggtactccacagacaggtaaacagggcacataggacacctggcccccggtcctcaattttaatgtcttttaaacagcactacctatgaggagaccctccaccggggtggcgttacagctctataaggattggctacatttaacaaacgtagaagccccacggcatccctccagttcaaaggcagttctggaaggcccgctttggccacagaatgagcaacaggtatagtaaacaagtcacagaagccaaggaccactggcctccttctggcccgtggctcttctaggcctactcaagatttgggacagatggcagtttctattcctttgttccctaacaaccttaaagcaggaggctgtttcctccttgctccgcccctccccagagactcatatttaagcaagatgctctctgctcaccacagtgcctggacaccaccgctgagtttctagaaactctttgctcccagcccccttcatccgtgcgcctcatggcctagtgacagacattcttcccttgatgctaaggccaaagcttggcagcaaaaggtgcctgaggctacgttttaattattggctccagagagcgggccaacgcctgcattgcacaggacatgcggcgggcagacacagtagcacacacctacacgcactcgcacactcaggtgggcttggtgagcctgtcttccacgaggctccgcgaacgtcccaacccgtcacaggcgcggaactccaagcgcgtggagttcaagcggtacttacccccaagacgctctgagccaggagccccactgtcacagtcgccagcagcagccacctgcataggagaaggagggagggtgagagagcgacataaaagtgcgggccccaacttgtcaactctagaaagatacattcaaagtcccctgcgcctaggagaccaggcagaaggcgacttaccctctcaggggaagaccagaggctgagaaccgcactcggtccatgatcccagtctttcagctctaggctcggctcgatcccttcctaacctggaggcaagagacaaagagggttagcaagggttgcaggcagagagagcattatcatcgcagcaccctgactccgcagtaatgtccctcgtttccttgcggagtgaccaaagttctgttccactaggagacagaaaaagggagactcttctccgtaggccctgcctggagctgttcagcccatgcagcgcgatcctgattcctccagctccgatccaaccgagcgctccgccttagcctgccccagcgctacaagtccgcgacttggggcctggctctcggcgcctcccgggggtctctctcacctcggggtcaggagctgctgccggcgctcatgggcccctgctgaagcgttggctcgcgacacactggcggccaggcctgcctggctccgcttggtgggcgccggattcccggccccggcgtgccttgccggtgcttgcccgggattggcgagccaaggggctcgtggaatcggggcgcgggaagagctgggtgcggagcgcagagccccggcgttcggactccctgcgacaccaagtcccgagccgcgcgcagcctccgcctcttacccgcgccgcagggtcctccccttggagacgccgcccgcgcactgcggaggggagggggcagcgccaacaaattggggagctcctcgggcggcgcgctcaggtctctgctcagagccaccgcacccgggacggtgagcagggctcacgcccgggccctccgagactgagcacctcgccgcggcccacgggagacgggctgcagttccccgccgtctctgttggtcccccgccgccccgggcgcgccaccatggggccccggctcagcgtctggcttctgctgccgctcgccgcccttctgctccacgaggagcgcagccgggccgctgcgaaggtgagtccccttcgggctgcgctccccaacctccttccttgcacctccggcgccccgcgaggcctctttgtccagcgcctggcgcggtcaagccgcccggccctcgagggtgtcgccggtggcacggccaggtgcactcttccacaggctctcccgctcgtggtccctgtgggctgcgatcgcacatccattacggaacctcctttgttacgggctgggtgagggagacttaggaagggactgaagcttagcgcgtaccgtggccggggtgagggtaccagggagccagtgagatttgaactctcatagccaaggcgctcggcggcggggcgcgcgagtgggtcggggctggaagggtggccaggcacaccccacgccactcagagtcccacacacatgtgcaggggagatcgctttgggtgtgtttctggttgtttggagaccgtgatggttgaggccgaacagctttgggccgtttgcctggaaacatctgtatttttgctttcccacgactttgtgtagcctacggcacgcttgagaacagacgcgggctcttctccgcatcctaaaagtctctgcctctactcttgccttttatgagtgtgtgcctgaaaattataaccacatttagacttgagtgtgaaaccaaagcgaaactccatcgcattgttccctgcgcaaattgtttttttaaagtttttgtttcctctggtgctgtgcttagccaggagggcgctgggagatgtttgcaagagccagacttccagctctggaggaaccggccagactttctgccttggcctctagagaatacacttcagctgctgctgctgtgacagccatacaggcccaaaggccacaaggtgtggcctctcaagagtttgccttccccctcaaatgcttaaaaaaaaaaaaagatgtttgctgctttgcggcgcttctaatttttttttaagaagaaactgtttgttaattgtgcattttctttccattttaagaatttcccatctttcctgtaggagcgatactgatcagctatgctataaattattaactgttacatactagaataaactggtaacgttactagggggtttcttaattgagttttgcctccctggtggcagcttcttcattggttactgaagaaggatgattacatcagcaaccaacttcagagaattc

SEQ ID NO: 3302 - DNA, 851 bp, Rattus norvegicus
ccaaaatgtcgtgctccaagtctatggttctgggttactgggatatccgcgggctggctcatgccatccgtatgctcctggagtttactgataccagctatgaagagaaacagtacacgtgtggggaagctcctgactatgatagaagccaatggctggacgtgaaattcaagctagatctggattttcctaacctgccctaccttatggacgggaagaacaagatcacccagagtaacgccatcttgcggtacatcgcacgcaagcacaacatgtgtggtgacaccgaagaagaaaagattcgagtggacatcatggagaaccagatmayggrcttccgcatgcagctggttcggctctgctacaattctaaccacgaaagcctgaagcctcagtatttggaacaactgcctgcacagytgaaacagttmtcgttgttcctggggaaattcacatggtttgcaggagaaaagctgacmttcgtggattttctcacttatgacktcttggaccagawtcgtatgtytgagcccaagtgcctggatgagttcccaaatctgaaggctttcatgtbccgttttgaggctttggagaagattgctgcattcctscmgtctgaccgctgcttcaagatgccaatcaacaacaagatggccargtggggtaacaagagcatatgytgagctggagctcgctgctgytgasccatmtttccctcaagggacccaccctctgtaagcttcctgccagccttgtcccatccgatctggaggggcccgcactctgtctcctctgctccttccaataaacagcagttrrrtthawraamaaaaaaaaaaaaaaacattgcg

SEQ ID NO: 3303 - DNA, 2479 bp, Rattus norvegicus
acactagaggaatctcgaatggcacttaaagaaatgttcaaagtccttagtgatcaggaaaaagcaaattaaacaaccccatgattccaccttatgccaatcagaattgctatgataaaatcgtcagatgatagcacatgttggcgaggatgtggagaacaaggaacactctttcaatgattgtggaatggcaaacttgtacaactactttggaaagaaaccttgaatttcctcagaatattggtagtatattaactgaagatcctgttatacctcctttgtgtgtatgacaaaaaaaaaaaaaatgccgtataggagcatctgttacaatatgtacttagaagcttatttgtgatagccagaagctggaaacagcccagatgtctcagaatagaagaaagaatatataaaatgtggtccatttacacaatggaatactattcagctattaagaatgaggatagcaaaaatatttcaggcaaatggattgaactaaaagaatatcatcctaagtgaggtaacttagaccctaaggacatgcatggcatgtactcactaataagtggatattagccagaaaatacagaataccccggatacaatccactgaactccaaaaaggttaatccactaaaagtcccaagtccaggatgttaccaattgttaaatatgataatatatttaaattaatattattaaaagaaataatagttaattagtactgataaaacatttatcacactgtcactatactatcactataactatgtttaatgatattatgaataccaatggtttgatactgcataagcattcatttgaatatgagtttaacagtaacagaggaagaacacatagccccagaataactgtactcaggactccctcttgaacttccttcaagagttccactcaactcttctggatattcaactatttcctcatgataagctccatacaataggacaaagtacaatattgtttgcttctctgatcacactccttcatgaagggagttacacatccatcagttctcacagcatgtcagggagtaggcagtgcgactagtgcctatacccaattttgaatctatgatgactacattgaaatcatgttattttggtctctcctttactcatgttcagtgtatcttcataaagtttgaaaagtcatggagagcctgatgatttatacaagagagaaagagagagagaaataaattatgactaatttttattatgaatttgttttggaattatggaaaacatcctgtaaatcctgttaggtaaacaattataatttttgcatgtgtatgttgtgacaaattgttttcttttacagtaaaatttaaatttttgtcttgtatacctgtgaattacattttgcattttgtttttcttgaaatatgttacatttttaaaaagaataatatattgtttttctcaggaccacactatgcagtcaaacctataaactaacatatcagcctaaatggtgacatagtccatcctgagttttcctaggaaaacttcttcaaagatctccacatgaaatcctgaacaaagaaacaaatgaagggtgcatggttaaatatttgagattttaaaatctggtgtccttattaactatatttaacatttaaattgcagcagcagcaggagcagcagcaccagcaggaacagcagcagccgcagcagcggcagcagcagcagcggcagcagcagcggcagcggcagcaacaggggcagccgcaacaacagcggcagcagcaggggcagccgcagcagcagcggcagccacaacagcagcggcagccgcagcagcaggggcagctgcgacagcaggggcagctgcagcagcggcagcagcaggggcagccgcgacagcagcagcagcagcaggggcagccgcgacagcagcagcagcagcaggggcagccgcggcagcagcggcagcagcaggggcagccgaggcatcagaggcagcagcaggggcagccgcagctgcagcagcagcagcagcagcagcagcagcaggggcaaccgcgacagcagcgtcagcagcaggggcagcctcggcagcagcggcagcagcaggggcagccgaggcaccagcggcagctgcaggggcagccgcagctgcagcagcagcagcagcagctgcagcagctacagcagcagtgccagcaggagcagcttcagcaacaatgtgagcagcagttgctgcaacagcagcaatgccagcaggagcagcagcagcagcagcagcagcagcagcagcagcagcagcagcagcagcagcggaaaaggagaaaaaacagaaggagccggcggagcaggaagagcaagaggaccagaaggaccaggagaaccaggaacaccaggaggaggagaagaaggtaataatgagtgactgtgtctacatgtgtgggaggagtttgctgggaaaggaatattggtaaatttagtactgagaggtg

SEQ ID NO: 3304 - DNA, 216 bp, Rattus norvegicus
gatttgaaggtcagtgacatcacaaggggtagttgccgcctctcgtggaagatgccagatgatgacggaggggacaggatcaaaggctatgtcattgagaagaagacgattgatgggaaagcctggaccaaagtcaatccaaactgtggaagcaccaccttcgtggtgccagatcttatctctgagcagcaatacctcttcagggttcgagcagaa

SEQ ID NO: 3305 - DNA, 2804 bp, Rattus norvegicus
  misc_feature (56)..(56): n is a, c, g, or t
  misc_feature (315)..(315): n is a, c, g, or t
  misc_feature (498)..(498): n is a, c, g, or t
  misc_feature (940)..(940): n is a, c, g, or t
  misc_feature (1317)..(1318): n is a, c, g, or t
  misc_feature (1327)..(1328): n is a, c, g, or t
  misc_feature (1330)..(1331): n is a, c, g, or t
  misc_feature (1780)..(1780): n is a, c, g, or t
  misc_feature (1804)..(1804): n is a, c, g, or t
gaattcggcacgagggggaaggtccagcccttccagcaggcagctccctgcgacangactctggagggcctttgaaaacccacacacaagcactgcagcactggttttctactatgtgactggcttctttatagctgtgtcagtcattgccaacgtagtggagaccatcccatgccgtggtcctgcacggtggcccacaaaagagcagccgtgtggtgaccgcttccctacagcctttttctgtatggacacggcctgtgtgctcatattcaccggggaataccttctgcggctttttgcagcccccagccgttnccgcttcctgcgtagtgttatgagcctcatcgatgtggtggccatcctgccctactacattgggctttttgtgcccaagaacgatgacgtctctggtgcctttgtcaccctacgtgtgtttcgggtcttcccgaatcttcaagttctccaggcactcccagggcttgcggattctgggctacnccctcaagagctgtgcttccgagctaggcttcctcctcttttccctcaccatggctatcatcatctttgccactgtcatgttctatgctgagaagggcaccagcaagaccaacttcacaagcatccctgctgccttctggtataccattgtcaccatgaccacacttgggtatggcgacatggtgcctagcacatcgcaggcaaaatttttgggtccatctgctcacttagtggtgtcttggtcattgccttgcctgtaccagtcattgtgtctaacttcagccgtatataccaccagaaccagcgtgctgacaagcgccgagcacagcagaaggtacgcctggcaagaatccggttggcaaagagtggtaccaccaacgccttcttgcagtataagcaaaatgggggccttgaggacagtggcagtggggagggacagatnctgtgcgttaggagccctctgctttcgaacaacagcatcaccatctgctgcattgttttggagaagactacgtgtcatgagttcacagacgagctcactttcagtgaggcccttggagctgtctcactgggtggtcgcaccagccgcagtacctcagtatcatcccagccaatggggcctgggagcctgttttcatcctgctgctctagaaggggagagcgcagagccatccgccttgccaactctactgcgtctgtcagccgtggcagcatgcaggagctagacacactagcgggtcttcggaggagccctgcccctcagagccgctcaagcctcaatgccaagccccatgacagccttgacctgaactgtgaganncgggacttnntnnctgccatcatcagtatccccacccctcctgccaacacgccagatgagagtcaaccttcctcccctggtggcggtggcagtggtggcatggctaacaccaccctcaggaactccagcttggctactccgtgcctcctccctgagactgtcaagatctcttccctgtgaggaatgggcctgcccattcagagggccttctttattcttgggaactccttccaaagccatattttggggaggcaaagagggacagacccgggaactccttatgcccccagacaagaactatgcaatggagtttcatagaatggcccatctgatggggaagtagggaacgaggaacttccctcagttcagacagtttttcttgtgggagcttgaagcatgggactccataggtccctggcctccttgccccagcatgctggactggcctctctctcctagctngcctcttgcatgcctcttcccttnggccctctgaggcaggttaaagctttctatagtctgacatttgaggtctgsacwgrcaagagttgagagtttctcttctctttggttgtgttgcgcaggtttgggggttcagggaagagaaccctcaactctaatttagcctctagggggcaaggttttgtccttctcargcccagcatttcccagatttggaagcttggaatgcaaccctgggctggcttaatgggctgtggctctgtagtgacctgctaccctgcctgagggggtcaggctgcttctcccaacaaagagatagcacaaacactaccctcccctggctagctgctggaagtgacttcctgccacctgtcttctgctgggcctccagcaaactagcaaatagcagctgctgtcataccaatgtgcaaagcctcggaccaattcgctgcagcatatacatgtgctctgatcagatgggccacatctaactactctcttctctgatgtgctcccttcttgggttggtctgcagtctggacctgctgagataagagactaacatccagcaagagctggcgtgggctggttcatattcttgggcagaaatccagaaatagtgtgggcagaggacamaattgttcctgacccctgggagagatagaagatatcgcctccttctctgctgtaactccttttgctcgctgtcttctcctccctcttgggtcacttgratctatgctctcagaccgaatctcacgttatctcargttcccttgtctccagctctgtccctctaaagctggcagctgacaaagatgaagttttcatcagtcaataaaacctaagaggagagatgtgkrccgmaaaaaaaaarawwaaaaatgcaatgggctatcaacagtccaaggcattggctgtcaacacgtatgaacaaaaaacctgggggggggccccggtccccattcgcccctttaagggggcgttttacaatcaactggccgggggttgaaaagggggggag

SEQ ID NO: 3306 - DNA, 1070 bp, Rattus norvegicus
gggcaccgaagatgcgctccattagaaaacggtggaccatctgcactataagtctactcctgatcttttataagacaaaagaaatagccaggactgaggagcaccaagagacgcaactcatcggagatggtgaattatgcttgagcagatcacttgtcaacaactctgataaaatcactcggaaggctggttccaccatcttccaacattccgtacaaggctggaaaatcaattcttctttagtcctggagataaggaagaatattctccgtttcctagacgcagaacgtgacgtgtcggtggtcaagagcagtttcaagcctggtgatgtcatacactatgtgctggacagacgccggacactaaatatttcccacgatctgcatagcctcctgcctgaagtttcaccaatgaaaaaccgcaggtttaagacctgtgctgttgttggaaattccggcattctactagacagtggatgtggaaaggagatcgacagccacaactttgtcataaggtgtaatctagctcccgtggtggagttcgctgcggatgtggggactaagtcagatttcattaccatgaatccatcagttgtgcaaagagcattcggaggctttcggaatgagagtgacagagaaaaatttgtgcacagactctccatgctgaatgacagtgtcctttggattcctgccttcatggtcaaaggaggagagaagcacgtggaatgggttaatgcattaatccttaagaataaactgaaagtgaggactgcctatccatcactgagactcattcatgcggtcagaggttactggctgaccaacaaagttcctatcaaaagacccatcactggtctcctcatgtacacccttgccaccagattctgtgacgaaattcacctgtatggattctggccatttcctaaggatctgaacgggaaagctgtcaaatatcattactatgatgacttgaaatatagatacttttccaacgcaagtcctcacagaatgccactggaattcaaaacattgaatgtgctgcacaatagaggagctctaaaactgaccaca

SEQ ID NO: 3307 - DNA, 1339 bp, Rattus norvegicus
ggcacgagagtgaatggtgaggaggggctgtcagatcctgctgctgctaatggatggagccttagggtgcccctacacctcctgaccttggctagactcacaggcagcaaaggaaccaggccatcctccggaaccatggttggacttcagccatcagaagtgcctcccacaacagttgtaaagttcctgggggccggcactgcagcctgttttgctgatctcctcaccttccccctggacaccgccaaggtccgcctgcagatccaaggggagaacccaggagtgcagagcgtgcagtaccgcggcgtgctcggtaccatcctgactatggtgcgcacagagggtccccgcagcccctacagcgggctggtcgctggcctgcatcgccagatgagttttgcctccattcgaattggcctctacgactctgtcaagcagttctacacccccaaaggaacggaccactccagcgtcgccatcaggattctggcaggctgcaccacgggagccatggcagtgacctgtgctcaacccacggatgtggtgaaggtccgatttcaagccatgatacgcctgggaactggaggcgagaggaaatacagagggactatggatgcctacagaaccatcgccagggaagaaggagtcaggggactgtggaaagggacttggcccaacatcacaagaaacgccattgtcaattgtgctgagatggtgacctatgacatcatcaaggagaagctgctggactctcacctgttcactgacaacttcccctgtcactttgtctctgcctttggagctggtttctgtgccacggtggtggcctccccagtggatgtggtaaagacccgatacatgaacgctcccccaggcaggtaccgaagccccctacactgtatgctgaggatggtggcccaggagggccccacagccttctacaaaggattcatgccctcctttctgcgtctgggatcctggaacgtgatgatgtttgtaacctacgagcagctgaaacgggccttgatgaaagtccaggtactgcgggaatctccattttgaacaaggcaagcaggccgcttggtactttcctcattaaaaaaggccgcctggaacagaacaaagcttctctgcccaggggtcgcaggcccatgcacgcacacgacggaaccctgcactgttactgacttgagaaactgaactaaaagagggggagagttttggtcttcgatgtttcatcctaaaacacctttgttttgcactgaccagatgggaaataaattatattaatttttaaaacctttccggttggatgcctaacatttaggccagagacaac

SEQ ID NO: 3308 - DNA, 7479 bp, Rattus norvegicus
ttctaccagacctggtatgatgagcgcctctgttacaatgacacctttgagacacttattctacatggcaacgtggtgagccagttgtggatcccggatactttttttaggaattctaagaggacccaagagtatgatatcaccatacccaaccagatggctctcatccataaggatggaaaagtgttgtacacagttaggtatgtcaagcctttagtgtctcactttctagggctctctcactcttccagaaaattttagctagggactcctaagtaaatatatcattctgaataatattcctaaaaccctgtgcagcttttctagatcaggaattcaacctcttcctgtgcaaatataagacactgagatattaaataaaagattttaaagatgcatgccaagtgttttggtaatcatggagctgtatttgccccacagtctagaaggtaggtgctggcctgactgtattagtagataattccatcccaaatgggcatagtatttaaagacacgcccacagtgacagaattgtccaggcacagtataaatacatcggtggaaaagtattcaggactaggatacataaattgaatgcctggaaggagatgcttgtgtcagcaatatgggatgtggaggtggtgcaaagtagcacaggactagagcactgcacgaacaagaaagaaaaatcaatctaggctggcccatgtacttctttgatgatgtagcctagtagtcagattttagaagttcttcttcctctctttgtatcattcctttgggctttttgtcttaaattctactaatggcactcattagatatgatacctggtcaatgttgagtagatatcagtgcaaagagccagcctaatgaggctcctttctcccttccaggatgaccattgatgcaagatgctcactccacatgctcaattttccaatggattctcactcttgccctctgtctttctctagctgtgagtaccttcttaggtttctggggatccagagatatgctgggccccacttttgctcatctttgccttttacatttttctgcttctgcttgtttcctgtgatggtgccagggttgctataagcctccattttccatcatcaccccttttcctgtaagcagtgctgtgtgtgtattgctttggctttatgttgaattcttccctcacccttgctctaccttaagctagtcacctgcttctgaagtatatctgaagtatgcctgctcctctccatctctgccttgatgcagggctttaatcatcttctgcttggacttctacagtaccttcactttgaaacagagtgtgtcttaagctaaattcatttttttcttcccaacacctgcctccaaagcaaatgtgtcgcttctgtgttgcctcattgaagggtgccatcatttacccagctacccaagccaagaactctgacagccccattcattgacctcctacatctactcagttcacacatcctgttggtgttccctccaaatctctattgatctcacctccatctctgcattctgactattattagctttcattcctcatttcaaatgtgttctttgctcgcctggatcaattctaaatgccttaaaatgaacctcaaatcccttcatgagctgaccctgctgcttcctgctatacaacctatctgtgaaatagtctccctaaagttttgctgtttccacattcacctttctgtgcttccctttcaccttcttcaacctcatctctattgagaatgtttattttcaaaacttaaagtgaatgccccatgctttaggaagtgggtcccaagagatctttccctattttgccaattgttccatgggtagagatttttcagagcaacccccaaactcacaattgtatatggccttactcaatgcaatgtgaatgctggagggtaggttcacgccttactcatctttgcatccgaagcccagggcaaatgtacttattgaatgcacttcaacaactgggccaaaggcagggtctcaaagctggtgaagccaaagtcaaaagtccaaaacatggctcaagctagcaccatgcttgtggggccctcaactgggtttcccagtctcattcattcctcttttccacattgttttcagtttcctatgatgagcatgagatgatatacaagtgggagaatttcaaactcaaaatcgatgcgaagaacacttggaagctattggagtttgattttacaggagtgaacaacaaaactgaaatcatctccaccccagttggtaagtgtgcagtgggagctagagctgggcagagtctgagggtgtagtaccaacaactggaagtggctatttgtaccaatgctatgtaaagagcttatggaaacactgtctaggacatcgcttctctctcatatatgctaaacacttacaactgtttgcagaggaaactgagacttcatagctatgtctcagtctcatctgcaaagaagtaagtgctttgccaagccccttgaaggacggggtaagtagatatatgtttgtaaccttcagtatgttaatctaccttttgagttttagatcttttgtatttaatttctttcttatatcactgactaacttagacaacattggggaggggtactctgtgtgattttaccaaatcctgaaccaggtcaagttggttgagtgggaaggaagaccaccctagcaggaggtagaagtggaaactagagtgacaatggcggctagtagggattgaggagtctgcagatggttactcaggtgcaatggctacagtaatattatcttaaaggagcaactgtgaagagtacatattttcaccagaggcttcagagtggaatcaacataaacatgttttttcctcctgatcttgttcctgacaaggataataggggcagattctgggtctcttaacttgtatctcccaaatagatgtgagcatctttgcttgtattcctaggtgatctgaatgaggagccaataaatcttctcagggtacctctgagagcaaccctggaccttcttcacatgtactgacaagaatgtggatggatcaggtcacccagccagacttttgacatttattttgctttgcttctgtgtgatgatgacataaaaaaatctgctattgctactgttggtcactcggtgaggggcagcttatgctaacccaactaaagctttgcttatacaatactaggcagggatgggtgctgcttgtcctgttcctgggactctgagaaagccttcttgcttgctttgacttggggttcttgttcttcttctacataaatgtgggcctgcctcttagtattcagtttgtccagataggtggagcctcatcatcagaagtgacagaagagacaaggttcaggggctttcaagtcactagtggttccgtttagtagatggtttttgcattgtttcaaaatggtgccctagtgactacaaagccccagagccagcatcatcagtgaagcaatgtcagtaggtaagcaacatctcttactgtggagaaagaaataggtcttcttttttcattgactagagactacttattctgaattcatactgtcttcactgtcagttatttttgagtcaggttccaactctcccagtttgaccctggggcacttctttctagctagaacacacatgtactcatttttcagggtttaaatgcagcagtgccctgcaacttgggccatcttggaccttacagcagagtttctgcttcaggagcttctcagaaagtgcagccttgtctgtagtaagtaaaccatccttcactggtggctgttgagcctctgaggaaatcttgccacgatcaagaggtcagcatcttacaaggagattattttcttccctagacgtctctttccatcagaaaattcttcttgctcatctaaaatgggagtttctggaacatttacccatcagatctagttctttttcccctataactacccagtttacattaatttaaggtactctttcaaaagtcaaatgtaaagatctagggttaacattagagcacacatttgtattctattgggactctcctccctagttccttttcttctcttgttcttcagttcactagtcctctgggcagtcttttaattgtgtcttttgacagtgcagccatcaactatgatctggacaaagcaggtaagaaccaaagtcatctttaatccattttgttttggtttggctttcagtcctagatacctctcttccattggtattgcttcttcaatcatcagaatgaaagaaacacttattagtatccttctcttgtccaatttccagcttttagtaaataaaacatttcttctttaatcagactgactaaaatttaaagaatgagaaacccaacagcacaatgcatcttgtgacatacatattaagggagtttttaatcacagtcaagtctccaggacagaaagaataataatttggtcattctggctagtagcatagaatggtttctggtgcagtgccggaggcattctagtattcaggcaggaagtttcccactgaccataagctacttatttgcctttctctgaagaacctgagaagctttgttcctccaaggtcaagtctcctaacactaggaggaaaggttgctctcgatcttcacggcccactcagacttgccaggtacatggtctgttttctgtatagtctacagtctagacatttagtgtttatgtctgccttccaaggttattttgaccaggggtatcaaaagtcactgagcaccattgtttcccatgttatgccaggcttggttggctaggggctatgttaaaggctttatatgagcccttccaggcaggagcttgaaggtccatttaatttaaggtcacaggtggctgttgcatcacagaactggaaattgagggcttaacttcacagaaaaatccatggttgagacaatttaatgtctaatgacatggagagtaaaagtgatcctctgggcaaactaagcatggagtcataatattatgaagagcattagaagcaacattaggaacagaatatgccagctggaaatacaggcttgatcaacttctgaaagatccatttctatctaaagtaaatacatgagaaggtcattatacccaagtgaatgtgaaggcctacactgccttccgtctgaatcttttgcaaacctaacatctaaagcttgactgacaagttcatattcatctacttctattttcctaggacattgaatttaggttaagcagtaatagatcaagaagagggagtccaggatttgcttaccagtataaatatatgtggtatctaaactgggaagcagttcaattagttttaggtgaggcattcatgttgtatgtgtgcatatgtatgagtcaaatccagttaggtcttagaatcagaatacatagtgtagacactattatgtagctcatatatagcagaatatgtcatatttggctaacccaagtgggcatgctatgaggactaacagggcagataatgttgtgacatcacaaactatacattgcatttctgtgggtctcagctagccatcagctattaggttttaataccatgaaagtaaaggttatggggttgtttcttgtttgtttgatttgttttgaacttttctctcactactgcttctctgggaaaaacagattttgggagaatgaatcagttaactgaaagtaggtttattaatactcttgtaccagcttatctctcaattagcaatgggtcttacagtaaatatctgagtttctactttgctgcactgaaatactgtgcctttattatagaactttgaaagggtttcccatgagctggatggtgggagccacactatatgtgccatgctggacatcaggccagtactgcaatgcagtggtgtatttgatgtctttcaggtgacttcatggtcatgacattcttcttcaatgtaagcaggaggtttggcttcattgtctttcaaaactatatcccttcatctgttaccacaatgctttcctgggtgtccttctggatcaagatagaagctgctgctgccagggcctctgtaggtaagaaagtatggtgatcttaaatgtgatcatatgtcatagattaacattgccttctcctgttgtcctgcagcactgtcaggagcttagcccaccttcactccttgctcttataggggtcagttctgtgctcaccatggccacactgggtaccttttctcgtaagaatttccctcgtgtctcctatctcacagctttggacttctatattgcaatttgtttcgtcttgtgcttctgtactctactagagttcactgtgctcaacttcctgacctacaataatattgaacgacaggcttctccaaagttctaccaagtaagaaccacgtgttggtatgggaagcaaaactttagactgaagataggagggttatggcacttgtgtgactacctttccaagtgatgagaatttccctggggttatagaggaaataaacttgctgtgatatccaggaaggcctagaactgatgtggagagtgtagtttctaggaaattctaggcaacttttcttcttgactcactttcccttgaccattttgttatctttatttttctatttcagtttccaaccaatagccgtgctaatgcacgtactcgtgctcgtgcccgcactcgtgctcgtgctcgtgcccgtgctcgtcagcagcaggaagtgtttgtgtgtgagattgttacctatgaggaaaatgctgaagagggttaccagtggtctccaagatcaagaagacctcagtgtccctggaggcgatgtggccgaagctatgtgtgcttcagggttctcaggaagtatttctgcatggttcctggttgtgagggcaacagctggcagcggggccgcatctgcatccacgtttatcgcctggataactactcgcgggtgcttttccccattacattcttcttctttaatgtggtctactgggtgatttgccttaacctgtaggctccagctggtagctcatggggcaatcacctcagttccccaggaggtcctaagcccctttgtcaagggagttgggagacaatagcaacagcagcaagcctgaggagagtttgtctttgctgctcctccttttgttggccccttcactcaatcttttaaacagcacttctcaagtaacagcccacctctctattcttcaaagagtatccatgatgttcagtgtgcccacaattgagcagataagctatctcttggttgtgtttgcagttactgtttttccccaggaggtcatggtaccatttgtggtgctaaggggcccagctcaagctcagccctagaatgcacagagcaacaacagtatagcagaaggaaggtcctcatccttaagtctttaagtcaggctatttgattttttctccctgctctctcttcctctacacacaca

SEQ ID NO: 3309 - DNA, 4665 bp, Rattus norvegicus
attgcttgcttcctaggggccagggctgttctgagcacgtcacaccaatccaagcttcacaaacacctatgggcagttgaagagggggaggcctcggacttctcgctggcctgggattcctctgtggcagcagcgggaggcctagaaggagagtcagagtgtgatcggaaatccagccgtgcgctggaagacaggaacagcgtgacaagtcaagaggagagaaacgaggacgatgaagatgtggaagatgagtcaatttacacctgcgatcactgtcagcaggacttcgagtctctggcagacctgacggaccaccgggcccaccgctgtcctggagatggtgatgacgacccacagctctcctgggtggcttcatctccctccagcaaggatgttgcgtcacccacgcagatgatcggcgatggttgtgaccttggcctcggcgaggaggaaggcggcaccggcctgccgtacccttgccagttctgcgacaagtccttcatccgcctgagctacttgaagaggcatgaacagatccacagcgacaagctgccgttcaagtgcaccttctgcagccgcctcttcaaacacaagaggagccgggaccggcacatcaagctgcacacaggcgacaagaagtaccactgccacgagtgcgaggcggctttctcccgcagggaccacctcaagatccacctgaagacccacagctccagcaagccgttcaagtgcagcgtgtgcaaacgcgggttctcctccaccagctccctgcagagccacatgcaggcccacaagaagaataaggaacacctggctaagtcagagaaggaagccaagaaggacgacttcatgtgtgactactgcgaggacacctttagccagacagaagagctggagaagcatgtgcttaccctccacccgcagctctcagagaaggcggacctccagtgtatccactgccccgaggtctttgtcgacgagagcacgctgctggcccacatccaccaagctcacgccaaccagaaacacaagtgccccatgtgccctgagcagttctcctccgtggagggtgtgtactgccacctggacagccaccggcagcctgattccagcaatcacagtgtcagccccgaccccgtgctgggcagtgtggcttccatgagcagtgctacacctgactcgacgcccgaccccgtgctgggcagtgtggcttccatgagcagtgctacacctgactcgagcgcctctgtggagcgcgggtccacgccagactccaccttgaagccgctgagggggcagaagaagatgcgggatgacgggcagagctggtccaaggttgtctacagctgcccctactgttctaagcgggactttaccagcctggctgtgctagagattcatctgaagaccattcacgcggacaaacctcagcagagtcacacgtgtcagatttgcctggactccatgcccacgctctacaacctcaacgagcatgtgcgcaagctgcacaagagccacgcttaccccgtcatgcaattcggcaacatctccgccttccactgcaactactgccccgagatgttcgcggacatcaacagcctgcaggagcacatccgagtctcgcactgtggccccaatgccaacccccccgacgggaacaatgctttcttctgtaaccagtgttctatgggctttctcactgaatcctccctcacagagcacatccaacaggcacactgcagtgtggggagcaccaagctggagtctcccgttatccagcccacacagtccttcatggaggtctactcctgcccttactgtaccaactcccctatctttggctccatcctgaagctcactaagcacatcaaagagaaccacaagaacatcccgttggcacacagcaagaagtccaaggcggagcagagtccggtctcctctgacgtcgaggtgtcttccccgaaacgacagcgcctctcggggagtgccaactccatctctaacggcgagtacccctgcaatcagtgcgacctcaagttctccaacttcgagagcttccagacccacttgaagctgcacctggagctgctgctccggaagcaggcctgcccccagtgcaaagaggacttcgactctcaggagtccctcctgcagcatctgaccgtgcactacatgaccacgtccacccactacgtctgcgagagctgtgacaagcagttctcctcagtggacgacctgcagaagcacctgctggacatgcacacctttgtgctataccactgcaccctgtgtcaggaggtcttcgactctaaggtgtccatccaggtgcacctggccgtgaagcacagcaacgagaagaagatgtaccgttgcaccgcctgcaactgggacttccgcaaggaggctgacctgcaggtgcacgtcaagcacagtcacctcggcaacccggccaaggcccacaagtgcatcttctgtggtgagaccttcagcaccgaggtggagctccagtgccacatcaccacgcacagcaagaagtacaattgcaggttctgcagcaaagccttccacgccgtcctcctgctggagaagcaccttcgggagaagcattgtgtgtttgacccagctgcagagaatggcacggccaacggggtgccccccacctccaccaagaaggcagagcccgccgacctgcagggcatgctgctcaagaaccctgaggcaccgaacagccacgaggccagtgaggacgatgtggatgcatcagagcccatgtacggctgtgacatctgtggtgcagcctacaccatggaggtgctgctgcagaaccaccgactccgggatcataacatccggcccggagaggacgatggctcacgcaagaaggcagagttcataaagggcagccacaagtgtaacgtgtgctctcggactttcttctcggagaacgggctccgggaacacctgcagacgcaccggggccctgccaagcactacatgtgtcccatctgtggcgagcgcttcccctcgctgctgacgctcactgagcacaaggtgacccacagcaagagtctggacacaggcacctgtcgcatctgcaaaatgcccctgcagagtgaggaggagtttatcgagcactgccagatgcaccccgacttgcggaactccctcactggtttccgctgtgtggtctgtatgcagactgtcacctcaaccctggagctcaagatccatggcacctttcacatgcagaagctggctggcagctcagctgcttcctcccccaatggccaggggctgcagaagctctacaagtgcgccctgtgcctcaaagagttccgtagcaagcaggacctggtcaggcttgacgtcaatgggctgccctatggcctatgtgccggctgcatggcccgtagtgccaatggacaggtgggtggcctggccccacccgaacctgccgaccggccctgcgctggcctccgctgccctgaatgtaacgtgaagtttgagagtgctgaggacctggagagccacatgcaggtggaccaccgtgatcttaccccagagaccagtgggccccggaaaggtgcccagacgtcaccagtgccccggaagaagacgtaccagtgcatcaagtgccagatgaccttcgagaacgagagagagatccagatccacgtcgccaaccacatgatcgaggaaggcatcaaccatgagtgtaagctgtgcaaccagatgttcgactccccagccaagctcctttgtcacctcatcgaacacagcttcgagggcatgggtggtactttcaagtgccccgtgtgcttcacagtcttcgtccaggccaacaagctgcaacagcacatcttcgccgtgcacgggcaggaggacaaaatctacgactgctcgcagtgcccacagaagtttttcttccagacagagttgcagaaccacacgatgagccagcacgcacagtgagggacctcgcgacaggacacctctccgcagaaggcttgccggagacgccgtggggagggccatttgaacattacatccaatcaaagtgtcatttgcaacccagatgtaaaactctaatgatttgsccatgaggcgctgctattataagcagctggaaatgaatattaatggcagagattaaaagtattccatgctcagtgttttttattgtcctgctacagytagtgtgcttttagagttttcgccgcagactacatttctagtgttmgagaaacctgcttttttgaggctattgtcctttgttccttcatgtattatmttgatagttttttttaaaggrttmgtgtgattttttttgcttcttttctatttctttctttcttgkttttctttytcccccttcagttaactactttttaattgaaattytaggtaattgtgcatcgtgatgtgattgcttggctattgtctgaatatttccttttaattttttaattaaagrctaatgctttgattggatttkccagttcaccggacagtgrttaaaactctgtaatgaawwwaawmrrwwwmmrwgcaactggatggtctgcttttaaatgtgacttgatctgactgcagtaactagttcagctcaataaagggaatccatgcgttcascmmmaaaaaaaaaaaaaaaaaaaaaaaaaaaaa

SEQ ID NO: 3310 - DNA, 1278 bp, Rattus norvegicus
ttctgtgaccctttcagcaagtcctgaaagcttcyacgrgragccatggctgcaactactccagcacaagatgttggcgtagagatctacctaggtcycgtgtggccagccccttccaacagcacccctctggccctcaacctgtccctggcgctgcgggaagatgccccggggaacctcactggggacctctctgaacatcagcaatatgtgrtcgctctcttcctctcctgcctctacaccatcttcctcttccccatcggctttgtgggcaacatcctcatcttggtggtgaacatcagcttccgggagaagatgactatcccagacctgtacttcatcaacctggcagcggctgacctcatcctggtggccgactccctgatcgaggtgttcaacctggacgagcagtattacgatatcgccgtgctctgcaccttcatgtccctcttcctgcagatcaacatgtacagcagcgtcttcttcctcacctggatgagcttcgacaggtacctggcgctggccaaagccatgcgctgtggcctcttccgcaccaagcaccacgcgcggctcagctgtggcctcatctggatggcctcagtgtccgccacgctggtgcccttcacggccgtgcatctgcggcacaccgaggaggcctgcttctgctttgccgatgtcagggaggtgcagtggctggaggtcacgctgggcttcattgtgcccttcgccatcatcggcctgtgctattccctcatcgtgcgggccctcatccgggcccacaggcatcgtggcctgcgcccacgcaggcagaaagccctgaggatgatcttcgcagtggtccttgtcttcttcatctgctggctgccggagaacgtcttcatcagcgtccacctactgcagtgggcgcagccaggggacactccctgcaagcagtctttccgtcatgcctaccccttgacaggccacatagtcaacctggcagccttctccaacagctgcctgagtcccctcatctatagcttcctgggagagaccttcagggacaagctcaggctgtatgtggcgcagaagacgagcctgccagctctcaaccgcttctgccatgccacgctcaaggcagtcataccagacagcacggagcagtcagatgtcaagttcagcagtgctgtatgagaggtacctcctagaggaaaacggacaggggagcaggcgtgcccaggagctgcacactctagcacaggtggtgggcgagctgagccatgtcatactctaaacccc

SEQ ID NO: 3311 - DNA, 1348 bp, Rattus norvegicus
ggggcaacaaggagagaggattttgagaagaggggggaaaattagcagagaaaacgacgagacagttcgcagctaaacccaagctctctagccggtgacagagaccggataccgcaagcatcagaactcgagacatgcccaccatcgcttctcccctgcctctcgccaccaccggtcctgagaacggcagctccatctacgactatgactacttggatgacgtgactgtcttggtttgcagcaaagatgaggtcctgtcctttggcagagtctttctgccggtggtctacagcctgatctttgtgctgggcctggccggcaacctccttctcctggtggtattgctccactctgtgcctcaacgacgacggatgattgagctgtacctgctgaacctggctgtctccaacctcttgtttgtagtgacgatgcccttctgggccatctctgtggcctggcattgggttttcggcagtttcctgtgcaaggtggtgagcactctctactctattaacttttactgtggcatcttcttcatcacctgcatgagtctggacaaatacctggagattgtccacgctcagcccctccacagacccaagacccggttcaggaacctgcttctcattgtcatggtgtggatcacagccctggctgtctctgtcccagaaatggtctttgtgaaggtccaccagaccttagatggtgtgtggcactgctatgccgattttggcggacatgcaaccatttggaagctgtacctgcgcttccagatgaacctcctggggtttctcttcccactgttggccatgattttcttttactcccgcatcggttgtgttctggtcaggctgaggccaccgggacagggccgggctctgaggatggctgcggccctggtggtagtcttcttcctgctgtggttcccgtacaacctcaccttgttcctgcactcgctgctggatctgcatgtctttgggaactgtaaaatcagccaccgtctggactatatgttgcaggtgacagagagcctggccttctcccattgttgcttcaccccagtcctctatgccttctccagtcacagtttccgccagtaccttaaagcggttctgtccgtggtgctgagacggcaccaggcacctggcaccgcccacgcccctccatgtagccattcggagagcagcagggttactgcccaggaagatgtggtcagcatgaacgaccttggcgagaggcaggctgacatctcccttaacaagggggagataggaaataattaatccccgggtctgggaacggtggttctctctgagggacagcatggctgtgcttgctgcttgcccca

SEQ ID NO: 3312 - DNA, 3846 bp, Rattus norvegicus
agctacgggggcgacgacggcgacgacggcggcggcggcggcggcggaggmatkcggtcttagaatgagcaatatccacgcgaaccatctcagcctagacgcgtcctcttcttcctcctcctcttcttcctcctcctcttcctcctcgtcctcggtccacgagcccaagatggatgcgctcatcatcccggtgaccatggaggtgccgtgcgacagccggggccaacgcatgtggtgggctttcttggcctcctccatggtgactttcttcgggggcctcttcatcatcttgctctggcggactctcaagtacctgtggaccgtttgctgccactgcgggggcaagacgaaggaggcccagaagataaacaatggctccagccaggcagatggtactctcaagccagtggatgaaaaagaggaggtggtggcagccgaggtcgkctggatgacatctgtgraggactgggcaggggtgatgatatctgcccagacactgactggcagagtcctggttgtgttagtctttgctctcagcattggtgcccttgtaatatacttcatagactcatcaaacccaatasaatcctgccagaatttctacaaagatttcacattacagatcgacatggctttcaacgtgttcttccttctctactttggcttgcggtttattgcagccaatgataagctgtggttctggctggaagtgaattctgtagtagatttcttcacagtccctcccgtgtttgtgtctgtatacttaaacagaagttggcttggcttgagatttttaagagctctcagactgattcagttttcagaaattttgcagtttctgaatatccttaaaacaagtaattccatcaagctggtgaayctgctctccatatttatcagcacgtggctgactgcagctggattcatccacttggtggagaattcaggggacccatgggaaaatttccaaaacaaccaggcacytacgtactgggaatgtgtctacttactcatggtcacaatgtctacagtgggttacggggatgtttatgcaaaaaccwcgcttggacgcctcttcatggtcttcttcatcctcgggggactggccatgtttgccagctacgtccctgaaatcatagagttaataggaaaccgcaagaaatacgggggctcctatagcgcggttagtggaagaaagcacattgtagtctgtgggcacattactctggagagtgtctctaacttcctgaaggactttctgcacaaggaccgggatgatgtcaacgtggagattgtttttcttcacaacatctcccctaaccttgagcttgaggctctgttcaaacggcatttcactcaggtggagttttatmagggctctgtcctcaatccacacgatcttgccasagtcaagatagagtcagcagatgcatgtttgatccttgccaataagtactgcgctgacccggatgcagaagatgcctccaacatcatgagagtgatctccataaagaactaccacccaaagatcaggatcatcactcagatgctgcagtatcacaacaaggcccatctgctcaacatccccagctggaactggaaagagggtgatgackcaatatgccttgcagagctcaagttgggtttcatagcccagagctgtctggctcaaggcctctccacaatgcttgccaatctcttctctatgaggtcattcataaagattgaggaagatacatggcagaaatactacttggaaggagtctccamtgaaatgtacacagratatctttcyagtgccttcgtgggtctgtccttccctactgtttgtgagctgtgttttgtgaagcttaagctcctgatgatagccattgagtacaagtctgccaacagggagagccgaatattaattaaccctgggaaccaccttaagatccragaaggtactttaggattyttcatcgcaagtgatgccaaagaagttaaaarggcatttttttactgcaaggcctgtcatgatgacgtcacagatcccaaaagaattaaaaaatgcggctgcaggcggcttgaagatgagcaaccgccaacactgtcaccaaaaaaaaaamaamrwaatgggggcatgaggaactcacccaacacatccccgaagctgatgaggcatgaccccttgttaattcctggcaacgatcagattgacaacatggactccaatgtgaaaaagtacgactcmacyggaatgyttcactggtgcgcacccaaggagattgagaaagtcatcttgactcgaagtgaagctgccatgactgtcctgagtggtcatgttgtagtctgcatctttggggatgtcagctcagccctgattggcctccggaacctggtgatgccgcttcgtgctagcaattttcactatcatgagctcaaacacattgtgtttgtgggctccatcgagtacctcaagcgggagtgggaaacactgcacaacttccccaaagtatccatattgcctggtacgccattaagtcgggctgatttaagggctgtcaacmtcaacctctgtgacatgtgcgttatcctgtcagccaatcagaataatattgatgatacttcrsttcaggacaaggaatgcatcttggcgtcactcaacatcaaatctatgcagtttgatgacagcatcggggtcttgcaggctaattcccaaggattcacacctcctggaatggacagatcatcacctgacaacagcccagtgcacgggatgttacgccagccktccatcacaacyggrgtcaacattcccatcatcacggaactcgtgaaygatactaatgttcagtttttggaccaagaygatgatgatgaccctgacacagagctgtacctcacacagcyctttgcttgtgggacagcatytgccgtyagcgtcctggactcactcatgagcgcgacatacttcaatgacaatatcctcaccctaatacggaccctcgtgacaggaggagccacgccagagctcgaagctttaatagctgaggagaatgcacttcgagggggttacagcactccgcagacactagccaacagggaccgctgccgagtggcccagttagccctgttggatgggccctttgcggacttaggggatggtggttgttatggtgatctgttctgcaaagctctgaaaacatataacatgctttgttttggaatttaccggctgagagatgcccacctcagcacccccagccagtgtacaaaaaggtacgtcatcaccaatcccccctacgagtttgaactygtaccgacagacctgatcttctgcctgatgcagtttgaccacaacgctggccaatcccgggccagtctgtctcattcctcccactcctcacagtcgtccagtaagaagagctcctctgtccactccatcccgtccacagcaaatcggccaaaccggcccaagtccagggagtcccgcgacaaacagaacmagaaragmwrtggtttwcasawgmgrcggatmatgcctatcmcagaaacattsaaatsrwkymcagatgagacggataatgcctatcccagaaacattcaaatcaagcccatgagtacccacatggctaaccagatgcaaccaatataaatccacaagcagcctgatccctccaatcagagaagttgaagatgaatgttgattcccagagaccagaactatttttttttaaaggctgacaaactgcataaatggtgacgtgacaacacaacctcttacatgctgaatcactggtggaaacactagaatatgcaagaattgcaagaaaataaaattagacagatctttctctttgccct

SEQ ID NO: 3313 - DNA, 4016 bp, Rattus norvegicus
cgcccgggcaggtgtctccttagatagcccggaacgctaccccgcacgaatgatatcccacattgtgtcctgcatccgggataaccttcctgacacgtgtccgccgacactgctgcaaccgcggctggagccacggcgccggtgccctgtgctttcccaggttatgcactgcaggagcgcttaccgcttctgtgacttctttgcgggccagggaccgagaaagcatctgtgccagcgcgaggtgcaggatggagagcagggcgctgctagctgtcgctctgtggttctgcgtggagacccgagccgcctctgtgggtttgcctggcgattccctccatccacccaagctcagcacacaaaaagacatacttacaattttggcaaatacaacccttcagattacttgcaggggacagagggacctggattggctttggcccaacactccgcgtgactctgaggaaagggtgttggtgactgagtgtggcgacagtatcttctgcaagacactcacagttcccagagtggttggaaatgatactggagcctacaagtgcttctatcgggacaccgatgtctcctccatcgtttatgtctatgttcaagatcacaggtcaccattcatcgcctctgtcagtgacgagcatggcatcgtgtacatcactgagaacaagaacaaaactgtggtgatcccatgccgagggtcgatttcaaacctcaacgtgtcactttgtgctaggtatccagaaaagagatttgttccggatggaaacagaatttcctgggacagcgagaaaggctttactatccccagttacatgatcagctatgccggcatggtcttctgtgaggcaaagattaatgatgaaacgtatcagtctatcatgtacatagttctggttgtaggatataggatttatgatgtggtcctgagcccccctcatgaaattgagctatctgccggagaaaagcttgtcttaaattgtacagcaagaacagagctcaacgtggggcttgatttcagctggcaattcccgtcctcaaagcatcagcataagaagattgtaaaccgggatgtgaaatcccttcctgggactgtggcaaagatgtttttgagcaccttgaccatagacagtgtgaccaagagtgaccaaggagaatacacctgcacagcgtacagtggactgatgaccaagaaaaataaaacatttgtccgagttcatacaaaaccttttattgcttttggtagcgggatgaaatctttggtggaagccactgtgggcagccaagtccgaatccctgtgaagtatctcagttacccagctcctgatatcaaatggtacagaaatggacgacccattgagtccaattacacaatgatcgttggtgatgaactcaccatcatggaagtgagtgaaagagatgcgggaaactacacggtcatcctcaccaatcccatttcaatggagaaacagagccacatggtctctctggttgtgaatgttccaccccagatcggtgagaaagccttgatctctcctatggattcctaccagtatggcaccatgcagacgctgacatgcacagtctatgccaaccctcccctgcaccacatccaatggtactggcagctagaagaagcatgctcctacaggcccagccaaacaaacccatatacttgtaaagaatggagacacgtgaaggatttccaggggggaaataagatcgaagtcaccaaaaaccaatatgccctaattgaaggaaaaaacaaaactgtaagtactctggtcatccaggctgcctacgtgtccgcattatacaaatgtgaagccatcaacaaagcaggacgaggagagagggtcatctccttccatgtgatcaggggtcctgaaattactgtccagcctgctacccagccaaccgagcgggagagtatgtctttattgtgcactgcagatagaaacacgtttgagaacctcacgtggtacaagcttggctcacaggcaacatcggtccacatgggcgaatcactcacaccagtttgcaagaacttggacgctctttggaaactgaatggcaccgtgttttctaacagcacaaacgacatcttgattgtggcattccagaatgcctccctgcaggaccaaggcaactatgtctgctctgctcaagacaagaagaccaagaaaagacattgcctagtcaagcagctcgtcatcctagagcgcatggcacccatgatcactggaaatctggagaatcagacaacaaccattggtgagaccatcgaagttgtttgtccaacatctggaaaccctacccccctcattacatggttcaaagacaatgagacccttgtagaagattcaggcattgtactaaaagacgggaaccggaacctaactatccgaagggtgaggaaggaagacgggggcctctacacctgccaggcctgcaatgtccttggctgtgcaagagcagagacactcttcataatagaaggcgtccaggaaaagaccaacttggaagtcattatcctcgtcggcactgcagtgattgccatgttcttctggctccttcttgtcattctcgtacggaccgttaagcgggccaatgaaggggaactgaagacaggctacttgtccattgtcatggatccagatgaactgcccttggatgagcgctgtgaacgcttgccttatgatgccagcaagtgggagttccccagggaccggctgaaactaggaaaacctcttggccgtggtgcctttggccaagtgattgaggcagatgcctttggaatcgacaagacagcgacttgcaaaacagtggctgtcaagatgttgaaagagggagcaacacacagcgagcaccgagccctcatgtccgaactcaagatcctcatccacattggccaccatctcaatgtggtgaacctgctgggtgcctgcacgaagcccggagggcctctcatggtgattgtagaattctgcaagtttggaaacctatcaacttacttacggggcaagagaaatgaattcgtgccctataagagcaaaggggcacgcttccgctctgggaaagactatgttggggagctctccgtagacctgaagcggcgcttggacagcatcaccagcagtcagagctctgccagctcaggttttgtggaggagaaatccckcwktgrcskagrskmmgwmswwgctkctgwagaactgtgagaacacaacagaaactcagggtttctgctgggtggatacccacttgtctgccctggtggcagtgtctgagggttttgtcaagtggcgayggtaaaggctcasacaggatgtatccctttgttcttcctctaactccacttctgtcttgccacacacccccccctccccagtgctcagtattttagctttgtggccacgtgatggcagaaggtcttaattggttggttttgctctccagataaaatcactagtcagatttcgaaattactttatagccaaggtctgataacatctactgyatcgtttagaatttaacatataaagctgtgtctactggtttttttttttgccctygggcatatgtttttcaaaagagaaactacttttcatttkgtrccatascgtgacgagcaggggccaatgactgtwaaacatgctgyggcacatatatttatagtctgttatgtggaacaaatgtaatatattgaaacttyatattatatataaggaactttgtactatccgcatttcgtatcagtattatgtagcacgacagagactgtgaggtctgagcagctggtggctcaggacgttgagaaactcgaaggaatcctttcgtgaggatgcgcagctatccctacccatctctctcacctcaaacggaggagaaaggggaatcagagataatgtgagtgtgtccttgttctctgttcttaggaggaatgttcttaccaactgttcatacgctttataaaccaataaatgtattccgagtaaaaaaaaaaaaaaaaa

SEQ ID NO: 3314 - DNA, 3129 bp, Rattus norvegicus
atgtggaacgcgacccccagcgaggagccggagcctaacgtcacgttggacctggattgggacgcttcccccggcaacgactcactgcctgacgaactgctgccgctgttccccgctccgctgctggcaggcgtcaccgccacctgcgtggcgctcttcgtggtgggcatctcaggcaacctgctcactatgctggtggtgtcccgcttccgcgagctgcgcaccaccaccaacctctacctgtccagcatggccttctcggatctgctcatcttcctgtgcatgccgctggacctcgtccgcctctggcagtaccggccctggaacttcggcgacctgctctgcaaactcttccagtttgtcagcgagagctgcacctacgccacggtcctcaccatcaccgcgctgagcgtcgagcgctacttcgccatctgcttccctctgcgggccaaggtggtggtcactaagggccgcgtgaagctggtcatccttgtcatctgggccgtggctttctgcagcgcggggcccatcttcgtgctggtgggcgtggagcacgaaaacggcacagatccccgggacaccaacgaatgccgcgccaccgagttcgctgtgcgctctgggctgctcaccgtcatggtgtgggtgtccagcgtcttcttctttctaccggtcttctgcctcactgtgctctacagtctcatcgggaggaagctatggcggagacgcggagatgcagcggtgggcgcctcgctccgggaccagaaccacaagcagacagtgaagatgcttggtgagtcctggcacccgctgacctttcttcccccactgcctgcccttccccagcggcctctatttctgtttctcatcatctccgctccccaagtctctcaagtctctgtctttctctgcctctctcaccttggttctcggtctcactgctttctgttttcttcctgtcttttcctgtatcttgtccacgaaaaagaaccctcatattggtaattccttaaaacgaggaaccttggtctgggaaaattggtccaagatggaaatacctcacggtttattgagcccctaattgttaacggtttagcttcttgtctcacatagaatttgtggttatcaaagtaataatattaaggtaagcaggcaggtaatgggtttagaaatcactccatggtaagtctaaccacaaatttgggtcactctgttaaggacggcttatagatgtattttgtttgttttcaatattgggatttgttttctgccctgcatctttctcagataattacatccactctgtttagtctatggttttgccaggaggggcttcatgctggggtctcctttttcttgtttttgtatttgtctccccagtaatataggccaggatagggtggagaagtcatcctttcctcaaactgtccttcaggaaggtctgggtactgaacggttactgcataaactctgcttccccaaaggcatgtgcttggtgtggtaaagtcatgaagatggtgctcatgtccaagaggaacctctgatctcacttttcaagggatttcatgtttgctgacatttaatacttgttagtttttgcagggggatgatttctcatttgcaattttattattctcaaattctgcatgtcagaatgttagagatttctcagggatgtcaggttctgtttccagatgagtgattgccctgtgtcctccattggactgtaaactcatatgcaccagacagggtctacattgctgccgtggtgcatagccttccatgtgtcacttagtcctaaagagaagttactaataacctaatctcactaatctcactggcatctcaatgccgatcccattgtcatctgaaaatttgaaggggacattaaagtggcacagggaccagaacaatatttttctctcattgctgaattttaaaaacaatctaaaaaattggaattcttgaagaaactatcttatatgactaaaatgaagccttgggtgggtgctaattattattgtctggcttacctgccccccccactacttatatcttttagagatgacacagacttgctttccctgtggctactaatcccaattgcacattcagtcccttgatagacttactctaaaaatctaagttcagcggtccacgaaacataacaaagcctgtcctaaaacagaaagaaagaaagaaagaaagaaagaaagaaagaaagaaagaaagaaagaaagaaaacagaagacaaacaaggtctttccccattccctaacatacaggaatggaaattattaagtctacgtgatagccaatgaatctgtttcttaagtatgcccacaagggtgctgccggagccattgctcagggctggagtatttactgggcatgcttgaccccagcatggagggtgagaagtgctcctgggaactctgatccactgctgtggtggagagcaaacacctggcctcatttatacttgttgtctgtataatgcatataaatgggggataatcattactaaactgtttagctgagcctcatgtcagtcaatcacaaagcagagtaattaccacacagactgggaagctcagtgaagattgttagcggttggtctgacagtcttgctgtgtgctatagtgttagacccaacggaggcagtatttataaggagggcagggttccatgtttcccgtgttaaagagcaagagatgatgtttgtcagtaggcatgcagctcatggtgaaaagaaagtccagacttaaagatgtgaagtgatttgtgctttgccccaccctgacagtctctctctgtgtgccttcagctgtggtggtgtttgctttcatcctctgctggctgcccttccacgtgggaagatacctcttttccaagtccttcgagcctggctctctggagatcgctcagatcagccagtactgcaacctggtgtcctttgtcctcttctacctcagcgctgccatcaaccccattctgtacaacatcatgtccaagaagtaccgggtggcagtgttcaaactgctaggatttgaatccttctcccagagaaagctttccactctgaaggatgagagttcccgggcctggacaaagtcgagcatcaacacatga

SEQ ID NO: 3315 - DNA, 3164 bp, Rattus norvegicus
gaattcgcgcacgagagcacatgctggatggactctggttccgccctttgtgcagacaaaagtgactgggtggccaggctttgcttactgtctgagttaatgaagcttgtttgataaggttttctttcaaaaaaaaattacatataaaggatttatcaaaagccctcatgaatatttcatgagttgatacattcggctgaatggattcagtgagtctcagtgtgtaacttgcacacaagccccatccacaaggaggctggtgacagaggaagcactttggcgcattttcasasgcarrggcagcctgataaagctcctgtgacaggctgacttgccattctcccartatgctgctcttgctctgaagtgctccaggattggaaccatcacggcttcccaaattagcctaggacgagtgtgcggacccagcagccttttaacctgcggcagtgcctttgctatgttcaagactgttgttgtggatggtgaaagctagcgcgccacacgagacatgacagcaaaaaattcttccaaagaacttccagcttctgaatctgaggtttgcataaagactttcaaggagcagatgcgcttggaacttgagcttccaaagctaccargaawcmvmcctacawytmmmaaaawwwmwmmaygcagttcammaargaakwcammatgctttttcagaaagttgctggtgaataaaagcatccgacagcggcgtcgcttcactgtggctcatacatgctttgatgtggaaaatggcccttctccaggtcggagcccactggaccctcaagccagctcttcttcaggactggtacttcatgccgccttccctgggcacagccaacgcagagagtcttttctctacagatccgacagcgactatgacttgtcaccaaaagcgatgtcaaggaactcctcacttcccagcgaacaacacggcgatgacctgattgtcactccttttgcccaggttcttgccagcttgcgaatcgtaagaaacaatttcaccctgctgacaaaccttcacggagcaccgaacaagaggtcgccagcggctagtcaggctccagtcaccagagtcagcctgcaagaagaatcatatcagaaactagcaatggagacgctggaggaactagactggtgcctagaccagctagagaccatccagacctaccgctctgtcagcgagatggcttcaaacaagttcaaaaggatgctgaaccgggagctgacacacctctcagagatgagcagatcagggaaccaagtgtctgaatacatttcgaacacgttcttagacaagcagaacgatgtggaaatcccatctcccacccagaaggacagggagaagaagaagaagcagcagctcatgacccagataagtggagtgaagaaactgatgcacagctcaagcctgaacaacacaagcatctcacgctttggagtcaacacggaaaatgaggatcatctagccaaggagctggaagacctgaacaaatggggccttaacatcttcaacgtggctgggtactcccataatcggcccctcacatgcatcatgtacgccattttccaggaaagagaccttctaaagacgtttaaaatctcctccgacaccttcgtaacctacatgatgactttagaagaccattaccattctgatgtggcgtatcacaacagcctgcacgctgctgacgtggcccagtcaacgcacgttctcctctctacgccagcactggatgctgtcttcacagacctggaaatcctggctgccatttttgcagctgccatccatgatgttgatcatcctggagtctccaatcagtttctcatcaatacaaattccgaacttgctttgatgtataatgacgaatctgtgctggaaaaccatcacctcgctgtgggattcaagctccttcaagaggaacattgcgacatctttcagaatcttaccaagaagcaacgccagacactcaggaaaatggtgattgacatggtgttagcaactgatatgtccaagcacatgagcctcctggctgaccttaaaacgatggtagaaaccaaaaaggtgacgagctymkgtgtwmtyytmykggaywmcwawactgaycrkwtacaggttcttcgcaacatggtacattgtgcagacctgagcaaccctaccaagtccttggagttgtatcggcaatggactgatcgcatcatggaggagtttttccaacagggagacaaagaacgggagaggggaatggagattagsccmatgyrtgataaacasaswgytwctktkswaaagtcccaggtwkstwtcaytgastaywttktycatccattgtkgrmgasctgsscagacctggttcagcctgatgctcaagacattttggacacactagaagataacaggaactggtaccagagtatgattccccagagcccctctccaccactggacgagaggagcagggactgccaaggccttatggagaagtttcagttcgaactgacccttgaagaagaggattctgaaggaccggaaaaggagggagaaggccccaactatttcagcagcacaaagacactttgtgtgatcgatccagagaacagggattctctggaagagactgacatagacattgccacagaagacaagtctctgatcgacacataatctccctctgtgtggaggtgaacattctatccttgacgagcatgccagctgagtggtagggcccacctaccagagccaaggcctgcacaaaacaaaggccacctggctttgcagttacttgagtttggagccagaatgcaaggccgtgaagcaaatagcagttccgtgctgccttgccttgccggcgagcttggcgagacccgcagctgtagtagaagccagttcccagcacagctaaatggcttgaaaacagaggacagaaagctgagagattgctctgcaataggtgttgaggggctgtcccgacaggtgactgaactcactaacaacttcatctataaatctcacccatcctgttgtctgccaacctgtgtgccttttttgtaaaatgttttcgtgtctttgaaatgcctgttgaatatctagagtttagtacctccttctacaaacttttttgagtctttctgggaaaaaaaaaaaaaaaaaa

SEQ ID NO: 3316 - DNA, 1296 bp, Rattus norvegicus
gaagatcttcttgtggagatatctgaagtgttgtttaatgaattggctttctttaagctcatgcaagatttggataataacagcatagctgttaaacagagatgcaaaaggaaaattgaagcagctggagtgatacagtcttatgcaaaagaggccaaaaggattcttgaaggagatcgtggctcacctgctggagagattgatgatgaagacaaagacaaggatgagactgaaactgttaagcagactcagacttcagaagtatmkgmygctaaaggtcccaaaaatgtaagatctgatgtttctgatcaagaggaagatgaagaaagtgaacggtgtccagtgtctatcaatctatctaaagcagaaagtcaggctttaactaattatggaagtggagaagatgagaatgaggatgaagaaatggaagamtttgaagagagtcctgtggatgttcagacttcgcttcaggctaacactgaaactacagaagaaaatgaacatgacaatcaggttctgcaacatgatcttgaaaaaacacaagaaagtacaaatgtaccatcagaccaagaaggaactagtaaaaatgatcaagacagctctcctgtgaaaccttgttatctcaatatcttkgraaatgaacagcatttaaacagtgctacccataaggactcactcactactaytactgattcatctaaacagcctgaccctatgccattacccttgactgcaagtgaaaccctagtgcctagagtcaaagaagttaaatctgctcaggagactcccgagagctctctggctggaagtcctgacactgaatctccagtgttagtcaatgactacgaagcagaatctggtaacataagtcaaaagtctgatgaagaagactttgtgaaagttgaggacttgccmctcaaactgacagtctgttcagaggcagagctgaggaagaaaatggtagaagaagaacagaaaamccatttagctggtgagatatgtgaaatgcagactgaagaattagctggaaaccctcagatactgaaagaacctgwaamagtkggagcccagaktktatgawwtgtmtksaraaactcatstwmcycwcbwrywtagtywgcwcaytraaaawawactattacttcctagaaaacctaagcctactattgggataggagatagtctgttcattaattcaggtgcttcttttcaaattatgtaagattatgttttttatttttaaaatctttagtttaataaagtattagatgtattgctaaaaaaaaaaaaaaaaaa

SEQ ID NO: 3317 - DNA, 4398 bp, Rattus norvegicus
gagccgggaggctcggtcggcgccctgcacgcaaccatcctccgggttcccagccccgggtgctgagctcgccgctataaatagcaggttacagcttctgcttgggcgcactcgctctcactggagaaggctggaaagtcaacctgaaaagtgtctgccgctgctatcgccccctactcagcctctgcaagagaacccaaagaaatggtgtcacctggcaagaggtctgccgctttttatgaaaaatcagctcaagaatctcgcagtggactattagatcattaatgtgaagatacatcaacgtcaaaccggaacattatctggtaccatttggaaaagacactgtggagaataagtcagttgtgaggtggatcatggaaatcaaagaggaaggaacgtcagaagaaggccagcattttcttccagcagctcaggcaaatgaccctgaggacattcagtttaccagcatccagaagagtcccaatgagccacagttggaattcattcttgcctgcaaggaccttgtggctcctgtcagtgatcggaaactgaatacagtagtacaggtctcagtaatccaccccgtggagcagaccctgacgaggtactccagcacagaaattgtggagggaacaaaagacccactgttcctgacaggcgtcacattcccatccgactaccccatctatgaagagacaagaataaaactgacagtctatgatgtcaaggataagccgcatgatactattcgaaccagtgtccttccggaacacaaggatcccccgccagaagttgcgagaagcttcctgggctgtgccagctttaaagtcggggagctgctgaagtccaaggagcaactgctgtccctgagcctgaggacctcagatggtggcaaagtggtcggcaccatagaagtcagcctcgtgaagatgggggagattgaggatggggacaccgaccacatcacaacagacgtgcagggacaaaagtgtgccctagtgtatgattctaccgcaccagagagtctgagtgggaaggaaaacttacctttcatgaacgcagtgttaaggaatcctgtgtgtaaactgtacagattccccacgtctgacaataagtggatgcgaatccgtgagcagatgtcagaaagcatcctttcttttcatattcctaaggaattgatttcccttcacatcaaagaagacctatgcagaaaccaggagttaaaagaacttggtgacctttctccacactgggacaacctacggaacaatgtcctttctcactgtgatcaaatggtgactatgtaccaagatattctgacagaactttccaaggaaacggggtcctccttcaaatccagcagcagcaaaggagagaaaacattagaatttgttccaataaacctgcacttgcaacggatgcaggtgcacagccctcacctgaaagatgctctctatgatgtcatcactgtgggggccccagctgcccattttcagggattcaagaatggtggtcttcgaaaactactccatagatttgagacagagagaaggaacaccgggtaccagtttatttattattcgcccgagaacacggccaaggcaaaggaagttctcagcagcatcaatcagctgcaacctctcgtagcgactcatgcggacctgctgctaacctctgccagccagcattctcctgacagcctgaggagttctttaaagctgctttcagaaaaaaccgagctttttgtgcatgccttcaaggaccagctggtcaggagtgctctcttagctctctacactgcgaggccaggaggtatccttaggaagccaccttctcctaaggtcagcacagaggagaaaagtagccagcatgatagcccgcagcagcttagaagacaagactccataccacatcactctgactatgatgaggaagagtgggacagggtgtgggccaacgtgggaaagagcctaaactgtattatcgctaaagttgacaaactgatcgagagagacagtcgcaacgacaaaagtactggaggcgacagtagcaaggacggagatgcggaccctaacctggaagattccctcacatcccacccaagggaggactggtatgaacagctgcacccactcatccttaccttgaaggagtgcatggcagaagtggtgaaccgagcgaagcaatccctgacatttgtgctgcttcaggaactcgcctacagtctgccccagtgtttgatgctgactctgaggagagacatcgtcttcagtcaggcgcttgctggattggtttgtggttttatcatcaaactacacacaagtttgcacgaccctggcttcctccagcagcttcacacagtgggcttgatagtgcagtacgaagggctgctaagcacttacagtgacgaaatcggaatgctggaggacatggctgtcggcatttcagacttaaggaaggtcgctttcaaaataacggaagccacatccaatgatgtcctccctgttctcacaggaaggcgcgaacactacgtggtggaggtcaagcttccagcgacagtgtttgagtcgctccctctgcaaattaaagaaggccagttgcttcatgtgtatcctgttctgtttaacgttggaatcaatgagcagcagactctggccgagaggttcggagatgtttctttgcaagaaagtattaatcaagaaaattttgagcttgtacaagaatattattcaatatttatggaaaagatgccgcctgattatatttcacattttcaagaacaaaatgatttaaaaggactgttggacaatctccaccaaaatatccaagccaagaaaagaaaaaatgtagaaatcatgtggctggcagcaacgatttgtcgcaaactcaatggcattcgttttacctgctgcaaaagtgccaaagacaggacatcaatgtcagtgacgctggaacagtgctccatcctgagagacgagcatcagctccacaaagactttttcatcagagcattagattgcatgaggagcagacaaacccagggggccttgaatgagtcggatgatcctgagacaggctgcctaagcgataacaagccgacttctcgacacttctaccctgtcgccctgcttcttgtcagttcacatctgctagttgtgtggctcattttaagtcttgctttactcttagccaaataccaataagttttatgctatgttccttgcttttctacaagagacaatggactttaattctctacaagagacaatgttgtaagatttctacattttcacgattcacagaatttaaaaaaaaattagaagaagaaatgtttgaattgtggttttgttttgttcttgattttgtttttccctaaaacctaaaaggcaaaaaaaggtactatgcattgagtggattcttttgctcttttgtttatggaaaagtgctttcccgccattaaatagctaaagacaagtttttaacttgctgtctttggagtaagacaaagaatagaatcctgcaagcttgaagttctgaacctcctcatcccgggtcattcactaaagaaattaggtcggacattgcgcaggttaaacccccaagacactcgggaagtggtggttgcagactttctttccactgtgctaatattaacagagttgccgtcagctaatagaaatgtgtctgcttttcttactctgttcctaatcatcccttacccattcatgtgcttaaccttctttgtcaagtgactttatgaaaaggatggctatttctgttttgtaattaaattaacctgtttgtaactattgtttgggttgatttggctttcagactacttttctattctttttaacaaggtctcatttgtgtcttgatgcgccatttttagcacctgtgacttttgtactgtggtagaggggacaggctcttcagaaagccatctcctctctgcactgcatagctaaaacagtgaggtaaaatagggatggaacttcctttaaaaaaaatctatagggccagacttaataaattaaatgccttattcctagaactgcatccttagggctacatgtagattttaatgtgttttaagggacagatagttaatttgtggaaaagctatacaaaggcagatatatttatgaaattaaagtaaagttgtattgtggagcaaattatatttaaagagtttattaaaagttaaatatctgttaagaaacttaatcatatctttccgaaggcaataatggtattgggcctggcctaggatttaattttgtaagatgtatcatcacttgtggaaaaagaaatgtagagttgaatcttggttatttttacttggactgttgctgcaactctgcactgaacaaataaagcatatttatttaaaaaaaa

SEQ ID NO: 3318 - DNA, 606 bp, Rattus norvegicus
  misc_feature (138)..(138): n is a, c, g, or t
gcgtctgcctgtccccgccgcacctgagccaccgcgatgcgataggaccgccgccgggaccgttatccgccgtgcccgcccgccgccaccatgccgcgctccttcctcgtcaagaaacatttcaacgcctccaagaancccaactacagcgaactggacacacacacagtgatcatttctccatacctctgtgagagctaccccatgcctgtcataccaaaaccagagatcctcacctcaggagcgtacagccctataactgtatggacatmagcagttcmattccactcccctctgcccagcggcctttctcmtcttactggatactcctcatckttggggcgtgtaagccccctgccttcatctgacacttcatccaaggatcacagtggttcagaaagtcccattagtgacgaagaggagagactccagcccaagctttcagacccccatgccattgaagctgagaagtttcagtgcaatttatgcaataagacctattctactttctctggtctggccaaacataagcagctgcactgtgatgcccaggctaggaaatcgttcagctgcaaatactgtgacaaggaatatgtgagcctgggt

SEQ ID NO: 3319 - DNA, 778 bp, Rattus norvegicus
ctcttcctgggccggtgccwctgagkgtcttcggcatggcgctgcacatggttcttgtcgttttgagcctcctgcccttgttggaagctcagaacccagaacctgccaacatcaccctaggcatacctattaccaatgagaccctgaaatggctctcagacaaatggttttacatgggagcagctttccgagaccccgtgttcaagcaggcagttcaaacgatacagacggaatatttttaccttacccccaacttgataaacgacacaattgaacttcgggagtttcagaccacagacgaccagtgtgtctataacttcacccatctaggagtccagagagagaatgggaccttatccaagtgtgcaggagcagtgaaaatctttgcccatttgatagtgctgaagaaacatgggaccttcatgcttgcctttaacctgacagatgagaaccgggggctgtccttctatgctaaaaagccagacttgtccccagagctgcggaaaatattccagcaggctgtcaaagatgtgggcatggatgaatcagaaatcgtatttgtcgactggacaaaggataagtgcagtgagcakcagaagcagcagctggagctggagaaggagactaagaaggagaccaagaaggatccttaggccargcatgaactcagctctctgaactccggggactgtccccatgcccactctacccccactcctgtgcacctcgattctattttccacaataataaaggtttggttaaacaawmaaaaaaaaa

SEQ ID NO: 3320 - DNA, 641 bp, Rattus norvegicus
attgctgtactactttgttaagaggaatattttcattttcactgaccatgatgtcaagaagaatagtccaatgacttatatgcttggaattaatttcatttccctccccactccattaggtgaacaacccacagatccagcacaaagctgtcaatgaactcatcagagtgattcaccagctgtcaccagaatctagcctaaggaagcggaaaaggagtcggtgctgattctggggtagagagtgtgccaataagaagaattctgccagcactatttgaattttaaaactaaacctatttattaatatttaaatttatttatatggagaatatattttagactcatcaaccaaagaagtatttatagtaacaacttatatgtgataaggatgaatttctattaatatatgtgttatttataatctctgtgtccttaattattcctctttgaccaatcattctttctgactaattaacccagactgtgattatgaagttgtatctggggtggggggacagccaaccagctgactgaactcacactgtggcttgtgcacttacttcacttgccaacggggaacattcagaactgcaatgaccccgtgaggtgctgctgaccagaggaatgtctatacatcggcc

SEQ ID NO: 3321 - DNA, 1350 bp, Rattus norvegicus
agttcctggcgatcctgacactcttcagtgtgctgttctcacagtcgctggcctggcctctctatgggccaccttcttcagtgaggttggatgacaggctgcagttcgaaggagcaggtgaccctgatcaagtctctttaaaagcagactctgacatcttgcagaatgccttagcggagaatgacacgccctattatgatgtgtccagaaatgccaggcatgctgatggagttttcaccagcgactacagtagacttctgggtcagatttctgccaaaaaataccttgagtcactcaywsgmrracgaatcagcagtagcatctcggaagaccccgtgccggtcaaacgacactctgatgcagtcttcacagataactacacccgccttagaaagcaaatggctgtgaagaaatacttgaactccattctaaatgggaagaggagcagtgagggagattctccagacttccttgaagagctagagaaatgatgagaagggtcctctgggcagagctgaagatcagagaattcttgaaggaaaacaaccaagtgattacattatgagttctacatatctaattcaagaaaacaacttccatagcaaaaccaaataaaatgtgttgtgaatattgwggwttcctttatgtaataactgtgatgtttacattgtaaatatatttagcactctaaaattcatctttagctcgtgaaaggcttataatttcatatgctatatattctttaaaaaatatatttaatgataggtagatactagattaattgcaattatctgaagctttctgcaagggtagcaatcgaggaaaattgatgggcttatttatagcatgcagytaactattcaacagagcagaacagataatcagtgtgaccaagtytgaatgctaagcagataggcygccgtgttacataaagcaaaatatctaarggaaawccaaacatatggaaaatggagatacttgacaaaaggattttcaaaattgwattcctccagtgatagggactccacctctcatggattcatctctccgactaggatttgcaatccccaaaagcttcttcgagttgcttcagctaggaaaagctcaacttccaacctggagcttccccttyctgcttgtgctgtggatgtgtaagctagaagcctaacggagtgcttgatttccagtagtaaatactctttccgtaatcactcacwwcagtattttgtcttattggcttcctttgctgaaagtacatttgtagacacaactatttttccaatgtgattgtatgaaattaaagacaggaataaagatctttggttatcattgcaaaaaaaaaaaaaaaaa

SEQ ID NO: 3322 - DNA, 1789 bp, Rattus norvegicus
aaggaggcagcaaagaacccgctgagagcagtgcagaactgtgggaagccagtggaaatgaaagggmtcccagtcctgctgtggctgtgtacggctgtgtgctcatcctacccattgcatggcagtgaagaagatgctggcatggaggttctgcagaaatacctagaaaactactatggtcttgaaaaggatgtgaagcagtttactaagaaaaagsacagtmgccctgttgtcaaaaaaattcaagaaatgcagaagttccttgggctgmmgmtgmcagggmagctggactcgaacactatggmgctgatgcacaagccccggtgtggtgttcccgacgtcggtggcttcagtacctttccaggttcacccaaatggmggmaaaaccacatctcctacaggattgtgaattatacactggatttaccamgagagagtgtggattctgccattgagagagctttgaaggtctgggaggaggtgaccccactcacattctccaggatctctgaaggagaggctgacataatgatctcctttgcagttgaagaacatggagactttatcccttttgatgggcctggaatggtcttggctcatgcctatgcccctggaccagggaccaatggagatgctcactttgatgatgatgaacgatggacagatgatgtcacaggtaccaacctattcctggttgctgctcatgaacttggccactccctgggtctctttcactcagccaatgctgaagctttgatgtacccagtctacaagtcctccacagacctggcccgtttccatctctctcaagatgatgtagatggtattcaatccctctatggacctcccacagaatcccctgatgtcctcgtggtacccaccaaatctaactctctggaccctgagaccttaccaatgtgtagctctgctttgtccttcgatgcagtcagcaccctgcggggagaagtcttgttctttaaagacaggcacttttggcgaaaatctctcaggacccctgagcctggcttttatttgatctcttcattttggccgtctcttccatccaacatggatgctgcatatgaagttactaacagagacactgttttcattcttaaaggaaatcagatctgggctatccgaggtcatgaagagctagcaggttatcctaaaagcattcacactctgggcctccctgaaaccgtccagaagatcgatgcagccatttctttaaaggaccaamasragrcgtacttctttgtagaggacaaattctggagatttgatgagaagaaacaatccatggatccagaatttcccaggaaaatagctgagaactttccaggcattggcacaaaggtggatgctgtctttgaagcatttgggtttctttacttcttcagcggatcttcacagttggagtttgatccaaatgcagggaaagtgacccacatattgaagrgcaacagctggtttaattgttaagaagatccatggaaggcgtcgtgtgtttcagctgaccctgatagctcttcctytgaaacttggcgcactgaagtggtttccttactytagcatgtgctatggcagagcaaaatgggagstacatatggcaccagtcaacctcaagttgtcgaaggacattcagaagcactgcttgkcttatactgtgtcaaagggrgrggrgaaaacacactcctgggstacagacaagtaactgtctctgtgtagatggtttgttttatttaataaaatggtgtgtcatttwttttaaaaaaaaaaaaaaaaa

SEQ ID NO: 3323 - DNA, 3349 bp, Rattus norvegicus
ctcgaggaaaactgcagctggtggtgttgagagacagcaagcagaccctcatcaacatcccatctctgaatgacagcgactcggaagtggaggatatctcggaaatcgagtccaaccgatctttttctccagaggagaggcgccagcagtattctgatcaggagtatcattcctccactgagaagctgaaggagaggccaagctcaagagaggagacctcaggcagaatgtccaggatgggtgccacacccacgccgttcaagtccacgggggacatcacagctgcaggtgtcacagaagccaacaaggaacccaggtcccaggaagaatccccagttcctcaacccagaacagcatcaagagtctttcttcgtcctagtcccgaaaatgaagcaatatatggccctaacaccaaaatggtgaagttcaagaagggagacagcgtgggcctccggttggctggtggaaatgatgttggcatatttgtggctggcattcaggagggcacctctgcagagcaggagggcctacaagaaggggaccagattctgaaggtgaacacacaagatttcagagggctggtccgggaagatgccgtcctctacctgttagaaatccctaaaggtgaaaccgtgaccattttggctcagagccgagcagacgtgtatagagacatcctggcctgtggcaggggagactcgttcttcataaggagccactttgaatgtgagaaggagactccgcagagcttggccttcaccaggggagaagtcttccgagtggtagacacgctgtacgatggcaaactgggccactggctggctgtgaggattggaaatgagctggagaagggcttaatccctaacaaaagcagagctgagcagatggccagtgtccagaatgcccagcgagagaatgctggggacagagcagacttctggcggatgcgtggccagagatccggggtcaagaagaacattcgcaagagccgggaagacctggcagctgctgtgtcggttagcaccaagttccccgcctacgaraaggttctgcttcgggaagctggcttcaagagacccgtggttctgtttggccccatagcagatatagcaatggaaaggctgactactgagctacccgacctgtttcaaactgcaaamacagaacccaaagatgcgggatctgagaaatccagtggagtggttcggttgaatactgtgargcaaattattgagcaggacaagcatgccctgctcgacgttacccccaaagctgtggacctgctcmattatactcagtggttcccaatcgtgattttcttcamcccggattccagacaaggcattaaaaccataaggcagargttgaacccaacatccaataaaakttctcgcaakkyattmrawmaarmaaamaarwmcaaaaaaacctgttctcatcttttaacagctaccatcaacgtgaattcagccaatgatggctggtttggcagcctgaaggacagcattcagcagcagcaacacgaagcagtgtgggtttctgaaggaaagatggaggggatggatgatgacgctgaagaccgcatgtcctacttaaccgccatgggtgcggactatctgagttgtgacagccgtctcatcagtgactttgaagatacggacggcgagggaggcgcctacactgacaatgagctggatgagccagctgaggagccgctggtgtcttccatcacccgctcctcagagccggtgcagcatgaggagagcataaggaagcccagcccagagccacgcgctcagatgaggagggcagctagcagagaccagcttagggatggtagcccgcccccagcattcaagccagagccgcccaaggtcagaaaccaaaacagagaggactctttcaactactccaagtcaaacttttctgccatggctggcagtgaaatcccggggggatccaccaaagggtgtcctccccctattgcggtgaaacctgcctttgggcgatccatcctgaagccttctactccagtccccatgcctgagagtgaggaggttggggagagcaccgaggagcaggaagaggctcccaaatcagtcctgggcagagtgaaaatcttcgagaagatggaccacaaggcgaaattacagaggatgcaggagctccaagaagcacagaatgcgaggattgaaatagctcagaagcatcctgacatctatgcggttccaatcaaagcccccaagccagatgctggcctgccccagcacatgagttctagacccccagagccacagaaagctcyttytaggctttaccaggacaccagaggaagctacggyagtgatcccgaggaagaggaggagtaccgccaacagttggcagcacactcgaagcgtggttactacagccagccctcccggtaccgagacwccgaattatagagggccayttgtggactcctgcgagactccctggaggtcttctccagttaaaatgcactgcagagatacggtggggatccaggcaacagacagctcgaattatcaaccgaaggctctgttcgtgggactggagtaaagttggttatgactttttgaatgaagagaaacactatagcmygakaayggttacttgctttggtgtggaccaaaaatctgtattaatctctctgtatttgtaatatgtatattgagcaataactccttctcctcgttcagagctgccttccagagctgcttcgatgtgaagcaaatgtgaacagggagtaaaaaaaaaaraarwactcsakctcrwrcyraatccagaagtaatttatcacgactccstaagtgcctttgacaagatgtgtcttagtttgcttccytgaagctttatgcaaagctataatggrctaaaacttttattttgrctaaatttttrtmccmgtttarcarctgtaactgccctcagcaccatgccacctttgcagggcattatcttgggrgtgtggmtattagttbtacatagctmgragkccaagattttattagagtgttkgyccttgttwgtytgaamccacgtgstccacaaagtcakaggcttgagaaaagggtattttatttccttcctatcagcatatgtactgacatcaggtggttttataatttaataaaaaggagtaccttgtggtcarrawwrarmwwwrwrhwraatctctacacaccttccttttrggctgtgtggggtggaatccaagatcctcatgcattcagagtgytgctccaccgytgaactataccccagacttcctgatttattttattttaattaaaaaaattaaaaagacttwaaaaaaaaaaaaaaaaaa

SEQ ID NO: 3324 - DNA, 2126 bp, Rattus norvegicus
ttggctgcctggggttcgtgcactcgggcgcgcaggtccggagctcggctgcgcgaagccgggaggaactccgcggtgccagcacttgagtagctgtgcttcggtggtcagcaccagagtgtctccctccctgtctatcgggtcttagacatgggtgttgtgctgctcccgccgccgctgtccatgctgatgctggtgctgatgctgctgccagcggccagtgcctcagaagctgagcaccgcctgttccagtacctgttcgaagattacaacgagatcatccggccagtggctaatgtgtcccatccagtcatcatccagtttgaggtgtccatgtctcagctggtgaaggtggatgaagtaaaccagatcatggaaaccaacctgtggctgaagcaaatctggaatgactacaagctgaaatggaaaccctctgactaccaaggggtggagttcatgcgtgttcctgcagagaagatctggaaaccagacatcgtactgtacaacaacgctgatggggatttccaggtggatgacaagaccaaagctctactcaagtacacaggagaagtgacttggatcccgccggccatctttaagagctcatgcaaaatcgacgtgacctacttcccattcgactaccaaaactgcaccatgaagttcggctcctggtcctacgacaaggcaaagatcgacctggtcctcatcggctcctccatgaacctcaaggactactgggagagtggcgagtgggctatcattaaagccccgggctacaaacatgaaatcaagtacaactgctgtgaggagatctaccaagacatcacgtactcgctgtacatccgtcgcctgccgctgttctacaccatcaacctcatcatcccctgcctgctcatctccttcctcactgtgcttgtcttctacctgccctccgactgtggggagaaggtgacactctgcatctctgtgctcctctccctgactgtctttctcctggtgatcaccgagaccattccttccacctcgctggtcatccccctgattggggagtacctcctcttcactatgatttttgtcaccttgtccattgtcatcacagtctttgtgctcaatgtgcactatagaactccaaccacacacaccatgcccacttgggtcaaggccgtgttcttgaacctgctccccagggtcatgtttatgactaggccgaccagtggtgagggggacactcctaagacgaggaccttctacggcgctgagctctcaaacctgaactgcttcagccgtgcagactccaaaagctgcaaggaaggctacccctgccaagatgggacctgtggctactgccaccaccgtagggtaaaaatctcaaatttcagtgccaacctcacaagaagctccagttctgagtctgtcaacgctgtgttgtccctctctgccctgtcaccagaaatcaaagaagccatccaaagtgtgaagtacattgccgaaaacatgaaagcacagaatgtagccaaagagattcaagatgattggaagtacgttgccatggtgattgatcgcatctttctctgggttttcatcctggtgtgcattttaggaacggcgggattatttctgcaacccttgatggccagagatgacacatagactgtgcactgttcatcgaggctcacctgtgctgacgcaaggggccacttcctcaatagcactatactttatctgatcactggcttggagtttgctatttcaagggttattttcaactcatcttgatttttcgtaaaaaagaaatgtgggagacaaatgtctagttatttatcatgggtaaatgaacatttcactacccctgtgattgaaactttaggtagaaaaattttctgttcataaatattaactccattagtgcaggatctccataaactcatttctcagcccataaacttcttgaaatcgtagtgtawwmarmarmrmmwrwwacttccgttctttactatctttccatgttggcatttgtgttgctgcaaaaccccacatatcataccccgagaaatgacacctggtctcacactcactgttagtaaactactctagtctgttcaagttcctaattcagaaaaaaaaaa

SEQ ID NO: 3325 - DNA, 2451 bp, Rattus norvegicus
aagctttcttccataattttgttgaaaacatttactagcccttcaggttaggagtcttcattctcttctatacctaatatccttaggtttgatcttttcattgtgtcctggatttccagatgttttgggatagcagctttttggattttacattctctttgatggttgtgtcaatgttttctatggtaccttctgcccctgagatcctctcttctatctcttgtgttctgttggtgatgcttgcatctatgactcctgatctcttccctaggttttctatctccagggttctctccctttgtgctttctttattgtttctgttttcatttttaaatcctggacattcatttttaaattgttcaattccttcacccgtttggttatgttttcctataattctttaagggatttttttgtttcctctttaagagcttctacttgtttacttgtgttgtcctgcttttttttccaaatatctaaatattttacaaacattaattacccactcagttccttttcctctttataaacacagaagccacatccttgagattaggcattctttcaagtttagtaggttgagagattcactgatgtaagatatcctcttcatcctatgaatgcacttgcagtcattcagattaaaattagcacccacatgagtcatgcttagtgacctaaacaccctataaaagagtagccgctaaagggaagatatggwmgkyasgwgctacagaaggtaaaggctgtctctatggagccactggccatcctggtgctgctgtgctttccgatctgctcagcatatcctctgcatggggcagtgagacaagaccactcaaccatggatcttgctcagcaatacctagaaaaatactacaactttagaaaaaatgagaaacaatttttcaaaagaaaggacagtagtcctgttgtcaaaaaaattgaagaaatgcagaagttccttgggctggagatgacagggaagctggactcgaacactgtggagatgatgcacaagccccggtgtggtgttcccgacgttggtggcttcagtacctttccaggttcacccaaatggaggaaaaaccacatctcctacaggattgtgaattatacactggmtttaccaagagagmgtgtggattctgccattgagagagctttgaaggtctgggaggaggtgaccccactcacattctccaggatctctgaaggagaggctgacataatgatcycctttgcagttggagaacatggagacttttacccttttgatggagtgggacagagcttggctcatgcctacccacctggccctggattttatggagatgctcacttcgatgatgatgagaaatggtcactgggaccctcagggaccaatttattcctggttgctgcgcatgaacttggtcactccctgggtctctttcactcaaacaacaaagaatctctgatgtacccagtctacaggttctccacgagccaagccaacattcgcctttctcaggatgatatagagggcattcaatccctgtatggagcccgcccctcctctgatgccacagtggttcctgtgccctctgtctctccaaaacctgagaccccagtcaaatgtgatcctgctttgtcctttgatgcagtcaccatgctgagaggggaattcctattctttaaagacaggcacttctggcgtagaacccagtggaatcccgagcctgaattccatttgatttcagcattttggccctctcttccttcaggcttagatgctgcctatgaggcaaataacaaggacagagttctgatttttaaaggaagtcagttctgggcagtccgaggaaatgaagtccaagcaggttacccaaagaggatccacactcttggctttcctcccaccgtgaagaagattgatgcagctgtttttgaaaaggagaagaagaagacgtatttctttgtaggtgacaaatactggagatttgatgagacaagacagcttatggataaaggcttcccgagactgataacagatgacttcccaggaattgagccacaagttgatgctgtgttacatgcatttgggtttttttatttcttctgtggatcatcacagttcgagtttgaccccaatgccaggacggtgacacacacactgaagagcaacagctggctgttgtgctgattatcatgatgacaagacatatacaacactgtaaaatagtatttctcgcctaatttattatgtgtcataatgatgaattgttcctgcatgtgctgtggctcgagatgagcccagcakrtagatgtctttcttaatgaaccacagagcatcacctgagcacagaagtgaaagcttctcggtacactaggtgagaggatgcatccccatgggtactttattgtttaataaagaactttatttttgaaccawaaaaaaaaaaaaaaaa

SEQ ID NO: 3326 - DNA, 603 bp, Rattus norvegicus
ttatctaccaaaagccaatcattactatacccactttacaaatggcaaagcctctttckgccakmkkggcgtctttggaggcctgctgggaacagsacttctaaaamaacaagtatgtctggaagsctgtggtgcaaggccatttttgctggmtacaagmgaggcctccggaaccaaagagagcacacggctcttcttaaaattgaaggtgtttatgccygagatgaaactgagttctacttasgcaaraggtgtgyttatgtrtacaaagcarwwamcaatmcagtgrctcctggaggcaaaccaarcaaaaccagagtgatytgggraaaagtaactcgggcccatggaaacagtggcatggttcgtgccaaattccsaagcaaccttcctgcaaaggccattggvcmcagaatccgtgkgatgctgtacccatcccggwtttwaactaatggagagtaaataaataaaagtaratttgtrmwmwwrwwwwwwwwwmaaacaaaacaaaaacaaatgggcaaagcaagtccccagaagactttgttgaaggccacacagtgaatgggtggtggagacaaggtccaataacccttagagatg

SEQ ID NO: 3327 - DNA, 2139 bp, Rattus norvegicus
cgcaactgagaagactggatagagccggcggagccgcgaacgagcagtgaccgcgctcccacccagctctgctctgcagctcccaccagtgtctacccctggacccctcgccgagctttgcccaaaccacgaccatgatgttctcgggtttcaacgcggactacgaggcgtcatcctcccgctgcagtagcgcctccccggccggggacagcctttcctactaccattccccagccgactccttctccagcatgggctcccctgtcaacacacaggacttttgcgcagatctgtccgtctctagtgccaactttatccccacggtgacagccatctccaccagcccagacctgcagtggctggtgcagcccactctggtctcctccgtggccccatcgcagaccagagcgccccatccttacggactccccaccccgtcgaccggggcttacgccagagcgggagtggtgaagaccatgtcaggcggcagagcgcagagcatcggcagaaggggcaaagtagagcagctatctcctgaagaggaagagaaacggagaatccgaagggaaaggaataagatggctgcagccaagtgccggaatcggaggagggagctgacagatacgctccaagcggagacagatcaacttgaagacgagaagtctgcgttgcagaccgagattgccaatctactgaaagagaaggaaaaactggagtttattttggcagcccaccgacctgcctgcaagatccccaatgacctgggcttcccagaggagatgtctgtgacctccctggacttgactgggggtctgcctgaggctaccaccccagagtctgaggaggccttcaccctgcctcttctcaatgaccctgagcccaagccatccttggagccggtcaagaacattagcaacayggagstgaaggctgaaccctttgatgacttcttgtttccggcatcakctaggcccagtggctcggagactgcccgctctrtgccagatgtggacctgtctggttccttctatgcagcagactggragcctctgcacagcagttccctggggatggggcccatggtcacagagctggagcccctgtgcactcccgttgtcacstgcactcccagctgcactacctatacgtyttcctttgtcttcacctaccccgaggctgactccttccctagctgcgcagctgcccaccgaaagggcagcagcagcaacgagccctcytmtgactcactgagctcgcccacaytgmtagccytgtgagcagtcagagaaggcagggcagccggcactgactgagctggtgcattacagagagragaaacamgtcttccytcgaggggttcccgtagacytagggaggaccttatctgtgcgtgaaacacaccargytgtggacctcaaggacttgaaagcatccacatctggactccagtcctcacytcttccggagatgtagcaaaaaamcaaaaaaamaaaamaaaaaaaaaacaaaacaaaaaatcaaaagcaaccgcatggagtgtattgtttgtagtgacacctgagagctggtagttagtagcatgtgagccaggcctgggtctgtgtctcttttctctttctccttagtcttctcatagcattaactaatctgttgggttcattattggaattaacctggtgctggatatttttcggattgtatctagtgcagctgattttaacaatacctactgtgttcctggcaatagtgtgttccaatttagaaatgaccaatattaaactaagaaaagatagaactttattttccggtagatagaaataaatcgctatatccacgtactgtagctcttcagcgtccatgttcattgtcatgtaactgatcatgcattgttgaggtggtctgaatgttctgacattaacagttttccatgaaaacgttttattgtgttttcaatttatttattaagrtggattctcagatatttatatttttattttatttttttctatcctgaggtctttcgacatgtggaaagtgaatttgaatgaaaaaattttaagcattgtttgcttattgttccaagacattgtcaataaaagcatttaagttgaawrmrraaaaaaaaaramaaaaaaaaaa

SEQ ID NO: 3328 - DNA, 1888 bp, Rattus norvegicus
caccaccatcaccgccactgccaccaccaccgctaccgcagtgctcccactggtgcagagctccagtggtcacagacccacttccgccatcctcctgcagcagctcgccctctctttccgcaccgtccggctcgctatgcgctcctccgcggctttggcgcttctgctgtgcgccgggcaagtctttgcccttcctgtgaacagccctatgacaaaaggggacactaaggtgatgaagtgtgtcctggaggtcatctccgactcgctgtccaaacccagccccatgcctgtcagccctgagtgtctggagaccctccaaggagatgagagggtcctctccatccttcgacaccagaatttgctgaaggaacttcaagacctggcgcttcaaggtgccaaggagcgggcccagcagcagcagcagcagcagcagcagcagcagcagcagcagcagcagcaacaacaacaacacagcagctttgaggatgaactctcggaagtatttgagaaccagagccctgcagccaagcatggagacgcagcatcagaagccccctccaaggacactgtagagaagagagaggattctgacaaggggcaacaggatgcctttgagggaaccacagaaggacccagacctcaggcctttccagagcccaagcaggagtcctctatgatgggaaacagtcaatctccaggggaggacacagccaacaatacccaatcaccaaccagcctccccagccaggagcatgggattccacagaccacagaaggcagtgagagaggtcccagtgcccagcagcaagccagaaaagccaagcaagaggagaaagaggaagaggaggaggagaaagaggaagaggaggaggagaaagaggagaaggcgatcgccagagagaaggctgggcctaaagaagtccccacggcagcatccagttctcacttctattcaggctacaagaagatccagaaagatgatgatggtcagtcggagtctcaggcagtgaatggaaagacaggggcttctgaagctgtgccatctgaagggaagggggagctggagcactctcagcaggaggaagatggggaagaggccatggcagggcccccccaaggtctcttcccaggtgggaagggccaggagctggaacgtaagcagcaggaggaggaagaggaagaggagcgtctktccagagaatgggaggacaagcgatggagcaggatggaccagctggccaaggagctgacagcagagaagcggctggagggggaagatgaccctraccggtccatgaagctctccttccgggcccgggcctatggcttcagggaccctgggcctcagctacgccggggctggaggccatcttccagagaagacagtgtggaggcccgaggcgaytttraggaaaagaaggaagaggagggcagckccaaccgcagagcagaggaccaggagctagagagcctgtcarccatcgaggcagagykgsasraggtggcccaccasctgcaggctttgcgacggggatgaggcactggctggtggggtccggccatggcttcaaggcccaactgctgctcaagtagggaggcttccagcctcagagcccaggttaccccttgccccttcccttctcttgctctcagcccctgccctggacacttytgcagggcagccctgaaagtcaacacagattctttctcggmacacaggcagctttctagaagtttctcttccaccttctaatccatggggcacmactgcagtagttctgatctttgggcgaaagccgagaactcctgactattaagatattccagataaaatttattgaaggaagaataaammwrmwwwrrrmwcttcaaaaaaaaaaaaaaaaaa

SEQ ID NO: 3329 - DNA, 3524 bp, Rattus norvegicus
gggccagccagagagcgagagagccggagagagccagagagagccagagagagcggctcagctcccagctccaagcagcgcagcgcccgcccggctctccccggccaccgccgccaccaccgctacctcagcaccgccacctcggccgccgcccccgcccaccccggccctccccggctgctgctccccggcggaggcaagaggtggttgggggggaccatggctgacgtttacccggccaacgactccacggcgtctcaggacgtggccaaccgcttcgcccgcaaaggggcgctgaggcagaagaacgtgcatgaggtgaaagaccacaaattcatcgcccgcttcttcaagcaacccaccttctgcagccactgcaccgacttcatctgggggtttggaaaacaaggcttccagtgccaagtttgctgttttgtggttcacaagaggtgccatgagtttgttactttctcttgtccgggtgcggataagggacctgacactgatgaccccagaagcaagcacaagttcaaaatccacacctatggaagccctaccttctgtgatcactgtgggtccctgctctacggacttatccaccaagggatgaaatgcgacacctgcgacatgaatgttcacaagcagtgcgtgatcaatgtccccagcctctgcggaatggatcacacagagaagagggggcggatttacctgaaggcagaggtcacagatgaaaagctgcacgtcaccgtacgagatgcaaaaaatctaatccctatggatccaaatgggctttcggatccttacgtgaagctgaaacttattcctgaccccaagaatgagagcaaacagaaaaccaaaaccatccgatccacactgaaccctcagtggaatgagtccttcacgttcaaattaaaaccttcagacaaagaccggcgactgtccgtagaaatctgggactgggatcggacgacacggaatgacttcatgggctccctttccttcggcgtctcagagctgatgaagatgccagccagtggatggtacaagttgctcaaccaagaggagggtgaatactacaatgtgcccattccagaaggagatgaagaaggcaacgtggaactcaggcagaagttcgagaaagccaagctgggccccgctggaaacaaagtcatcagcccttcagaagacaggaagcagccatctaacaacctggacagggtgaaactcacagacttcaacttcctcatggtgctggggaaggggagttttggaaaggtgatgcttgctgacaggaagggaacagaggaactgtacgccatcaaaatcctgaagaaggacgtggtgatccaggatgacgacgtggagtgcaccatggtggagaagcgggttctggccctgctcgacaagcccccgttcctgacacagctgcactcctgcttccagacagtggaccggctgtacttcgtcatggaatacgtcaacggtggggacctcatgtaccacattcagcaagtcggaaaatttaaggagccacaagcagtattctatgcagccgagatctccatcggactgttctttcttcacaaaagaggaatcatttacagggatctgaagctggacaacgtcatgctggactcagaagggcatatcaaaatcgccgacttcgggatgtgcaaggaacacatgatggacggggtcacgaccaggaccttctgtgggactccggattacattgccccagagataatcgcttaccagccatatggaaagtctgtggactggtgggcgtacggcgtgctcctgtatgagatgctagctgggcagcctccgttcgatggcgaagacgaagatgaactgtttcagtctataatggagcacaatgtgtcctaccccaaatccttgtccaaggaagctgtctccatctgcaaagggcttatgaccaaacaccctgccaagcggctgggctgcgggcccgagggggaaagggatgtcagagagcatgccttctttaggaggatcgactgggagaagttggagaacagggagatccaaccgccattcaagcccaaagtgtgcggcaaaggagcagaaaactttgacaagttcttcacacgagggcagcctgtcttaacaccaccagatcagctggtcatcgctaacatagaccagtctgattttgaagggttctcgtatgtcaacccccagtttgtgcacccaatcttgcaaagtgcagtatgaaactcagaaacaaaagatctaatgcctccctagcccccaatctccccagcagttgggaagtgattcttaaccataaaattttaaggctatagccttgtattttgttccacacagaggcctgaaaattctggggatattagtccataagtgatcaactttcttcccccacccaatcccaaaccaaaaaacattatcttagtggatgatgacataatatacagagtatagtttaattatgtagaagtcacatctggcttcaagttaattctttcttaggaaacaaagagacttggaccctattttttggtacgatttaatatattctccatacctttcatattttggattttcactatccaaatcaccagagataataaagtgaacccacctgaactcaagggatggaaacatttctgcccaagatatctttggaattaaagaacaggaagcccaaacagaaaacaaagagaggcagagtctcatatattcaagacctcgttgcttctattttctgcttcaatggaaacagtccctagagtctgagagggcaggatgaacctgatcactgttcccaatcatcatagcacaaccatagtgcatagtttgaaaatgaaagaaaacttcagacagatgttcgttgaatctatcatatgtactcccctgctcggttgataactatctcgataactcattctttttaagaggccaaaatcatctaaggactttgctaaacaaacatgtgaaatcatttcagatcaaggataaaccatgtgtatgttcatkytaatctctgggagatgactcttcaatccagggtsccatcagtawtcatsccactgttcacgagtgktgttasccaaccccccgccacataataatattytgctaccyttgtgggtacccttcytaggaagctaaaatgtatgccccatccccttttgtactayttatttaataagccgcagtgtcgtttatgaaagyacaatgtatagtaacttaatcaaaastactgactagcatcagtccctataggttgattttcctcctttctctagccccacatccacttagrgatgagaaaaaaaararwawattttgggttccaattcccagttctaattgaatggcacacatggagctgtaggatcaagacactttatgcttatatcaactcaaagatgttttcttgctagaaggattttaatatgttttgcgagtgcatcatgcaatggattttgcatgtttataataaaccttaataacaagttaaaaaaaaaaaaaaaaaa

SEQ ID NO: 3330 - DNA, 702 bp, Rattus norvegicus
  misc_feature (446)..(446): n is a, c, g, or t
  misc_feature (493)..(493): n is a, c, g, or t
  misc_feature (539)..(539): n is a, c, g, or t
  misc_feature (580)..(581): n is a, c, g, or t
  misc_feature (595)..(595): n is a, c, g, or t
  misc_feature (598)..(598): n is a, c, g, or t
  misc_feature (660)..(660): n is a, c, g, or t
  misc_feature (689)..(690): n is a, c, g, or t
ctccttgaattcwysagrggcagsrgccagcctcagacaccatgtcaccaaagaaagccaagaagaggttagagggcggaagctccaacgtgttctccatgtttgagcagacccagatccaggagttcaaggaggccttcacarkcayggrccagaacagagmcggcttcattgacaagaatgacbtaagggacaygwkkgctgccctcggrcgagtraacgtgaaaamckaagaratcgrtgagatgatcaaagaggckscasgdssamttaayktvactgtgttcytymccatgwtkrgggrgaaacytaaaggasbtgrccsgragrrgrccmttytmaacgcctwmaaggtgtttgacccsgaaggcraaggrtydmtgraggccghhtdtkwccrrgrratkytrdccmcscaarcardrrggttytmcaaaraarrrayngvccmratkttygcagcttttyccchyramgtymccggcaacmttgnwkwtaaraawwtsgttcavatcmtcmycymcggrraarrraaggantkdscchtkaaycvcrscmysgggtgrcmtwwagcstktknnccatccvcargccntdntktyccmvcmtkygggtkttymccmtcccarggccctktgcaaatwamcmggaagtbttgknhhhrvdhaamarvarwrmaamaragctcnncgaacgcggccg

SEQ ID NO: 3331 - DNA, 2211 bp, Rattus norvegicus
ccacgcaggatcacgatgctgcccagcctggcactgctcctgctggccgcctggacggttcgggctctggaggtgcccactgatggcaatgccggtctgctggcagaaccccagatcgccatgttctgtggtaaactcaacatgcacatgaatgtgcagaatggaaaatgggagtcagacccatcagggaccaaaacctgcattggcaccaaggagggaatcctgcagtactgccaagaggtctaccctgaactgcagatcacaaacgtggtggaagccaaccagccagtgaccatccagaactggtgcaagcggggccgcaagcagtgcaagacgcacacccacatcgtgattccttaccggtgcctagttggtgagtttgtaagcgatgcccttctcgtgcccgacaagtgcaagtttctacaccaggagcggatggacgtttgtgagacccatcttcactggcatactgttgccaaagagacatgcagtgagaagagcactaacttgcacgactatggcatgctgctgccctgtggcatcgacaagttccgaggggtcgagttcgtgtgctgcccgttggcggaggagagcgacagcatcgattctgcggacgcagaggaggacgactccratgtctggtggggtggagcggacacagactatgctgatggcggtgaagacaaagtcgtagaagtagccgaagaggaggaagtggccgatgttgaggaagaagaagctgaggatgacgaggatgtggaggatggggatgaggtggaggaggaggccswggagccctaygamgaggccacagagagaacaaccrgcattgccaccactaccacaactaccactgmstctgtssmsraggtrktymrasttcccacgwcggyrgccagyaccmctgacgcagtsgacaartacctggwgacccccgkagatgasaacgagcacgcccatttscagaaagccaaagakaggttgkragccragcacygagagagaatgwmcyasgtmatgagagaatgsraggwggcakaacgkcmagccargaattygcccaaagytgacargaaggccgttatccagcatttccaggagaaagtggaatctytggaacaggaagcagccaacgagaggcagcagcttgtagagacacacatggccagagttgaagccatgctcaatgatcgccgtcgcctggccctcgagaattacatcaccgcactgcaggcggtgcctccaaggcctcatyatgtgttcaayatgctgaagaagtacgtccgtgcagagcagaaggacagacagcacaccctaaagcattttgaacatgtgcgcatggtggaccccaagaaagctgctcagatccggtcccaggttatgacacamctccgtgtgatctacgagcgcatgaaccagtctctgtccctgctctacaacgtccctgccgwggctgaggagattcaagatgaagttgacgagctgcttcagaaggrgcasraskactccgacgacgtcttagccaacatgatcagtgaacccagaatcagttacggcaacgatgytctcatgccttctttgactgaaacgaagaccactgtggagctccttcccgtgaatggcgaattcagcctggatgatctcmaaccgtggcatccttwtkgggtggactctgtgccagccaatacagaaaatgaagttgagcctgtcgacgcccgcmccgctgctgaccgaggactgaccactcgaccagggtctgggttgacaaacatcaagacasamgagrtctcagaagtgaagatggatgcggagttcggacatgattcaggcttcgwagtccgccatcaaaaactggtgttctttgcaraaratgtgggttcaaacaaaggtgccatcattggactcatggtgggtggcgttgtcatagcaacagtgattgtcatcmccttggtgatgctgaaraagaamcagtacacatccatccatcatggcgtggtgraggttgacgctgctgtgaccccggaggagcgccacctytccaaratgcagcagaatggatatgagaatccaacatacaagttctttgagcaratgcagaactaaaccccgccccccgccacarcarcggcctytgaacttgacagcaaaaccattgcttcactacccatcggtgttcatttataaaataacgtggaaagaaaaaaaaaaaaa

SEQ ID NO: 3332 - DNA, 1530 bp, Rattus norvegicus
caatccaagacaagatgtccagcaagggctctgtggttctggcctacagtggtggtctggacacctcctgcatcctcgtgtggctgaaggaacaaggctatgatgtcatcgcctacctggccaacattggccagaaggaagactttgaggaagccaggaagaaggcactgaagcttggggccaaaaaggtgttcattgaggatgtaagcaaggagtttgtggaagagttcatctggcctgctgtccagtccagtgcactctatgaggaccgctatctcctaggcacctctctcgccaggccttgcatagctcgcaaacaagtggaaattgcccagcgcgaaggggccaagtatgtgtctcacggcgccacggggaagggcaatgaccaggtccgctttgagctcacctgctactcgttagcaccccagattaaggtcatcgccccctggaggatgcccgagttttacaaccggttcaagggccgaaatgatttgatggaatacgcaaagcaacatggaatccccatccctgtcacccccaagagcccctggagcatggatgagaaccttatgcacatcagctacgaggctggaatcctggaaaaccccaagaaccaagcacctccaggtctctacacaaaaactcaggaccctgccaaagcacccaacaccccagatgtccttgagatagaattcaaaaaaggggtccctgtgaaggtgaccaacgtcaaagatggcactacccacagcacatccttggacctcttcatgtacctgaatgargttgcgggcaagcatggagtagggbgcattgacatcgwggagaaccgcttcattgraatgaasycccggggtatctackagaccccrgcagggaccatcctttaccacgctcatttagacatagaggccttcaccatggatcgggaagtacgcaaaatcaagcagggcctgggcctcaaattcgcagagctcgtatwcaccggwttctggcacagccctgaatgtgaatttgytcgccactgcatcgacaagtcccaskaacgggtggaasgaaaggtgcargtatmtgtcttcaagggccaggtgtacatccttggccgggagtctccactttsactatacaatgaagagctggtgagcatgaacgtacagggtgmctatgaacccattgatgccaccggcttyatcaatatcaactcgstcaggctgaagsagtaccwtmgccttcagagcaaggtcaccsccwaayagmssgysacaaagaggsygggcctccccgctytgcagctctcccaggctccagcattaattgttgtgataaatttgtaattgkagcttgttstccwaccacctgactggggytgstgtgccccccctcacctcccccccacccacaggctttgttccctggtcccctatagcctacaaaagtggtcatcgaagggaagggggggtggcaggcagctgcagaaagcrcgtaaaatgacaattaaaagaagttacattagtchwwmawwwrwmaaaaaaa

SEQ ID NO: 3333 - DNA, 3822 bp, Rattus norvegicus
cttcactgggggcccttaggcgagaggagtttccaaattgggtaaaaggcagagtggaggaggggaggtgataattagcaaagttgtagacctctgaaccttctgggtctgaagcccctccctgtgagcgtgggggagactcactctccggtgggggggccgtttgggtcccccccacccctactccctcgctcctttacaccccgggctctctcctggcctcctacccctgcaccctgcatccatcatgacggtgatgtcaggggagaatgcagacgaggcttcggccgctccaggtcacccccaggatggcagctacccaaggcaggcggaccacgacgaccacgaatgctgcgagcgcgtggtgatcaacatctccgggctgcgcttcgagacgcagctcaagactctggcccagttccccaacacgctgctgggcaacccgaagaaacgcatgcgctactttgaccctctgaggaatgagtacttctttgaccgcaaccggcccagcttcgatgccatcctttattactaccagtcgggggggcgcctgcgcaggccggtcaacgtgcccctggacatgttctccgaggagattaaattttacgagttgggcgaggaggccatggagaagttccgggaagatgagggcttcatcaaggaagaggagcgccccctacccgagaaggagtaccagcgccaggtgtggctgctctttgagtatccggagagctcaggacctgcacgggttattgccattgtatccgtcatggtcatcctcatctccatagtcatcttttgcctggagactctccctgagctgaaggatgacaaggacttcacgggcaccattcaccgcatcgataacaccacagtcatctacacttctaacatcttcacagaccctttcttcattgtggaaaccttgtgtatcatctggttctcttttgagctggtggtgcgcttcttcgcctgccccagcaagacagacttctttaagaacatcatgaacttcatcgacattgtggccatcatcccttatttcattaccctgggcacagagatagctgagcaggaggggaatcagaagggcgagcaggccacttccctggccatcctcagggtcatccgcttggtaagggtgttcagaatcttcaaactctcccgccactccaagggccttcagatcctgggccagaccctcaaagctagtatgagggagttagggctgctcatctttttcctcttcattggcgtcatactgttttctagtgcagtgtacttyrcggrggcggaagaagctgagtcgcacttctccagtatccccgatgctttctggtgggcggtggtgtccatgaccactgtgggatacggtgacatgtaccctgtgacaattggaggcaagatcgtgggctccttgtgtgccatcgctggtgtgctgacaattgccctgcccgtacctgtcattgtgtccaatttcaactatttctaccaccgagaaactgagggggaagagcaggctcagttgctccatgttagttctcctaacttagcctctgacagtgacctcagccgccgcagctcctctactatcagcaagtctgagtacatggagatcgaagaggacatgaacaatagcatagcccactacaggcaggctaatatcagaactggtaactgcaccgcaactgatcaaaactgcgtkrataagagcaagctcctgaccgatgtttaaaaaaagcaccaggcaagcaatcaaaagcccccaaacaaaacccttggcgactcctgtcccactctgtagatactttactaaaaccgtagtctttgaatgctttatttaactggcaatgcactgttgcattgtgaatttggggggtgggcaaacctgaagctttcaagatcacatttaaaaaacaaaaccaaccaaacaascaaaaagaaaaaaaaaacccamcaaaaaatwtaaaaactcaacccaacccaataaccaactattttcattttwatttaaaaaatgagaaaagaaagrggattttytaaaacgctgcccatgawgtwrwctktstrawataakwstcawrctttccyyrwamwraarwwwwwmmaatcttttggcttaagttgtttwgtttgttttttttaaacctaaaaatcagatgaccacttaggaacataaaaattcaaatttgcatggaactccactgtaaaatttttgcaaattgcacagcacatgtcagatagtgtgccccgtggaacaccatgtaacagcctcagtggtcagtggggggaaaaatgcttttattttgatcaactgaattgcatacaaggctaacaaaatccggactcattaagaatggttcagaaagcaccttgcaaatctgttmctggtcccaatctgwtggrwttttccatctgscccgttctcmtaaatcccagtctattctctaagaaargggcaacttgattamatgagttgwttcatctgtaaggctgstaagtwctctcavctgsagatgatccaaatataggtttgttttktttttaaaccmawyctgacccstgaccttcagaagkgkatgataamccttaccctccttattgcaagagcacaagagttcaatggtaagcatgtttgaatccgatamcatttattttatawtcgcatgctgagaaagttagcccagmcaatagtgaataagcttacgttgaaatcgactcttctaaatatagtccgtttcatttgcattcaccaaaagtgcactccttcatttattamctcttttcttagcagctaaagtactgtatttaagtacgtaccttagatggggacagtcccttttccgagctcaaagcatgttctcttagtcagcattatggcctatttgaykawgatataccttgawttawttaatgcatggtttcagtaataaaaaaaattagaaaatactaaaaattacaagcctgtgggacgaaaggccaaaggacacgggggtggggggtggggtgggggaactccgtcattttcctgcctttgctcagggaaatgtcaagcttctatgcaggtatagacagagagaggaccaatatgcccatcctttaaggggaaactgtggaaaactaaataaatcattcaaggtatttaatagacctaaaaccaagcattctttctagctgaacataaatacaagcaaaacaaacaaacaaacaaacaaaaaaaaggtgcaatattgcatggtttcttggtgcattcttaggatgtaagtgataacgctgacctcttcatgcatccagagcagagccgatttcttttcgcagtcatgatttgaagtctatagagacttcggccctcccccctgaggctccctgaagaaactcagccaattgatttaatacttgcttagtgcctttatctgtacccacagtgaactgcagaaaagtgcctccataactcagctgggaagttatttaacagaagggaggaagggttggggcacagacctttttgctttttgttttgtttgtttttccatcctcactgtctcacttcaccactgtgagaagacctctccaccctcagagcccccaaagaagagagagagagagagagaaagcaggtgctgtctctcttggctgtctactggacttggtctctttggcagcctgactctggatatgaactgagacccatctttgaagtggacatgaaccataaactggttctattctgttttgttctgttctgttttgtttcttctcgaccagaagccaagagaaatgtttttgggaatgtggaaggccactccggacatacaaagcttc

SEQ ID NO: 3334 - DNA, 1468 bp, Rattus norvegicus
gttgaaggcgcggttccagttgtcwccagtgtcacaggcagctkctcaaagtattatgtacttcawaaaacggagatggwttctgatcctgsaatcgcttttgctgkctttggtmactggatttcaagatcartcagtaccaaatgtaaatgccataayckgmwgyaacgtaaccmtgacaatcctgaagcacccacttgcrtcgtatcaacgtctcacctggcttcatactaccaaccakaagattttagagtrcttccctaatggtaaaramactgtcttcgagtctgtatttaamgacagggtcgatcwtracaaaacaaatggtgcacttcgtatctataatgtctcgaaagaggacagaggtgactactacatgagaatgytgcrcgaaactgaggaccagtgkaagataaccatggaagtatacgatcttgwgtccaagcctgccatcaaaatcgagaagaytaaaratttgactgactcctgwcacctgakgctatcatgtaaggtasaggaccaaggtgwtgactatacywkgtatgargactcggrsccctktccycamrggaatccaggatatgtactcgaaatcaccatcactccacacaacaagtctacattwtacacctgccaagtcagcaatcytgtaagcagcgagaacgacacactgtactttattccaccttgtacgcyggccagatcttctggagtccattggattgcagctkggctagtggtcacgttatccatcattcccagcatcctgctagcctgacaagatctctcctcagtcaagaaggaaacatcaaagcsgtatcttgccttcatcccctgcactgctcctaaccattgacgctgctctggctccgtggagcaaaggaaagtgtgttattgttatctgtgctggtttgaatgcatgctctatggagtaagcacaggacctagtacagtgctacatcactgatctttacaaagattctaagctaatttttwaaaaactgggggtagcatctaattttatataccytagttgtttcstaacattcattraagataaatgcattcyttttaccaaaatatgtggctatcttatactaatgttgtttatatcactctttttttataaagataaatgcattcctttaccaaaatatgtgactatatcatgctaatgttgtttatatcactcctttttgtgaagataaatgcattccttttaccaaaatatgtgactatgtcatgctaatgttgtttatatcactctbttttataaagataaatgcattccttttaccaaaaacatgtggctatattatactaatgttgtttatatcactcttttttataaagataaatgcattccttctaccamaawawrwramwawawcatgctaatgktgtttatatcaccyttttaaaaataaaatcttttcacatamwmwaaaaaaaaaaaaaaaaaaaaaaa

SEQ ID NO: 3335 - DNA, 1183 bp, Rattus norvegicus
cgacaaaggaggcactttatcatacagtttgttgataatctatatcgatttgagggcaccggcttttcaaatatccctcaacttatagatcaccacttcaatacaaagcaagtcatcaccaagaagtcgggggtggttctgctgaatcctattccaaaggataagaaatgggttctcaatcatgaagatgtttcattgggagaattactgggcaaggggaattttggtgaggtgtacaagggcacactgaaggataaaacccctgttgctgttaaaacgtgcaaggaagacctgcctcaggaactaaaaataaagtttttacaggaagccaaaattctcaagcaatatgatcaccccaatattgtcaaacttataggcgtgtgcacacaaagacagcctgtctacatcattatggaactggtcccaggaggtgattttctgtcctttctgaggaagaggaaggacgagctaaagttgaagcagttggtgaggttttccttggacgttgctgctggcatgctgtatctcgagggcaagaactgcattcacagggacctggctgcacggaactgcctggtaggtgaaaataatactctgaaaatcagtgactttggsaygwskcggcaagaagacggtggagtgtattcatcttctggcttaaagcagattcccattaartggacagcaccagaagcactgaattatgggagatacagctctgaaagtgacgtgtggagcttcggcatcctgctctgggagactttcagcctgggagtctgtccgtaccytgggwtgacaaaccagcaagcacgggaacaagtggagagagggtatcggatgtcagccccacagaactgtcccgrggaaatttttacaatcatgatgaagtgctgggattacaagcctgaaaaccgccctaagttcagtgaccttcacaaagagctcmcggccatcaagaagaaaatcacatagtgccacccagggytagactccacctgcgggactctgtcctcagtcaccctgactttataccmccttactgcaaccatctttgaaggttatgttttttattaactgggtttttaaagtatgttccmctttaaatatgttaaaggcaaatttattcaagaaataaatagtcctacccagggccgtattagctamccmcaamaaaaaaaaaaaa

SEQ ID NO: 3336 - DNA, 3164 bp, Rattus norvegicus
aagctcctccccgcacagtgaggagtagatttttgaaaatcaccccactgcagactcctccccctctggaaacctcgtccctagggctgagaatgactctggctctgcgcgtgtagtcagtcaccagttgacccagtgcggcgtaggattgcagcccgcatacctggggcttgccacccaggttttgcagctgagacaccgtgggacccgtgatcctgtgtttgcagcgggaacatttcgggtctgtgatccgagtggggacgcgacgcagaggctgaggatgagcaccgcggatctgatgctacgctgggccatcgccctgctcctggctgctgctggagttgcagcagaagattcatgtggcaagaacgagttccagtgtagagacggaaaatgcatcgtcagcaagtgggtgtgtgacggcagccgcgagtgcccggatggctccgatgagtcccctgagacatgcatgtctgtcacctgtcgatccggtgagttcagctgtggaggccgcgtcagccgatgcattcctgactcctggagatgtgatgggcggaccgactgtgaaaatggctcggatgaactagactgctcccccaagacgtgctccctggatgagttccgctgccaggatggcaagtgcatctcccggcagtttgtgtgtgaccaagactgggattgcctggatggctctgacgaggcccactgtgcggccaccacttgtggccctgctcacttccgctgcaactcctcttcctgcatccccagcctgtgggcctgcgacggggaccgggactgtgacgatggctccgatgagtggccgcagaactgcggggccgaagacacggccgctgaggtggtcagcagcccctgctcctccctcgagttccactgtggcagtagtgagtgtatccatcgcagctgggtctgtgacggtgcggctgactgcaaggacaagtcggacgaggagaactgcgcggtgaccacctgccgacctgacgaattccagtgtgcagatggctcctgtattcacggtagccgccagtgtgaccgtgaacatgactgcaaagacatgagcgacgagcttggctgcatcaatgtgacccagtgcgatggccctaacaaattcaagtgccacagtggggagtgcatcagcttggacaaggtgtgcaactccgcccgggactgtcgtgactggtcggatgagcccatcaaggagtgcaagaccaacgagtgcttggacaacaatggtggctgttcccacatctgcaaggacctcaagattggctatgagtgcctatgtcccagcggtttccggttggtggacggccaccagtgtgaagatattgacgagtgtcaggagccagacacctgcagccagctctgtgtgaacctggagggcagcttcaagtgcgagtgtcgggccggcttccacatggaccctcacaccagggtctgcaaggctgtgggttccatagggtttctgctcttcaccaaccgccatgaggtacgtaagatgaccctggaccgcagcgagtataccagcctgatccccaacctgaagaatgtggtggcgctggacactgaggtggccaacaatagaatttactggtctgacctgtcccagagaaagatctacagcgccgtgatggaccagggcaccagcttgtcctatgatgccatcatcagtggggacctgcacgcccctgacgggctggcggtagactggatccatggcaacatctactggacggattcagttccgggcactgtttccgtggctgacaccaagggtgtcaggaggagaactctgttccgagagaaagggtccagacccagagccatcgtagtggaccctgtgcatggcttcatgtactggacagattgggggacacctgccaagatcaagaaagggggtttgaatggtgtagacatctactctctggtgaccgaggacatccagtggccaaatggcatcacactagatcttcccagtggccgcctctattgggttgattccaaactccactccatctccagcatcgatgtcaatgggggtggtcggaaaaccattttggaggatgagaagcagctagctcaccccttctccttggccatctatgaggacaaagtgtattggacagatgtcttaaatgaagccattttcagtgccaaccgcctcacgggttcagatgtgaatttggtggctaaaaacctcatgtccccggaggacattgtcctgtttcacaacgtcacgcagcctagaggggtaaactggtgtgaggcaacggttctccccaacggtggctgccagtacatgtgcctgcctgcccctcagatcagtgcccactcacccaagttcacctgcgcttgccctgatggtatgctactggccaaggacatgaggagctgcctcccagaagtcgacactgtaccgaccacccaggggacatccaccattgggcctgtggtcaccacatcagctgctgtgtcactgaagcgcaaggaggatccctcagctactaggcacaaggaggatccctcagctactaggcacaatgaggatccctcagctaccagcacctctaggcagcctggggataccccagagctcagcacagtggagtcggtgacagtgtcctcccaagtccaaggtgacatggctggcagaggggacgaggtgcagcggcacggtgtggggttcttgtccatcttcctccccattgcactggtggccctccttgtcttcggagccatcctcctgtggaggaactggcggctgaggaacattaacagcataaactttgacaacccagtctaccagaagaccacggaggacgagatccacatttgccgcagccaggatggctatacctacccctcgagacagatggtcagcctggaggatgatgtggcatgaacagctgaggggagccatctctttccgggatccgctgccacccttaggcaggaaggacgctttctcacacctccccgccctgcactggtccttccacctcagtggtctctgtgttgctcaaagcaagataagagcaaaactgggctggggccaagctcagcggcctgtctgccctgggtcctgttttatatatttattgtctggggacagaaaaggctactggccatgctccagatgggaattc

SEQ ID NO: 3337 - DNA, 795 bp, Rattus norvegicus
  misc_feature (395)..(395): n is a, c, g, or t
  misc_feature (556)..(556): n is a, c, g, or t
  misc_feature (595)..(595): n is a, c, g, or t
  misc_feature (683)..(683): n is a, c, g, or t
  misc_feature (705)..(705): n is a, c, g, or t
  misc_feature (711)..(711): n is a, c, g, or t
  misc_feature (716)..(716): n is a, c, g, or t
  misc_feature (768)..(768): n is a, c, g, or t
ccwydmvksagtttttaggtcccacgtccactggagatcctaaggcagcatgcctcccaagaagcctgagcccaagaaggagactgccaaggyagccgcagcccctgccccagctcctgccccagctcccgagcccctcagggactctgcctttgatcccaagagtgtgaagatagacttcagtgccgaccagatcgaagaattcaaagaggccttttcattgtttgaccggactccaactggagagrtgaaaatcacctatgggcagtgtggggacgtgmtgcggsccctkgsccagaaccccmccaacgcrgaggtgctgcgagttttgggcaaacccaagcytgaagagatgaaybscamgasvcwrgasttsragatrkwcbtgcmswkyntgcasmavatytmcsgmaacaaggrgcasggcachtwtgaggaywthgtggagggdytgcgggtctytgmcaaagaaagcaaygdcacagycatgggmsccgaghttmrgmatgtcytcvccmcchtgggagagmagatdagsgagvctgagktggagcanctbttgmytsrvyargaggmtkccaaygkstgcayhamnwrkgamgcstbtbycaagcaygtmatktscgrstaaagacawktbhccaaggtgyttgscyccgcstgvktmmgssrgrgabccmtrntgswtbbdrvsbvkcahyvranwmvdanwrrmntbgcagaycyavggcstcccsysyaartaaagaagcscmgtgtggvgtytcnmmhdhhawrwaaaaaaaraaaaaaaaa

SEQ ID NO: 3338 - DNA, 3131 bp, Rattus norvegicus
caggagcttgcctgaccccagtggcaaggcttccagattcttctgaatcaaaccctttatgtccaaccgaatccacctggaaaacacgcaagagtgagttcctagaacgtcaaaatgaaggagcggacctctgcatgccgtcacgggacaccacagaaacatcctgatacctctgaagagagccaggcaatggagtctgtggataacctctgcagtcagtatgaggagaaggtgcggccctgcattgacctcatcgactccctgcgagctctgggtgtggagcaagacctggccctgcctgccatcgctgtcattggggaccagagttcagggaagagctctgtgctggaagcactgtctggagtggccctccccagaggcagtggtattgttaccaggtgtcctctggtgctgaaattgaagcaactgaagcagggagaaaaatggagcggcaaggtcatttataaggacaccgagattgagatctcacacccttcactggtagaaagggaaatcaataaagcccagaacttgattgctggggaagggttgaagattagctctgatctcattagcttggaggttagctctccacatgtcccagacctgactctgattgaccttcctggtatcacaagagtggctgtgggtgaccagcctgcagacatcgaacacaagatcaagagacttatcactgaatacatccagaaacaggagaccatcaacctggtggtggtccccagcaatgtggacattgccaccacagaggccctgaaaatggctcaggaggtggaccctcaaggggatagaaccatagggatcttgaccaagcccgatctggtggacagagggactgaagacaaggtcgtggatgtggtgcggaacctcgtgtgccacctgaagaagggctacatgatagtcaagtgcaggggtcagcaggacatccaggagcagctgagcctggctgaggctcttcagaaggagcaagtcttcttcaaggaacaccctcaattcagagttcttctcgaggatgggaaggccacagtgccctgcttggcaaagagactgaccatggagctcacctcccacatctgtaaatcgctgccaatattggaaaatcaaataaatgtgaatcatcagattgcgagtgaggagctgcagaagtacggagcagacataccagaagatgacagtaagaggctgtcctttctgatgaataaaatcaatgtcttcaataaggatatcctaagtttggtacaagcacaagaaaacatatcatgggaagaaagccggctgttcaccaaactgcgaaatgagtttcttgcttggaatgattatattgaggaacatttcaaaaaaaccctaggttcttctgagaaacacagccagatggaaaaatttgaaagtcattatcgtggccgggaactgccagggtttgtggactataaggcatttgagaacattatcaagaaggaagtcaaggccctggaagaacccgctctgaacatgctgcacagggtcactaccatggtcaaaaatgccttcacaaaggtttcatcaaacaattttggtgattttttaaacctccacagtactgccaagtccaaaattgaagacatcagatttaaccaagaaaaagaagccgaaaaactgatccgacttcacttccagatggaacacattgtctactgccaggaccaggcttacaagaaagccttgcaggagatcagagagaaggaagctgagaaagagaagtcaacctttggtgcctttcaacataactctcctcgaaaggagttgactaccactgagatgacccagcacctgaatgcctactaccaggagtgcggaaggaacattgggagacagatccctctgatcatccagtactccatcctgcaaacatttgggcaggaaatggagaaagcaatgcttcagcttctacaggacaccagtaagtgcaactggttcctgactgagcagagtgacagcagagagaagaagaagttcctgaagaggcggcttttaaggctggatgaggctcagcggaagcttgccaaattctccaattaatcaggcttgctatgtgacttccctggtcacagctagcgtcccctgcacaatgaccctttagctgtttaccttatgttagtatgttgcctttagactgtggaagcatgccctctgcaaactctgaggagacgaagagaggagccatggagagtcattctacttcagcagtaagacacgaccctctcaaagcacaggaggctggcacctctcagggtccttcctgctcctaactgccatttctttgtcaggaggatgtcctggctgagtacttcagaagggatgtctcctggctttgtactgctctgcctggagtagtgctagaggtgtsacagrgtcctagcaggacagctctttgtaggcataaattttttgcaacctaattttagcaagggttcaacctcacttttagcccaccacccatcagaggtagtgggacagaaaagttattaggatatgggggaagtgctcagcaatagttctttgggggtgagctcaactttctttggcagcataacaaacaccaaataagactcagaagttgcagatcagtcctctaggcaggcagacaccaggcacgaaccagcagctgtakatcaatcttaaagaaagctcgccagccagcctgaggtaaggctgtggaagcagcaaacttcctcagcaacctcacaagtagttcttaggcaagtttcttctaatggtagtgttaccacaagttgagcccaacaatgctatgcaaggcawaccattacatgcacgttgttagtgaagaataagtakgcagagcaaaccaacgctcagttgctcgtctcccagtgttttgtggggccgtatttatctccttcatcatgggtcctttcacatgtttgcaatattaaatcatcctttcacctgtgtccgcttcaggacaacagtctttcacaagtttgcttcagcaagacaccctttcacctgtgtgccccagcaaaacatcatttgacataactttctaaagaaactagaagtttccacttcaagttcttccaataaaattcttgctaaatgaaaaaaaaaaaaaaaaa

SEQ ID NO: 3339 - DNA, 687 bp, Rattus norvegicus
  misc_feature (192)..(192): n is a, c, g, or t
  misc_feature (565)..(565): n is a, c, g, or t
cggccgcaggcgctcgaccccgggggycgkkctytykkyrcwkscagasswssgscaysatgggtckcatgcacgctcccgrgaagggcvygwsscagtcggcgstgccstaccgccgtagcgtgcccacgtggytgaagttbacgwstgasgaygtgwaggaayaaaktkrcaagttrkccarsaaarrmnwrmvwmmwwmmmarawarrwgygawtstragrgacycwcatggtgtgkcamaggtcckbwwygwgrccggaaataaartmttgagamyscwtaagtmcaaaggccktrccyctgatcktyytgaggwtbwhtaccakytdrkcamgarrscagwtkctsksadmaaryrsckwgagaksmhcagrawrgwtmaggrtgstaaatymcgcctgmttytaawtgagrgcasrakkcaccggctggctcgatmskmtargactaagcgggtgctcccasccaactggaaatatgagtcatscacagccthtgskvtggtggcataaatgctgttgcgtacvcmwgcmrtaawatcackytgrstmrawhmwawrrnwhdmrrmvrryrmtyscacccaactggaaatatgagtcatccacagcctctgctctggtggcataaatgctgttgcgtacacaagcaataaaatcactttgggttaaaaaaaaaaaaaaaaa

SEQ ID NO: 3340 - DNA, 1506 bp, Rattus norvegicus
gacagctggtgtgagtcctggtgactgccattacctgttccttagagatggctctgcagacccccagcttcctcctcccagcagctgtggttgtgctgatggtgctgagcagcccagggactgagggcagagactccscargggatttcgtrtwccagttcragggccwgtgctactacaccamcgggacgcwgcgcatrcggvwygtgaycagayacatctacaaccrggaggagtacstgcgctwcgacagcgacstgggcgagtwccgcgcgswgaccsagctggggcggccskmmgccgagtactdkaayaarcagtacctsgagcrgacgcgggccsagstggacasggtctgcagayacaactacgaggrghcggvggyycbcacctccctgmgrcggcttgrksagcsyaatgyggycmkctccctgtccaggacagaggccctyaaccaccacaacytgctggtctgctcagtgacagatttctacccagcccagatcaaagtgcgctggttccggaatggccaggaggagacgrcgggggtcgtgtccacacagcttattaggaayggggactggaccttccagatcctggtcatgctggagatsacgcctcagcggggagakgtgtacayctgccatgttgaccaccccagccttsagagcccygtcacagtggagtggcgggcacagtccgagtctgcccagagcaagatgctgagcggcatcgggggctttgtgctgggggtgatmttcctcgggcttggccttttcatccrtcacaagmgtcagaaaggrcctcgggggcctcctccagcagggctcctacagtgacacaggagagtgttttggttgtgtttgaagasacakgggaaacctgcccccatctytcmgcatcaaatcctgcaattcttctgtccctacagagccagagcagttagcacccccccccccccgggcmgacgctggccttgggaacagacaaaaggcagccttctccaacctcagcatcacgtcagaactcatactccctcccctggttagcaaccagcatttctctggtgcagatggctcctgmccttgaaggaggcgggagccaatatccttgaagtgatgaaagccsactctcggactatgagaaagagscaattaagtgtcaagtgtgcccasacagctgygaccagttgtgaaataccctagcttctgataacggaatgagttacttcttcccagtcaggaaggtaggccctttccagcactccccaccccatctgaacaggtttgtytcagggttggaaggatggcactcctttaccccyyccccaatmacatactgccaaagctcgagaagcccassttacgcatattcctatatatgtcacaagccccttgatgtgagcattgaattcctaacctgtggaacagggaaggcttgtgatctgatttgggtcagacccgtataataaagattctctttgttcttgmaaaaaaaaaaaaaaaa

SEQ ID NO: 3341 - DNA, 7439 bp, Rattus norvegicus
gagggaaggaggaagaagaggataggtccttgtttctcaagcaccaagagtcccactcgttcctagaagacagcagagacagaggcctagctatggctgtagttggacagtactgtgacacactttgtttctggttgttgggcacaccacaggtcaagtctatgcactctcctttattaaggtctggcctaagccagcatttgtaacacataacctcccagtccctgcctccccttccagacccttcttccactaaaagatggaacccagaagtaaatggagatcctggagagagctctagaaccccagctgtctccacctatggctacggcttggtccccagaacaccaggagcttatggaaatctaagaagcaagagagtgaagccatcctcctagacgaggaaaggcttggtgatcctgggtgcttttccctgcaaacaggagcccgggcagcaagaaaagatactcaggctgcgggcacacgggccacacacagcagagaaatgacacagcgtgagggcgacgcttgaatacacagaaacacacacacacatggagaagcaccagatggaggaggcagccaaggctgggccagggattcgttactccccaacccacacagagcggctggtggggttacgtaatgcaggctgcaaaaacactaaccagcctccttcaagggatcctggggcggggggtggaggggggacctcctttgaaaggcaggtggggattttgcagtcaactcctgttctcagaggcggtgggcacttctgtcagctgactcagcccttggggtggccctggaaagtggcagaaagggaagagcaaggcgcttcagcttgttagtcatgagggcccatgggtgtccctccttgtgtgaaggcaaggtggggatgctgtagggagtcgtctagggatacagggagaatccggggctgtggaggagagaaatggatgaaaaagatgggcttgctgacctccacccatctcccacacatccacaccatccctacaaccccccccagccatccattcatctatcccccacccgcacaaccccacaccatcccccacccacccatacccccgacccatgcccccccaccgtcccacccctgaggatcacctacctgttacagcccacagcttctcctacacacaattccctgaacttacctgatctaagccattactgccgctctacagcttggcccatgttggctttcagcaccccaaacacaccccaaatcccttcgctggcacagctgatagtctgaaaactgacagagtttttaagaataaatattggagctgtgaaaatatacattgaaagcaattaacaggtaactttcaaagttcagacttgaaagcgaggctggcctatctctccccatctactcctcggacaaggccctgagccctctttcaagttggggcttctctttcaagttggggcttcgggtgtagggctgggtttctgtgaacatcaaaggtggagaagtcaccgttgagaagagaagtattcagaaactgccgagtttgtcttctctttgctttttttttcttccccactattgaatattgattgaaccatactatgtgccgttgttgaacctagagggtcacggcctgtcttcctcctgttcctttgatagggcatttcgtgcgttacgtgggggacaaatgtattcgagctgtgcgtccacctatctctctggtgttgaatgcgttcgtaacatggtgaagtctatttttaaaatggaaatgagcgatgatgaggaaaatggctttgggggttagttgggctctcccatccatgataccgtggagtatagcattcatatctgcccagtagtgttttttttttctcggtggggaggttgatgggaagcctccagagtggggagcccaaaggtgagttctgaaggagcttcgtgactatgaatgggaaaatgtttgcaaagtccagggcaccggggacagtgtaacagtcagagcagtggctcccttggtgggaggctgaggctccttacccttgagtttctagggttgcctggctgtcttggctgtggcatccccaaggatgctttggtctttgagagctttgacggcagggataaagccaggtgaccaacgctaactgaaaaagtagaccaggcatctgtgactcaggactttccattctagttctgaggtattcagtgcccgctcctccctccctccctccctccccctctctctctctctctctctctctctctctctctctctctctctctctctctctcctctcagctactctctttttccttctgctcagctccaggtagaagcccctatgtcacctctrcgtctgacaagctggtgaccaagatgcccagagactagaccctatgcttgtgagtcacagtcatcagacacggcaaacctccagtcttcctgacctgttgcttagggacacatcccgttgctgcccctgacgtctgcctggtcaaccttgacttcctttgagagtaaggaagggggcggggacacgttgaaatcatgccacccaaggccgaatcggaatgagcagatgacgccaagttgacgtcaaagacagaggcgacagaaactctgcagccagctcttgcccccgaggagctcaggttcctgcaggagtcattttagcttagtcttctgaaggacacagataccatggaagagaacacgtttggggttcagcagatccaacccaatgtaatttctgttcgtctcttcaaacgcaaagtgggaggtctgggcttcctggtgaaggaacgggtcagcaagcctcccgtgatcatctcagacctgattcgaggaggtgctgcggagcagagcggccttatccaagctggagacatcattctcgcagtcaacgatcggcccttggtagacctcagctatgacagtgccctggaggttctcaggggcattgcctctgagacccacgtggtcctcattctgaggggccctgagggcttcactacacatctggagaccaccttcacaggggatggaacccccaagaccatccgggtgacccagcccctcggtcctcccaccaaagccgtcgatctgtctcaccagccttcagccagcaaagaccagtcattagcagtagacagagtcacaggtctgggtaatggccctcagcatgcccaaggccatgggcagggagctggctcagtctcccaagctaatggtgtggccattgaccccacgatgaaaagcaccaaggccaacctccaggacatcggggaacatgatgaactgctcaaagagatagaacctgtgctgagcatcctcaacagtgggagcaaagccaccaacagagggggaccagccaaagcagagatgaaagacacaggaatccaggtggacagagacctcgatggcaaatcgcacaaagctccgcccctgggcggggacaatgaccgcgtcttcaatgacctgtgggggaaggacaacgttcctgtgatccttaacaacccgtattcagagaaggaacagtcccctacctcggggaaacagtctcccaccaagaacggcagcccttccaggtgcccccgtttcctcaaggtcaagaactgggagacggacgtggtcctcaccgacaccctgcacctgaagagcacactggaaacggggtgcacagagcacatttgcatgggctcgatcatgctgccttcccagcacacgcggaagccagaagatgtccgcacaaaggaccagctcttccctctagccaaagaatttctcgaccaatactactcatccattaagagatttggctccaaggcccacatggacaggctggaggaggtgaacaaggagattgaaagcaccagcacctaccagctcaaggacaccgagctcatctatggcgccaagcatgcctggcggaacgcctctcgatgtgtgggcaggatccagtggtccaagctgcaggtgttcgatgcccgagactgcaccacagcccacggcatgttcaactacatctgtaaccatgtcaagtatgccaccaacaaagggaatctcaggtcggccatcacgatattccctcagaggactgacggcaaacatgacttccgagtgtggaactcgcagctcatccgctacgcgggctacaagcagccagatggctctaccttgggggatccagccaatgtgcagttcacggagatctgtatacagcagggctggaaagccccaagaggccgcttcgacgtgctgcctctcctgcttcaggccaatggcaatgaccctgagctcttccagatccccccagagctggtgctggaagtgcccatcaggcaccccaagttcgactggtttaaggacctggggctcaaatggtatggcctccccgctgtgtccaacatgctgctggagatcgggggcctggagttcagcgcctgtcccttcagcggctggtacatgggcacagagatcggcgtccgtgactactgtgacaactctcgatacaacatcctggaggaagtagccaagaagatggatttggacatgaggaagacctcgtccctctggaaggaccaagcactggtggagatcaacattgctgttctatatagcttccagagtgacaaggtgaccatcgttgaccaccactctgccacggagtccttcatcaaacacatggagaatgaataccgctgcagagggggctgccccgccgactgggtgtggattgtgcctcccatgtcgggcagcatcacccctgtcttccaccaggagatgctcaactatagactcaccccgtcctttgaataccagcctgatccatggaacacccacgtgtggaagggcaccaacgggacccccacgaagcggcgagctatcggctttaagaaattggcagaggccgtcaagttctcagccaagctaatggggcaggccatggccaagagggtcaaggcgaccattctctacgccacagagacaggcaaatcacaagcctatgccaagaccctgtgtgagatcttcaagcacgccttcgatgccaaggcaatgtccatggaggagtatgacatcgtgcacctggagcacgaagccctggtcttggtggtcaccagcacctttggcaatggagacccccctgagaacggggagaaattcggctgtgctttaatggagatgaggcaccccaactctgtgcaggaggagagaaagagctacaaggtccgattcaacagcgtctcctcctattctgactcccgaaagtcatcgggcgacggacccgacctcagagacaactttgaaagtactggacccctggccaatgtgaggttctcagtgttcggcctcggctctcgggcgtacccccacttctgtgcctttgggcatgcggtggacaccctcctggaggaactgggaggggagaggattctgaagatgagggagggggatgagctttgcggacaggaagaagctttcaggacctgggccaagaaagtcttcaaggcagcctgtgatgtgttctgcgtgggggatgacgtcaacatcgagaagccgaacaactccctcattagcaatgaccgaagctggaagaggaacaagttccgcctcacgtatgtggcggaagctccagatctgacccaaggtctttccaatgttcacaaaaaacgagtctcggctgctcgactcctcagccgccaaaacctgcaaagccctaagttcagccgatcgaccatcttcgtgcgtctccacaccaacgggaatcaggagctgcagtaccagccaggggaccacctgggtgtcttccccggcaaccacgaggacctcgtgaatgcactcattgaacggctggaggatgcaccgcctgccaaccacgtggtgaaggtggagatgctggaggagaggaacactgctctgggtgtcatcagtaattggaaggatgaatctcgcctcccaccctgcaccatcttccaggccttcaagtactacctggacatcaccacgccgcccacgcccctgcagctgcagcagttcgcctctctggccactaatgagaaagagaagcagcggttgctggtcctcagcaaggggctccaggaatatgaggagtggaagtggggcaagaaccccacaatggtggaggtgctggaggagttcccgtccatccagatgccggctacacttctcctcactcagctgtcgctgctgcagcctcgctactactccatcagctcctctccagacatgtaccccgacgaggtgcacctcactgtggccatcgtctcctaccacacccgagacggagaaggaccagtccaccacggggtgtgctcctcctggctcaacagaatacaggctgacgatgtagtcccctgcttcgtgagaggtgcccctagcttccacctgcctcgaaacccccaggtgccttgcatcctggttggcccaggcactggcatcgcacccttccgaagcttctggcaacagcgacaatttgacatccaacacaaaggaatgaatccgtgccccatggttctggtcttcgggtgtcgacaatccaagatagatcatatctacagagaggagaccctgcaggctaagaacaagggcgtcttcagagagctgtacactgcctattcccgggaaccggacaggccaaagaaatatgtacaggacgtgctgcaggaacagctggctgagtctgtgtaccgcgccctgaaggagcaaggaggccacatttatgtctgtggggacgttaccatggccgccgatgtcctcaaagccatccagcgcataatgacccagcaggggaaactctcagaggaggacgctggtgtattcatcagcaggctgagggatgacaaccggtaccacgaggacatctttggagtcaccctcagaacgtatgaagtgaccaaccgccttagatctgagtccatcgccttcatcgaagagagcaaaaaagacgcagatgaggttttcagctcctaactggatcctcctgcccccgtgcgtgcgatgtggcggctgccccaagtgcccaagtaagggcggccgcaggttgactaaattcggacacacacggctgaaccgagtggccctgctctgcctcttgtcctgttgctgtgtcctggtccttcttcctgctctgggctctctcaaccccacccctgggttttctccttgactcttgggctacgatgcatcacccttgtaccctgcagtggctctcacaaaaccgcatcctccccacccccacccgattgctgccaagggcaggttgcggtgcatggctgttgctcctgttgytggggtctgaaggtggctggcgctgggcctcaggtcaccctgaaccagtcccttggccacttaagcccccttccaccctctttttatgatggtgtgtttgtgtgtgtgtgtgtgtgtgtgtgtgagaga

SEQ ID NO: 3342 - DNA, 2578 bp, Rattus norvegicus
atgtctgttccatcatccctgagccagtcggccattaatgctaacagccacggaggccctgcactcagcttccccttccccttgcatgctgcccataaccagctgctcaacgccaagctgcaagccacagctgtggtacccaaggaccttcgaagtgccatgggagagggtagtgtgcctgaaccaggccctgccaatgccaagtggttaaaggaaggccagaaccagcttcggagggctgccacagcccatcgagaccagaaccgaaatgtgaccttgaccttggcggaggaggccagccaggaggctgagacagcacctwwrggtccaagcttaatgsatstatactcgtgactgagctctcggcccacaatcagccaaccgagggcttcatggatccgccwwgatcatcaacacccagggactgggaccagatgaaggagggagaaggcagcgaggagaagttgaggaggaggatgaagatgaggaggaagaggatgaggaggaggaggaagaggatgaggaggaggaggacttgtcttctcctcaagggctacctgagcctctggagaatgtggaagtcccctctggaccccaggtcctcacagatggcccccgggaacatagcaagagtgctagcctcctatttggcatgcgaaacagtgcagccagtgacgaggactcaagctgggccaccttatcgcagggcagcccctcctatggctctccggaggacacagattccttctggaaccccaacgctttcgagacggattccgatctaccggctggatggatgagggtccaagacacctcagggacctactactggcacatcccaacagggaccacccagtgggaacccccaggccgggcctccccatcacaggggaacagtccccaagaagagtcccagctcacctggactggctttgctcaccaagaaggctttgaggaaggagaskkywsgarggatgaacctagtgaagaggccccaatggagttgggactgaaggaccctgaggaggggacattgcccttctcagctcagagcctcagcccagagccagtgccccaggaggaggagaatctgccccaacggaacgccaatccagggatcaagtgtttcgctgtgcgctccctaggctgggtagagatgactgaggaggagctggccccaggacgcagcagtgtggcagtcaacaattgtatccgccagctctcctaccacaaaaacaatctacatgatccgatgtctggaggctggggagagggaaaggatctgctgctccagctggaggatgagacgctaaagttggtggagccacagaaccagacactgctgcatgcccagcccatcgtcagcattcgcgtgtggggcgttgggcgggacagtggaagagagagggactttgcctacgtagctcgagryaagctkayccmkwtrstsargtgyyamgtgtttmgctgksaggcacstgyywasaacrtcgysacyagcctgcatgagatctgctccaagatcatgtctgaacggcgcaatgctcgctgcttggtaaatggactctccctggaccactctaaacttgtggatgtccctttccaagtggaattcccagcaccaaagaatgaactggtgcagaagtttcaagtctattacctagggaacgtgcctgtggctaaacccgttggggtagatgtgattaatggagccctggagtcagtcctgtcttccagtagtcgtgagcagtggaccccaagtcacgtcagcgtggcccctgccaccctcaccatcytgcaccagcmgacagaagcaktgctgggggaktgtsgagtgcggtycctctccttcctggctgtggscagagatgtgcacacgttcgcattcatcatggctgccggccmagcyyccttytgctgtcacatgttttggtgcgagcccaatgctgccagtctctcggaggctgtgcaggctgcatgcatgctccgctaccagaagtgtctggatgctcgttcccagacctccacctcytgcctcccagcaccccmtgcrgagtcagttgcgaraygtgtagggtggactgtccgcaggggtgttcagtctctgtggggttccctcaagcccaaacgthtaggatcccagaccccatgaagagctcccatcctccctvkacmtgcttgtkttgggccccagggaactcaarggtttggggcavbtmrgsgmkgtggatgttyttcbtacaccccatgtcccccggrmtgcccctcstcagtagctggggttccctacctagsggywsggagrgagaaattgaattccttcacagaagtcatyacmctggactgatgacatsggggsmkrgaagcaaagccagccttgggctctccatccccagtgtttgaggtggagcaggaggaaytggymcragbcagkcccyatcctcaaaggcccmmtaagggcagraggggactggtctcggcatggatcccctgtcccctgttmtgcggacacctccmctgtactgatatcastaataaagtctgtctgtcgctgmhrawraaaaaaaaaaaaaaaaaa

SEQ ID NO: 3343 - DNA, 1152 bp, Rattus norvegicus
caagatctcaaaacactggggagatgaacaaaggccgcaggccctcagacccgaagtcggcagtattagtcatggctatacagctaagagtcttctatctcgttccacttcttctagccagctatgtgcagacaacccccaggctggaaaagatgaagatggactgctacaaagatgtgaaaggcaccatctacaactacgaggctctgtctcttaatgggaaggaacgcattccattcaagcagtatgcaggaaagcacgtcctctttgtcaatgtggctacctattgtggtctgacaattcagtatcctgaactgaatgcactccaggatgatctgaagcaatttggcttggttatattgggctttccctgcaaccaatttggaaagcaagaaccaggagacaatacagagattcttcctgggctcaagtatgttcgtccgggaaaaggatttttacctaatttccagctttttgcgaaaggggatgtaaatggtgaaaaagagcaggaaatctttaccttcttgaagcgctcctgtcctcacccctcagagactgtggtcacaagcaaacatacattctgggagccaataaaagtccatgacatccgctggaactttgagaagtttctggtgggacccaacggtgtccctgtcatgcgctggttccaccaggctcctgtcagcactgtcaagtctgacatcctggcgtacctgaatcaattcaaaaccatataggaaggcaagcttctgatctcttcctcctctttctccctgaaagctgctctgaaaaaagactccaccttctcagcatgctctttactgaaatggactctacctgcccaagtcacccctaaattacctaagttcttcccctgcacaagcagatttgtgtctggaaagctgaagatgtttttccttgttagatttatgagttaaagaaagaaaagagaagaaaggaaaagaaaagaaaagaaaagaaaagaaaagaaaagaaaagctaaatccagaggcctcagttacaggtttggctgggtgtgttagtattcacctacaatgtgaacactcagcagacattacagacatttcagacagacagagacaagaggaacatgaattctaggccagcctgggctacaagaaatcttgtgcg

SEQ ID NO: 3344 - DNA, 1059 bp, Rattus norvegicus
  misc_feature (1016)..(1016): n is a, c, g, or t
ccaataaggaaactctgaaccaggagtcatggaagtcaaacccaagctctactactttcaaggcaggggaaggatggagtcgatccgctggctgctggctacagctggagtggagtttgaagaagaatttcttgagacgagagaacaatatgagaagttgcaaaaggatggatgcctgctttttggccaagtcccattggtggaaatagacgggatgctactgacacagaccagagccatcctcagctacctggccgccaagtacaacttgtatgggaaggacctgaaggagagagtcaggattgacatgtatgccgatggcacccaggacctgatgatgatgattatcggggctccatttaaagcccctcaggaaaaagaakagagcctagctttagcagtgaagagggctaaaaaccgwkamttcssmkygwktgaaaagattttaaargascayggakaggcatttcttgttggcaaccaactcagttgggcagacatacagctamtagaagccattykgmwsshsgmvgargtcagtgctcctgtgttgtckgacttccctctgctgcrggcatttaagacaagaatcagcaacattcctacaattaagaagttcckgcaacctggaagtcaraggaagccaccyccrgatggccactatgttgacgtggtcaggmccgtcctgaagttywagtgacagsgtgctttaaagtggvtrbtgcaagggtccaatcrcascagcagytayagagcattccaraggcaagatagagctcycaggagtaaaggtyttcaaagaacmtgaaamccactctgtccaacaatgacaaatgccaattaaatagagtgaaaawytgwwhaaaaaaaaaaaaaaaaaaaaaaaaaarwwwggcggccgcaagcttattccctttagtgagggttaattttagcttggcactggccgtcgttttacaacgtcgtgactgggaaaaccctggcgttacccaacttaatcgccttgcagcacatcnccctttcgccagctggcgtaatagcgaagaggcccgcaccgat

SEQ ID NO: 3345 - DNA, 3255 bp, Rattus norvegicus
tgggaggaccgacccggcagggacctgctgggggcaggacccggggagcaagatggccacggtcatccccagccccctgaggtggtgcgggcgtgcgcgaggcgggggagtcagcgcgggcgagtctgtgtggctgcgagtgcgtgtgtgtgtatgtgtgcggccgctgggggtggggctggtggggtgtcagggggctgtcaccgcgtgcgggggtgcgagggtatgtgactgtgggtgtctggcaagaatggtgtacgacgcgttgctcctggacgggtggagggcgtgggggaggggtctccaaggatttttaggggaaaggggtcatgtcccctcccagggatgctagggtttgagagagggtaaatgatttagagaagatggggcctgggtacactcgagtcgaacccacgctacctttgtcttggggtgtggagtgtgttgtgagacttatacattgctttttgttttgtagctgaatgtgtgggtatgtataggatttcttttattctgcactacctatctgagtatttgggtctctaagtgtgtgcacatgtctggtgaaactgcaccatttatgttccgtgtctctggatagggagctgtagggataggtctaaatatttgcacgaacagaggcagaccggactgtccctctgtttccaaggggtgtacctgtgtttgtgaatgtattttaaatttgggtttgtttttccccggagggtgcgaatgtgtgtatgtgtacctgtataaatctctgtgatgtctttgtattgtgtgtttggctgaagtgtctctggatgaatatgtaagcgcatatgtaaatgattctagggtccctatcttttgacaacgtgtgactgttgggatgagtgttgtgtggtgtgtttccatgttgtggggctttgtggataatcttcctctggacacatctggggtctctggatacatggcattcatagccttggcgaggacttctaccgggaggccatcgagcactgccgcagctacaacgcgcgcctgtgtgccgagcgcagcctgcgcctgcccttcctcgactctcagaccggcgtggctcagaacaactgctacatctggatggagaagacccaccgcgggcctggtttggccccaggacagatctacacttaccccgcccgctgttggaggaagaaacggagactcaacatcctggaggaccccaggctccggccctgcgagtacaagatcgattgtgaggcacctctgaagaaggagggtggcctcccggaagggccagtccttgaggctctgctgtgcgctgagactggagagaagaaagtggagttgaaggaggaggagaccattatggactgtcagaaacagcagttgctggagtttccgcatgatctcgaggtagaagacttggaggaagacattcccaggaggaagaacagggccaaaggaaaggcgtatggcattggaggtctccggaaacgccaggacaacgcatccttggaggaccgagacaagccgtacgtctgtgatatctgtgggaagaggtataagaaccggccagggcttagctaccactacacccacacccacctggctgaggaggagggggaggagcacactgagcgccacgccctgcctttccaccggaaaaacaaccataaacagttttacaaagaattggcctgggtccccgaggcacagaggaaacacacagccaagaaagcaccagatggcactgtcatccccaatggctactgtgacttttgcctggggggctccaagaagactggatgtcctgaggacctcatctcctgtgcggactgcgggcgatcaggacatccctcgtgtttacagttcacggtgaacatgaccgcagccgtgcggacctaccgctggcagtgtatcgaatgcaagtcctgcagcctgtgtggcacctcggagaatgacggtgccagctgggcgggtctcaccccccaggaccagctgctgttctgtgacgactgcgatcggggttaccacatgtactgcctgagccctcccatggcggagcccccggaagggagctggagttgccacctctgtctccggcacttgaaagaaaaggcctccgcttacatcaccctgacttagacctggctctgcttctccaggacctttgggtggtgctatcctcggcctcttggagctcctgacttttcccgcctggtgtccccagtggaagggatagggtgaagcccagagaggggccaaggcggtctccctctgcaagtggaatgttaccctgagggagggtgggtccagcagggtccctcctgtcccccatcttcattccttgacaagtgggcaccaggcttctgctcccctcaaagccataccgcctctgggcgggcatagaggggtagtggatgccagccagtggcacggmamragsctttttctaaagaaaaagacaaaacgtgaaaaaaaaaaaaggaaaaaaaaaaagaaattaatatatacaaagattcctctaagcctggctgggtggggggccactgagtgtctgctgggacctgactttaccagtttcctgaatggcccctccccaccccatttctggagttgcrattgtctcaactcccatctgaggtgggtaccacaccttcctcacagccaggccaggtgggcatggtgcccacacactgccccctcccggtacccaccgtggatactgcatgatgtgamccatggttttgaactcttcctgcccctcctttgagagccccgccctgcgcccacccggtgcctgccagacctggggcttgcagctgggggagsccggtggggtgaggcaggcaggcargcagccagcccgctgcaatgagaagaagcacagattgcaatggactcagttgttttttgttttttgtttttgtttttktttttttttctttctttctcccttctcaaccctttccttcmctacccagccaggctgggbtgcctccttccccccatcgctagccattttgggggtggcaaggaggtgtggwcgtttctcgtggttgtgtgtgtttgktgttcgggwtttaamaaagggaaattgagactgcaartggggggaggtggaggrtckgggggagtctgccccccaacccwggagtaccccccttgccaccaagtctcctttattgcctgcctctgctgtgaattaacttgttctgtgtattaaactgggccggacccctctgcccacmamaaaaaaaaaaaaaaaaa

SEQ ID NO: 3346 - DNA, 1507 bp, Rattus norvegicus
caagattgccctgctggaggaggcacggaggcgcaaggaggacgaggtggaggagtggcagcaccgggctaaagaggcccaggacgacctggtgaagaccaaagaggagctgcacctggtgatgacggctcccccgcccccacccccgcccgtgtacgagcccgtgaattaccacgtgcaggaggggctgcaggatgagggagcagagcccatgggctacagtgccgagctctccagcgagggcatcctggacgaccgtaacgaggagaagcggatcaccgaggcagagaagaacgagcgcgtgcagcggcagccgttgactctgagcaatgagttgtcccaggcccgggatgagaataagaggacccacaatgacatcatccacaatgagaacatgcggcaaggccgggacaagtataagacgctgcggcagatcaggcagggcaacaccaagcagcgcatcgacgagtttgaggccatgtagaggccaggccgggaccaagggcggagggcacctcacagcaggcaggtgtcactcttggctctttagtactctataagtctagaaacccccttgccgtgtwscagksvckhrragrgcaggtaymskgcvawgwtctgccccaagacccagtggaatcctccctggttgctyccaatagtatcacatagtgccaaacaggccagatttttatgacagttgccgaatcacttcccgttsgragcagggattcggagggctggcccgaatgacgcgattcagtgtcmctggggataataatagcactgtggctcacacacgggtgccatactttctytagtttwacaatgagctcaaatcgatkktgttcttgatttmtatgaaggatccatctckgyrygkkgaggggtgaaaaygattttgaaatttgagtcttaagacgcyccacacagtytccttcctycagacckctggcaragtytmstgcggtccctcaragtgtacggtacaggactytccgatmcaaaattbtcatgcttaccctgttagcaktcattgttggactgatacacctaatgatyttytatagagaatagtatttatatmtaagcgataatatgggtttgtaacmttagttttaaaaasggmmmgwkktgttstgtawatkwtgttaccttttacagartaaaagarttcamcmttwwdammmarwaawmmmramacttgatctgacacgggggcaggtgggagaccgatgacygraatcsccgctgtacaaaaaygkyagkgggttttgtgcatgtaaaacgcacacttcaayttcctgtcagttcttcactgagagcagtcagactbtagcccgaagggactcaggcctgtttattgtgaacaacttgttcctgttttcagtttgtcttccttccttgagccggactgtcctttttggttgtgatgtcctgtgcaggtcactccgcaccagatttacacacaataaaagttctccamggmwaaaaaaaaaaaaaaaaa

SEQ ID NO: 3347 - DNA, 1146 bp, Rattus norvegicus
atggaagaaaacgaatactcaggatactgggagcctcctaggagacgatgctgctgtgcaagacgggggactcagctcgtgctggtggggctactgaccacagtaatggtctggctgctggccctgctccttctatggcactgggaaacggagaagagtctaaaacagctgggagacgctgcaatccagaacgctcttcagatgtcacaaaacttggaagagctccaagctgaacagaagcaaatgaaatctcaggactctcagctctcccagaacctgaacgaactccaagaggatctaatcaacgtcaaatcccagaactctgaactctcccagaacctgaacacactccaagaggatctagtcaacgtcaaatcccagggcttgaatgagaagcgcgcggcctcagattctctggagaagctacaggaagaggtggcaaaactgtggattgagatactgatgtcaaagggaacggcatgcaacgtgtgtcccaaggactggctccatttccaacagaagtgctactattttggtgagggctccaagcagtggatccaggccaagttcacctgcagtgacctggaaggacggctagtcagcattcacagccagaaggagcaggacttcctgatgcaacatatcaacaagaaggagtcctggattggtctccaggatctcaacatggagggagagttcgtatggccagatgggagccctgtgggttatagcaactggaatccaggggagcccaacaatgggggccagggtgaggactgcgtcatgatgcggggatctggccagtggaatgacgccttctgccgcagctacctggatgcctgggtgtgtgagcagctggcaacctgtgacctatccgcccccttagcctctgtgacgccaacaggacccacccccaagaatgaaccctgactaagttctgtgcttcctctcctggatttctcctctacctttgtcatggaaacaaccaggccttgaggatgcccctgtcaaggcccgattgctctctgtgactgaggctaggattatgtccctcccaaactgaagtggctggtggaggccagctcctgccagctatccagaaagcctctcccgctaagctgaccattccattccgtctgccctctt

SEQ ID NO: 3348 - DNA, 1692 bp, Rattus norvegicus
  misc_feature (1222)..(1222): n is a, c, g, or t
  misc_feature (1243)..(1243): n is a, c, g, or t
ggcacgagsggywygrkskywcgwtgrmkkmgsywcgwsktgttctgctctgcgattgcrgcgcttgttcgagcgcttacagcggcgcgtcggtcccakcaagggcctcaracttcagctttgggtgagagaagatggcccgaaccaakcagaccgctaggaagtccaccggagggaaagccccccgyaaacagctggycaccaaggcgsccsggaaaagckcgccctctactggcggggtgaakaaacctcatcgctacaggcccgggaccgtggctctaaragagatccgtcgttmccagaaatmramtgagctgctcatccggamgctacccttccagaggttggtgagggagatcgcccaggatttcaaawcygacttgaggtttcaaagtgcarccatcggtgcccttcaggaggctagcgaggcatacctggtggggttgtttgamgawaccaatctgtgtgccatccacgccaagagagtcaccatcatgcccaaagacatccagttggctcgccggatacggggggagagagcttaagttgaagcgryykywahggywkwkkgtagkaaattctgtaaaatamwwwrrdwwaawwwdwkwykkywykwgkrrraaattgtktataatatgktgcatttgtacttaagtcatwccatctttcactcaggrtgaatggaaagagtgactgtycacagacctcagtgatgtgagcactgtggctcaggagtgacaagttgytaatatgcagaagggatgggtgatasttcwyrswyctcatgatgcatgtttctgtatgttaatgacwtgttgggtagmtattaaggtactagaaykgakarrtgtgtwcasgrkscttttgcaataaaactggttatgacttgawmmaarwrwwwaammawacatcactgtkawaraawrwrrrmwwwwwcaaaggttgaagatacaagttttagccacagtgtwacagtttcctttaaaaaarammaadwwrammtggcagctatagaatwcrctatgtgcatttataatagctattywatatattgtagkgttcaacwttttwrrmwyaarkgtttwmcmktsmcawddvdhrrvrarwmhwrwmatwaaggtgtgtrkratttmgkcmmswtggtatttctgrhhmgrstgcattkgtttttamcaaagtrraaramtgctatgsgtattaarcyttgcataagtcctcattntaccacatgttcabtaacmcntgaccctbtggytrkwaacacaaaacwctaacggggattttckttaagggctytagagtaaaacawcaagmtattmacmccrgcaysakskgttcbtwatbtagtwagtragcttttcattgtgtttggtcttacrchtagactgagtktggttttgtttttaatctttaaggggraaamctgtacaaggtwtgcttttccttgtggagtttataaacatgggggtaakagyacagcttgagcttattgsactctgccaatgaaratgggttaggttacacytggttactmtcctggcaaaahaatcccttktatadrgatggccttcwagtggtttttaaaagtatcstattsaagtttttaggtcaattatgtakgktgactawwtttacaaataaacttgtttattcmhhhdhvhdwmaawmmwaaaaaaaaatgtttggcggccg

SEQ ID NO: 3349 - DNA, 1354 bp, Rattus norvegicus
cacgagggttttgacctgtwgaggtmctcacttttcgttatggcgctgaaggtggcrrtagctgctggcagtgctgcaaaggcaatattcaagccagctctcctctgccgkccttgggaggttctggctgcccatgaggccccccgaaggagcatttmctcacaacaaacaattsctmcgtctgctaagtatggtgggcggcatacagtgactatgattccaggggatsrcrwsggcccggagctcatgttgcatgttaagtcggtattcaggcatgcatgtktgccagtggactttgaagargtgcatgtaagctccaacgctgatgargaggacatccgmaatgccatcatggccatccgccggaaccgtgtggctctaaagggcaacatcgaaacaaatcatracttgccaccatcccacaaatcccggaacaacatccttcgtaccagcctagacctctatgccaacgtcatccactgtaagagtctgccaggrgtggtgacccggcacaaggacatagacatyctcattktgcgggaaaacacagaargcgagtacagcagyctggagcatgagagtgtarcabgagtggtggagagcttgaagattatcaccaragccaagtccctgcgcattgctgaatatgcttycaagctgscccaggagagtgggcgtaagaaagtgacggctgtgcacaagsccracatcatgaaactgggtgatggactctkccyccagtgttgcagggaagtggcagcccgctaccctcagatcacctttgatagcatgattgtggacamcacaacaatgcagytggtatcccgsyytcagcagtttgatgtcatggtgatgcctaatctctatggtaacattgtcaacaacgtytgtrcakgrbtagwtsrwskmccakgcmttstkrywkkksccaactaykkycwtstgtmtscwktaytcgagacagstwcaaggaacmcaggcaaaagtattgccaataagaacattgytaaccctaytgccacattgbtagcawgttgcatsatgbtagaccmcctcaagstccattcctatscmmcctycatycgaaaagctgtyttarmatycatggacaatgaaaatatgcataccccagacattgkaggccagggcmccwcatyccaagccatycaggacatcattbgtcacakycgcatyattaatggacgggctgtggaggcctagctatmcctksagkttgstcagwttgtytgtaggactcccttytcattttarcactycasctagctttggggacaggctccagaataaagccamttgtgttccvrraaaaaarraaaaaaaaaaaaaaaaaaaa

SEQ ID NO: 3350 - DNA, 4652 bp, Rattus norvegicus
cacgagggtttggattaagtgttaagggaaaggaggtccasgcaaggcagctggacaggcagtcctgcasagcgcatcagggtgcatctctagacagttggggatcgccaggtcggagtgtgcaccgggtctgctaagttttgccttcacccagagtcttggatcccgcctggatggagtcscttctgggtttccattggctcctgtgaktgcttgggtgtctggagattgttttttggcgaaggggaacaacttttgaagttcgcccaggakaccgcgttccaaccytagtgcctasgcagccggacccgygggggcgcgaccgcggcgggagtcaccatgggcagcaaaggcgcctaccggtaccattggcagagccacaatgtcaagcacagtggtgtggacgacatggtactactctccaagatcacagagagctccatcgtagagaacctgaagaagagatacatggacgactatatttttacatatatagggtctgtcttaatctctgtcaaccctttcaagcaaatgccatattttggagaaaaararawwraaawrtaccaaggagcggcccagtatgagaayyywyytywtwtytwtkcmsttgmmkacaktatktayrgaaacatgatcawcgacagagakaaccagtgtgtcatcatcagtggtgaaagtggtgctggaaagacagtagctgccaagtacatcatgagctacgtctccagagtgtccggaggaggccccaaggtccagcatgtcaaggacatcatccttcagtccaacccactcctggaggccttcgggaatgccaagacagtccgcaacaacaactccagccgatttggaaaatactttgaaatccagttcagtccaggtggggaaccagatggtggcaagatctccaacttccttctggaaaagtccagagtggtgatgaggaacccgggagaacggagcttccacatattctaccagctcatcgagggcgcctctccagagcagaagcaaagccttggtatcaccagcatggactactattattacctgagcctctcagggtcatacaaggttgatgacattgatgacaagcgggatttccaggaaaccctgcacgccatgaatgtgattgggatcttctcagaggagcagactctcgtgctgcagattgtggctggaattctccacttgggaaacatcaacttcaaggaagtgggcaactatgcgsccgtggagagcgaagaatttttggcttttcctgcgtatctgctgggtataaaccaagaccggttaaaagagaagctgacgagccggcagatggacagtaagtggggaggaaagtcagagtccatccatgtgaccctcaatgtggagcaggcctgctacaccagggatgccctcgccaaggccctgcacgcgcgagtctttgatttcttggtggattccatcaataaagctatggagaaggaccacgaggagtacaacattggtgtcctggacatctatggctttgaaatatttcagaaaaatggcttcgagcagttctgcatcaatttcgttaatgaaaaattacagcagatttttatcgagctgacgctaaaggccgagcaggaagaatacgttcaggagggsatargatggrcacccattgaatatttcaatartaaaattgtgtgtgacctcatagagagcaaagtcaaccctcctggaattatgagcatcctggatgacgtgtgtgccaccatgcatgctgtgggtgagggtgctgaccagacactgctacagaagctccagatgcagatcgggagccatgagcactttaacagctggaaccaaggtttcattattcaccactatgctgggaaggtttcctatgacatggatggcttctgtgaaaggaaccgggatgtgctattcatggacctgattgagctcatgcagagcagtgagctgccttttataaagtctttatttcctgaaaacctgcaagccgacaagaaagggcgcccaacgactgcaggaagcaaaataaagaaacaagccaatgacctcgtgagcaccctgatgaaatgtacaccccactacattcgctgcataaaaccgaacgaaaccaagaagcccaaagactgggaggagagcagagtgaagcatcaagtggagtacctgggtctcaaggaaaacatccgagtgagaagggctggttatgcttatcggcgtgtcttccagaaatttctacagaggtatgccattytgaccaaagctacctskcmtrwrtgkarmggagmwgwgaaamaarrwrwmmwmmatctgctacagtctgtcaacatggacagcgaccagttccagctcgggaggagtaaagtgttcatcaaagccccggagtctctatttcttctggaagagatgagagagagaaagtatgatgggtacgcacgcgtgatacagaaaacatggaggaagtttgtggcccgcaagaagtatgtccagatgagagaagacgcctcagacctgttgttgaacaagaaggagaggaggagaaacagcatcaaccgaaacttcatcggggactacatcgggatggaggagcacccggagctccagcagtttgtgggcaagagggagaagattgactttgctgacatagtcaccaagtatgacaggaggttcaagggtgtcaagcgagacctgctgctaaccccaaagtgcttgtacttaattggaagggagaaggtgaagcaaggcccggacaaaggtcttgtgaaggaagtcctgaagcggaagatcgaggtggaaaggatcctgtccgtgtccctcagtaccatgcaggatgacatcttcattctccatgagcaagagtatgacagtttgcttgagtccgtctttaaaacagagttcctgagccttttaacaaagcgatatgaggaaaaaacccagaagcaactacctctgaaattcagcaatacccttgaactgaagttgaaaaaggagaactggggtccctggagtgctgggggctcccggcaagtgcagttctaccaaggcttcggtgacctggccatcctcaagcccagcaacaaagtgctgcaggtcagcattggacctgggctgcccaagaacgcccgtcccaccagaagaaacactgtctcaagcagagggtattctggtggaactaacaacaattacccgatgagagccgcccctgctcccccaggatgccatcgaaatggcctcaccagaaaccagtttgtgcatcctccccgtgcctctggaaaccagaggtccaatcagaaaagcctatacacctctatggcccgcccacccttgccaaggcaacagtccacaggctcagaccgattgtctcagacaccggagagcctggatttcctcaaggtcccggaccagggtgctgctggagtccgaagacaaacgaccagccggcctcccccagcaggcggcagaccaaagcctcagcccaagcctaagcctcaggtgccgcagtgcaaggctctgtatgcctacgatgctcaggacacagacgaactcagcttcaatgccaatgacgtcatcgatattattaaggaagatccttctggctggtggacgggtagactacgaggcaagcagggcctgtttcctaacaactatgtcaccaagatctgaggcgcccagaaattgtcatgcaggcagaggagctccagacgtggactggggaggggactttttggggactccccttctgatccacaatgagcaactgctactccaaggtctgaagctattctggtaccttccccatggaagacgcagaaaagcttgggatgggaacaaggagtttcactccgtaaatgatcctaaaaggtagtctagttcccaggagcgccaaaacaaccacccactaagatttatttattgtatttaaatctggtgaaagcagcaggggctgctgggtgtctatcccgcagcctccagcgcactcaccaagcccaggggacagcaggtggtgactatgacaagtgcctttagywsragrgcacgtttcattcattcctctcttccatacctgatacattcctttctgctaaccctccttcagggaggacccaccctctgcrggctggacttggtgtgaacaggcactcaccwgtcaatgccaagggcaggccgtccttccaagcccatgggagccagggccaytaagactgctggtggggaggaagttgggtgmtgggctgactgatggtcttgctttcccttggtctttgcttgtaatgtggctggcccatgttggttttatgtttaatgttgtgcttataagaagaaagatcyccccccccacccargytgtacatttataaaaaagtgaccatatactgtatayakaaaagtytagaagcacgtatgaatgccgcaggtagtattccactgtacccattcgtgaaggtaggttttattacaggatttgcaccaggtacttacagacgccccctctcctctttgcctagagagacagtcactgcattcctgcacagcccctcagaccccctgaccctctccatgtaggtaaatctcctgtcacccctctgccgwcctcccctacctcctcaataaatgtaacggagtcarwrmaawrwmwwmwwmwwwmaaaaaaa

SEQ ID NO: 3351 - DNA, 1151 bp, Rattus norvegicus
  misc_feature (10)..(10): n is a, c, g, or t
gtcgtgcgtncctcttgtcccacgcaagtccagcttgtaccatgccggtcaaaggaggtagcaagtgcatcaaatacctgctctttggatttaacttcatcttctggctcgccggcatcgcagtgcttgccattggactatggctgcggttcgactctcagaccaagagcatcttcgagcaagaaactaatcattccagcttctacacaggagtgtacattctgattggagctggggccctcatgatgctagttggtttcctgggctgctgtggagctgtacaagagtcacagtgcatgctgggattgttcttcggattcctcttggtgatattcgccattgagatcgccgcagccgtctggggctatacccacaagsacgaggtgawtaaagarstccaggagttttacaaggacacctaccaaaagttaaggaacaaggatgagccccarcgggaaacactcaaagccmtccayrwgkcgttgaactgctgtgscatagctggtggkgtggagcagtttatctcggacatctgccccaaaaagcaggttctggaatccttccaggttaagtcctgcccggatgccatcgatgaggtcttccacagcaagttccacatyattggagcagkgggcatcggtatcgccgtggtgwtratcttcggtatgattttcagcatgattctgtgytgcgccatccgcaggagccgaraaatgkyytagagtctgacccaaccccgagcaggaacagtggctytgaggacagtcgggccatttgttttttttgccamtaatattagtattcattacgcmwttytaaacaacagttattctgtgtttgtctttttaatgctttattcattattgacatttgtagtagaggratccgggggttcggktyawtttgrttttttttttttggtkgttwatttttgcytgktatgttaagcaaaaaatcctgcaatgaaaggtactgtatttgccagactctwgacataagatgytsyacataaagagaatttttttgccyttaaatagataaaagtatctatcagataaaatcaggttgtaagttatattgaagacaatttgayacataataaaagmtkataacawwrwvwarwwwaaaaaaaaaaaaaaaaaaaaaaaaaa

SEQ ID NO: 3352 - DNA, 3012 bp, Rattus norvegicus
gtcgacccacgcgtccggcgtctccagactgtacacacgccagccgtgacccttcggatctgagagaactctgcaggcagcaaagtcctgtccttaccatggcgcctggagagaagatcaaagccaaaatcaaaaagaatctgccggttcgaggcccccaggcaccaaccattaaggacctgatgcattggtactgcatgaacaccaacacccacggstgccgccgcatcgtggtgtcccgaggccgccttcggcsyctgctgtggatcgcgttcacgctaactgcagtggccctcattatctggcagtgcgccctcctcgtcttctctttctacaccgtctctgtctccatcaaagtccacttccagaaactggatttccctgccgtcactatctgcaatatcaacccttacaagtacagtgctgtgagtgaccttctgactgacttggacagtgagacaaaacaggccttgctgtccttgtatggggtcaaagaatctcggaaacgccgggaagcaggatccatgccgtccaccttggaaggcacaccacccagattcttcaaactgatcccactgctggtcttcaatgagaatgagaagggaaaggccagggacttcttcactggccggaagcggaaaatcagcgggaaaatcattcacaaagcttctaatgtcatgcacgttcatgagtcgaagaaactggtgggatttcaattgtgctcaaatgatacctctgactgcgccacctacaccttcagctcaggaatcaatgccatccaggagtggtacaagcttcactacatgaatatcatggcacaggtgcctctagagaagaaaatcaacatgagctattctgccgaagaactgctggtgacctgcttcttcgatgggatgtcctgtgatgccaggaacttcacgcttttccaccatccaatgtatgggaactgctacacatttaacaacaaagaaaatgccaccatcctcagcacctccatgggaggcagtgagtacgggctgcaagtcatcttatacataaacgaagatgaatacaaccccttcctggtgtcctccactggagccaaggtgcttatccatcagcagaatgaataccccttcatygaagacgtggggatggagatcgagacagcaatgtccacttccataggaatgcacctgacagaatccttcaagctgagcgaaccttacagccagtgcacagaggayggcagtgatgtgcccgtcacaaacatctacaacgctgcctactccctccagatctgcctttattcatgcttccaaacaaagatggtggaaaaatgtggctgygcccagtacagccagcctctgcctccagcagccaattactgcaactaccagcaacaccccaactggatgtattgctactaccagttgtaccaggcctttgtccgggaagaactgggctgccaatcagtgtgcaagcaatcctgtagctttaaggaatggacactgaccaccagcttggcacaatggccgtctgaggcttccgagaaatggttgctgaatgttctcacctgggaccaaagccagcaaataaacaaaaagctcaacaagactgacctggccaagctcttgatattctacaaagacctgaaccaaagatccatcatggagagcccagccaacagtattgagatgctcctgtccaactttggtggacagctcggcctgtggatgagctgytcagtcgtctgtgtcattgaaatcattgaagtcttcttcattgacttcttctctatcatcgcccgccgtcagtggcacaaagccaaggattgktgggcccgtaggcagacaccgccctccactgagactccctccagccggcaaggccaggataatccagctctggatacggacgatgacctgcccacttttacctctgctatgcgcctgcctccagccccggggtccacggtgcctggcacaccacctcccagatacaataccttgcgcttggatagagccttttcatcccagctcacagacactcagttgaccaatgagttgtaagacaggattgggaaacaatcatggtttgaggaggctctcttcctgacacagatggccctcctatccttgctctgtctttcaatacatgactaacagcctgctgtgaaccggatagggcatgagaatccacagaagaacctgatgggacctgccccaacactcataacttccagaataagctatatgctacaacctggacttggcacttatgagctaaagagctagcagtaatggcctgggccaacagtgggctcttcacaggatcctgagagagaatcatgcttcagagccccaaactcaggagtttacccacgctaaccctgacttagcctgtggctcaagcacatgatcttgggtagcaaggccagccagctattgcctgacatgtgtgatagaagaaattagcaccatccttggatcctaacagttggttgctgacctcaaccattgacattgggacaaggtgttctctgtggcctcagacagacagttggcccagagcctggggatcatgtttggagagggcacagtagagagaagccaaggggtgtggtaggatgtccccactctgagagcagggtggggcagtagagaagagccagttaaagggcatagctggacactcctgccaaatggtattcccacaatctcagctcaagtggtatactttgagttgtaccaagcacttacataagttactctagggcataacaaacaccagcctataggcccaatcctttattttgtctttgaactgagagtatgcgtatgcgtgagagtgtgtgtatgaatgtgtgtatatgtctgtatgtgtttataatttttatatagctaatatatacatttatcaaaaagataatattttgtgacttgtgaaaattatatgagattcaaatgttactgtttataaataaagttttgtggataggcaaaaaaaaaaaaaaaaaaaaagggcggccgc

SEQ ID NO: 3353 - DNA, 1630 bp, Rattus norvegicus
gtagcttggctgtgtcgggcctgaaccgagcagctgcgcgacgtcatggacacctccgggaagcaggctgaggctatggcgctgctggctgaagcggagcgcaaggtgaagaactcgcagtccttcttctccggcctctttggaggttcatccaaaatagaggaagcatgcgagatctatgccagagctgcgaacatgttcaagatggccaagaactggagcgctgctgggaacgctttctgccaggctgcccaactgcacctacagctccagagcaagcacgatgcagccacctgctttgtggacgccggcaacgctttcaagaaagctgacccccaagaggccattaactgtctgatgagagcaattgagatctatacagacatgggcagattcacaatcgcagccaagcaccacatctccattgctgagatctatgagacagaactggtggatgtagagaaggccattgcccactacgagcaatctgcagactactacaaaggagaagagtccaacagctcagccaacaagtgtctgctgaaggtggctggctacgycgcacagctggagcagtaccagaaggctatcgacatctatgagcaggtggggaccagcgccatggacagtcccctcctcaagtacagcgccaaagactacttcttcaaggcggccctttgccacttctgcatcgacatgctgaacgccaagcttgctgttcagaagtatgaggagctgttccctgccttctcggattcccgggaatgcaagctgatgaaaaagctgctggaagcccatgaggaacagaatgtggacagctacacagagtcggtgaaggaatatgactccatctccagactggaccagtggcttaccaccatgcttctacgaatcaagaagaccattcagggtgatgaggaagacctgcgctaggcctccagccactgccttccacccatctgtctgtcacagaggtggagccaacacctccaccaggagtctgaaggagtgggtgcaatgtrgscctcatcctccagggcaccaggcaagctctcctggatggctggtcaccmtatgcccamtgygtccttcaccmcsccatktatttaagctcccaaaggtgtcctcstgctctggaaaacccamytsgrcagakkcyccaatacagacttctctgtgtgcttmaggaammwrrarwmarmatymarwmmmawhwmvtkammarmarwrwamtaaggstattyccatatctchtaccktgtmccstdgcagagataagaacacaggtagttygtgagacttgctctccctgrctgggggtarcctctgcccstggagctttcccttgytcytacartgccaacctytcaggttagacccagccctggagctcacrgggtkccktgrccctsccctgccctgcacstgsttctctcsmtgcatmcaggtctgtctgtcgacwtgaagmtgcggctggcccaagaaagacaaaaacctsccacytktgvdwrarwmaaaaaaaaammaaaaaamcaattgcggccgcaagcttattccctttagtgagggttaattttagcttggcactggccgtcgttttacaacgtcgtgactgggaaaaccctggcgt

SEQ ID NO: 3354 - DNA, 5868 bp, Rattus norvegicus
  misc_feature (5416)..(5416): n is a, c, g, or t
  misc_feature (5439)..(5439): n is a, c, g, or t
  misc_feature (5858)..(5858): n is a, c, g, or t
atgttcagctttgtggacctccggctcctgctcctcttaggggccactgccctcctgacgcatggccaagaagacatccctgaagtcagctgcatacacaatggcctaagggtccctaatggtgagacgtggaaacctgatgtatgcttgatctgtatctgccacaatggcacggctgtgtgcgatggcgtgctatgcaaagaagacttggactgtcccaacccccaaaaacgggagggcgagtgctgtcctttctgcccagaagaatatgtatcaccagacgcagaagtcataggagtcgagggacccaagggagaccctggcccccaaggcccaaggggacctgttggcccccctggacaagatggcatccctggacagcctggacttcctggtcctcctggtccccccggcccccccggaccccttggtcttggaggaaactttgcttcccagatgtcctatggctatgatgagaaatcagctggagtttccgtgcctggccccatgggtccttctggtcctcgtggtctccctggcccccctggtgcacctggtcctcaaggtttccaaggcccccctggtgaacctggcgagcctggcggttcaggtccaatgggtcccccaggtccccctggccctcctggcaagaacggagatgatggggaagctggtaagcctggccgccctggtgagcgtggacctcctggacctcagggtgctcgtggattgcctggaacagctggcctccccggaatgaagggacacagaggtttcagtggtttggatggtgccaaaggagatactggtcctgctggtcctaagggagagcctggcagtcctggtgaaaatggaactcccggccagatgggtccccgaggtctgcctggtgagagaggtcgccctggaccccctggcactgctggtgctcgtggtaacgatggtgctgtcggtgcagctgggccccccggtcccaccggccctactggccctcctggcttccctggtgcagctggtgctaagggtgaagctggtccccagggagcccgaggctctgaaggtccccagggtgtgcgtggtgagcccggaccccctggccctgctggtgctgctggtcctgctggaaaccctggtgctgatggacaacctggtgctaaaggtgccaatggtgctcctggtattgctggtgctcctggcttccctggtgcccgaggcccctctggacctcagggccccagcggcgctcctggtcccaagggaaccagtggtgaacctggtgcccctggcaacaaaggagacactggtgccaaaggagaacccggccctgctggagttcaaggtccccctggccctgctggagaagaaggaaaacgaggagcccgtggtgagcctggacctagcggcctgcccggacctcctggcgagcgcggtggacctggtagccgtggtttccctggtgctgatggtgttgctggccccaagggtccttctggtgaacgtggttctcctggccctgctggtcccaaaggttctcctggtgaagctggtcgccctggtgaagctggtctccctggtgccaagggtctcactggcagtcctggcagccctggtcctgatggcaaaaccggcccccctggtcccgctggtcaagatggtcgccctggacccgcaggtcctcctggagcccgtggacaggctggtgtgatgggattccctggacctaagggtactgctggagaacctggaaaggctggagarcgaggtgtccccggamcccctggmgctgttggtcccgctggcaaagatggcgaagctggagctcaaggagcccccggccctgctggtcctgctggtgagagaggtgaacaaggtcccgctggctcccctggattccagggtcttcctggtcccgctggtcctcctggtgaagcaggcaagcctggtgaacagggtgttcctggagaccttggtgcccctggaccctctggcgcaagargcgagagaggtttccctggtgaacgtggtgtacaaggtcccccmggtcctgctggwccccgaggaaacaatggtgccccsggcaacgatggtgccaagggtgatactggtgcccccggagcycywggtagccagggtgcccccggtcttcagsgrayrcswggtgaacgtggtgcagctggtcttccaggtcctaagggtgacagaggtgatgctggtcccaaaggtgctgatggttctcctggcaaagatggsgtmcgkggtmtgactggtcccattggtcctmctggccctgctggtgcmcctggtgacaagggtgmarctggtcccagtggtcctgctggccccaccggagcccgtggtgcccccggagaccgtggtgagvctggtccccctggtcctgctggmttcgctggyccccctggtgytgatggccaacctggtgcgaaaggtgaacctggtgatactggtgtgaaaggtgacgytggtccwcctggmcctgctggtcccgctggaccccctggccccattggtamcgttggtgctcctggacccaaaggttctcgtggtgctgctggtccccctggtgctactggtttccctggtgctgctggtcgtgttggtccccctggtccctctggaaatgctggaccccctggccctcccggtcccgttggcaaagaagggggcaaaggtccccgtggtgagactggtcccgctggacgtcctggtgaagttggtcccccaggtccccctggccctgctggtgagaaaggatctcctggtgctgatggacctgctggctctcctggtacccctggacctcagggtattgctggacagcgtggtgtggtcggtcttcccggtcagagaggaraaagaggcttccctggtcttcctggaccctctggtgaacccggcaaacaaggtccttctggagcaagtggtgaacgtggtccccctggccctatgggvccccctggattggytsgsmcmccwggkgawycwrrkmrtkmggsatmscctggtgctgaaggctcccctggaagagatggtgctcctggtgccaagggtgaccgtggtgagactggccctgctggcccccctggwsmtcctggtgctcctggtgctcccggccctgttggtcctgctggcaagaatggcgaccgkrrygasamwggtcctgctggtcctgctggtcccattggycctgctggtgcccgtggtcctgctggmccccaaggcccccgtggtgacaagggtgagacaggcgaacaaggtgacagaggcataaarggtcatcgtggcttctctggtctccagggtcctcctggctctcctggmtctcctggtgaacaaggcccctctggagcttctggtcytgcaggtccmcggggtccccctggytctgctggttctcctggmaaagatggmctcaacggtmtccctggccccattggtccccctggtcctcgasgtcgcactggsgawastggtcctgytggtccccccgramctcctggaccccctggscytcccggtcctyccagcggtggttatgacttmagcttcctgcctcagcyacctcaagrkamrwstcaagatggtggycgttactaccgggccgatgatgccaacgtggtccgtgaccgtgrscwygaggtggacactaccctcaagagcctgagccagcagattgagaacatcsgcagmsctgagggcagccgcaagaaccccgcccgcacatgccgtgacctcaagatgtgccactctgactggaagagcggmgagtactggatcgaccctaaccaaggytgyaacctggatgcmatcaaggbctactgcaacatggagacaggtcagacctgtgtgttccccactcagycctctgtgcctcagaagrrcwsgwrcatcagcccaaaccccaaggagarraagymtgtctggtttggagagagcatgaccgatggattcmagttcgagtwtggmrgygaaggttccgatcctgccgatgtygstatccagytgaccttyctgsgsytgrtgtccaccgaggsctcccagaacatcacctatcactgsaagaacagygtagsctacatggaccaacagactggyaamctcaagaagtccctgctcctccagggctccaacgagatcgagctcaggggcgaaggyaacagtcgattcacctacagcacgcttgtggatggctgcacgagtcacaccggaacttggggcaagacagtcatcgaatacaaaaccaccaagacctcccgcctgcccatcatcgawgtggctcccttggacattggtgccccagaccaggaattcggaatggacattggccctgcctgcttcgtgtaaactccctccatcccaatctggttccctcccacccagcccactttcccccaaccctggaaacagaccaacaacccaaactcaatttccccaaaagccaaaaattgggagacaatttcacatggactttggaaaacatttttttcctttgcattcatctctcaaacttagtttttatctttgaccaactgaacgtgaccaaaaaccaaaagtgcattcaaccttaccaaaaagaaaaaaaaataagaataaataaataactttttaaaaaaggaagcttggtcctcttgcttgaagacctatgtgggtataagtccctttctgcccactgggcttatgataccccaaatgctgccttttctgttcctttctccaccccctcttggggcctctcctccattgctccccaaatttaagtctcccccaaagacacaggaaataatgcattgtctgcccagccagcaaaggcaatgctgaatcgtcccaccagcccctcaacccccagcttacttccctacccagcaccttcaaatcctgccgggacattgggttctcggactattgaaggagcctaaccatctggcatctccatggcctctgcaacaaatccccacacacactttgtttttgagggcctgtgctgggggagccacctgcccctcgcaggggtttggagccaggcagggtcacagcagactggaaacatcggccacacatgtgcaggctgggtgggagagactgttctgttccttgtgtaattgtgttgctgaaagactrcctcgttcktgtctttgtgtgtcaccggggcaactgkgtgggggcggggatgggggcarggtggcadcgcgcccagtttggyatcaaaggtgstacatctctgtgaaggggtgggktgggaargaatttctggyrckakrgaatctgagatgctcccytrsmccascaaatgttcctttkgydsvavgdvdddkkktmttcyttttttttttttaatggaymgrsrskwskgtkwwttttyttttmctgasggtgctaytwmmcamgggwggagagmgtnccammyccagmytgctytctctnwacccccctsttyactmttccagctcytgggccdryvygwkgatmtstctctvttvtgaaaccctcccctcktgctgvtgctccmtaccctcagmttctctctctcyctgtcytgcmtcagggtttcagagcmccattthccaaagcacaaagcagtttwtatccctggggtgggaggargcaagagactctgtacctattttgtatgtgtataataatttgagatgtttttarttattttgattgctggmrtaaascakgkggaaatgahmmrdyvmamaraaaaaaaaaamvwwhrmrkymrmaarmwtwttsmcwykmgksmgggttaattttagcttggcactggccgtcgttttacaacgtcgtgactgggaaaaccctggcgttacccaacttaatcgccttgcagcacatcnccctttcgcc

SEQ ID NO: 3355 - DNA, 1414 bp, Rattus norvegicus
  misc_feature (1187)..(1187): n is a, c, g, or t
  misc_feature (1190)..(1190): n is a, c, g, or t
  misc_feature (1196)..(1196): n is a, c, g, or t
  misc_feature (1208)..(1208): n is a, c, g, or t
acccasaghrvasragccsmrycagwcrcmatcaggaacmtcgagaagctgctccagctatgtgtgaagaggaagacagcacagctctggtgtgtgacaatggctccgggctctgtaaggcgggctttgctggtgatgatgctcccagggctgttttcccatccatcgtgggacgtcccagacaccagggagtgatggttggaatggsccaaaaggacagctatgtggggsacgaagcgcaragcaagagagggatcctgaccctgaagtatccgatagaacacggcatcatcaccaactgggacgacatggaaaagatctggcaccactccttctataacgagcttygcgtggccccagaggagcatccgaccttgctaacggaggcgccgctgaaccctaaggccaaccgggagaaaatgmcccagattatgtttgagaccttcaatgtccctgccatgtatgtggctattcaggctgtgctgtccctctatgcttctggacgtacaactggtattgtgctggactctggaratggcgtgactcacaacgtgcctatctatgagggctatgctctgcctcatgccatcatgcgtctggacttggctggccgagatctcaccgactacctcatgaagatcctgactgagcgtggctattccttcgtgactactgctgagcgtgagatcgtccgtgacatcaaggagaagctgtgctatgtcgctctggactttgaaaatgagatggccactgctgcttcctcttcttccctggagaagagctacsaactgcctgaygsrcaggwgmtcacsakcskgvatgamcrcwtymgckgcccrragamyctckkccagcsakctttcattggwatggmgtcggcggscatccacgaaaccacctataacagcatcatgamgtgtratmttgacatcaggaaggaccksyaygmkracaacgtcctctcggggggcactaccatgtacccaggcattgctgacaggmtgcagaaggmsmtcacagccbtcgmtcccagcaccatgaagatcaagattatkgywcskccagaacgcaaatattctgtytggatcggcggctccatcstggsttctvtatbtacyttccrgcaratgtgraksmgcamacrgghgywwghcgaakmtkgscyswccakkstscrcykcamwkknttntrrgbnrsgmmvcyaccnkccgcyccgccsccacccccgcccsgccsccgbyhtgtytbyagcacacamctgtgaatgttttgtggatcagcgcsttyagttstttwccaaatcattcctacmtaawrmwwwrawwwrwwamtmgtgtgtttttttttaataaatcagacatgtgytmmmmwwhwwrmmmwrrmmwrhmammmhdraaaaaaaaaaaaaaaaaa

SEQ ID NO: 3356 - DNA, 150 bp, Rattus norvegicus
atcaacaggtggtggtggctcacacctttaatcccagcacccagaggcggaggcggaggtctctgaatttgaggcctaacctgtctacatagtgacttcctggacaaccaaggctatacagagaaaccgtgcctcaatcgaaaacaaaaa

SEQ ID NO: 3357 - DNA, 654 bp, Rattus norvegicus
ccgctgccgccatgaaccccgaatatgactacctgtttaagctgcttttgattggtgactcgggcgtgggcaagtcatgcctgcttctgcggtttgctgatgacacgtacacagagagctacatcagcaccattggggtggacttcaagattcgaaccattgaactggatggcaaaaccatcaaactacagatttgggacacagctggtcaggaacggttcaggacagtcacttccagctactatcggggtgctcatggcatcattgtggtgtatgacgtcactgaccaggaatcctacgctaatgtgaaacagtggctgcaggaaatagatcgctacgccagtgagaatgtcaataaactgctggtaggcaacaagagtgacctcaccaccaagaaggtcgtggacaataccacagccaaggaatttgcagactctctgggtgtccccttcctggagacaagtgccaagaatgccaccaatgttgaacaggcattcatgacaatggctgcagagatcaaaaaacggatggggccaggagcagcatctgggggtgaacggcccaacctgaagatcgacagcactcctgtgaaatctgctagtggtggctgctgctaggggggggtacttggggagggcacttctccagatgatg

SEQ ID NO: 3358 - DNA, 1305 bp, Rattus norvegicus
ggaatggacaagatcctgacagcatcrtttttactcctaggccttcacctgkctkrggtgagtggccrgmakkmgagrmgwgrycagcarcaggtsaaacaaagtcccmwatctctkacagtctrkgaaggaggamccacagttctgarctgcagttatgagracagyrctttyrrstacttcccatggtatcrgcagttccctggggaaggccctgtactcctgatrrccatahrwtcagkrtccartaaaaagraagayggmmgattcacartcttcytcaggaaaartgagaaacrkctctcyttgcacatygaagactctcagcytggagactcagccacctacttctgtgyagcaagvsrrtwwsraywaygasmhhmykacttytggvkmwggmaccaractvrydrtbaarccmaatgtcacagacccagagcctgctgtgtaccagctgaaagatccccagtctgataacatcaccctctgcctgttcaccgactttgattctcaaacsaatgtgtcccagagcgcaagttccgaagcgtttgtctctggcaatactgtgatggacatgaaggctatggattccaagagcaacggggccattgcctggagtaaccaaacaagcttcagctgcaaagacgccttcaagaagaacgcctcccaccccacttcagatgtgccctgtgatgccaagttggtcgagaaaagctttgaaacagatatgaacctaaactttcaaaacctgtcagtcatgggactccgaatcctcctgctgaaagtggccggatttaacctgctcatgacgctaaggctgtggtccagttgagattgaaagagcgtgactccaaagctccttcctcctcctcatcctccgctccctcttcaagccaaaaggagccctcccacctgtaaagaaggctgtctgaggactgactggatctccccgatctgtgaagaaggttgctggagagctaagctcagctgtacccactcagcccccttgctgctgctgaccattcacagagacgcaggggctgggctctcctggatctgaagacctcctctcccatgatagatttcccagcagaatctcttagagaatgttgtaaagaatatgttttttgtgtggttttttttttttgtatttttaaagcatccataaagaagtacatattactctttcatcaaggtgtagaaattatctcattgtctagacgctccccgctactgtgtgtattgagccacattgtatattattctgctgccgatgacgtcattaaaggtgattcagaaaaaaaa

SEQ ID NO: 3359 - DNA, 841 bp, Rattus norvegicus
  misc_feature (590)..(590): n is a, c, g, or t
tttcggctctgtggcttttctgtttacgatccgtacacsakscgaggagctaggcaggcgggacgccctcggggtcggtgctgtakctggggttartggtgagggacgaggagaggtgcatacmrrgckgkwgstccrctcgyrbtkkykkhhwkhhythsmwcdadbyrrsddvvkbgckghmgmggvamkcaggatggkcmmgmgkttgacataccgtcgtaggmtttcctacaatacagcctctaacaaaamtaggctgtctcgaacycctggcaacaggwtcgtttacctttacaccaagaaggtcgggaaagcacctaaatccgcatgtggcgtgtksccakgcagactgcgasgggtccgtgctgtgagacccaaaktcctcatgagmttgtccargacaaakaagcacgtcagcagggcctatggtggmtcmatgtgcvccaagtgtgtccgggmcaggwtcaagcgggctttccttatcgakgagcasaaawtcgttrtgaaagtktygaaggcmcaagcacagrgtcagaaagcaaaatwaatgggcagcttttttaagtmataaaaatcaagctytbwmnhhmrhrmmmwvrmmrmahmwmamamaaaaamwmrarsrsrkgcccggtcrcmarttcgccctatagtgagatcgatccaattccactgggcgccgattaaaacgtccgcgacggaaaacctggcgtacccactaacccctgcagacatacccttcgcagcgggtacaggagaggcgccgacgcctccacagaggcgcgaagggaaggcaccgacgcaaatagcaagccacaataggacgacctttacaaag

SEQ ID NO: 3360 - DNA, 2273 bp, Rattus norvegicus
cggcagcgacccgtcctaagtcgacakacgtcctctttaggtattkcaacaggatctgaagtacgcccgaggatctcagaaaccatgcccaagccagacagcgaagcagggactgccttcattcagacccagcagctccatgcagccatggctgacaccttcctggaacacatgtgccgcctggacattgactccgcacccatcacggcccgcaacactgggatcatctgtaccattggccctgcttcccgatctgtggagatgctgaaggagatgattaagtctgggatgaatgtggctcggctgaatttctctcatggaacccatgagtaccatgcagagactatcaagaatgtccgtgcagccacakaaagctttgcatctgatcccattctctaccgacctgttkcggtggstctggatacaaagggacctgagatccggactggactcatcaagggcagcggcaccgcagaggtggagctgaagaagggagccacactgaagatcaccctggacaacgcctacatggagaagtgcgatgagaacatcctgtggctggactataagaacatctgcaaggtggtggaggtgggcagcaagatctacgtggacgatgggctcatctccctgcaggtgaaggagaaaggtgctgactacctggtgacagaagtggaaaatggtggctccttgggcagcaagaagggcgtgaacctgcctggtgctgctgtggacctccctgctgtgtcagaaaaggacatccaggacctgaagtttggggtggagcaggacgtggacatggtgtttgcgtctttcatccgcaaggcggctgacgtgcatgaggttaggaaggtcctgggagagaagggcaagaacatcaagatcatcagcaaaatcgagaaccatgaaggtgtccgcaggtttgatgagattttggaggccagcgatggaatcatggtagctcgtggtgacctgggcattgagattccggcagagaaggtcttcctagctcagaagatgatgattggacgatgcaaccgagctgggaagccagtcatctgcgccacccagatgctggagagcatgatcaagaagccacgccccacccgtgctgaaggcagtgacgtggccaatgcagtcctagatggagctgactgcatcatgctgtccggagaaacagccaaaggggactaccctctggaggctgttcgcatgcagcacctgatagctcgagaggctgaggcagccgtgttccaccgcctgctgtttgaagagcttgcgcgagcctccagtcaatccacagaccccctggaggccatggccatgggcagcgtggaggcctcttataaatgtttagcagcagctttgatagttctracggagtccggcaggagtgctcaccaagtggcccggtaccgcccaagggctcctatcattgctgtgacacgcaatccccagacagcccgccaggcccatctgtaccgtggcatcttccctgtgctgtgtaaggatgccgtactggatgcctgggctgaggacgttgatcttcgtgtgaacttggccatgaatgttggcaaggcccgaggcttyttcaagaagggagatgtggtcattgtgctgactggatggcgccctggctctggcttcaccaacaccatgcgtgtagtgcctgtaccatgatgatcctctggagcttctcttctagcccctgtcccttcccctcccctatcctatccattaggccagcaacgcttgtagtgctcactctgggccatagtgtggcgctggtgggctgggacaccaggaaaaattaatgcctctgaaacatgcaatagagcccagctatttttcatggccctacttgagccaggggtgaaggaggaatgcaggattggaaaccctctgactttatcacagaagggcagcattatctctgtgttctttgctcctgtagaaagttttccagagarttcccagccctggcctggaatcaggagacmgcaagamcagaggctgggggcccagggttcccatgtagatgacttttggccctgtccctgacttgctttcccaacagctttggsctctctcctcgtgcactccactgctgtccctgcagatgttccactctccacctcgtactctgcagcgkctccaggcctgktgctatagtgcccacctgawtgtcaataaacagcrscggarscaaaaaaawraaatttattcaaaaaaaaactcgagggggggcccggtacccaattcgcccgatagtg

SEQ ID NO: 3361 - DNA, 2441 bp, Rattus norvegicus
gcgcccggccgccgcccgcagccgcaccgctgkycgrgtkcctgccyagcycwratgcyatccagcccagagcaasrtstgaggcycrggkayccmkswgsargrgcaacgtcacacctcytgaggacagccaggaggactctggcttttgctgagctgtgcatcttacctccttccttccaaaggcttcagacccaagctccactctcctcaagtcgtgctgctgtgcccctggctaagcatctcactgtccctcaagccccatccagtcctagagcacacctcgaggacctgccctcctgctcagaatgactcaccattatttccagctcaagtgagaagatgtgacggggactgagctgcctatttgtgtatctgtggcatcagatctgctcttcaaggaagagaacctcaggctcctgcctggccagccaaaggaggctgtgactccaactcacagaaggctctgggtctttcctacaggagcgcagactaatgcttctgtgtttcctggggcccagttaccagcaccctgagttccctgctgcaggcagctggaaggcataaaataaagcacactcctcagccccaattatgacagtggctaccggagacccagtggatgaggctgctgccctccctgggcaccctcaagacacctatgacccagaggcagaccacgagtgctgtgagagagtggtgattaacatctcaggcctgcggttcgagactcagctaaagaccttagcccagttcccagagaccctcttaggagaccccaagaaacggatgaggtactttgatcccctccgaaatgagtacttttttgatcgcaaccgccctagctttgatgccattttgtactactaccagtctgggggcaggttgaggcgacctgtgaatgtgcccttagatatcttctctgaagaaatccggttttatgagctaggagaagaggcaatggagatgtttcgggaggatgaaggctayatcaaggaagaagaacgtcccctkcctgaaaatgagtttcagagacaggtgtggcttctctttgaataccctgagagctcagggccggccaggatcatagccattgtatctgtgatggtcattctgatctcgatcgtcagcttctgtctggaaaccttgcccatcttccgggatgagaacgaggacatgcatggtggtggggtgaccttccacacctattccaacagcaccattgggtaccagcagtccacctccttcaccgaccctttcttcatcgtagagactctctgcatcatctggttctcctttgagtttctggttagattctttgcctgtcccagcaaagctggcttcttcaccaacatcatgaacatcattgacattgtggctatcatcccttactttatcaccctggggacagagttagctgagaagccagaggacgcccagcaaggccagcaggccatgtcactggccattctccgtgtcatccggttggtaagagtctttaggattttcaagttgtccagacactccaaaggtctgcagattctaggtcagaccctcaaagccagcatgagggaattgggcctcctgatattcttcctcttcattggggtcatcctcttctctagtgctgtctattttgcagaagctgatgagcgagattcccagttccccagcatcccggatgccttctggtgggcagtcgtctccatgacaactgtaggctatggagacatggttccaactaccattgggggaaagatagtgggttctctgtgtgcaattgcaggtgtgttaaccattgccttaccagtccctgtcatagtgtyyaatttcaactacttctaccaccgggagacagagggagaggagcaggcccagtacttgcaagtgacaagttgtccaaagatcccgtcctcccctgacctaaagaaaagtagaagtgcctctaccataagtaagtctgattacatggagatacaggagggagtaaacaacagtaatgaggactttagagaggagaacttaaaaacagccaactgtaccttggctaacacaaactatgtgaatattaccaaaatgttaactgatgtctgattgaaacctattaatgtactcacagctcaacaggactaatgcagatattgcataatagcctgcattgtagtcagtgttctacagtgtgcatctggttctgcatggaaagcaatagtcgtgcaagtgacttttgatcttttgatttttgatttagaacacagaatatttatcatggctttcatgaaatctttatcaccgacttacaggtttccaaagatgagagtcacccatggagccagcatctcagaaaggcacaatgcagccccctcatagcccccacaccatatcaacaccacctatcttcccacttaaacacctgggaggtgcattctcccccaccccacgcg

SEQ ID NO: 3362 - DNA, 1087 bp, Rattus norvegicus
  misc_feature (304)..(304): n is a, c, g, or t
  misc_feature (307)..(307): n is a, c, g, or t
caggccagtctgggggtgaggaaaagggggtatttctctcacggctctgaggttcaggcaggcacttaaaagatatttctgacctacagctcacaacaactaccaggcccagtccgctgtccccctgcggcacgagacccacggtggggaagatgtggcggtctttgccaagggccctatggctcacctgcttcacggcgtccatgagcagaactacatcccccacgtcatggcgtatgcctcctgcattggagccaaccttgaccactgtgcctgggccagctctgcgagcagcccctccccnggngccctgctgcttccactggctctgttccccctacgcaccctgttctgagggcccaggtcccacaagagcccacaatggacagccggctcccctccctttgtggcctgccacctggccgcccacactcaacggggaggcccaggcaacctcgagcaggaacagaagtttgctacctgcctcacttccgcccggaaccctccgtgggtcggattcctggctctgccgttgtttctctattcactgccttttggccagcagggtgggtttctctcttgggccggcaggacacagactgcgcagattcccaaagcaccttatttttctaccaaatatactctccagaccctgcaaccatcatggaacattccagatctgaccttctctcccctaccccttctctctggaacactgggtcccatrgtcacagccagtccctcaacccaaccctccctggagggaagaccaggtctgctcagggtgagactcccaggaagccacytccggggttggctgtctacccaggktggccaggytgggaagaacaacccagccggacaggacgcacacactccccacccagctccagagactcgccaacccttcactgaagcgactcccctgtttggawtagcaaaaaaaaaaaagaaagaaaaaaaagaaaaaaattttaatttctctttttggtgttggttaaaagggaacacaagacatttaaataaaatgttccaaatwwwwmwrarrmmararmwragtctttgtggtcagtgggaaagagaccaa

SEQ ID NO: 3363 - DNA, 475 bp, Rattus norvegicus
tctcacgtcactgactgtagagagctattgatgggtctcagcccccaccttgctgtcaccctgttctgctttctcatatgtaccgggaacggtatccacggatgtaacgacagccctctgagagagatcatcaacactttgaaccaggtcacagaaaaagggactccatgcaccgagatgtttgtaccagacgtccttacggcaacaaggaacaccacggagaacgagctcatctgcagggcttccagggtgcttcgcaaattttacttcccacgtgatgtacctccgtgcttgaagaacaagtctggggttctcggtgaactgaggaaactctgtagaggtgtcagcggtctgaactcactgagaagctgcaccgtgaatgagtccacgctcacaacactgaaagacttcctggaaagcctaaaaagcatcctacgagggaaatacttgcagtcctgcacttccatgtcctaac

SEQ ID NO: 3364 - DNA, 9914 bp, Rattus norvegicus
ggagcctagggcctgsaasaggsaaagagtgaksgaggaattggggayctmgtagttatagacaytagaaawagactcagsagagcayrggagccagcagaccttgaactagcagayattgaaaactrtgawtcaagcaaaaccttcttcgctcastggatcctctcaaatcattcagtttgattccattgatcaacatgcctgtcttcatgccaacgccatggaggtttattactattgytttgtyrcgwagcttkaawtcagggatrttagtmcytcaagtccttttatkgyayaagatttttatacctgtactgggtgggrgttatttccatatgaagttgggaattgctctttcaagkcctgtaaagagttgtgttggaattttaaagagattggtttgaatatktagataggcattggtaaggtgaacatttaacttcggttaatcctaccaatscaagwgcawaggagatcttrccatattctgatatctacctcaatttcattcttcagagactkgaasttcttgtcctgcaggacatttcctggctaggttraagttaayccaagatattwyayattattttkgctattgtgaaggatgttgtttctgtaatttctttctttgcccatttaatatttrtataaaggagggctatttgtttgrwttttytstttgtgttttagttggtttttagtrttcattttgaaatratttakmcaatggaggaaaaatgtaagsttacagacmtgctgggacacaagtaaggcagamtttgtacactctacttttgytttkgacttctcccactttccwcattgactttgagccactcaataaataaaagrtgtgytcargagwwcagtacgcttctactaatccatgttctgagaaatcatccmgtctgcccatmtgtaatctgaacacaaagcacaggttrtccraggcaryatttcctaagaggagggaggagccyttggtgkrgataaatagscatcsctgtgcacwrgrgakmamaacacaccagggcaccctgaacatcaggagtcggcaaacacagaggctagtagctggctggtatcacctctgcaggtaatgcccagaattcctgcctccaggtacagaaggaaccttcccaggcctgtgtggtactggctgtggactgcaacatatgtttgtgggagtggggaaatggctttggctgagatactgggttagaaacacgggacattgctatggttcatgaaatctcctcttttgtttctcttgcctstggatgatgcagatactgtggtctatgctcatggagagtaatggagcctgctcctctgactctactggggagttttgagagcttgctagmttgcctactgctgtcrtagcaagggtgacacaggactgttgccgaatcatgctgggggaggtggccattgtaccatgctcacatcacaaaggagattactgtgggtatggaccccacttcccggcctagatcccaaatgccatggccacactcaggggtttcgccctcaacaaaggaaggaaagaaggttcagttactgagtcagggtctcctgctgtacaatcccagcagtctctttactctggaaataattttggcagaatttattgtttagtgccctccgaagaaatgggtgcatcagtctgaaacaaaagcacaagatgaaggcagccaagttgttgttgagatccctggcttcactgcaggcatgtcacagcaatggggacaggtggcttagcaccagcacaccctcctgggctctctccagttccctgtttgcccttcaagtcttctctgcccccaccctgtcttccctttgttccctcctaaattagtctccctcctcatatctccctgttcctctttttcccaattctctctaactcttccttttacaaactttcctctatcctctcctctcctgtcccctcctttctgtctactctcccctcttttctctcctctgtcttctctctttcccccttcttcccttcctccccttgcctctgcccactgtcttctctcttacctcctctctcctctcctaactctcctcttacttctcctctccaaaatcccccttcctctctcctatctctccttcttcctctgcctcacctrcatttactatgtgtcttcactttacacttccaaacaaatggtcagagatcaaaggtagataaccatgattactatagtctgtcaggatgagtgtggccacaactccaggggaatatgaagggaaatgaagcccctcgaatggttgtagatactccctacaaccaattcccaatgcccacaataagccagccacataccagtaatgtaacctggacccctcaccaggcagcacagagaggtctgacaatttacttgctgtgacacagtcatcatgacagccaatataaaatctggtcgaggtgcgagagtctggactcctgcttcttmmmaccagcaggacttccgagcctgaggtacaaagcaccatggggttccctggcagggcagagagaaccttcctttgtgtgtccttccactacaggttctcaaaggtccaggatttccacactacatcagatatctctcctgcttcctctcgactaaccctcccccatccctaacttcaagcaccaaaggaactcaggggacttaagatttctcagatttgaaattgaagggctaagatagggcctgtgataaaaactgctccaaggatcctgagttttgcctaaggaggtggcagctacaggtggctcaagtccaaagtgcagacaaggctcatgcccattcgctattctgccttgctctatgaccctaacatatcccgtcaaatcactgaagcttggttttgtactgtgaaaatgggctagtgcaaaagcatgtcatctgtggtagtagggatcatatgatgtagtgatggcatgagtcaccagagcacttcctgtgggcagtcacaraagcatgaagtggagtagagcagggcacaataccagccaggtgggaggactagaagacggttgaagcaccaggcgttcctcccagtctcaacaaatgtgtcttctattttttcagccaggaggacagagaagatggccttcattgcagctttggggctcttgatggcagggatctgccctgctgtcctctgtgatggcatactgggaagggacactctaccccatgaagaccaaggcaaggggagacaactgcacagtctcacattggcttccatcaacactgacytcacattgagcctctacaagaagctggctttgaggaatccagataaaaatgttgtcttctcccctcttagcatctcagctgccttggccattttgtctctgggagcaaaagacagcaccatggaagagattctagaagtactcaagttcaatctcacagagatcactgaggaagaaatccaccagggctttgggcacctcctacagaggctcagccagccagaggaccaggcagagatcaatacaggtagtgccctgtttattgacaaagagcagccgatactgtcagaattccaggagaagacaagggctctgtaccaggctgaggccttcgtagctgacttcaagcagtgcaatgaggccaaaaagttcatcaatgactatgtgagcaatcagacccaggggaagatcgcagaactgttctcagaactggatgagaggacatccatggtgctggtgaactatctcctctttaaaggtgakagtcatcactgcctggggagtggagggagaggatcttssstgggtgcctgtgctatacaatgatcactggaaaggaggtgctcaaagcmttggagacatgggtgcctaacttcttgttactcacgastctcctcttctgaggtgtttctggacaatggtttgtgtctcctggtacatgctcaacagaagccctgagctctcagtctacaggagctgattgttcaatatgacttaagcttacttacaagcagaatgtcataccttacatgttcagtcctacctgttgktcagaagccatggctcactccstgcggagtcccattacaggcatttctagtatgttcctgtagtagaagtccataagtgctggagagtctctgactctaggagagtccakgtgagcttgggactatttgatcataaggagcctggaaagwgtaacatggaaggtagcatatcccacaactaatgaagaacctcgtgggcagttactctgcagtacttcacccctgagccttttctgtaatgaacttgtcccgggcatggagaggcagggactgggtaagaggtcactagagatgtagtggtgtgggccaggcagtgttctgtgcttagtgttagattgttttgtgtaattttgcttttgtaaaataaccacccacttagcatgaaaagtcaggattcccaagacacattcctgagccagactctgatgagatttaggtgcaagatagatggaaactcagctggaaatgttgtaggtaatggtactggggggaaatccagagatcccccatgaacaacatcctgcttaatagagaccagggagcaaggtgaccaccctgaaatttgtgcctgacagaaggcataatgtgaccagacgtggggtgaagagaaaacatgattaaagttagtccaggttagagtagggcsatcctggggttagagaaagaaaatcaaggtgacaatggagagaaatgtaggataggaggacaagaggacagaagacagagaacaagagcacagaggtcwwgatgtcccccgacctgatgtgggcaggggatggtataagcagagtgacagcctgaaatgtaagatttcaggacatgtctctctcaactstcctcaggacactgggtaaatactgcttggtgtgagttgggatgtatgtttaggctgtgagattccaggaccaagaaatgttccactstagtcccacaatgtacactgggtgtagtrrcataaactagaaatctggataaacctgagcaggtatttgtgatttgtggagactgccatggcccataaggacttcttacccatgattcaggcacagactataggattatgaactggtcccgatatgggggatggaagtctctgctcttctctttcccctaaaacctatcctaaaagcmattgtctcctagamatggttctcctgaggaagacaggaccctcaakkctccacaggcttcaccatcttcactgtctctctcttactcactccaccccacatccctgactgtgtctttagtccaggcagccaggctaaggttttcaggatccgctgtctaaaccattcctggagacaattctcatagctagcascctgatcamctacwwgctttatccggttctgcacatgtcacaataaaggacacgtctgagtgactgaagatgaatggatggamgccacagctcaaaagctgagcctagatggggaggaggtggaatatttgtcctgtggctacaacwwgatcatttgcstcattttaggcaaatggaaggtaccatttaaccccaatgacacatttgagtctgagttctacttggatgagaagaggtctgtgaaggtgcccatgatgaaaattaaggatctcaccacaccctacatccgggatgaggagctgtcctgctctgtgctggaactgaagtacacaggaaatgccagcgccctgtttatcctccctgaccagggcaagatgcagcaggtggaatccagcttgcaaccagagaccctgaagaagtggaaggactctctgaggcccaggtgcatgtcctgaggacccagagctgtcattgatccctgtcctgctgttgcctgatggccagtgassstgtgccycattgtcacagcagtgtcctatgtaatggtggagakkccccaggggacaggtrgacttgagttgaatttcccttctgctgactatgtgttttgggccctgagttgctgtcgattttgttattcacaggatcwgatcaggctagaataaggatctcagagtccctccctctagcaggctctaagttacagggaatstagaatgagttggaaggccaagggaattgtgattgataggagatgaactctgagaatcagctctgccctgcggatccactttactctctcwacacgcatcattccctatacatgcaatacgacttgaagacctactatgtgctgtctgttatagactctgaaagtgtatcagagaccttaagcacaaatgtactcttcggcctcctcttggaattgaggaagaaagaatgtaggcatgaaaattaaattaatcatcatttagtaggttaaaacatgagaaagggtgacrttaagaaggggagtgtccaaggattaggaaatctagagtctgatgcagtgtgcactttaaaatagaagatgttttagggttgctgcacctggggaggattccatttgtgaatctaggaggaaatcattcctagtaaaggaacagctgggaccaagtcaggttacctgtctactgttcacactctccagtcactgatgaataattaatgtatcagaaacagcaaagatacgtggcctacacatgggtggaaagaagacttcactccaggaacacagtttgtctatggagagaagcctcagggacaaggtggatttgatggggacatggagtacagggacgcttacattgctattttttattctcaggattataagtgagcttcgcatgcccaagttctccatctccacagactacaacctggaggaggtccttccagasctgggmattaggaaaatcttctcccagcaagctgatctgagtaggatcacagggaccaagaacctgcatgtctctcaggtaagacaagaaacacagggtgcctcacattgggtcctcaatgtggatgttgaaggtcatacgggcatgtggggatggttcatgtgtgagaacaccgacatttctgatgttccctaacaaatgtccatcctctactccctgtacctaagctcacctaggagaccattgtgggggaagagactgtagttgctttatagaaccattgataccaacctgtgctatactgcagggctgcacacagtactctgcagggttacccaaatgcactgcagatctacccacaatacactccaggaccacccacaatacagtgcaaggccacccacaataaactacagatctgcacacaatatactacagggccatctacaatacaccgcaggttccacccacaatatacttcaggccaaatcattccaagcctcagcttcgtttaatgcagtgctgggatasatagtacttcttgaccatcatacaaaatattaacagtaaaagtaataacctgaatctatggatacttctgatgaaaacccaagaataggagagagatgccttagacgctcataccacatccctagctgcacarsctgtcwgtgtccagtgttctgtccagggcccacccagatccctgggctcagatctkkcccagcaggacatggcagtctgggaatgtacagtcatgccctctssattgctgctgtatgtcccaaggagactggagcassagggatgctgaatcctgcactggctgccagcaccgtggctgttctctctgaaatcgttgggaatctgcctgtgaggaaactcctgctgctgcctactgcctttcttcagtttgtagtgggtttgagtgcagcacagattcagacactgagcagaccacagcatgctcatctcataccctgagcagtgacttggaaatccatggttssagctcaaagaaggaagaaagagactcagcagcagaagaggccggcactcactgcttgctccagaccccgctmmtgccctctctgatgtcyactgagtgatgtgtttctctcccacaggtggtccacaaagctgtgctggatgtggatgagacaggcacagmakgwksygstsycacarmagysamrgcagccckrrwwagyttacygyrmactatacctcttctgaatttcaaccggccattcatgctggttatcactgacaataatggtcagtctgtcttctttatgggcaaagtcactaaccccatgtgagtctgaagctccccaaaatctgacaattctgcccaggatcctggaacagagcctggatgctgatctctgtatatgccctgacatacatgctctgattggctattgcaaagttggcttagaccagtgacatcaactatctctatggctcccatgtgcaytggascctttggattgtcagtgtcaggcayttaggaccyttgggagcatytacacatgtttctgaacttggaatctttctttattcttcttccytggtgactcctctttctgtgttcataccccaaaccaagccattgataagtcccagtaaaggttctgagaacatctgttttcagtctccasastcttgatgaaactaggctagcctctgggccaaccacatgagactcaggcmcaggactgagaggggaaactgctgcaatgaatgtcattcaagcatctgagaacctggtatcatgctcttaagttatgctttcccctctaaaggcaatgccacacagtgccccttgcagtttcccctgacactgcccacatctggcacagtgttggagctctaactcctgcagcagcaaggggcctgtgggtcagaccagatcctctctccctagcactcctcctactcagggccaagtggtaacctctctaagtttgcagctgaccaacctcagagaaaagatgaacaccacaaaccaaaatgaaaagataggaccaaagggtcaataagcatacacctgcacagaaagctgcccaggcagtgttcacttagctcctgttggaagaggttgcctctagtgaaaacatagtagtagtgatagtcattctctgactcctgtgatggccactctgacttacatgctaattaacattcccttwatgaatgaaaaaactgaaggcacagggaaacttagtttattyccatgactatatattatggcytgtggcatgcattyccaagkktccyaatgctggrggaatagttgtgaccttgttcttcaggcattattgtggtgggcaggtggagaaggaatcaggactctgatacttcccagagaagaaccaaatagtccatagatccagtgacatctctgctgaggtgaatgcaaggggtgtgagacggtgctcagataaccacagagaatgttttgggcagggcaaaaaataatgaagccatttctgaggatctgagaggaagtggatttctgggacaatggagtagagcaggagaggtaggaatggccacagcggcaaagagcctgactccttagtgattctggaataatttggagacactgggagtgttggaggaattagacagtttctcacttggtaaaggtactctatgaggttacagtaccgagaactgagttgtgagaggtgaggagtgttactaagggcattcaggttggggcacctgctgttcatggagaaacttcggggcctggaatcacagccagtgatctacatgaacagggacagctacacattcagtcgagacttgcttgaatattaaggctcccgagaacacccattgagcagtggccatgaggtcatcagagaattgaagccctgtgggccacactcaggaccccagtccccagtattctgtgagcactgaagtaccctgccctgatggccatgatatgagagaagaagactcatctattgaaacaatcaaatgtcccagcagacttcccaatgtgtctgttaggcatcatcctgagactgggacaccatttccattcaatgagcactgactagttccagctctatccctccatccatcctggatcc

SEQ ID NO: 3365 - DNA, 1065 bp, Rattus norvegicus
atgtcggaggagcagttcggaggggacggggcggcggcggcggcaacggcggcggtaggcggctcggcgggcgagcaggagggagccatggtggcggcggcgcagggggcagcggcggcggcgggaagcgggagcggcggcggctctgcggccggaggcaccgaaggaggcagcaccgaggcagagggagcgaagatcgacgccagtaagaatgaggaggatgaaggccattcaaactcctccccacgacacactgaagcagcgacggcacagcgggaagaatggaaaatgtttataggaggccttagctgggacaccacaaagaaagacctgaaggactacttttccaaatttggggacgttgtagactgcactctgaagttagatcctatcacagggcgatcaaggggttttggctttgtgctatttaaagagtcggagagtgtagataaggtcatggatcagaaagamcataaattgaatgggaaagtcattgatcctaaaagggccaaagccatgaaaacaaaagagcccgtcaaaaaaatttttgttggtggcctttytccagacacacctgargaaaaawtaagrgrgtactttggtggttttggtgaggttgaatccatagagctgcctatggacaacaagaccaataagaggcgtgggttctgtttcattacctttaaggaagaggaaccagtgaagaagataatggagaagaaataccacaatgttggtcttagtaaatgtgaaataaaagtagccatgtcgaaggagcagtatcagcagcagcagcagtggggatctagaggagggtttgcaggaagagctcgcggaagaggcggtgatcagcagagtggttatgggaaagtatccagacgaggtggtcatcaaaatagctacaaaccatactaaattattccacttgcaacttatccccaacaggtggtgaagcagtattttccaatttgaagattcatttgaagtggctcctgccacctgctaatagcagttcaaactaaattttttctatcaagttcccgaatggaagtatgacgttgggtg

SEQ ID NO: 3366 - DNA, 875 bp, Rattus norvegicus
ctcacaattgggtaaaagccgcgctgtcctctycwcwgsaccgactctgtyytgcggraccatgsssrgsccgctgcgctcytkgatgctactgctggscrwcswgscckwggcctgdsccggaacythcaggccacccccgcgattgttgggagctccgcaggaggcagatgccagcgaggagggcgtgcagcgagcgttggacttcgccgtwagcgagtacawcwagggcwgcwwcgatgcgtaccacwgvcgcgccatwcwggtggtgwgwgctcgtwagcagcttgtggctgkaatawactattatttggatgtggagatgggccgwwctwcatgtwccawgtcccagacaaatttgactawctgtsctttycacgaccagscccatctgatgwggawggcactctgctycttycagatctwcwgcgtgccctgkwwwggcwcwcwcwccctgwcwwwatccwgctgcaaaaatgcctwwgagctgwgtctyatwrgaccatgccaatggkycyttacttgttcccctamcytgwwgkgkktwatccctgagawgggtkstycagstytkrakggcatytycggggwgttccmacmaggagacwrwwaagwrgctgctgcaggcabgwtytgcmcgtyagawcagytgtyccctggttctcttctcyttgcmgwacytgtcataccttgctytdgstmaawtaamamawwwawmaaawgaraamaammawmawmmwammwhvmwcwttctatacaacacaaaaaaacttcgaggcggcgccggtccccattgcgcctatagtgagcggatacaatcactggccgccgtttacacgtcggactgggaaaccctggcgtaccaaacttatcgt

SEQ ID NO: 3367 - DNA, 3180 bp, Rattus norvegicus
  misc_feature (281)..(281): n is a, c, g, or t
agtgtgcatctctctctctctctctccagcatccaggcttgctgcagcccctagctgggtaaggggtgtgatgtgagagtggggtgggagggggcacagggcggggcctgccacgtcacttggagagtgtgttaaggaggaagggcagagctgagagctgagcctgctgctgctgttgctgctgctgctgttgctgctgcttgctgttgctgctgctgctggggctgctgcgggtgcgggcaaggattgatgcggtggggaggtgggtctctcgctccggncccgggcaggcccagggcggttccgaggcctgtagaacagctcctgggaagaaggtggcggctgcaatcgcgaccttggccagacctagttcgtggtggacgtagggcggaggcggaggccgagcccgggcaggagtctttggcgagccagagggaggcgcatctggcgcttcggtaccagcggcagccttgtgagtcttgtgaggctggagaagygcagcaggacctggtgagagctagcaagtctggagggcggacctgtgggtcccgagcccagttttaggcaccaccgagagctaagccaagcgtcttttcgggcagccagtttcacgcgcgcgacagtttgcgggttccaggcatctcagaaatcttgagcacggaggcgcggctactgagagccagagccacatcccagacctagcctggcagagagaccagctgcagggttcaccgacctaaccgccaggtcagagcacgggccccaccctaaaggagggcgcagccggagctgggaagccggtgccgcgctccggagctcgtgtcgtgggcgccgtcctagtggcggggagcgcaccgccgaggtgacatgagatcggagaaatccctgacgctggcggcgccgggggaggtccgtgggccggagggggagcaacaggatgcgggtgagttccaggaggccgagggcggcggcggctgctgtagtagtgagaggctggtgatcaacatctctgggctgcgctacgagacgcagctgcgcaccttgtcgctgttccctgacacgctgctaggagaccctggccgcagagtccgcttctttgaccccttgaggaatgagtacttctttgaccgcaaccgacccagcttcgacgctatcctttattactaccagtcggggggtcgcctgcgcaggccggttaacgtgccccttgacatctttatggaagagattcgcttctatcagttgggagatgaagccctggcggccttccgggaggatgagggttgcctgcccgaaggtggtgaggatgagaagccactcccctcccagcctttccagcgacaggtctggctcctctttgagtatccggagagttctgggcccgcccgaggcattgccatcgtctcagtgttggtcatcctcatctccattgtcatcttttgcctggagaccttgcctcagttccgtgcagatgggcgcggtggaagcaacgaggggagtgggacccgcatgtccccggcctccagggggagccacgaggaggaagatgaagacgaggattcctatgcatttcctggtagcattccctctggggggttggggaccggaggaacttcttcatttagtactctcgggggttccttcttcacagaccccttcttcctggtggaaactctgtgtatcgtctggttcacctttgagctcctggtgcgmttctctgcctgtcccagcaaggcggcyttctttcgcaatatcatgaacatcattgacttggtggccatcttcccctactttatcaccctgggcaccgagctagtgcaacgtcacgagcagcagcctgtgagtggtggcagtggtcagaatrggcagcaggccatgtccctagccatcctcagggtgatccgcctggtccgggtgtttcggatcttcaagctctcccgccactccaaggggttgcagatcctgggtaagaccttgcaagcatccatgcgggagctcgggctactcatcttcttcctcttcattggagtcatcctcttctccagcgctgtctacttcgcagaggcagatgacgttgactcgctcttccctagcatcccagatgccttttggtgggctgtggttacaatgaccacagtaggttatggggacatgtaccccatgacggtgggaggcaagattgtgggctcactgtgtgccattgctggggtcctcaccattgcattaccggtaccggtcattgtctccaatttcaactacttctaccaccgagagacggagcaggaggaacaaggccagtatacccacgtcacttgtgggcagcctacaccggacctgaaggcaacggacaatgggcttggcaaacctgactttgcggaggcttcacgggaacggcggtccagctaccttccaactccacatcgagcttatgcagagaaaaggatgctcaccgaggtttgatggatgcgggcaggcctgcaggaaaacaggagctctgagcaagtcatctctcaggcttccttctcatgctcactactccgccttagctccagaggacctcgaacccccgccccgccccctcccgtacacagtacaggcatcctggaccaaatatctggactatagactgttgctcgctcctcgcagcattcgaggtttctccatcttagtgacatttttggaaatttcaacggtgccacccaatcatgcccatcagtcacgtgaatgagatgcacatttctttgactgaccttccctcaagactgagttctcatgcctgggtcttgtaatatctctaggaatggtgacaccaatagaataggaagcagctacactcaggtcccttctttagagtcctttgctttgggtcatgcgccttccttagcttctggtcacgtggtcactggcagactctggactatggaagatttcagcttgccgttttggtgctctctccagcttctggctggtagagctattagctgcccggctttgaaagttatccacagctaaatttggatggaattagagaaaatactacccaactggattatttgaaggacacgagggtcagttctagatcaatgggggccagtggacctctcagttgtgatctgtcacaggagaccacagcaggggggtctacagtagacctcaccacccagattccctgactccctt

SEQ ID NO: 3368 - DNA, 2383 bp, Rattus norvegicus
cacgaggcgcggccgtccgctctcccaactcgcagccagtcggcgcgtcccgcctactgagcgcagcctccaccaggatccgcggggaccagctcgggatcagccggcgacccacttctgaccaacccaggagcggcccgatacccactcccgaccaacccgcgaccgacccagggacccactccggacctgctccttacaggggacagcgcctcgccgcttcccgccgcccagcgcccgcacgctcctcgggacacagtgccaaccatccagaggacaagatggattggggcacactacagagcatcctcgggggtgtcaacaagcactccaccagcattgggaaaatctggctcactgtcctcttcatcttccgcatcatgatcctcgtggtggccgcgaaggaggtgtggggagatgagcaagccgattttgtttgcaacactctccagcctggctgtaagaatgtgtgctacgaccactacttccccatctctcacatccggctctgggctctgcagctgatcatggtgtccacgccggccctcctggtagctatgcacgtggcctaccggagacacgaaaagaaacggaagttcatgaagggagagataaagaacgagtttaaggacatcgaagagatcaaaacccagaaggtccgtatcgaagggtccctgtggtggacctacaccaccagcatcttcttccgggtcatcttcgaagctgtcttcatgtatgtcttttacatcatgtacaatggcttcttcatgcagcgtctggtgaagtgtaacgcctggccttgtcccaatacagtggactgcttcatttccaggcccacagaaaagactgtcttcacggtgttcatgatctctgtgtctggaatttgcatcctgctaaacatcacagagctgtgctatctgttcattaggtattgctcagggaagtccaaaagaccagtctaatgcattgcctggctgttaagcaaagatgagggagaggatgaggcaacctgtgcttagttatcagagttcagctaccagcatctcccgggcaaacattcccaccttaaatgccgccatttgaagtcccccgcaggcctcccatgaaactccagaagcctccatgggcctcccttcccccaaagctcccaaacaaaggcccaattctatgcctgtattaatgggttctaaagttagttagaccccgtgctggtgtgactatgctttaggatacattcacagtttaaacaaagggatctcacattgtttctcttcctctgaggacaggagacatgagcccagtcctgaggaaggtacagagaaagttccttcttccgggtccccttccccaagttgcccccagttaagggtaaagaatcttcgttctgttattttctttcatarwwwaarwwwrmaamaatggacaaaagctatttaatgttcaagctagctgtgtccttttttttttttttaaatgaaaaccttaaaatgataggttcttttgttcttaaaatgatctggaaagcattatacattcctcctatttcagaggttcggtttgtgatgtgagcatggtgtataaccagatctcacaaggtctttaaaacgttggccttttggttatgrgaaacctgggctgtggctgagagcccacctactgtattcatccttaggtgtgctgagtacagcccgcaacaacgttacagcctgtctcaaatgagacaaactggaagcttctcgtgttagcttctgacaagaagaggccttgattaaaattttcaaccgtaattttgtgtaagaggcagataggttatgcctacaactgccccctgccatgagcctaamtcagcccccctccacccccagbthgtytactctgtagctgtgggatgtggcagtcagtatcaaaagacttcatgagtttgcttgggaatttcactgccatggtacaatttaatggtgcagaaacaagwtggggtggttttcaaagaaccgatgaaacttytagactytaaatcctgttgattaaaactgagtttttytactttgaatgtctgtttgcctcccttttcagcattgccttytaaactggaaacagaaatgttgatatttggaaaaaatagaagaaactagtttaggtcaatgtgtaacttttytaggacaagttgaaccttagcattgtcattytgcctgatgtgttgtccacaagatgacagtcaacaaatccaacaggggacacttyttcctkccaagaatgtcgttgggaagccattctgtaacaataaataagagttgtggtttmaarwmwamamwawwwwacctaatgaagaacttattgctgatgttcagaaattcgacattgaaaggtgttttgccaatacggg

SEQ ID NO: 3369 - DNA, 930 bp, Rattus norvegicus
tttttttttttttykgcmcsagswckaskscgagaatgaagaccattctcagcaatcasactgtcgacattccagaaawtgtbkacwtcactctgaaggrgcgcacagtcattgtgaagggccccagaggaactytgaggagggacttcaatcacwtcaatgtmgagckgaskmkkyttggmaagaaawakaaaaggctccgtgttgacaastggtgggkwwacaggaaggaactggccactgtcagaaccatytgcagtcatgttcagaacatgatcaagkgtgtgacamtgggcttccgttacaaratgaggtytgtgtatgctcamttccctatmaacgtcghtattcaggrgaatkggtctctggttgaaatccgaaatttcttgggtgaaaaatacatccggarggttcggatgargacaggtgwtgcttgttctgyctctcaagcccagaaggwtgagttaatcyttgaaggaaatgatattgaacttgttycaaattcagcggmtytgattcagcaagccmcaacagttaaaaacaaggrtwtcaggaagttttkggrtggcatytwtgtttytgrgaagggaaccgtccagcagcctgaygaatgagacctcagtttcctagcttcagaaacargatcctgwywacaagtacagytwgggctywktggaaacaataaragacttwtwtdtkkamamamamaamawamaaraaacacaagacaaacaacacaaagaacaccaaacagcacaaacactaaaagaacacacaaaacacaacaaaaaacaccagggggcagaacaaaaccacaaggaggcataaccaagaccgaatacagacagaaacagagacacaacccaaacaccaccaaagaacaaagacacccacaacgggaggacgcctctgaaaacaaccagaacccag

SEQ ID NO: 3370 - DNA, 1501 bp, Rattus norvegicus
cagccagggcctcacccttgccctgtgaggttatctgataggattttaccagttccctcagcgcacggggctagctgctcaccatctgaaagcacagccattcggccttggacatacatcccaagggacagacaacatggcagcctgtgtgaagaccaataaatcccatgtcatcttcaagaaggtctcccgggacaagtcggtgaccatctacctggggaagagagactatatagatcacgtcagccaagtagagcctgtagatggtgttgtattggtggatcctgagctcgtgaaggggaagaaagtgtatgtcaccctgacctgcgccttccgctatggccaagaggacattgatgtgattggcctgaccttccgcagggacctgtatttctctcgggtccaggtatatcctcctgttggggccatgagtgccccaacccagctccagttgagcctgckcaagaaactgggagataacacgtacccatttctgctcacgttccctgactacctaccctgctcagtgatgttgcagccagctccacaagatgtagggaagagctgtggggttgactttgaggttaaagcatttgccacagacatcasagatgctgaagaggacaagatccccaagaagagctctgtgcggttactgatccggaaggtgcagcatgccccacctgagatgggtccccagccctgtgctgaagcctcctggcagttcttcatgtctgacaagcccctgcacctctcagtctccctcagcaaagagatatatttycatggggagcccatccctgtgaccgtgactgtgaccaataacacggagaaggttgtgaagaagattaaagtgtcagtggaacaaatagccaatgtggttctctactcgagtgattattacgtcaagcctgtggcctcggaggaaacacaggaaaaagtgcagccaaacagcactttgaccaagacgctggtgctggtgcccctcctggctaacaacagagaaagaagaggcatcgcgctggatgggaagatmaagcatgaggacacaaacctggcctccagcaccattatcaaggagggcatcgatcggaccgtcatgggcatcctggtgtcataccatatcrrsrygargctcacggtgtcaggctttytaggagagctcacatccagtgaagtggmtactgasrygmsgwycmktctgatgcacccccagcytgaggacccagcaaaagaaagtgtccaggatgaaaatytggtttttgaagagtttgctcgacaaaatytgaargatactggrgrgaatacagaagggaagaaagwtgrggatgcaggccaggatgrgtgaagacttagccttgatssstagaaactgcttgtagtcctggttgccttgtgggaaacccytggtaacctttcagagttwtgctaaatacgaaagctcgrgcattyttcccagaaataaagtytgyksgtcctyccmaaaaaaaaaaaaaaaaaa

SEQ ID NO: 3371 - DNA, 2655 bp, Rattus norvegicus
gaggaggaaggcgctgctggcgagcctcagccggccgctcagggggctaaggaggtctggagggctcggcgcgactgagggccggaccactagaggtatcgggtggcgctgcggcagcagcaggtgcgggtggcggaggctgcggctccagtgccatcccttattccacctgcgctgtcagcatgcaccttgcagaaccagaagcagcttgctggctttgaacgtgtggcaaatatttcagaaagcttcaagatcaagttggaggaaaggacggtttttcttctaaattcatctgcttcaactattattcttactgggaatggacaatggaatgctctctagatttatcatgaccaaaacgctccttgtcttctgcatttccatgaccttatccagtcactttggcttttcacaaatgccaactagttctgtacaagatgagaccaatgacaacatcacaatattcaccaggatcttggacgggctcttggatggctatgacaacagactgcggcctgggctgggagagcgaatcacgcaggtgcgaacagacatctatgttaccagctttggcccagtgtccgacacggaaatggaatataccatagatgtatttttccgtcaaagctggaaagatgaaaggctgcggtttaaggggcctatgcaacgtctccctctcaacaaccttcttgccaggaaaatctggaccccagacacattcttccacaatgggaagaagtccattgcgcacaacatgacgacacccaacaagctgctgaggctggaggatgatggcacacttctctacaccatgcgcctgacgatctctgctgagtgtccaatgcagcttgaggactttccgatggatgcccatgcttgtcccctgaaatttggcagttatgcttaccctaattcggaagttgtctatgtttggaccaatggttccaccaagtctgtggtggtggcagaagatggctccagactcaaccagtaccacctcatggggcagacagtaggcactgagaacatcagcaccagcacaggtgaatatacaatcatgactgctcattttcacctgaagaggaagatcgggtactttgtcatccagacgtaccttccctgcatcatgacagtcatcttatcccaggtgtctttttggcttaatcgagaatctgtcccagctaggacagtttttggagtgaccacagtgctgaccatgacaaccctcagcatcagtgcccggaattcgctgcccaaagtggcctatgccacagccatggactggttcattgctgtctgctatgcatttgtcttctctgccctgattgaatttgccacagtcaactactttacaaagagaggatgggcctgggatggcaagaaggccttggaagcagctaaaatcaagaaaaaagaacgtgaactcatactaaataagtcaacaaatgcttttacaactgggaagttgacccatcctccaaacatcccaaaggagcagcttccaggcgggactgggaatgctgtgggtacagcctcaatcagagcatctgaggagaagacttctgagagtaaaaagacctacaacagcatcagcaagatcgacaaaatgtcccggattgtgttccccattttgtttggcactttcaatctagtttactgggcaacatatttgaatagggagcccgtgataaaaggggctacctctccaaagtaagacaggaaaccatacttgcacagaaatgaacctgaggagaggtcaagctcacagagactatttgggcgcctgtctttcaggaaattttgcatgtttaataatatgtacaaataatattgccttgatgtttctatgtgtaacttcaatgtttcaaggatgtcccttaataaaccaagcaaatggccttctacaacaacgggaggcaatgactgactctcagatgctcagcgtcctaacatcaatagtttacaaacaagataagtatatttttaactgttctggtatatgacgtttttatacttcgaatgccatttcgtaccatttttcccagccaacagaacattttagggaatccctgtgatgaccacttgacaggtgaaaaagcaaagatcctcgggtacacaaagtccatgaagagcaaactgtggacatttaagtccagtacgaattgcctttaacaattcttcttgttctgaaattagaaaaatactgcatgaactgacattaagaagtagataagcaaacwtttatgcagacaaatttaatgacaagcccatagtgtcttagattagtagatcaaataattccccaaggaaaagaaatcaactgattcaaaattaattttgttgttttttgtgaaaaatgaatttatttctcaccccgccccaacacctttacaaccttaataatgactaagaaagcaaaatcttaaaaccttaaagcaacaaggccttggtctttggtggtggtattctgtggccattgtttctgaccctgggtcctcttgctgctgcttcagcgctgagaaattgtaattgagttattttctgttttatttccctgtacatatttcatgrttggattatcgctctgttagcttttgtatatgaatcttaaatgttcattaaaaaaatgtaaaactgmaaaaaaaaaaaaaaaaa

SEQ ID NO: 3372 - DNA, 4671 bp, Rattus norvegicus
ctctgaccgagttcagcccccagtgtctttcctccacctcctcctgcagcggcagcatcggcagttggcagtgsgcaacttgrggctgtaaccagsgcaagcccccasggtcctgctcacccgacagggggctcakctccccaaaggggtgtgtgcarggcgggggcggccagctgggaccagctggtggccctagaaaacctcacccacacccacacaccccttttgtgttgcasgctgcccctctgagagcggaggcagcgagagtactcgcgtgcctcgcaccggtccgckgtgagagctgcggggaccaasactcgcaccacctcccggtcctcgctccakkramagaagacttgaaagtgcttgagcaaccaacatccgcagtcagatcggaagactctgccctggccatccccagagcgccaccagaacgtctcattaagattgaagaaagattccgagaagaacaaaaccccccaaatactccataataccctgcagaacatttcacttgaaccaaaaatggtgagtgccagtcatcctgaggccctggccgcccctgtcaccactgttgcgacccttgtcccacacaatgccactgagccagccagtcctggggaagggaaggaagatgccttttccaagctgaagcagaagtttatgaatgagctgcataaaattccattgccaccgtgggccttaatagccatagccatagttgcggtccttttagtcgtaacctgctgcttttgtgtctgtaagaaatgtttgttcaaaaagaaaaacaagaagaaggggaaggaaaagggaggaaagaacgccattaacatgaaagacgtgaaagacttagggaagaccatgaaggatcaggcccttaaggatgacgatgctgaaaccggactgactgatggagaagaaaaggaagagcccaaggaagaggagaaactgggaaagctccaatattcactggactatgacttccagaataaccagctgttggtgggaatcatccaggctgctgaactgcccgccctggacatggggggtacatccgatccatacgtcaaagtcttcctgctgcctgaaaaaaaraaraaawwtgagactaaagtccaccggaaaaccctcaatccagtcttcaatgaacaatttactttcaaggtaccctactcggaattaggtggcaaaaccctggtgatggctgtgtatgactttgatcgcttctccaagcacgacatcatcggagagttcaaagttcctatgaacaccgtggattttggccatgtgaccgaggagtggcgcgatctccagagcgctgagaaagaagagcaagagaaactgggtgacatctgcttctccctccgctacgtccctactgccggcaaactgactgttgtcattctggaagccaagaacctgaagaagatggatgtgggtggcttatctgatccctacgtgaagattcacctgatgcagaacggtaagaggctgaagaagaaaaagacgacgattaagaagaacacactcaacccctactacaacgagtccttcagctttgaagttccgttcgagcaaatccagaaagtgcaagtggtggtaactgttttggactatgacaagattggcaagaacgacgccatcgacaaagtcttcgttggttacaacagcactggggcggagytgcgacactggtcagacatsctggccaacccccggcgacccatcgcacagtggcacactctgcaggtagaggaggaggttgatgccatgctggctgtcaagaagtaaagggaaaacgaagcctttctgcatctgcccacatagtgctctttagccagtatctgtaaatacctcagtaatatgggtccttttggtttccagccatgcattcctgatacaatccagtggtacttcaaatcctgttttaatttgcacaaatttaagtgtagaaagcccttatgccctccatcataccactgccctccaaatctactcttcttttaagcaatatgatgtgtagatagagcatgactgaaattatgtattgtatcacactgttgtatataccagtatgctaaagatttatttctagtttgtgtatttgtatgttgtaagcgtttcctaacctgtgtatatctagatgtttttaataagatgtyctattttaaactatgtaaattgactgagatatagagctgataatatattatatggtaaatatagtatcgtstgcattccagcaaaaatatcaacttgaaaggcactagtacagttaaaccaacatcttaaaggacaacttaaacctgagctttctattgaatcctttgagtaccaagattcgctcacacaacacctttgatgggcgaacccaattttgtagaattctttcacaggcaaatagcatgacctgagcagcatctgggctgacctcaaggaagcaaagccacaaaccagaatagcatctgtctgtctgtacctgcaaagccaaagccatgcttcgctcttacagtcaaggaagcaatgaacaggagccaatgcgttcctaccactgcatctagcatagcttcatggtggtgttctctgtgtgtgcgtgtgcaagcgtgaaagtgtatgcacgtgtgtatgtgtggtgcatgcctttgtttggggttagggtgggggaggaggagctgagggaagtcagcgtttctgaaatattgcctgcctgtttaaacagaaaattatagctctccattgtcacatttatataaaacgtgcaacctgggaattctgatccggatttcaccccaatattgattccaaaaggtattcgcgtgagactttgtaacaaaatattttattatacaaaaccagattagaaggaatgcagaatatttttaacgcagcaatctgtgcttattccacaaagtgactttgtggtaaacagacagtattgtaaccccacgaaaagacggaatataacagttagccatagttctgaatgcacttcgacgaagccaaaacagacagctagtgatctttttatatgctctttttacgtgagttttaatttgtcctttaaacaaaggtgaaacaaaaccaagaacaagttctcgcaaactgaagcaacctcttatgtacactagatgcttgacttaggaggagtttttaaatgttctcaatgttattctgtagtaaatggcactattatgaagccactagtcattccatatgagtcttaaggacggctctgtgtaacactgtgactgccccgtgtgcttagacacgtagtttcctcagtggatagcactcaacttactccgtagtgatattgtaacaatactgccattccctcttactgcactgcccaacatgtgtgtagcacaaacagttctcattcctaaggaccaattcagaactgaacagctatgcataggacagaaagatacatagaccgggtgtgggagaacacacagcattttgtcaacactgtgcactagtcacatttgtcctgctgccggtagacagccacttcaggaagtgagcctgctacctaacaccgcttctagactcttctcccacttgctattgtggcccgttttcacctccaggtcacagagaatggcaacatcctgaagggagagaccatcttcacatctaccaaaataaaatggaggaatgctaagcatggcctcgtgcttgatctttaggaattagctccgtgttttggacaaaactcaagagaatccccaatagggctggtggtagactttaagcacggggtcggctgctcckcctgcacacacaacacaaaagctaacccctggttgtgattcttccctcatgagagaagaggcaaaccctttgcccttcactcccatcacagcaaactttcagacctagaacagacacacaggacaaggagcaaatccttccctatggatgaacagcacgtttccaacattaaaaccacagatgataggaaacacatactcataggtrakttaaacagcagtttaaacagragaytcaaatgaggggctttcctatytaagggatcaagtcctaccaaagagaaggaacaccttaaataccagacactgacatttaatttcatcatctcccgacttgagttgtacacaatggaacatttccgaggacgcagctccgagctgccgarstgacattacttcstgcattacaatgatactagcacattctcttgcaacactgscaacatgggattgtcaccatagagttagttggtactatatcattctcttgtgagccggtgactggacytgctttmtgaccaagatccatcctctgataagccacatgtwcctttctgacaatgcagtstgaagtsttagaagctgatgccctagaaagatcctagttgcctttgtgtatacttactgcctgcttgagtgtttctatgtgtggattttststgtgtctsgtagaaatgttggggtgttttcttctgccataaggcttgtgacccgcgagcyrattcccttagctgtactttcccttcattttttgataagtggtttaaattctgtttcactttgtgtagtgaaccccatggtagttttctsattgttgytmmmaaaaatgmcttaacatmtyacatggacactcaataaaaawgttttatttcctgttrawaaaaaaaaaaaaaaa

SEQ ID NO: 3373 - DNA, 1103 bp, Rattus norvegicus
  misc_feature (3)..(6): n is a, c, g, or t
agnnnncgcgacytktywktwytwywytwgysgtkasacarcaggagttasgsrcgaygmkttccactgycgcttaccgggwcccggaccgagagctsdyrakggggcctcagggmtccgccggccctgtgcagatgcgtttctcgccttatgccttcaacggaggtactgtattggyaattgctggagaagatttttccatcgttgcttcagacactcggttgagtgaagggktttcaattcayrcccgmkmtasmcycramtgytacmmmckmrcwgacarracagtaatygkctgcagdggctttcatggagawtgkctcaccttgacamagrttattgragcmmgattaaagrtgtacavgcatybcarkaacaaksccrkkmcaacmgkgscgattsytgsaatgctgwctaccatmctgtactcacggcgkttcttyccttactatgtctacaacatcattgrrggacttgatgaagamggamarggasccgtgtacagctttgacccagtaggytcttascagagagaytctytcaaagccssaggctcagcargtgccatgctgcagccgctgytsgacaaccargttggsttcaaaaatatgcagaatgwggagcatgtccccctgactctggacagagccatgaggctsstgaaagacgycttcatttytgcasscgaragggatgygtacaytgragacgccctmaggatytgcatygtgaccaaagrgggcatcagrgaggaraytgttcccyttcggaaagahtgatgtggggccarggtttggagctgtggsacgtttgttttattaaaaagwaatgtaaaggmmwmrwdwwmwwamammrtgtcttctctargcatgacagattgtgaagaatttctcccttgggggttggagagttaactcatcaattaagaaagwacggctcttgtgraggatctaagtttgattcccagcamtcacctgtaaccragttccaggggatacagtgtcctcttmtggcctcaacaggcacgtgcacatgcccacatacaagtatatgtataatgaaaaataaaaccattaataattwmwmamaaaaaaaaaaaaaaa

SEQ ID NO: 3374 - DNA, 2351 bp, Rattus norvegicus
gggggggggggctgccgatcgcaatggaagaagaaatcgccgccctcgtcattgacaatggctccggcatgtgcaaagctggctttgctggggacgacgcccccagggccgtgtttccttccatcgtcgggcgcccccgacaccagggtgtcatggtgggcatgggccagaaagactcgtacgtgggtgatgaggcccagagcaagaggggtattctgaccctgaagtaccctattgagcacggcattgtcaccaactgggacgacatggagaagatctggcaccacaccttctacaacgagctgcgtgtggcccctgaggagcacccggtgcttctgaccgaggcccccctgaaccccaaagctaacagagagaagatgacgcagataatgtttgaaaccttcaataccccagccatgtacgtggccattcaggcggtgctctccttgtatgcatctgggcgtaccactggcattgtcatggactctggtgacggggtcacacacacagtgcccatctatgagggctacgcccttccccacgccatcttgcgtctggacctggctggccgggacctgacagactacctcatgaagatcctgactgaaaggggctacagctttaccaccactgctgagagggaaattgttcgtgacataaaggagaagctgtgctatgttgccctggattttgagcaagaaatggctactgctgcatcatcttcctctttggagaagagttatgagctgcctgatgggcaggtgatcaccattggcaatgagcgcttccggtgtccagaggctctcttccagccttccttcctgggcatggagtcctgtggcatccacgagaccaccttyawmtccatyatgawgtgtgaygtggwcatmcgyaaagaymtgtrtgccarcacagtgctgtstgrkggkaccmccatgtatccakgcattgstgacaggatgcaraaggmgatcamagscctgkctyccagcacaatgaagattaagatcattgctyctcctgaacgcwmgtrctcagtytggattggcggctmcatmctggcctcactgkscaccttscagcagatgtggatcagcaagcargrgtwtgacgrgtcargcccctycattgtbcaccgcaaatgcttytagatggrctgagcaggtgccaggcatytgmtgcatgagctgawtytgaagtatcgatytgccctggcaaakgtacacacctcatgctagsctyatgaaackkraatwwgcctttgaaarraaawwwrwmmwwraagctkgtatytgatatcagsactggwtcgkagaactkgdkgctgatttttgaccykgtattcwagdtaactgbtccctygstatatgtttaataccctgtgcatatctkvatwwagtmcytakdtcatgkggctcssdcacwtkgbggytggsgarakcygbkgwaragtshkhmagtccmcascytrktggatctytktrmscaccatgymgtgatctgtgmrsggtwttamccammagyarryttyyrrkatttccyragrctggcaagggttcctgaacwartkamcactycttttyttgycagwctaacagggtgkgaaagtccgagccttmggmvssrgkkkchghwvwggwtthttccctcctgaccwccatsggttgwtasttrscttgagttgggaacgtktgcatcgacacctgtaaatgtattcatycttktaattyatgtaaggttttkgtactcaattctttaagaaatgacaaatttkkgttttmtactgttcartgagaacattargccccagsaacacgtcattgtgtmaagagaaataaaagtgstgcagtaawvawaaaaaaawahmmmmmmmmmmmmmmwwtaacccaaattcacttaatacaaaaatacaaactcgagggggggcccggtacccaattcgccctatagtgagtcgtattacaattcactggcccgcgtttacaacgtggtgactgggaaaaccctggcgtacccaatttaatcgccttggagcacatccccttttcgccagttgggggaataagcgaaagggcccgcaccgatcgccctttccaaaagtttgcgcaaccttgatggccaaatggacatttgaaagcgttaaaattttggtaaaaatcgcgtaaaatttttggtaaatagagtcattttttaacccacaagccccgaaatggcgaaaaatccctctatataataaaaaagaatataccccagataagggttggaggggttgttccacttttggaacaaaagggccctctttataaagaggtggcctccacagctcaaaggccgaaaaaccggcttttacg

SEQ ID NO: 3375 - DNA, 1047 bp, Rattus norvegicus
ccaagtacccaaagaagatactcccttgtactacaaaccagaatgctgatcccagtgataggtgttatgtgctttttgtggtcaacaattgattcttctgcatgttctaaatgtctgtgatacagatgtttgcaaaccaaagcactgagtgactgctataaaaaacaatggtgagggtgacatggctgcctctcaagctggttcttctttcttatttgttcagtggtaccaaccctcaggtggacaaacggaagtgcaacacagccacatgtgccacacaacgtctggcaaacttcttggttcgctccagcaacaaccttggtccagtcctcccaccaaccaatgtgggatccaatacatatgggaagaggaatgtggcagaggatccaaatagggaatccctggatttcttaytcctgtaaagtcaatgtaytcccgtatctcttattacttcctgtgtaaatgctctgatgatttcctgaataatgtaacagtgcctttgccattcccgcccaagtgagaatgtacaacaacgtgcctgtgcttgctgtgtttgtaaattcttattctaagacgtgctttaaactgagtgttgataaaggtcagggtgaatacctctctaatcacaacatgttcttggctgtacatcgatatcgtaggaacacttaaaatttctgtttttaccttgtaactctatgactcaagtttaacaataaaggagggcgtgggatggtggacttgaaaagtcattaacagctcatagtaaatttctgattctagacattggaaagcaagcattctaaatacctgctaagatgacatttcaaaataaattagcaaaatcttgtacttatttaattaaactttttaattctawwwmwwrwwgtccttgttggtagtaagaggctgttttaaaggataaaggttgtttgtatccacrarrarwwwawwrwwtctttttctctgtagagagctttaatgacatgtttattctgctaaggaatctttcagcaaaactcaaacataattgtatccagcagaaggatc

SEQ ID NO: 3376 - DNA, 2380 bp, Rattus norvegicus
atgtcgatgagtccaaagcacacgactccgttctcagtgtctgacatcttgagtcccctggaggaaagctacaagaaagtgggcatggagggcggcggcctcggggctccgctcgcagcttacagacagggccaggcggccccgccggccgcggccatgcagcagcacgccgtggggcaccacggcgccgtcaccgccgcctaccacatgacggcggcgggggtgccccagctctcccactccgccgtggggggctactgcaacggcaacctgggcaacatgagcgagctgccaccttaccaggacaccatgcggaacagcgcttcgggccccggatggtacggcgccaacccagatccgcgcttccccgccatctcccgcttcatgggcccggcgagcggcatgaatatgagcggcatgggcggcctgggctcgctgggggacgtgagcaagaacatggccccgctgcccagcgcaccccgccggaagcgtcgggtgctcttctcccaggcgcaggtgtacgagctcgagcgacgcttcaagcagcagaagtacctgtcggcgccggagcgcgagcatctggccagcatgattcacctgacacccacgcaggtcaagatctggttccagaaccaccgctacaagatgaagcgccaggcgaaggacaaggcggcgcagcagcaactgcagcaggacagcggcggcggcggaggcggcggcggcggcgcgggttgcccgcagcagcagcaagctcagcagcagtcgccgcgccgggtggccgtgccggtcctggtgaaagacggcaaaccctgccaagcgggcgcccctgcacctggagccgccagcctgcaaggccacgcgcaacaacaagctcagcagcaggcgcaggcggcacaagcggctgccgcggccatctctgtgggcagcggtggtgcgggtctaggagcacacccaggccaccagcccggcagcgcagggcagtccccggacctggcgcaccacgcagccagccccgcagcgctgcagggccaggtctctagcctatctcatctgaactcctctggctcggactatggcgccatgtcttgctctaccttgctttatggtcggacctggtgagatgtgggacgcgcctgagccctgtgcgacctcaccgctttccctctaccctccgcaaagaccaccattcgcccgctgctccacgcccttctacttttttctcatgtttagaccaaggaaaagtacacaaagaccaaactgctggacttcttcttcttcttcttctttcttcttcttcttcttcttcttcttcttcttcttcttcttcttcttcttcttcttcttcttcttcttcttcttcttcttcttcttcttctgctgctgctgctgctgctgctgctgcttcttcttcttcttcttcttcttcttcttcttcttcttcttcttcttcttcttcttcttcttcttctccttcttctttttctgcttcttcttcttcctcttcttcctcctcctccttcttcctcctywykmkscttgtccccactcctccttttctctttctccttttcctacgtttcccctttttttccttcatccttctccctttcctttctctttcctacctaaaacttgtggacttttttttaacataaaaagaaaatagaaacagtcaagcaaatccaacccctttacgaattctttaaccagagaaggacaaagaacaaatttgggggtctttctggtagttcaaatgggttctcaagcttaggcatggcacaattttggggcctgctctatgcttccacggccctgaactctgaagccggaaaacttccctgtggatgcactctgccagcaaagagagcttgcttgtaaataccaggatttttcgtttgtttgtttcagaagggaggacagaaactggagagaggaaagattcttcagcataacccacttgtccctgacacaaaggaagtgtcccctcccaggtgccctctggccctataggttcagtccaggctggcctttcagaaaattgttttaggtttgatgtgaacttgtagctgtaaaatgctgtcaaaagttggactaaatgcctagtttttagtwacctgtacattatgttgtaaaaagaactccagtcccagtccctggcccctcactttttaaaagggcatcatsgacaagcctgtgtatattactccacggtttggtatttgcagcaccagttgccccctcccttttttctgttgtaacttatgtagatatttggcttaaatatagttcctaagaagcttctaataaattatacgrattkraawwmaaarawrmwwwttctgattaaaaccctttttctttttaaaaaaaaaaaaaaaaa

SEQ ID NO: 3377 - DNA, 1396 bp, Rattus norvegicus
ctctgcaggcgccatggaggagaaggtgctcgtcacgggcggggctggctacatcggtagccacacagtgttggagctgctggaggcgggctactcgcctgtggtcatcgacaacttccacaattccrwksgtggagaagactccatgcctgagagcctgcgccgggtccaggagctgacaggccgctctgtggagtttgaggagatggacatcttggaccaggcagccctacagcacctctttaagaagcacaattttaaggctgtcatccactttgctgggctcaaggctgtgggcgagtcagtgcaraagcctctggattactacagagtyaaccyarcmkggmccatscagswsctggagmtsrwsagrgccwtggggstgrasagkmtggtstkmagcakctswgccaccgtgtatgggaaacccgtacctgcctctggacgaggcccaccccaccggggctgtaccaaaccctacggcaagtccaagttcttcattgaagagatgatccaggacctgtgccgggcagacacggcctggaacgctgtgctgcttcggtacttcatccccataggcgcccatcgctctgcgcgcatcggcgaagatcctcagggtatccccaacaacctcatgccctatgtctcccaggtggcaatcgggcgacgagaggccctgaatgtctttggtgatgactacgctacggaggatgggacaggtgtgagggattacattcatgtggtggatctggccaagggccatatagcagccttgaagaagctgaaggagcagtgtggttgccggatctacaacctgggcacgggcacaggctattcggtcctgcagatggtccaagccatggagaaggcctcagggaagaagatcccgtacaaggtggtggcacggcgggaaggcgatgtggcggcctgttatsccaaccccagcctggcccatgaggagctgggctggacagcagccttggggctggacaggatgtgtgaagatctgtggcgctggcagaagcagaacccttcaggcyttggggcgcakgsctgaggctctccttwccacggaccagaaaagagcagctacytgctttgcagccgccacaggaccctacaccctcatgcgctgaggccaccctacctcaaaggccagctgtytytcagccctcccggcaggagacctctggttmtactgaccagaaaggagtytgggtccttccagcctattttccccagagtccagcagctcatgtgatccccagagccttgtggaggccagggggtytgggaccaaagcctccctcaggcactaacttatacagctaagattgagctttccaaagtatttaaaataaaaatgtcttcttwtcmaraaaaaaaaaaaaaaaaa

SEQ ID NO: 3378 - DNA, 1945 bp, Rattus norvegicus
gtatacatttgaatacacctttttcttcactttattggggattaagttcaacacatattaaagcagagtgtggggtagggagtaatgaaaaagaagatgtcaggaaaaggccatcatactcccaagagtgtgagtgtggtgagtgtgggcatctctagggagaccggtcatacatgcacatctttcaaagagaaattcaatgccctaaatggagtgtaaaggtggatcaaagttttagaaacattttttttctgttatagaaaatgctttttaaacaagaattgggggggtagagatgtttactattatgaaaagagaaaaaaaatgcatctttgaagacccaaggcactggaaacactgagtttcactacttgcctttattaggtgtcctctatctgattgttagaaattattcatttcctcaaagagagagaataaattgcttggggattcggccctgctctgcgctcttcctttgctaaaggcaaacgctgaaggcttcagaatcatgaggatgcttctgtgcttgaacgttctaactctcagctgtgtctgggccattgctatggagatccccatgagcacagtggtgaaagagaccttgatacagctgtccactcaccgagctctgttgacgagcaatgagacgatgaggcttcctgttcctactcataaaaatcaccagctatgcattggagaaatctttcaggggctagacatactgaagaatcaaactgtccgagggggcactgtggaaatacyattccaaaacttgtcattaataaagaaatacattgacggacaaaaagagaagtgtggcgaagagaggcggaagaccaggcatttcctggattacctgcaagagttccttggcgtgatgagtacagagtgggcaatggaagtctgagactgagctggacaggatttcaccttttaagttaaattttcaacagatgcaaaaaaaaaaaaacccaaaaacaaaaaaaaacaaaaccccaaactgtacaaatgcaagggttatcgtatgctgtttccattcatatttatgccctgtagtcaagttaaacctatctatgtccagatatgccaaagtgtttaacattctttttgtgtctgtataacagaaatttagcccaggctggcctcaaacttataatgtagcagagggtgaccttgaactcccgatcctcctgagggctgagattacagacatgcaccattgtgactagttcatatggtgctgggcatggaacccagggctttgtgcacgctaccgactgagctgtactccctagacctcgtccccttctttgcatcagggtctcaagtattccaggctgactttgaactcagtgtgtatccaaggatgactttgaactcttggtccaggtggatgcagaaggatcacatacccaacttgagcatcctttctcctagcccttttagatagacggtactcaatggctctcttgctgggggatgccacaccaggcttcctgctcctatctaacttcaatgtaatacccactaatcaatctttcctcaactctctgctactctctccagcctccagtaatcccacttctatttctacagggttgacttttcttatgttctatgtatgaatcagattatgccatgattgtctctctgtgcctggagcagcccaattttggagaaaaaaaaggggggggggacatctccttgcagtgagagtgagagccagccacaggctgagccttacttttcagtgtaactaaacttaagaagcaaagtaaatactgcaacctttctaccccacatagacagaaagcatcaaatgggaggttattcaggtatcggggtcgctggagaagccttctgcagtttactccaggaaaacggatgtatgcttttatttaattctgtaagatgttcatattatttatgacatgtttaagaattc

SEQ ID NO: 3379 - DNA, 1934 bp, Rattus norvegicus
cctataagccggcgacctctggcattaagctttgctctcttcgggccgtcgcgaccatgcagacccccggcgtcttgctgctcattctcggcctcctggatgcgtcctcctccgcgcttatcagaatccccctgcgcaagttcacatccatccgtcggactatgacggaagtgggaggctctgtggaagacctgatccttaaaggtcccataaccaagtactccatgcagtcatctcctaggaccaaggagccagtgtcagagttactaaaaaactacctggatgcccagtactatggtgagatcggcattgggactcccccacagtgtttcacagtcgtctttgacactggctcctctaacctgtgggtcccctccattcattgcaagctgctggacatagcctgctgggtccaccacaagtacaacagtgacaagtccagcacctatgtgaagaatggcacatccttcgacatccactacggctcaggtagcctctctgggtacctgagccaggacactgtgtcggttccatgtaagtcagacttaggaggtatcaaggtggagaaacagatctttggggaagccaccaagcagcctggagtcgtattcatcgcagccaagtttgatggcatcttgggcatgggctacccttttatctctgttaacaakgtgctcccggtcttcgacaacctgatgaaacagaagctggtggaaaagaacatcttctccttctacctgaacagggacccaaccgggcaacctggaggagaactaatgcttggcggcactgactccagatactaccacggggagctgtcctacctgaacgtcacccgaaaggcctactggcaggtgcacatggaccagctkgaggtgggcagcgagctgacyctgtgcaagggaggctgtgaggctattgtggacacagggacswckmkkctggtggggcctgtggacgasgtgaaggaactacagaaggccattggggcagtgcctctcatccagggcgagtatatgatcccttgtgagaaggtgtccagcctgcccattatcacskyyaasctagsagkccrwwmctmygaactwsrcccagagargkacakamtmmasgtakcgcaggcwsgaragacgatctgcctgagtggcttcatggrgatggacatacccmctcccagtgkgccgmtctggatcctgggcgatgtctttattggctgctactacaccgtgtttgacagagaatacamtagggtcggctttgccaaggctgscacactctaacttgctcsttctymactgtcagggaactggatcagagtccarkakagaaagccagccagscccatmcytccacctgccccactcacacatatkcacactcgcywagtgttgctgggccyttgggaggcctggctggagctgktcmagctgttctgttctgtggtccctgtccytgggtwcagattgctgccctccgcctgtctgaaggaggccaaggcctacccagtacaaaaggctgcctttaaaggcccctactggcttggtagctgccgggatgaattgtcttgtcctgctgccctttgctgcgtgggcagcactctgaagcaggcaaatgggtcttgggatccctcccagaaacctgctctgaccagaccctcaggcagcctggggatggcaccaagctctactgccccactatctctggcctggcaaaggctgaaggtgagcagaaggagcaagaggacagaagcaaaactatatgaacctggggggggttacctgggacctgaccccaccctcctgggaaggcatgcttcagcctggggcagaggtaggatggctgactggttttggctggcctctgctgccctcatcctgggctagtcagatgggagccaaagttgatatacaaataaagttgttttgggcctcttt

SEQ ID NO: 3380 - DNA, 2570 bp, Rattus norvegicus
tggtgtcactacacagggctgcctctaggcctggggaacgcaccccagttccgacacctgctgccctggctggatgatgaaccagtctcagagaatggcacctgttggctcggacaaagaactgagtgacctcctggacttcagtatgatgttcccgctacctgtggccaatggcaagggccggcccgcctccctagctggaacccagttcgcaggctcaggactggaggaccgacccagctcagagtcctggggcaacagtgaacagaacagttcttcctttgaccctagccgggcatacagcgaaggtgcccacttcagtgactcccacagcagcctgccgccttccacgttcctaggagctgggcttggaggcaagggcagtgaacggaatgcctatgccaccttcgggagagacaccagtgttggcaccctgagtcaggctggcttcctaccaggtgagctgggcctcagcagtcccgggccactgtccccatcaggcgtcaagagcagctcccagtattacacctcattccccagcaaccctcggcggagagctgcagatggtggcctggatactcagcccaagaaggtccggaaggttccgcctggtcttccttcctcggtatatccatccagctcaggtgataactacagcagggacgccacagcctacccctccgccaagacccccagcagcgcttacccctcccccttctacgtggcagacggcagcctgcacccctcagcggagctctggagtccccctggccaggtgggctttgggcccatgctaggtgatggctcggcccccctgccgcttgcaccgggcagcagttccgtgagcagtggtgcctttgggggcctccagcagcaggatcgcatgggctaccagctgcatgggtctgaggtcaatggtacgctcccagctgtatccagcttctcagctgcccctggcacttacagtgggacttctggccacacgccacccgtgagcggggccgacagcctcttaggcacccgagggactacagccagcagctcaggggatgcccttgggaaggcactggcctccatctactccccggatcactccagcaataatttctcgcccagcccctcaacgcstgtgggttcmccccagggcytgccagggacatcacagtggccccgggcaggagcgcccagtsccttatcccccaactacgatgcaggtctccatggcytgagtaaaatggaagatcgcttggacgaggccatccacgtcctccgcagtcacgctgtcggcactgcaagcgagctccatggactgctgcctggccmcagcamrttsrscacragstttgcgggcsccatgtcactgggcgggcggcatgcaggcctggtcagcggaagccaccctgaggatggcctcacaagtggtgccagtcttttgcataaccatgccagccttcccagccagcccagctccswmmmwrammwmwmamagaggccacccgactcctttagtggactcgggagggcaggsgtgactgcaggcgccagtgagatcaagcgggaggagaaagaggacgaggaggtcacatcagtggcagacgytgaggaagacaagaaggacctgaaggtcccacgcacacgtaccagcccagacgaggaygaggwcgacctkctcccyssagagcagaaggmcswgmgggasmrggagmgscgsrtggccaataacgcycgrgagcgsstgcgygtscgsgacatyaaygaggccttymrggagctsggccgcatgtgccagctgcacctcarswsbgakaagscgcagaccaarctgctsatcctgcascaggcsgtgsmsgtyatcctsrgcctggagcagcaggtgcgagdwcgydrssbgvmssccaaagcagcctgcttgaagcggcgggaggaggagaaggtatctggcgtggtcggggatccgcagctggcgctgtcagccgcccacmcsggcctgggtgaggcccacaatccagcyggrcacctgtgagccgtcacagggtcttcgttggaccagggaccaccacatctctgcccggggtgcacccaggatggtcctggatgakacatctccatcgaggcatgggcagagggctctgggacacttcagggcctgggggagttggcacggagcagcccacctgtcttggcccagtaaccaagctgaagagcggctcctcctctcgattagcgggaactggaaacaaagcagcatgcccacttwtcrgaaaggaaaaaagatgccttaaytatgtcagacggaagagtcggaccgmryyctggcaaggggcggcctggtactggcttytagttcagagccacagcacattgtgcctaagcatttttcgttttttaaaaggagaataaaggaacattagttttcagatttttttttttaatgtagacaaaagttagcaagaacgaggccttccgtgtcttttttttcccttaactttcttttccgtatgttttgtaagcaacaaatttttgtmtaaaarwmwmawrwmwrwttctgttwmwaaaaaaaaaaaaaaaaa

SEQ ID NO: 3381 - DNA, 3144 bp, Rattus norvegicus
gctctctctctctctctctctctctctctctctctctctctctctctctcttctctcagaaatcgctttggggaacccagcttgcagccaatgaacccgccttccagattkgygysmakrcwswwgtsagcttcgttttaggcgtagcacagccaggcagaagaaaatggggcaaagcgtgctccgggcggtcttctttttagtcctggggcttttgggtcattctcacggaggattccccaacaccatcagcataggtggacttttcatgagaaacacggttcaggagcacagcgctttccgctttgctgtgcagttatacaacaccaaccagaacaccactgagaagcccttccatttgaattaccacgtagaccacttggattcctccaatagtttttctgtgactaatgctttctgctcccagttctccagaggggtgtatgctatctttggattctatgaccagatgtcaatgaacaccctgacctccttctgtggggccctgcacacatcttttgtcacacctagctttcccactgatgcagatgtgcagtttgtcatccagatgcgcccagccttgaagggtgccattctgagtcttctcagttactacaagtgggagaagtttgtgtacctctatgacacagaacgagggttttctgtcctacaagcaattatggaggcagcagtgcaaaacaactggcaagtgacagcaaggtctgtgggaaacataaaggacgtccaggaattcagacgcatcattgaagaaatggacagaaggcaggaaaaacgatacttgattgactgtgaagtcgaaaggattaacacaattttggaacaggttgtgatcctggggaagcattcaagaggctatcactacatgcttgctaacctgggttttactgacattttactggaaagagtcatgcatgggggagccaacattacaggtttccagattgtcaacaatgaaaacccaatggttcagcagttcatacagcgctgggtgagactggatgaaagggaattccctgaagccaagaatgcaccactgaagtatacatctgcgctgacacatgacgcaatattggtcatagcagaagccttccgatacctgaggagacagagagtggatgtctcccgcagaggcagtgctggagactgcttagcaaatcctgctgtgccctggagtcaaggaattgatattgagagagctctgaaaatggtgcaagtacaaggaatgactggaaacatccaatttgacacttatggacgtaggacaaattataccattgatgtctatgaaatgaaagtctcgggttctcgaaaagctggttactggaacgaatatgaaaggtttgtgcccttctcagatcaacaaatcagcaatgacagctcatcctcagagaaccggaccattgtagtgactaccattctggaatcaccatatgtgatgtataaaaagaatcatgagcagctggaaggaaatgagcgctatgaaggctactgtgttgatttagcctatgaaatagccaaacacgtaaggatcaaatacaaattgtccattgtcggtgatgggaaatatggcgccagagatccagagactaaaatatggaatggcatggttggggaacttgtctatggaagagctgatatagctgttgctccactcactataacattggtccgtgaagaagtcatagatttctcaaagccatttatgagcctgggaatctccatcatgataaagaagcctcagaaatcaaagccaggcgtcttttcattcctggatcctttggcttatgaaatctggatgtgcattgtcttcgcttacattggagtcagtgtagttctcttcctagtcagcagatttagcccttatgaatggcacttggaagacaacaatgaagaacctcgtgacccacaaagccctcctgatcctcccaatgaatttggaatatttaacagtctttggttttccttgggtgctttcatgcagcaaggatgtgatatttctccaagatcactttctgggcgcattgttggaggggtttggtggttcttcaccctgatcataatctcttcctacactgcaaaccttgctgctttcctgactgtggagaggatggtgtcccctatagagagcgctgaagacttagccaagcagactgaaattgcatatgggaccctggactctggttcaacaaaagaatttttcagacgatccaaaattgctgtgtatgagaaaatgtggtcttacatgaaatccgcagagccatctgtgtttaccaaaacaacagctgacggggtagcccgagttcggaagtccaagggaaagttcgccttcctgctggagtcgaccatgaacgagtacattgagcagagaaagccgtgcgatacgatgaaagttggtggaaatctggattccaaaggctatggtgtggcaacccctaaaggctcagcattaggaamksctgtwaacctkgcagtattraaactsartgarcaaggcmtcttrgacaarytgaaaaacaaatggtggtacgayaarggrgartgyggcagcsrrggrcksygrswsyaaggacaagaccagtgctctaagcctgagcaatgtggcaggcgtgttctatatacttgtcggaggtctgggcctggccatgatggtggctttgatagaattctgttacaaatcacgggcagagtccaaacgcatgaaactcacaaagaacacccaaaactttaagcctgctcctgccaccaacactcagaattacgctacatacagagaaggctacaacgtgtatggaacagaaagtgttaagatctagggatcccttcccaccagaagcatgcaatgagaggaaatcactgaaaacgtggctgcttcaaggatcytgagccggatttcactctccctggtgtcgggcatgacacgaatattgctgatggtgcaatgacctttcaataggaaaaactgatttwttttttccttcagtgccttatggaacactmtgagacttgcgacaatgcaaaccatcattgaaatctttttgctttgcttraaaaaaaawwaaaawaaaaccaacaaaaaatggacatgcaagattccagtatgcgaaaaaaatcttattaaaacat

SEQ ID NO: 3382 - DNA, 1021 bp, Rattus norvegicus
  misc_feature (699)..(699): n is a, c, g, or t
  misc_feature (781)..(781): n is a, c, g, or t
  misc_feature (797)..(797): n is a, c, g, or t
  misc_feature (908)..(908): n is a, c, g, or t
aggttgctgcgtgactaccaggagctgatgaacaccaagctggccctggacatggagatcgccacctacaggaaacttctggaaggagaggagatcaggatgtctggagaatgcacccccaacgtgagcgtgtctgtgagcaccagccacactagcatgagcggaacgagcagccgaggtggcggcagatacggctccggaggcggcggcsrtkgckgcaygtwcggmggcggctccagaggcggcagctacggaggtggttccggaggcggcagctacggaggtkgcagctctggaggcggctccggaggcggcagctacggcggcggcagcagtgggggccacagaggtggctctggagggggcggtggcagctccggaggcagctatggtggttcctctgggggaggccrsgrrggrtccagctccggtggcggcgttaagtcctstggcagttctagtgtgaagtbtgttkscacsacttactcccgagrgaccawctaaagaggtgcccaccacwccattagststccctttccatcaaggstarrcrygrsggscaaaaccaaarccaattgcaccagccttattrgagaaaagagctatggytaaatgctcagattaggctkatttcccccgcgykttyttttctgctcagcwtgcaaagaagttttyatattvgtmgcagtctgagtcccntggtaacaaccccactsktatsttytgytgagaaacagbttagagctsycatcrccaacatgacatttcaaagaggaskkcngakccaraactttgcntggcacgcccagagcaytggavtgccccttagcatccygtatcctgcagcacacagagytgcttttgsttttgyacataaggtgtwtgsgagtgtmttttacggagcgvtntgaacaacccctcccvtgsccaccytgccccatttctttgwtwtgctgcaataaactgsakbtgaamctctcaaaawmwaaaaaaaaaaagakrtawaaaaaaaaaaaaaaaa

SEQ ID NO: 3383 - DNA, 1274 bp, Rattus norvegicus
caaaagctggagctccaccgcggtggcggccgctctagaactagtggatcccccgggctgsabgrvkkckvmamrmgccatcttkgcatttgttccckggtcgtgctccgcgctcactgcagccaccttcgccgmccaccgtctcctmcaacgcggactccggcagctttytcgccagagtcctsgaaactcgacwwattccttacgcgtasvmccagaccaccggsgtgccccaccatgtmagacgcggcagtggacaccagctccgagatcaccaccaaggacttgamggagaagaaggaagttgyggaggaggcagakaatggaaragacscacctgccaatgggaacgctcaaaatgaggaaaatggggagcaggaggctgacaatgaggtwgatgaagaagaggaagaaggtggggaggaagaggaggaggakgaagaaggtgatggtgaggaagaagatggagatgaagatgaggaagctgargstcctacsggcaascgggtwgctgaggatgatgaggatgatgatgttgagaccaagaagcagaagaagactgatgargatgactagacagcaaaaggaaaagctaaccttacgcaccgtgacctattcaccctccacttcccgtctcagaatttaaacktggtcaccttcgagtaragaagcaggcccccscccgcccactscrcgagtgccacccacmmatgacatgcgctcttcaccacyccaccaaaaccrcaacatgaattggcaacatgggaggagaaaagaaccagaacttcccaggccctgctttttttcttaaaaatactttaaaaggaawwkttgwytktattwwytawkyamattwkryaywttwrtamatatygwyasrggtcagccatttttaatgataacgggtgaccaaaccagccttcagagcgttttctgtcctacttcagactttacttgtggtgtgaccatgttcattatactctcaaaggagaaaaaaaaccttgtaaaaaaaacaaaaacaacaacaaaaaaacaatcttattctgagcattccagtaactttttttgtgtatgtacctagctgtactataagtagttggtttgtatgagatggttaaaaaggccaaagataaaaagattttttttcctttttttttgtctatgaagttgctgtttatttttttggcctgtttgatgtatgtgtgaaacaatgtccaacaataaaccggaattttattttgctgagttgttccaaaaaaaaaaaaaggaatycg

SEQ ID NO: 3384 - DNA, 1998 bp, Rattus norvegicus
  misc_feature (1597)..(1597): n is a, c, g, or t
agtagaaatgaaaagagaataagcgaaacagagacagttttcgctgaggaggagccaagaagaaagaaggcctccatatctaatatgtattatcataaacacagtgtacagttatcactgaccctcccatgacctggctccgcccatgagggccatgggtcaggctggccaatgacttcaaagaattgtgcagaacaaagggtcagagcattgtctgtgaaacataaaaggccaccatttctagcagcagcatgcacttgcttctgacacttctgtggtcaccagcaacctcccagacttgacatcatggtgaactttactgctgaggaaaagagcctcatcaatggcctatggagtaaagtgaatgttgaggaggttggtggtgaagccttgggaaggtaagaattggctgttgatgcatctgggagaaggatgaatagttccttggacaaggagctaggagtcaagaattctgaggatttctgatttttctacttgtttttcttcacttcacagacttctcgttgtgtacccatggacccagagattctttgacagctttgggaacttgtcctctgcctctgccataatgggtaacccaagagtcaaagcccatggcaagaaggtgctgactgcttttggagaaaccattaagaacctagacaacctcaagtctgccttggccaagctcagtgaactgcactgtgacaagctacatgttgatcctgagaacttcaaagtgagtctagggcaagctcacaagtttattttgggtttgtcttaggggcaaaatagaagctgacaatatgagttgggagtgcttacctagctgtcaaagctcattggtctaggcagagtgtcagggaatggctgtaagaaattagtttataggcatttagaaaattttgtcatgatagaattttgttggactgattgtggagagtagagtgaaagaatagcagatctgtgcaaggagaagtagaattgggagaggaaaaataccttaactttctgtgggtcctattaatgctgaagaaaagatttcggagacaacttaaagatggaatttctcaatcaacatacaaaactatattaaattcccaaatgagtatcatgacaaatggaggcttgttcttacatttggtggcagttttacaattccaccaagagcagttgtagcatagaaattctatatatcagatattagacaactggaggatgagaataacaagacaggcaaatagatacgatgggaatgtgaattcaggcagggcagtggtgagtggggagagaggggtacaatagagaaatggaacctatcccctcagagatgattgagagaactttgaagctgaatgtgttaaagagtataggttcaaaataywwskbyrcbhbkkvvsmadvyyhdktgamkctkcatktracawrshaatsttdwtcytgwswwmctstcaamarctcwtgggtaatgtsctggtgattgttckrghtagtcacttcggcaatgaattcacggytgaggtacaggctgcctggcagaarwtggtgsctggggtgsccactgvtytgtcccataagkaccaytgagccctttytntagytghccagcaatcstgtrtgtcccctbtgccctsytkyttcacatgdgtastsgactggtcywtgaaaggacrgcatgtttdrtaaagatcatkswtsstkgtwhwmaaaaawwmawwwwrwmwwrwmwwtttttctacttttatgctaacgatacctatttgatgtgtttgtggaagagaggaagacacaggcatttcttcgaaaactgtaggaactcaatcaagaaacatagatgccatggaaggcttctatagggccaaggaaagtctaaagctgggaaagagttctcaaagagaagaaagaaatttagtggagaaggaattgtgtatggaacatatgaaaatgtattaatagagggtgaagaaaagggggacagttgatacctggcatcaggtt

SEQ ID NO: 3385 - DNA, 2475 bp, Rattus norvegicus
ctggcacatctcccagaatgagtaccacaggagctaaggctgksamawtmsagwmtgagwagycwcaaksarstragccacctgtgattcatgagaaaaagccaaaaggaaagccaaaggaagggtcagagacaaaatttcaagatgctccttctgctgatggagagagtgtggctggagrtgtgactgtggccactgcctcagacraggtggttgttaagaaaaaagagaagaaatcattaacacctactttacctatggagtccacactaaacaagctatctgacaagtcaggcgtgaatgctgctttggatgacctgatagacaccttaggtgaatgtgaagatactaacaaagatgatccaccatatactggaccagtagttctggacccaatggattctacctaccttgaggcactgggtataaaagaagrgactattcctccagagtataggaaacttctggagaaaaatgaagctatcacaggacctcttccagattctcctaaacctatgggaatcgaccatgctatagatgcmwyrtmawstkwwtkcayytgtrgctmtcyramtrraaakcmarctgrgawrgwgamktytactggggaaagttcgaaagctcagtctgcaggagtgaccagaagtgctgttcctccccaggagaagaaaaggaaagtagaagaggaggtcatgaatgatcaagccctgcaggctctgtcagattcactgggcacccggcagccagaccctcagagccatcttaggcaagccaaacaagtcaaagaggcaaaagcaaaagaagaaaggcaggagaaatgtggtgaagatgaggacacagtacctgctgagtacaggttaaaaccagccaaggataaagatggaaaaccactattgccagaacctgaagaaacatctaagtgcctgagtgagtcagagctgattggggagctttcagcagattttgtccaacctacatatcaagaaaaaccatctatgccagctgcaaaaataaagaagggcgtagtgccagatgatgctgtagaaaccttggctagaagcctggggacaaggaaagaagatccagaagatgaaaaatctctggtggataaagtcaaggagaaagctaaagaagaagatcatgaaaaacywsgwgraaragaagaaacaattcctcctgattatcgactagaaatagtcaaggataaggatggaaaaccgctcctgccaaaagaagccgaggaacaacttccacccttaagcgatgacttccttcttgatgcattgtctcaggacttctccagtcctgcaaacatattgtctcttggttttgaagatgccaaactttctgctgctgtttctgaaacagtttcccaggtgcctgctccaagcaaccacacagcagccccaccgcctggcactgagaggagagacaaagaactcgatgatgccttggatgaactttctgacagtcttggacaaagacagcctgatccagatgagaacaraccactagatgataaagtaaaggaaaaaatcaaagcagagcatagcgagaractgggagaaagagacgacaccatcccccctgaatataggcatctcctggataatgatgggaaggacaaaccagagaagccacttgacaaagaacacagagaagcctggtcaggaccaggaccccattgatgccctctcagaagacttggatagctgccccccaactacagagacttcacagaatacaacaaaggagaagggtaagaagacttcaagttccaaagcatccaagaatgaagagaaaacaaaggattcctccaagaagacagaggaagtgcccaagccaaaggtggatgaagatgcaacataaagtttatgcattttggwatctgaataaaaattcttcagctggtggatgktgacttttgaagatcaaaggctttgatgacaatttttctgggtggcttctagacagttgtatttgttatgtcttttgacaccttaaacattgagttgatattcttttccagaacaaaaaagaatttgtctggttcatctgtgttctgtattgagtattgataaacttcaaagatttttaattgcctttaggtaggagaagkaagctttatatttgtaaaaaatatatttgacagtttcttaaaacaccaaaaatcccagaaaacctttgcaaacatttgcacattatatacatagtgcctgtaaaactcattagtaattttggtttacacccaatttttttagcaattgcaatataatgctcttatagtttgtcaatattttgatttcttattatgtctttttcttgggctttgatgtatctttgggttaatgttgataagtcaaatgtggaatattgtactttgggtgtataactcctttggagatgctaataataaattaatgatagataacccaggtaaaccttgggagcaccaaaaattaaaaaaaaaaaaaa

SEQ ID NO: 3386 - DNA, 8268 bp, Rattus norvegicus
ggcgggtcagggagcgcaggggcgtggggcgcagggccgggtgcagcgcagtgaaggaacgagcctgggttgccctgtagtgccggggagaccctgagagcccagcccgcccacccgccaggaaagagggcagcagcgggtggaacgcccgcgggaccgcccgtggtgcgcgtgaacgtccgatcccggccggccaccgcaagaggccgccgcccggcagcgggcagctggcgagcaggcatgccgcggctcctggcgcccttgctctgcctaacgctgctgcccgcgctcgccgcaagaggcttgagatgctcccagccaagtgggacctgcctgaatggagggaggtgcgaagtggccaacggcactgaagcctgtgtctgcagcggagcgttcgtgggccagcgatgccaggaccccagcccttgcctcagcacaccatgtaagaatgctggaacgtgctatgttgtggaccatggcggcatcgtggactatgcctgcagttgccccctgggtttctctgggcccctctgcctgacacctctggccaatgcctgcctggccaacccctgccgcaacggggggacctgtgacctgctcactctcacagaatacaagtgccggtgcccgccagggtggtcaggaaagtcatgtcagcaagccgacccctgtgcctccaacccctgtgccaatggtggccagtgcctgccctttgagtcttcatacatctgtggctgcccgcccggcttccatggccccacctgcagacaagatgttaacgagtgcagccagaaccctgggttgtgccgtcatgggggcacgtgccacaatgagattggctcctatcgctgtgcctgccgtgccacccacactggtccccactgcgagctgccctacgtgccctgcagcccctcaccctgccagaacggaggcacctgccgccctacgggggacaccacccacgagtgtgcctgcctgccaggctttgctggacagaactgtgaagaaaatgtggatgactgcccaggaaacaactgcaagaacgggggtgcctgtgtggacggtgtgaatacctacaattgccgctgcccaccggagtggacaggtcagtactgcacagaggatgtggacgagtgtcagctcatgcccaacgcctgccagaatgcgggaacctgccacaactcccacggtggctacaactgcgtgtgtgtcaatggctggactggtgaggactgcagtgacaacattgatgactgtgccagtgccgcctgttttcagggtgccacctgccatgaccgtgtggcttccttctactgcgagtgtccacatgggcgcacaggcctgctgtgccacctgaacgatgcgtgtatcagcaacccctgcaacgagggctccaactgcgacaccaaccctgtcaacggcaaggccatctgcacttgccctcgggggtacacggggccagcctgcagccaggacgtggatgagtgcgctctaggtgccaacccgtgtgagcacgcgggcaagtgcctcaacacactgggctctttcgagtgtcagtgtctacagggctacactgggccccgctgtgagattgatgtcaacgagtgcatctccaacccatgtcagaatgatgccacgtgcctggaccagattggggagtttcagtgtatatgtatgccaggttatgagggtgtatactgtgagatcaacacggacgagtgtgccagcagcccctgtctacacaatggccgctgcgtggacaagatcaacgagttcctgtgtcagtgtcccaaaggcttcagcgggcacctgtgccagtatgacgtggatgagtgcgccagcacaccatgcaagaacggcgccaagtgcctggatgggcccaacacctacacctgcgtgtgcacagaaggttacacggggacccactgcgaggtggacattgacgagtgtgaccctgacccctgtcacattggtttgtgcaaggatggtgtggccacctttacctgcctctgccagccaggctacacaggccatcactgtgagaccaacattaatgagtgtcacagccagccgtgccgccatggcggcacctgccaggaccgtgacaactactacctctgcttatgcctcaaggggaccacaggacccaactgtgagatcaatctggatgactgtgcgagcaacccctgtgactctggcacgtgtctggacaagatcgatggctacgagtgtgcgtgcgagccaggctacacagggagcatgtgtaatgtcaacattgacgaatgtgcgggcagcccctgccacaacgggggcacctgtgaggatggcatcgccggcttcacttgccgctgccccgagggctaccacgaccctacgtgcctgtctgaggtcaacgagtgcaacagtaacccctgcatccatggagcttgccgggatggcctcaatggatacaaatgtgactgtgcccctgggtggagtgggacaaactgtgacatcaacaacaatgagtgtgagtccaacccttgtgtcaacggtggcacctgcaaagacatgaccagtggctacgtatgcacctgccgagaaggcttcagtggccctaactgccagaccaacattaacgaatgtgcttccaacccctgcctgaaccagggcacctgcattgatgatgtcgctgggtacaaatgcaactgccctctgccctatacaggagccacatgtgaggtggtgttggccccatgtgccaccagcccctgcaaaaacagtggggtatgcaaggagtctgaggactatgagagcttttcctgtgtctgtcccacaggctggcaaggtcaaacctgcgagatcgacatcaatgagtgtgtgaaaagcccgtgtcgccatggtgcctcttgccagaacaccaatggcagctaccgctgcctctgccaggctggctacacgggtcgcaactgcgagagtgacatcgatgactgccgacccaacccatgtcacaacgggggttcctgcactgacggggtcaacgcggccttctgcgactgcctgcccggcttccagggtgccttctgtgaggaggacatcaacgaatgcgccacgaatccatgccaaaatggcgccaactgcactgactgcgtggacagctacacgtgcacctgccccaccgggttcaatggcatccattgcgagaacaacacacctgactgtaccgagagctcctgtttcaatggtggcacctgtgtggatggtatcaactccttcacctgtctgtgcccacctggcttcacgggcagctactgccagtatgacgtcaatgagtgtgactcacggccctgtctgcatggtggcacctgccaagacagctatggtacctataagtgtacctgcccacagggctacactggtctcaactgccagaaccttgtgcgctggtgtgactcagctccctgcaagaatggcggcaagtgctggcagaccaacacacagtaccactgcgagtgccgcagcggctggactggcttcaactgcgacgtgctcagtgtgtcctgcgaggtggctgcacagaagcgaggcatcgatgtcactctcctatgccagcacggagggctctgtgtggatgaggaagacaagcattactgccactgccaggcaggatacacgggcagctactgtgaggacgaggtggacgagtgctcacctaatccctgccagaacggagccacctgcactgactatctcggtggcttttcctgcaagtgtgtggctgggtaccatggctctaactgctctgaggagatcaacgagtgcctatcccaaccctgccagaatgggggtacctgcattgatctgaccaacacctacaagtgctcctgccccaggggcacacagggtgtacactgtgagatcaacgtcgatgactgccatcctcccctagaccctgcttcccgaagccccaaatgcttcaataatggcacctgcgtggaccaggtgggtggctatacctgcacctgcccgccaggcttcgtcggggagcggtgcgagggcgatgtcaatgagtgtctctccaacccctgtgacccacgtggcacccagaactgcgtgcagcgtgttaatgacttccactgcgagtgccgggctggccacactggacgccgctgtgagtcggtcattaatggctgcaggggcaaaccatgcaggaatggaggtgtctgtgctgtggcctccaacaccgcccgtggattcatctgtaggtgccctgcccgcttcgagggtgccacttgtgaaaatgacgcccgcacttgtggcagtttgcgctgcctcaacggtggtacgtgcatctcaggcccacgcagtcccacctgcctatgcctgggctccttcactggccctgaatgccagttcccagccagcagcccctgtgtgggtagcaacccctgctacaatcagggcacctgtgagcccacatccgagagccctttctaccgctgtctatgccctgccaaattcaacgggctgctgtgccacatcctggactacagcttcacaggtgcggccgggcgcgacattcccccgccacagattgaggaggcctgcgaactgcctgagtgccaggaggatgcaggcaataaggtctgcaaccttcagtgtaataatcacgcgtgtggctgggacggcggcgactgctccctcaacttcaatgacccttggaagaactgcactcagtccctgcagtgctggaagtattttagtgacggccactgtgacagccagtgcaactcagctggctgcctttttgatggcttcgactgccagctcaccgagggacagtgcaaccccctgtatgaccagtactgcaaggaccacttcagtgatggccactgcgaccagggctgcaacagtgccgagtgtgagtgggatggactggactgtgcagagcatgtccccgagcgactggcagccggcacactggtgctggtggtgctgcttccgcccgatcagctacgcaacaactccttccacttcctgcgggacgtcagccacgtgctgcacaccaacgtggtcttcaagcgtgacgcgcagggccagcagatgatcttcccctactatggccgcgaggaagagctacgcaagcacccgatcaagcgttctgcagtgggctgggccacaacgtcactgcttcctggcaccaatggtgggcgccagcgcagggagctggaccccatggacatccatggctccatcgtctacctggagatcgacaaccggcagtgtgtacagtcatcctcgcaatgcttccagagcgccaccgatgtggctgccttcctaggtgctcttgcctccctcggcagcctcaatatcccctacaagatcgaagccgtaaagagtgagacggtggagcctccgctgccctcacagctgcacctcatgtacgtggcggcagctgccttcgtgctcctgttctttgtgggctgtggggtgctgctgtcccgcaagcgcaggcggcagcatggccagctctggttccctgagggtttcaaagtgtcagaggccagcaagaagaagcggagagaacccctcggcgaggactcagtcggcctcaagcccctgaagaacgcctcagatggtgccctgatggacgacaatcagaacgagtggggggacgaagacctggagaccaagaagttccggtttgaggaaccagtggttctccctgacctggatgatcagactgaccaccggcagtggacccagcagcacctggatgccgctgacctacgtgtgtctgccatggccccaacgccgcctcagggggaggtagatgctgactgcatggacgtcaatgttcgaggaccagatggcttcactcccctaatgattgcctcctgcagcggagggggcctggagacaggcaacagtgaggaagaagaagatgcacctgctgtcatctccgacttcatctatcagggtgccagcttgcacaaccagacggaccgcacaggggagactgccctgcacctggctgcccgatactctcgttcagatgctgccaagcgcttgctggaggccagcgcagatgccaacatccaagacaacatggggcgtaccccattacatgccgctgtttctgcagacgctcagggtgtcttccagatcctgctccggaacagagccacagatctggatgcccgaatgcatgatggcacaacccctctgatcctggcggcacgcctggccgtggaaggcatgctagaggacctcatcaactctcacgctgatgtcaatgctgtggatgacctaggcaagtcagctctgcactgggcagccgctgtgaacaatgtggacgctgctgttgtgctcctgaagaacggagccaacaaagacatgcagaacaacaaggaggagactcccctgttcctggccgcccgtgagggcagctatgagactgccaaagtgttgctggaccactttgccaaccgggacatcacggatcacatggaccgattgccacgggacattgcacaggagcgcatgcaccacgatatcgtgcggcttttggatgaatacaacctggtgcgcagcccacagctgcatggcactgccttgggtggcacacccactctgtctcccacactctgctcgcccaacggctacctgggcaacctcaagtctgccacacagggcaagaaggcccgaaagcccagcaccaaagggctggcttgcagtagcaaggaagctaaggacctcaaggcccggaggaagaagtcccaggatggcaagggctgcctgttggacagctcaagcatgctgtcacccgtggactccctcgagtcaccccatggctacttgtcagatgtggcctcaccacccctccttccctccccgttccagcagtctccatccatgcctctcagccacctgccaggtatgcctgacacccacctgggcatcagccacttgaatgtggcagccaagcccgagatggcagctctggccggaggcagccggttggcctttgagccacccccaccacgcctctcccacctgcctgtagcctccagtgccagcacagtgctgagtaccaatggcacaggggctatgaatttcaccgtgggtgcaccggcaagcttgaatggccagtgtgagtggcttccccggctccagaatggcatggtgcccagccagtacaacccgctaaggccaggtgtgactccgggcacactaagcacacaggcagctggcctccagcatggcatgatgggcccgatacacagcagcctctccaccaataccttgtccccgattatctaccagggcctgcccaacacaaggctggccacacagccccacctggtgcagacccagcaggtgcagccacagaacttacaaatccagcctcagaacctgcagccaccatcgcagccacacctcagtgtgagctcagcagccaatgggcacctgggtcggagcttcctgagcggggagcccagccaggcagacgtacagccgctgggccccagcagtctgcctgtgcacaccattctgccccaggaaagccaggctctgccgacatcactgccatcctccatggtcccacccatgaccactacccagttcctgacccctcmykmksagcacagctactcatcctcacctgtggacaacacccccagccaccagytgcaggtgccagagcaccccttcctcaccccatcccytgagtcycstgaccagtggtccagctcctccmsgcattccaacatctctgattggtccgagggcatctctagcccgcccacgagcatgccgtcccagatcasccacattccakaggcatttaagtaaacagagatgtgggatgaaggaccccascttccgttcccaagctctgttgggagtcctttccagtgctccaggatgctggggcgaccaawggagccttttaaaaaaaaatgtttttatacaaaataagaggacaagartttccattttttttttagtatttatttatgtacttttaktttccacagaaacactgcctttttatttatatgtattgttttctatggcactaggggaamacatctgttycaagaaaataaactagttctgagagcctcrawwwwmmwrrwmarrrtgaagttccctgtgtgtttgtaaaatacgaacaaggattcatgatttgtaaatgccgtttatttattgattgcttctttccaaaatcgtcgagaaagaaagaaagaaaaaraaaraaaraaagaaaaaaaaaaaaaaaaa

SEQ ID NO: 3387 - DNA, 1739 bp, Rattus norvegicus
  misc_feature (1719)..(1719): n is a, c, g, or t
ctatgcacattccttgtactcactgtgctgctgctgaggtgtgaggcaaactccgcttggggactgagctagtggagaaaggatcttaaaagcgacctgatgggttctgggaaagtcttccttttctctccttccctcctgtggagtcaaactagaggagtgaggttgatattcttgttactaaccctgcatctgggaaactgcattgataaagcagatgatgaagatgatgaagatttaactatgaacaaaacatgggtcttggcacctaaaattcatgaaggagatatcacacagattctcaactctttacttcaaggctatgataacaaacttcgtccagatataggcgtgagacccacagtaattgaaactgatgtttatgtaaacagcattggacctgttgatcccataaacatggagtacacgatagacatcatttttgcccagacttggttcgatagccgtttaaagttcaacagcaccatgaaagtccttatgcttaacagcaacatggtgggaaaaatttggatccctgacacgttcttcaggaactcaaggaaatctgatgcgcactggataacaacgcccaatcgcctgctgcggatatggagtgatggaagggttctctacactctgagattaacaattaatgcagaatgctaccttcaactccataactttcctatggatgaacattcctgtccactggaattttcaagctatggataccctaaaaatgaaattgagtacaagtggaaaaagccctcagtggaagtggctgatcctaagtactggagattgtatcagtttgcctttgtagggttaagaaattcaaccgaaatctctcacacaatctccggagattatattatcatgactatcttttttgacctgagcagacggatgggctatttcacaattcagacctacattccgtgcattctaacagttgttctttcctgggtgtctttttggatcaacaaagatgctgtacctgctagaacatccctgggtatcactacggttttgactatgacaaccctcagtacaatcgctagaaaatctttacctaaggtttcttacgtgacagcaatggatctctttgtctctgtgtgtttcatttttgtgtttgcagcactcatggagtatggaaccttgcattattttactagtaacaataaaggaaaaaccaccagagacaggaagctgaaaagcaaaacttcggtatccccaggtctccatgctggatctactctgattcccatgaacaacatttctatgcctcaaggggaagatgattatggttaccagtgcttggagggcaaagactgtgctacctttttctgttgctttgaagactgcagaactgggtcctggagagaagggcgaatacacatacgcattgccaaaatcgactcctactccaggatctttttcccaacagcttttgccttgttcaatctggtttactgggttggatatctatacttataagttctgccaatagataaaaaaattcataaaaatctggcttagtccaatataatcacttcgatttcataacaggaagttagaatttaaaatgaaagtctaccagttaaaatctgaatcatttggtcatatgattaaggctttcataaataaataagaaagaattattcaggttaatttacctaactaaacatgaaattcatgtccaatatagcacatttaaancagtaaacttaataattttt

SEQ ID NO: 3388 - DNA, 2995 bp, Rattus norvegicus
tacgcggcgctcaggcatgcccgcgcgcagcccggcccgcagactgcagtcggccctggagggggcgccctcgttgagtgcgcgccctgccggccgcctagggctcctccccggcgccgggccaggttcgcccaggcggccgcgggctccggctgccggcccgctccccccgggaccgcggctcggctgcgggcgccccgcgtgcgccctccccgctgcgctactggactcaagttagaagccgagcccgggcgcgcacttgcgccaagcgtccgcggcgcgcggagacgtgcaccggcgagcggggagggcgaggcggcgccgacggccaaaacgcggacctgggggcgcactcgggaacagcaggaggaccgcgggtgtcggcgcccagccccgtaaagtaaagttgcagggacccggaagaacggcaacctgcgccccggctcgcttagccccagccagccctttgggaagcagacgtccgggccgcccctgcagcctgcagcccagtcgggcacccggaccgtggagccgcttgcatgcatcagcttggacactacatctccgtgggctggcggccgggacgctcccactgaacccaggccgagggcggggccgcgcgaggacccgggacctaccccccttcccccccaccgccgcgtcgccgcgctctctgggcacctccagctctgcacttacgcgcgcggcacgtgcggggagcccggcagccacgctctccggcgtgccacccgcccgccggccaccacggccgagggcctgcggggcttcgtggcccccagcggcgccgaggagcagcgcggcgatgcagacgcgactctggctgtgggcgcccrrctgcggaggctgcgccccggctcctggcaggaccgcgtagctctcgggaggaccatggcgtccccagcgctggccgcggcsctggcggcggcggcggctgagggccccaacgggagcgacgcgsgcgaatggggtagcggcgggggtgccaatgcctcggggaccgactgggsaccaccgccgggccagtactccgcaggtgctgtggcagggctggcagccgtggtgggtttcctcatcgttttcaccgtggtgggcamcgtgctcgtggtgatcgctgtgttgacaagccgagcgctgcgcgccccgcagaacctcttcctggtgtctctggcctcagctgacatcctggtggccacactggtcatgcccttttcgctggccaatgagctcatggcctactggtactttgggcaagtgtggtgtggtgtgtacctggcactggacgtgctcttctgcacctcgtccatcgtgcacctgtgtgccattagcctggaccgctactggtcggtgacgsaagcggtagagtacaacctgaagcgcacgccacgccgtgtcaaggccaccatcgtggccgtgtggctcatctcggctgtcatctccttcccgcctctcgtctctttctaccgccggcccgacggcgccgcctacccgcagtgcggcctcaacgatgagacctggtacatcttgtcctcctgcataggctccttcttcgcgccctgcctcatcatgggcctggtctatgcgcgcatctaccgcgtggccaagctgcgcacgcgtacgctcassgagaaacgcggccccgcssgccccgacggcgcgtccccgaccacagagaatgggttgggcaaggcggcgggggagaatgggcattgcgcgcccccgcgcactgaagtggagccggatgagagcagcgcggcagagaggcggaggcgccggggagcsstgcgcagaggaggacggcggcgagagggtgccgagggggacacgggcagtgcggacggaccgggacctgggttggcggccgaacagggtgctcggacggcgtctcggtctccaggccccggagggcgcctgtcgcgggccagctcgcgctccgtcgagttcttcctgtcgcgtcggcgccgsgcgcgcagcagtgtgtgccgccgcaaggtggcccaggcgcgcgagaaacgcttcaccttcgtgttggcggtggtcatgggcgtgttcgtactgtgctggttccccttcttcttcagctacagcctgtatggcatctgccgtgaggcctgccagctgccagaaccgctctttaagtttttcttctggatcggctactgcaacagttcgctcaacccggtcatctatactgtcttcaatcaggacttcaggcgctctttcaagcacatcctcttccgtaggaggagaaggggcttcaggcagtgaccctctggctgcctggacttggccccactgacctcctggacagctccgaactcgggtasatagggggaccaaccagtgtggcttctccagagttccagggcggacttcagggtacagtgtggaatgtggccagcaggaactgggagagagacaactgggcctctgggagtggggaggagaaagggagaccctttgccttcccatctcagcgaggggctgtggctagatccagttcctaagaaggcttctgtggagtgtggctgtgaacttagggttttagagctcagacaactgcaccagaaaggrgacccycccccccaactctcggtcttccctgtgagcaagggctgacttcctatgacctgaaaaaggtatctgtctgggggaggagagatagcacaggcaatctctggttactgagagtgtttgccaaatacaatgacagccaaacaaaaccaaactttttttttaaaataaacctttgtaattaarwrwwarrwrmawwrrtcagtccttaagccagggtgtgagagaactctccagatcttgccctgagagccctgcacaggcacacactagagtatagagtgctctgaaaactggagttctaactgcctttttttcatgaggaagagaggggtctcctttaaacggttaaagggtttgggtatatgcaaagtatatactccaaattctttttcctttcagg

SEQ ID NO: 3389 - DNA, 2312 bp, Rattus norvegicus
gccgcgtcgcagctccgagactggccccggccgcgacgccgccgcgatgggcaacgccgccgccgccaagaagggcagcgagcaggagagcgtgaaagagttcctagccaaagccaaggaagatttcctgaaaaaatgggaagacccctctcagaatacagcccagttggatcattttgatagaatcaagacccttggcaccggctcctttgggcgagtgatgctcgtgaagcacaaggaaagtgggaaccactatgccatgaagatcttggacaagcagaaggtggtgaagctgaagcagatcgagcacactctgaatgagaagcgcatcctgcaggctgtcaacttcccgttcctggtcaaacttgaattctccttcaaggacaactcaaacttgtacatggtcatggagtacgtgcctggtggggagatgttctcccacttacggcggattgggaggttcagtgagccccacgcccgtttctacgcggcgcagatcgtcttgacttttgagtatctgcactccctggacctcatctaccgggacctgaagcccgagaaccttctcatcgaccagcagggctatattcaggtgacagacttcggttttgccaagcgtgtgaaaggccgaacttggaccttgtgtgggacccccgagtacttggcccccgagattatcytgagcaaaggctacaacaaagctgtggactggtgggctctcggggtcctcatctacgagatggctgctggttacccgcccttcttcgctgaccagcctatccagatctatgagaaaatcgtctctgggaaggtgcggttcccatcccacttcagctctgacttgaaggacctgcttcggaaccttctgcaggtggatctcascaagcgctttgggaatctcaagaacggggtcaatgacatcaagaaccacaagtggtttgccacaactgactggatcgccatctatcagagaaaggtggaagctcccttcataccaaagtttaaaggccctggggacacgagtaactttgacgactatgaggaggaagagatccgggtctccatcaatgagaaatgtggcaaggagtttactgagttttaggggtgtgcttgtgccccatgggttttcttttcttttttttttttctttttctttctatttttttttctggttgggggtgggggggttggatcgaacagccagagggccctagagttccatgcatctaatttaacatccactccacacccccagggttaaggagagcaggaaagtcagatactggggaaggggcaacatcagctgctccccctctcccttcacctccaccctkccctkcctgttttcaatgaatttyttagctccagtcatactcaatcttgctggtgtatccaggggcgagtagggaaagagggscccaaattcagcctccacccctaccccagcamtkgatactaaggatgaacagtaaagccaaccttyccttccatgcagccctacctggaaagggagattttatgacctatacagagggcwsswkgccarwggkkttttttttttttttttcctcattwaaattaagttccaccagtgcctcccmccctccaaattgtcccacccctytmaaccccacccccaytccytaaatccattctgatgagacccgggtwgccaactgactytgtcaaggaaggaactgggcttggaacctcgccmtgagctgctagcctmccggcccccyttyycagtggtctcatsccaattgtkctgwgcaccagcccccvtraraagcmcctccscatcctgggcgctcastthtagctwarctgtcasctgwccatcacctytwgccgkgtgkccycaytcactgmammmvcamgtytgattgygctwywtctmtcaataraaaggtggggabctgctggrgatatgaccccgkdwatccctgtgwdkakccctctcgtaacttctcccaaaraggaggrgctctyakgcctgggtggggscccckgrwgggcgaragggvccrtwcaacctgtgtghtycraaggatgagactyyctyttgaacagtgtgmtrkwgkaaacrtwtktgaaaamtvkkrccaataaagtwttgtkktdrahwdrrraaaaammwwawrrrattactaaaattaatcttttttgtgcgccaacaagtcctttttttctttatggtggggggggtttaattttaagtagtggcactctgggtctctgctttttttacaaaccgtttgttgacttgtgtgaaaagacccctgagggttatctcccccctctaaataccg

SEQ ID NO: 3390 - DNA, 2157 bp, Rattus norvegicus
cccgcagtgcccccagagagctctaatggtaccaagtaacagaccggccttcctgtagcacggggacgccagatctcagaagatgtcggctatacaggcctcctggccatccggtacagaatgtattgccaagtacaacttccatggcactgccgagcaagaccttcccttctgcaaaggagatgtgctcaccattgtggctgtcaccaaggaccccaactggtacaaagccaaaaacaaagtgggccgtgagggcatcatcccagccaactatgtccagaagcgtgagggtgtgaaggcaggcaccaagctcagccttatgccctggttccacggcaagatcacacgggagcaggcggagcggcttctctacccaccagagacaggcctgttcctggtgcgggaaagcaccaactaccctggggactacacactgtgtgtgagctgtgaaggcaaggtggagcactaccgcatcatgtatcacgcgagcaagctgagcattgatgaggaggtgtacttcgagaacctcatgcagctggtggagcactacaccacagatgccgacggactctgcactcgcctcatcaaaccaaaggtcatggagggcacagtggcggcccaagatgaattctaccgcagtggctgggccctgaacatgaaggaactgaagctgctacagacaataggaaagggggagtttggagatgtgatgctgggggattaccgaggcaacaaagttgcagtcaagtgcattaagaatgatgctacagcccaggccttcctggctgaagcctctgtcatgacgcagcttcggcacagcaacctagtccagctactgggtgtgattgtggaggagaagggtgggctctacatcgtcacagagtacatggccaaggggagtttggtggactatcttcgatcacgtggtcgttcggtgctaggcggagactgtctcctcaaattctcactagacgtctgtgaagccatggagtacctggagggtaacaattttgtgcaccgggacttggctgcccggaatgtgctggtgtctgaggacaacgtggccaaagtcagtgactttggcctcactaaggaagcttccagcactcaggacacaggcaaactgccagtcaagtggacagctcctgaagccttgagagagaagaaattttccaccaagtctgatgtgtggagtttcggaatccttctctgggaaatctattccttcgggcgagtgccttacccaagaattcccctgaaggacgtcgtccctcgggtggaaaagggctataagatggacgctccggatggctgcccacccgcagtctatgatgttatgaagaactgctggcacctggatgctgccacgcggcccacctttctgcagcttcgagagcagctcgagcacatcagaacccatgagctgcacctgtgacctctgcctccacctaggccatggccttgcakggatggggcctagaagatacagatttggtgccstgctgcttgctgggcctgaacttgaactgagccccagcgggctggtaggcttyttgcctctgacctgcctgtcccttytggccccccagagaccccacbtaggcctggcatcttctctcatggacccmcctatagggctyabgrsgcscactgaasgggctgagaagagaggaggccgaggagcgvgagscagtgctcctgtggtcggcyttytctyggccccatcattcgccttcttagagtkwtattcctttccttttttgrgmwykwkbbccgtrygwywrtttbhtwttwttttkcaacataaggagaaagaaagtacccagcaaatgggcattytacaagaagtacgaatcttatttttcctgtcctgcccctgggggtggggaggaatcarcctctctstakggacccatcacbccagcstgtcycccatcstgtgttccatgtcyagtgttgcctcggtckcctatgtttgcgcttgaccatgtgcgctgtttgcatgtgcccarrgcaggcatctgtcasgggcttggatttcatgtgctgtggscgctcacccacactgccttgtgagatggaatcgtaataaaccactccatgaggacaccgcyvmmmarmmwmrrmrmwwmctccgccaaaaaaaaaaaaaaaaaa

SEQ ID NO: 3391 - DNA, 1494 bp, Rattus norvegicus
ttccgctcgcgctcccccgccgccatgtcggctaccatcgagcgggagttcgaggaactggatgctcagtgtcgctggcagccgttatacttggaaattcgaaatgaatcccatgactatcctcatagagtggccaagtttccagaaaacagaaatcgaaacagatacagagatgtaagcccatatgatcacagtcgtgttaaactgcagagtgctgaaaatgattatattaatgccagcttagttgacatagaagaggcacaaagaagttacatcttaacacagggcccacttcctaacacgtgctgccatttctggctcatggtgtggcagcaaaagaccagagcagttgtcatgctaaaccgaactgtagagaaagaatcggttaaatgtgcacagtactggccaacggatgaccgagagatggtgtttaaggaaacaggattcagcgtgaagctcttatctgaagatgtgaaatcatattatacagtacatctactacagttagaaaatatcaatagtggtgaaaccagaaccatatctcactttcattataccacctggccagattttggcgttccggagtcaccagcttcattcctaaatttcttgtttaaagttagagaatctggttctttgaaccctgaccatgggcctgcagtgatccattgcagtgcaggcatcgggcgttctggcaccttctctcttgtagatacctgtctcgttctgatggagaaaggagaggatgttaatgtgaaacaaatattactgagtatgagaaagtatcgaatgggactcattcagactccggaccagctcagattctcctacatggccataatagaaggagcaaagtatacaaaaggagattcaaatatacagaacagaacaatgactgagaagtacaacgggaagagaatagggtcagaagatgaaaagttaacaggactttcttytaaggttccagatactgtggaagagagcagtgagagtattctccggaaacgcattcgagaggatagaaaggctacaaccgctcagaaggtgcagcagatgagacagaggctaaatgraactgaacggaaaagraaaaggccaagattgacagacacctaaatgttcatgacttgagactattctgcagctataaattttgaacctttgatgtgcaaagcaagacctgaagcccactccggaaactaaagtgaggcttgctaaccctgtagattgcctcacaagttgtctgtttacaaagtaagctttacatccaggggatgaagaacgccaccagcagaagacttgcaaaccctttaatttgaygtattgttttttaacatgtgtatgaattgtagaaagatgtaaagaaaataaaattaggagagactactttgtattgtactgccattcctaatgtatttttatactttttggcagcattaaatatttttattaawtrgamaaaaaaaaaaaaaaaaaaaaaaaaaaaaaaaaaaa

SEQ ID NO: 3392 - DNA, 1764 bp, Rattus norvegicus
gaattcgacatcacagcaactagcaatctgtgggtggtgacaccgcagcacaacatgggactccagctgagtgtggtgactcgggacggactccacatcaacccccgtgcggcgggcctggtgggcagagacggcccttacgacaagcagcccttcatggtggccttcttcaaggtgagcgaggtccacgtgcgcaccaccaggtcagcctccagtcggcgtcgacagcagagtcgcaatcggtccacccagtcgcaggacgtgtcccggggctccagtgcttcagactacaacagcagtgagttaaaaacagcttgcaagaagcatgagctttacgtgagcttccaggacctgggatggcagracwggatcatcgcwcccaaaggctacgctgccaactattgtgacggagagtgttccttccctctcaatgcacacatgaatgccaccaaccacgccattgtacagacyttggtccaccttatgaatcccgagtacgtccccaaaccatgctgcgcaccaaccaaactgaatgccatctcggttctttacttcgacgacaactccaatgtcatcttgaaaaaatacaggaacatggttgtgagagcttgtggatgtcattgagtggaagccagttgcaggggctgtgattctgcctcggattcctaacatctgccttaaaacacgggaagcagcacagtgcagcgggassatgacactcaaagcatctcctgctggtgccttagcccaaggaggattttacgaggaccttgtcgatggctttcccagttgagcagttgctggtctgtaggaagctgtaatgcttgtagcayaggcctggaaactacagaaacatagtgttctcctcccccagtcccacccagactagtcttagcttttagatctagctgtttgtggtgtaagtaggagataaacttgaaggaatattaaatatccctggttgaaaramarawmwarwrrttctacagcacccatcccagggagattttgcagatagccgaatggaggagaggagaacactctattagattccattcccagcaaagggcagctcccacagaacctgcagcctggccatcacagggctttgtggaggtgccttctgtctactgttagttacccgttttatgttgactcttggtggtgtgaaaatgtactaatttcggtcaaaacaaactatagcattcccacgccatacwcmksccttactcacagaattccttactagaaccaaagtagatggactgtactttgtggtagagccctgaagcatctgcagtagccttcatttaaaccacggaacagcagaatgtgattctgcgtctctcgggcagactggctggacatgtacgttaccatcrggaacactggccccaacacatcagstytctctctcstaactmtgctttttcccttttccctacattagcattccacggttcagggytagagtstaaagcagaagtccacaaacagaagggccctgactctaasaatgggtttgttgaggtgagcatgctgtttgtaaaccaaaaccaccatttcctcttgtrgaaastaagactcagactgaatcttmgaatattttttaaatgtctttttcacaatcatgtactgggaaaccaatttcmtactaaactgattaaataatgcatttacaatctgtaaaamaaramaaaaaaaaaaaacattgcggccgcaagcttattccctttagtgagggttaattttagcttggcactg

SEQ ID NO: 3393 - DNA, 2272 bp, Rattus norvegicus
ggatcccttgcaaatgtctgaaagaaccttgaaaactaatctttatgaactctccaactgtttgttgtagtctacctggactagggagataggtacacaaaatgggtgaatctttaaaaaaaaataaagatgagagataactagtaatagatccaaaggaaagatgtgatgagtggtttaaaacagcttttggggccagacaggttaagtgatatcgtccattattccagatgattctgtcctaaacaccgtgcttcctctctcgagtgctgacataaaataacgttacctcagctgcttttacacataggaaaaaaatgagactttggaatctgtttatagatgatgtaagatctaagcttcctgagtagtgcccatctgtgcagacccgggagtgaaggagtgggctgctgtgaaagcctcacctttggcagccaagtccctcctggtggaaaagataaacaagacccaagccaatggcggccaggacagctttctccatactcctgacatactcacatcacaactcctgacattccttactcaacaaacattcccccccccgggggggggaatcccacccgctacagcatgctggcactagcaacagctcaagtcagaacccatgtctcttaggagccgagattgatctctcctgtagtcttcttgcaagacaggcttccacaatctatttttgtttgtttctctctttctctctcctctctctctctctctctctctctctctctctctctctctctctctctctctgtgtgtgtgtgtgtgtgtgtgtgtgtgtgtgtgtgtgtgtgtgtgtgtgtgtgtgtgtttgaggttgtctatttgtttgaagggggttgttttgtttggttttctgctccggcagtatttgcttttgtggtgtctcactgatctaaagaagaaagtttaagatctccagaaagtttcaaatattggtttgcataatcattgactgcctactgagcctggcgctattagacagcaagaaaatagggacaggtgrgtgaaaagttatgactttcagatagttgggcagaggtcatctctgaggtatgcctcaagaggagagaaggaagggagcaggttcaccgaatccgaggtgtccaacagctcacgaaatccaagtccgtctgccctttcaaacaacccacccacgtgccaccgaagtgattcatgcggggaaagcagtttccccttcgtgccctccccagagtttctaactgattggtgggggagcctccgrcgcccactcgcacccgccacctcgggggccgcgtgctgtggggacgtcccctcccgccagcgtcggacrcgggctggcgtagggctgcgtcagctgcagcccgtggcattggcgcgcgcgcctcttcggtttggggctaattatagggtggctgtgcggccgccagagaggcaggcgcacagagccccgcagcccagcgacgctgccgggcgcctcgtagagctccccgacgcggccacctcacacttgccttctttatttctcttgcagagtggcatctgcgatccgctcttccagctacctgcgccatctgaacaacggcagcgtgagtgactttgcccaagtcgccgtagccttgcggaccgtctcctgttccctcgttgcatgcgatcgtccggctttctcggggttcctcattgtcctgggtgtccgggtcctattccccaagcgactggtcctgctcccgagccgcgaactccagtgttcgctccagaatcttgccctaagcaaccgacgccagggaggacaggatgccatgccatagggaagacaggactccccaaaggagaacaggataccatcagggagacaggactcccccgtggaagataggatacctccaggaagacagaatgccccccaggcagccctgggacagcgggaaacactagggaccaagctatccctggttcactcgggattttgttgggttgtgggcggggctcaggaaagattgtccctgctggtcctgctccacgaccacccacccggcaaggttccctcctagagaaccttgtcagagacagaacgggtccccacaggcgcattcttctttccaacagcccatggcgcagttcctgagactttgcatctggctcgtagcgcttgggtcctgcctcctggctacagtgcaggcagactgcagccaggactgcgctaaatgcagctaccgcctggtacgtcccggcgacatcaacttcctggtaaggttgaatttgtgatgaggga

SEQ ID NO: 3394 - DNA, 1119 bp, Rattus norvegicus
aggatccacattgagaagatcataggctcgggggagtcaggagaagtatgctatgggaggctgcaggtgccaggacagcgggatgtgcccgtggccatcaaggctctcaaagctggctacacggagaggcagcgccaagacttcttgagagaggcagccatcatgggacaattcgatcatcctaacatcatccgcctggagggtgtggtcacccgaggccgcctggcaatgattgtgactgagtacatggaaaatggctctctggatgccttcctcaggacccacgatggtcagttcaccatcctgcagctagtgggcatgctcaaaggggtgggcgctggcatgcgctacctctcggacctgggctacattcaccgtgacctggccgcccgcaacatcctggtagatggccgtcttgtgtgcaaggtgtcagactttgggctctcaagggctctggaggacgaccctgaggccgcctacaccactgcgggagggaagatccctatccgatggacagcaccagaggccattgccttccgcactttctcctcagccagtgatgtgtggagctttggtgtggtcatgtgggaggtgctggcctatggtgaacggccctactggaacatgaccaatcaggatgtcatcagctctgtggaagagggttataggcttccagcgcccatgggctgcccacgtgccctgcaccaactcatgctagactgctggcacaaggaccgtgcccagcggcctcgcttctctcacgtcgtgagcgttctggaggccctggtccacagccccgagagccttagggccacagctacagtcagcaggtgcccagcccctgcctttgccaggagctgctttgacctccgagcaggcggaaatgggaacggggacctcactgtgggagattggctggattccatccgaatgggccggtaccgggaccactttgcagcgggcgggtactcctcccttggcatggtgcttcacatgaacgcccaggatgttcgtgccctcggcatcaccctcatgggccaccagaagaaaatccttggaagcatccagacaatgaggtcccagctgagctgcactcaggggccacgccggcacctctga

SEQ ID NO: 3395 - DNA, 4321 bp, Rattus norvegicus
gtaacctcaggtcaggtgactggaaagcaggggaggaagactctgcctcctgccaaggtgctggtggctttgcattggaaaagcgggaaacaatatgaatcactttgagtcagccgagaccaatttcctttccagaattgggaaagcgagctctgttctatccggccgcaaaagcaggagtgcgactgtggataaccctgcctgctttaggtgggctttagggagaaagtggggcgcttgggaagctgtgcgtgcctctgctctgtgcagggtgggcggtgcgcaagaaggaaaggcccgagggacctgtgggaaacagtctaaaggaaactgagctatgccctgtaggcattgcacagtctcctgaagaactaaggccactagtatcctttattgaggacacacacctgtgtagaccttacatgcgttcatttattcgattccctaacaagtcaacccgaagcatcgaggaatctggtaaggaaattctgcaaaccgcattgggctttcttgcctaatttaagacccaaggtaagaagattatttcctctccccctcccctctttttggtatagcctagtaagtttcaagtcctctcttccttcagaagctcaaaaaggcaactttcatccaagggaagtctggctcaggctgcgaaaacctgtctcccaggatattggaaggcggacactctccacttgcttggcaagcgcgggcggccttccgcgctgtcctcagggaccttgcccgccctgcatggcgattgtgcaagcgcagctttgggctcctgcaaggccagctgcagcctgcaggaggagggcgaggaggcgtgctcgcagcgcacccgctgaaccctgggctcgacccgcctttctcaggttatctccggggtggagtccaccggtgcgtctgccgggccagcagcgtgtcggtcaccgaggccccggcgccctcactcacctcgctgactccatcctcttcccacacccgccccccgcgtccctcccagccggtccccctccgccctgctcagcgtgctcattggccactccagcatgccctgcttccataaatacgaggtccctatgcctggaatcttggggaggtacaacgaggtacatcaaacctggcggcatcccttcgaccctccttgattcccccgtggctttaggccttagaagtctaatttgcagactctccccatagctgccaaccccggcctctcttccccagcccctgtggccagctcagggcagaaaccagcgccctaagcaccttgcagcatcccgggcatctgcttcttcgaagtccctcctgttgtaccccatttcgccacacccgggggttctgattgcctttcttccccaaaccgccaaaacttcagaacccagcaactcttcctaaacaccttacccgttccagcccctgctgagtcccacgggtcgcctgctactatgagctgccccattgacaaacggcgcaccctgatcgcttttctgcgccgactgcgcgacctgggacagcccccaaggtcggtgacatccaaggcgagcgcttcccgcgctccaaaagaggtgcccctctgcccgctgatgacagacggtgagactcgaaacgtcacctccttgcctgggcccaccaactggccactgctagggagtctactggagattttttggaaaggtggcctgaagaaacagcacgacacgcwggyaragtasywyrwkwmstatggccagattttccggatgaagctgggctccttcgactccgtgcatctgggctcgccgagcctgctggaagctctgtaccgcacagagagcgcgcatccccagcgactggagatcaaaccttggaaagcctatcgcgaccacaggaacgaagcctacgssytkmtswkcmkgkragkmcwkswgtggyrragggtccgcagcgccttccagaagaaactcatgaagcccgtggagatcatgaagctggacmakwrmwtcmwtkaggtcttggcksactkkskagagcgcatggatgagctgtgcgatgagcgaggccgcatcccagacctgtacagtgagctgaacaaktkktycwttgamagkmatykgccttgtgttatatgagaagagatttgggctccttcaaaaggagacagaagaagaagcgctgaccttcattmckgyswtyrwwacgrtraksagsmcsytkgggaagatgatggtgacccccgtggagttgcacaagcgcctcaacaccaaagtgtggcaggcacatacgctggcttgggacaccattttcmwmtcagtsaaassmtscmtcgacaaccgcctacagagatattcccagcagcccggggcagatttcctctgtgatatttatcagcaagatcacctttccaagaaggaactgtacgccgctgtcacggagctgcagctcgytgcmktksagacgrymrsgrwsrgctkgatgtggattctctacaatctatcccggaatcctcaagcgcaacggagactccttcaggaagttcagagcgtgctgcctgacaatcagacgccacgggcggaagacctgaggaatatgccctatttaaaggcctgtctgrawkwwtyywtsaggcttacsycamgkgygccatttacaactcggacccttgacaaaccaacggttctgggtgaatwckststryycwwaggaryartgtwrrcyctcaatacccaagtgctgggttctagtgaagacaattttgaagattctcataagttcagacccgaacgctggcttcaaaaggagaaaaagatcaaccccttcgctcatctcccattcggcatcgggaagagaatgtgcatcgggcgccggctggctgagttacagctccacctsrmtststgytrgrtaatccwmamatacgacattgtggccacagacaatgaacctgtggagatgctgcaccttggcatcctggtacccagccgggagctgccaattgcgttccgtccwckrwwkgatkytsaggtwkmktytsrsmccaatcaagaccagcaatcttcccctttctgcaagaaagctgcttatggcttcagtattcctaagacggcgaacttcaaggaccagagcatgggacaacctgcgaaacacggcgcacacagccttctgcagaatgattctgacaatgatgtttactaagcccattactcagggaagcacatggggggcggaaatgccaggcaccgcccactacactttaccacgtgtttacattagccaatcagagcccctaagagcctgcgatcgctccatctttgtgacgtcaacggaggctgctggtcagccactttagtaaaggttattaagtgtttctgatgcaaaacccaaagcggcagcgttaattcccgtttacatttcatgaagaaagacctactatgctttaattgtctcagtgggactgacaaaacgtttattatactcggtttcgttcaatatttgaggaaacgcctgctgtaaaccgagctaaacattaggctctcgtaaagctatttttcctgcttacaaggggaaacattgttggaaattagagagtgtctattttaagaagttctacagtgaagccagctccttgcttatgaatgcctcgttggtgcggtcagtggactctaatctcttatttcattggtacctttctctgtggtttcagggtgtggagatagacgaatcaaaagtttctaagttgtgcgtgtgtcggcgcatgcatgggaatggctgtgggcctgagggtactttgcttcagtcatgtttttatataaagacatgaggtacccaatttagtatggaacttgtcctgaaatgtaatcatagggctttctgtgccttaacttcatctattcaaatcgaggactgtaatgtatgcgctctacccatgctgcctgtaatgtacagtgggacttgaaccccttggaaaagcacaatttcgtaagcgcaaaacagttatgcactactgacaaaattttaaaatgtttacatataacgtgcatttttttcaaccagtactgtttttctatagaggtttactgattatttctatatatttgataaagatttcccttttaggttatggttttagaatagtctgaaatatatgtacatttgaatgaatatgtgtgtgtggatgacaggtatatacttcgcctttcttataaaattatatttagagttataaatccagaaactaaagatgtagttttgtggtaaagagttttggcctggtctatgttggctcctgggttcaatcctcagcactactaaacaataaaaaataaaataaagaatt

SEQ ID NO: 3396 - DNA, 1193 bp, Rattus norvegicus
  misc_feature (581)..(581): n is a, c, g, or t
  misc_feature (585)..(585): n is a, c, g, or t
gactcattgtgggtgcccatcatgatgtcctacagcgagagattggggggaccggctgtctccccacttccagtccgtgggagacacatggtgcatggggcagcctttgcttatgtccccagcccacaagtcctgcacaggattcctgggacaaccacctatgccatctccagtctgagcccggtagccctcacagagcacagctgtccctatggggaggtcctggaatgtcatgacccgctccctgccaagctggcccaggaagaggagcaaaagccagagcccaggctgtcccagaagcttgcccaggttggcacaaagctcctgaaggtgccgttgatgctaggcttcctttacctctttgtctgctccctggacgtgctcagctctgccttccaactggccggagggaaagtggctggggacatcttcaaggacaatgccatcctgtccaacccagtggcagggctggtggtgggaatcctggtgacagttctggtgcagascyccasyammksgayawscwtcryygyyagswtkkttyyytytkkyttkttkkwkktttttttttttttktwacntbanccgcatttawtwatgctraatttattcccgtgscatgagcttwtgtttcttcaatttcttckgggatatctttttcttctgtgsaacctcctcttctggctttggaacaatctgttccttctcagtgaggatcatytcgatgtggcagggggagctcatgtatgggttaatccggscgtgagctctgtadgtycgtctgcgcatcttavgagccttgttcacctggatgtgttcaatgwmcasagagtctamatccwaacccyywmgtkymgmattmytctctgcatttttaagcatgtgcagcaaaaattcagcactcttttttgkscaccgtcmctgtgtccagccccactgtttggmctgkgcgcacctaccractccaccrttataccgccggaatggcacacactgcttctttaaagtgacatccttcagatacttggtggctttgcggatatgcatacccttgatggcctgggcagtttcccgggtgttcttaaagtgaacacgaaggtttgagcctcttgacttgcatgatttcgtggggttttmtgggtcaagggagtagcgaaccakswtcmchsstyrysyctgrmykckwrcmgrat

SEQ ID NO: 3397 - DNA, 7748 bp, Rattus norvegicus
ggacaaaagatcctccatcaccgaagtgacgtcttagaaactgtagttctgatcaacccttcggatgaagcagtcagcaccgaggtgcgtttgatgatcactgacgccgcccgccataaactgctggtgctcaccggacagtgctttgagaacactggagagctcatcctccagtcaggctctttctccttccagaacttcatagagattttcaccgaccaagagattggggagctcctaagcaccacccatcctgccaacaaagccagcctcaccctcttctgccctgaggaaggagactggaagaactccaaccttgacagacacaatctccaagacttcatcaacatcaagctcaactcagcttctatcttgccagaaatggagggactttctgagttcaccgagtacctctcggagtctgtcgaagtcccctccccctttgacatcctggagcccccgacctcgggcggatttctgaagctctccaagccttgttgttacatttttccggggggccgcggggactctgccctgttcgcagtgaacggattcaacatgctcattaacggaggatcagaaagaaagtcctgcttctggaagctcattcggcacttggaccgggtggactccatcctgctcacccacattggggatgacaacttgcccgggatcaacagcatgttgcaacgcaagattgcagagctggaagaggagtcccagggytccaccagcaacagtgactggatgaaaaacctcatctcccctgacttgggggttgtgyttctywatgtrccygaaaatctgaaaaayccagaacccaacatcwrratgaasagaagywyagaaraagcrtgcttcaccctccagtacctaaacaaactgtscatgaaaccagagcctttatttagaagtgtaggcaatgccattgagcctgtcatsctgttccaaaaaatgggagtgggtaaactgragatgtaygtgcttaacccakkcaaaagcarcaaggaaatgcagtatttcatgcagcagtggactggaaccaacaragacaaggmtgaacttatcctgcccaatggtcaagaagtagacatcccgatttsctacctasyttycgtctmgtctttgattgtgtggsacccarccaaccctgctgagaaaatcatycgggytytgtttcctrgaaacagcayccagtacaacatyctagaakggctggaaaaactcaaacatstwgacttcctaaagcagccactgrccacccaaaaagatctcactggccaggtgtccacccccccagtgaaacaggtcaagttgaaacagcgggctgacagccgagagagtctgaagccagccacaaaaccactttccagtaaatcagtgaggaaggagtccaaagaggaggcccctgaagccacaaaagccagccaagtgraaaaaacacccaaagttgaaagcaaagagaaagtgatagtgaaaaaagacaagccaggaaaggtagaaagtaagccatcggtgacggaaaaggaggtgcccagcaaagaggagcagtcgcccgtcaaagctgaggtggctgagaaggcggccacggagagcaaacccaaagtcaccaaagacaaagtggtraaaaaggaaataaagacaaaacccgaagaaaagaaagaggagaagcccaagaaggaagtggctaaaaaggaagacaaaactcccctcaagaaagacgagaagcccaaaaaggaagaggcgaagaaggagatcaagaaagaaatcaaaaarraararaaaaargagctgaagaaagaggtgaagaaggaaacgcccctgaaggacgccaagaaggaggtgaaraaaramraraaraaagaagttaaaaaggaagagaaggaacccaaaaaggagattaagaagatctccaaggacataaagaaatccactcctctgtcagacacaaagaaaccggctgcattgaaaccaaaagtagcaaagaaagaagagcccaccaagaaggagcctattgctgctgggaaactcaaggacaaggggaaggtcaaagtcattaaaaaggaaggcaagaccacagaggccgctgccacagctgttggcactgctgccgtggctgcagcagccggagtagcggccagcggtcctgccaaagaacttgaagctgagcggtccctcatgtcgtcccctgaggatctaaccaaggactttgaggagctaaaggctgaggagatcgatgtagcgaaggacatcaagcctcagctggagctcattgaagatgaagagaaactgaaggaaaccgagccgggagaagcctacgtcattcagaaagagacggaagtcagcaaaggttctgctgagtcacctgatgaagggatcaccaccactgagggggaaggggagtgcgagcaaacccccgaggagctggagccagttgagaagcagggcgtggatgacatcgagaagttcgaggatgaaggcgctggttttgaagaatcctcagaggccggagactacgaagagaaggcagaaactgaggaggccgaggagccggaagaagacggggaagacaatgtgagcgggagcgcctcgaagcacagccccacagaagacgaagaaatcgctaaggctgaggcggacgtacacatcaaggagaagagggagtctgtggccagcggcgatgaccgggccgaagaagacatggatgaagcgcttgagaaaggagaagctgaacagtctgaggaggagggtgaggaggaggaggacaaagcagaggacgccagagaggaagaccatgagcccgacaaaactgaggctgaagattatgtgatggctgtggttgacaaggccgcggaggccggagtcaccgaggatcagtatgatttcctggggacaccggccaagcaacctggagtccagtctcctagccgagaacccgcgtcttcaattcatgatgagaccctacccggaggctccgagagcgaggccactgcttcagatgaggagaatcgagaagaccagcctgaggaattcactgctacctccggatatactcagtccaccatcgagatatctagtgagccgactccaatggatgagatgtccactcctcgagatgtgatgaccgacgagaccaacaatgaggagacagagtccccgtctcaggagttcgtgaacattaccaaatacgagtcttcgctgtactctcaggagtactccaaacctgtggttgcatcattcaatggattgtcagacgggtcaaagacagacgccactgacggtagggattacaacgcttccgcctccaccatatcaccaccttcgtccatggaagaagacaaattcagcaagtctgctcttcgtgacgcttaccgcccagaagagacggacgtgaaaaccggtgccgagttggacatcaaagatgtttcggatgagagacttagcccagccaagagtccatccctgagtccttctccaccatcacccatagagaagactcccctgggtgaacgtagcgtgaatttctctctgacacccaacgagatcaaagcctctgcagagggagaggcaacagcagtagtgtcccccggagtgacccaagcagtagttgaagaacactgtgccagtcctgaggagaagaccttggaggtagtgtcaccgtctcagtctgtgacaggcagtgcgggccacacaccttactaccaatctcccaccgacgaaaagtccagtcacctacctacagaagtcactgagaacgcgcaggcagtcccggtgagctttgaattcactgaggccaaagatgagaacgagaggtcgtccatcagccccatggatgaacctgtgcctgactcagagtctcctatcgagaaagttctgtctccgttacgcagccctccccttattggatccgagtccgcatatgaagacttcctgagtgcggatgacaaggctcttggcagacgttcagaaagcccctttgaagggaagaatggaaagcaaggcttctcagacaaagaaagcccagtttctgacctgacttccgatctttaccaagacaagcaggaagagaaaagsgcgggcttcataccgataaaggaagactttagtccagaaaagaaagccagcgatgctgaaatcatgagttctcaatcagctctggctttggatgaaaggaaactgggaggagatggatctccaacgcaagtagatgtcagtcagtttggctctttcaaagaagacaccaagatgtccatttcggaaggcaccgtttcagacaagtccgccacgcctgtggatgagggcgcsgaagacacctattcacacatggaaggtgtgrmctmrgtgtcaacsgcctctgtggctaccagctcgtttccagagccaaccacagatgacgtgtctccttctctccacgctgaagtgggctctccacattccacagaggtggatgactccctgtcggtgtcggtggtgcaaacaccaactactttccaggaaacagaaatgtctccgtctaaagaagagtgcccaagaccaatgtcgatttctcctcctgacttctcccctaagacagccaaatccaggacaccagttcaagatcaccgatccgaacagtcttcaatgtctattgaattcggtcaggaatcccccgagcattctcttgctatggactttagtcggcagtctccagaccaccctactgtgggtgctggtatgcttcacatcaccgaaaatgggccaactgaggtggactacagtccctccgatatccaggactctagtttgtcacataagattcckcckacagaagagccatcctacacccaggataatgatctgtccgagctcatctctgtgtctcaggtggaggcttccccatccacctcttctgctcacactccttctcagatagcctctcctcttcaggaagacactctctctgatgtcgttcctcccagagatatgtccttatatgcctcgcttgcgtctgagaaagtgcagagcctggaaggagagaaactctctccaaaatccgatatttctccgctcacccctcgagagtcctcacctacatattcacctggcttttcagattctacctctggagctaaagagagtacagcggcttaccaaacctcctcttccccaccaatagatgcagcagccgcagagccctacggcttccgctcctcaatgttatttgatacaatgcagcatcacctggccttgagtagagatttgaccacatctagtgtggagaaggacaatggagggaagacacccggtgactttaactatgcctatcaaaagcccgagagcaccaccgaatccccagatgaagaagattatgactatgaatctcacgagaaaaccatccaggcccacgatgtgggtggttactactatgagaagacagagagaaccataaaatccccatgtgacagtggatactcctatgagaccattgagaagaccaccaagaccccagaagatggtggctactcctgtgaaattaccgagaaaaccactcggacccctgaagagggcgggtactcgtatgagatcagcgagaagacaacacgaacccctgaagtaagtggctacacctatgagaagaccgagaggtccagaaggctcctcgatgacattagcaatggctacgatgacactgaggatggtggccacacacttggcgactgtagctattcctacgaaaccactgagaaaattaccagctttcctgaatctgaaagctattcctatgagacaactacaaaaacaacacggagtccagacacctctgcatactgttacgagaccatggagaagatcaccaagaccccacaggcatccacatactcctatgagacctcagaccgatgctacactccagaaaggaagtccccctcggaggcacgccaggatgttgacttgtgtctggtgtcctcctgtgaattcaagcatcccaagaccgagctctcaccttccttcattaatccaaaccctctcgagtggtttgctggggaagagcccactgaagaatctgagargcctctcactcagtctggaggagcccccccaccttcaggaggaaaacaacagggcagacaatgcgatgaaactccacccacctcagtcagtgagtcagctccatcccagacggactctgatgttcccccagagacagaagagtgcccctccatcacagctgatgccaacmttgactctgaagatgagtcagaaaccatccccacagacaaaacggttacgtacaaacacatggacccgcctccagcccccatgcaagaccgaagcccttctcctcgccaccctgatgtgtccatggtggatccagaggccttggctattgagcagaacctaggcaaggctctgaaaaaggatctgaaggagaaggccaagaccaagaaaccaggcacaaagaccaagtcctcttcacctgtcaaaaagggtgatgggaagtccaagccttcagcagcttcccccaaaccaggagccttgaaggaatcctctgacaaggtgtccagagtggcttctcccaagaagaaagagtctgtggagaaagctatgaagaccaccaccactcctgaggtcaaagccacacgaggggaagagaaggacaaggaaactaagaatgcagccaatgcttctgcatccaagtcagtgaagactgcaacagcaggaccaggaaccactaagacggccaagtcgtccaccgtgcctcccggcctccctgtgtatttggacctctgctatattcccaaccacagcaacagtaagaatgtcgatgttgagtttttcaagagagtgaggtcatcttactacgtggtgagtgggaacgaccctgccgcggaggagcccagccgggctgtcctggatgccttgttggaagggaaggctcagtggggaagcaacatgcaggtgactctgatcccaacacatgactctgaggtgatgagggagtggtaccaggagacccacgagaagcagcaagacctcaacatcatggtcctagcaagcagtagtacagtggtcatgcaagacgagtccttccctgcatgcaagatagaactgtagaaaccgcagccgaccacaccacaggatttgaactgtgtttccagaaattcctgaatttgaaactaccttttcttaaacgtccattcatctaattacgtcactgaacaaggacctgccagatgctatacagtgtcatggtgatgcaaatcactgatatttctcaatttttgccgaccgctaaggaaagtaaccatattcccacaatagatttcaagttactgcaaaawwammwammmmmrwtcatctctgctgaaatacgtggaagccaggcactcgcacaccyaactgacttctgctaggkattggcatttatcttagagagrgaaararararrraaararagtcgtcttgcatgaccactgtactactgcttgctaggaccatgatgttgaggtcttgctgcttctcgtgggtctcctgaatcaaaaaaaaaaaaaaaattttttttttttttttaaaaacaactttccttgggggcaaattaacaagtagggtgagacactttgaatttaaaaaaaaattatttcattatttgtgtaaagttaaaagacttctaaaaatatccaaggacttaggattatgttcactgtgaaaagaacactaagaaattttctcagcaaatatgatctgagatagtcaattctaagaattc

SEQ ID NO: 3398 - DNA, 3123 bp, Rattus norvegicus
tgaccagccaggagtgacacatctgtattccatccattctctccctctttgcccatcctcaatctgttctcataagctcataggcacttaggcagaagtcatctccttgtgattctgcccaagatctgcccgttgggtttgtagggggaggaagaaaaaaaaaaagagagagacagagamragaaactacaggcaaactttcagctttgaagttgtcaccttggagaagtgaagtcgagaagtgtgacaccatgaatggacctgtggatggcttgtgtgaccattctctaagtgaagagggagccttcatgttcacatctgaatcggtaggagaagggcatccagataagatctgtgaccagattagtgatgcagtgctggatgcccatctcaagcaagaccccaatgccaaggtggcctgtgagacagtgtgcaagacagggatggtgctcctgtgtggagagatcacctcaatggccatgattgactaccagcgggtggtgagagacaccattaagcacattggctacgatgactctgccaagggcttcgacttcaagacctgcaatgtgctcgtggctctggagcaacagtccccagacattgcccaatgtgtccatctagacagaaatgaggaggacgttggtgcaggagatcagggtctgatgttcggctatgccactgacgagacagaggagtgcatgccgctcaccattgttcttgctcacaaactcaacacccggatggcagatctgaggcgctctggtgtccttccctggctgagacctgattctaagactcaggtaacagttcagtacgtgcaggataatggtgctgtcatccctgttcgcgtccacaccatcgtcatctctgtgcaacacaacgaagacataacactggaggccatgcgagaggccctgaaggagcaggtgatcaaagctgtggtgccagccaagtacctggatgaagacaccatctaccacctgcagccaagtgggcggtttgtcatcggaggtccccagggggatgcaggtgtcacaggccgcaagattattgtggacacatacggaggctggggtgcccatggtggtggtgccttctctggaaaggactacaccaaggtggaccgctcagcagcttatgccgcccgctgggtggccaagtctctggtgaaggctgggctctgccggagagtccttgttcaggtgtcctatgccattggtgtggcagaacctctgtccatttccattttcacctacggaacttccaagaagacygagcgagagctactagaggttgtgaacaagaactttgacctccggccgggtgttattgtcagggacttggatctgaagaagcccatctaccagaagactgcatgctatggtcatttcggaagaagcgagtttccctgggaggtccccaagaagcttgtgttttagagctgccgggaagcttagctctgtcctatactcaacctcctcaagatctcaactccctggtctcagagagccctccctgcttcccaccctatgcaaagccagcttcctccgattttccccctacccggcaatctgcaaacatcttaatagtggcaaggcaggtggtttctggtgctaggtcatcaggtctccttgcaaggatagtcagtgttccctccctgtctctcagatgacaacaatgttaattttgtgtaaaagttgctcctgtcatcccctcccgtagtctgaagctaaccaggccatctcttcctccgtcctggacatgtgcccagatgaatgttttgtcccatatctctggcttcccctttacattggcagccagaggtcctgagccggggcttcctcagggtccctctgagactgggcatctgctccctaggatatggtcagtgtcccctgaacatctgcattctgtgagggactgagctgtgtgttcttcatcccaacacaataagswsgwrkcgtcattatccacagtgacagatggggaaactgaggctcrgagagytatggagctctgacaggttcctatagctgcgtgcaccagagtcaagaaacagatcttgactctaggaattttgactctaaccctcacacctgcatcccaaacaagatgttgaccagagtgacgacacatggattgacaagaggttatgacctcttatttaaggcctgkgtttcaggagaattagatgaacctaatggctcttggtgagccctggacagtgttcccacaaaatcaagatggaaacatgtaagtgtctcatttgttctggaagagggcttaaggaaagctgagcatcttggtctataaagctggactggggtctgtaattaagaggaagcttcatggtcctagcgcccaacactcaaagacaggtgtgtgaattctttgagcatgggatctaatcatggacagccccatgtgcttgcttcctcacagaggagaggcagttcgttgttccagcacagacaaccagcctctataggggacccttcaaggctttcttgtgccctggaccctcacacttatgcagtctgaatgctgctagggaagtgggtgatccaggtgaggagccagcgtccaagcagttgacaagttgcccaagatctcacgagaactgacttttaccaggtagcctgggtgtgtctgtctagcagagtcctgagaacatgtctstaggtgtcccatcatgatcagcrtcacacacccagcctgtccctcgttggggcttccccacagcatactgccctcatagctctcaaacacgtggcttcaggaagggacmtggctcatatcgatgttctgmttagagagactgagcagcttcatcaaggagcagacaccttgcatctgccttaactggacagagaccccagctttccccattccaccagggcgaggaaacagcagagagaaaagccccaggagccaacagatcctgaagctstatgtgatgtagaagcttgggtcttwccatggggtcagggctgcmtgggagccaagttccttacagcagagggaaggatgggtgtgcagaaggctgaattcctgtaacttaagctttatctaaataaaaatccrgaattgtatacttgttctaaaaaaaaaaaaaaaaaa

SEQ ID NO: 3399 - DNA, 4437 bp, Rattus norvegicus
gctcccatcttcgaggctcagctcaactcagagctacttcttccaaattctacatcttggcggacttcgcgaaggaaacccggagtgttacgtgaggtcctgatggagtttgaagagggccttaacggaagagcagacaagaacttctcaaagatgggcaaaaagagtaaaaaggagaaggagaagaaacctgctgttggcatattcgggatgtttcgctatgcagattggcttgacaagctgtgcatggctctgggaactctcgctgctatcatccacggaaccctgcttcccctcctgatgctggtgttcggatacatgacagatagttttaccccaagcagagacccgcattctgaccgagcgattactaatcaaagtgaaatcaacagtacacataccgtcagcgacacgagtctggaggaggacatggccatgtatgcctactattacacgggcattggtgccggtgtgctcatcgttgcctacatccaggtttcactttggtgcctggcagctgggagacaaatacacaagattaggcagaagtttttccatgccatcatgaatcaggagataggctggtttgacgtgaatgacgctggggagctcaacacccgtctcacagatgacgtctccaaaattaatgacggaattggtgacaaacttggaatgttctttcagtccataacgacattttcagccggttttataataggatttataagtggttggaagctaacccttgtaattttggccgtcagccctcttattgggttgtcatctgccatgtgggcaaaggtactgacttcatttactaataaggaactccaggcttatgcgaaagctggagcagttgccgaagaagtcttagcagccatcagaactgtgattgcgtttggaggacaaaagaaggaacttgaaaggtacaataaaaatttagaagaagctaaaagagttggcataaagaaagccatcacggccaacatttccataggtattgcctacctgttggtctatgcgtcttatgcactggcattctggtatgggacctccttggtcctctcaaatgaatattctattggacaagtgcttaccgtcttcttctctattttattggggactttcagtattggacatttagccccaaacatagaagcctttgcaaatgcaagaggggcagcctatgaaatcttcaagataattgataatgagccaagcatcgacagcttctcaaccaagggacacaaaccagacagtataatgggaaatttggaatttaaaaatgtttacttcaactacccatcacgaagtgaagttaagatcttgaagggcctcaacctgaaggtgaagagcgggcagacggtagccctggttggcaacagtggctgtgggaaaagcacaactgtccagctgctgcagaggctctacgaccccatagagggcgaggtcagtattgacggacaggacatcaggaccatcaatgtgaggtatctgcgggaaatcattggggtggtgagtcaggaacccgtgctgtttgccaccacgattgccgaaaacattcgctatggccgagaaaacgtcaccatggatgagatagagaaagctgtcaaggaagccaatgcctatgacttcatcatgaaactgccccacaaatttgacaccctggttggtgagagaggggcgcagctgagtgggggacagaaacagaggatcgccattgcccgggccctggtccgcaaccccaagatccttttgttggatgaggccacgtcagccttggacacagaaagcgaagccgtggttcaggccgctctggataaggctagagaaggccggaccaccattgtgatagctcaccgcttgtctacagtgcgcaatgctgacgtcattgctggttttgatggtggtgtcattgtggagcaaggaaatcatgaagagctcatgaaagagaagggcatttacttcaaacttgtcatgacacagactagaggaaatgaaattgaaccaggaaataatgcttatgaatcccaaagtgacactggtgcctctgagttgacttcagaagaatcaaaatctcctttaataaggagatcaattcgcagaagtatccacagaagacaagaccaggagagaagacttagttcgaaagaggatgtggatgaagatgtgcctatggtttccttttggcagatcctaaagctaaatattagtgaatggccctatttagttgtgggtgtactttgtgctgttataaatgggtgcatacaaccagtgtttgccatagtgttttcaaagattgtaggggttttttcaagagacgacgaccatgaaaccaaacaacggaattgtaacttgttttcccttctctttctggtcatgggaatgatttcttttgttacgtacttctttcaaggcttcacatttggcaaagctggagagatcctcaccaagcgactccgatacatggtcttcaaatccatgctgcgacaggatataagctggtttgatgaccataaaaacaccactggctcgctgactaccaggctcgctagtgacgcttctaatgttaaaggggctatgggctccaggcttgctgtagttacccagaatgtagcaaaccttggcacaggaattatcttatccttagtcttagtctatggctggcagcttacacttttacttgtagtaattataccactcattgtcttgggtggaattattgaaatgaaactgttgtctggtcaagccttgaaggacaagaaagagctagagatctctgggaagatcgctacagaagcaattgaaaacttccgcactgttgtctctttgactcgggagcagaagtttgaaactatgtatgcccagagcttgcagataccatacagaaatgctttgaagaaagcacacgtctttgggatcaccttcgccttcacccaggccatgatttatttttcctatgctgcttgtttccggttcggtgcctacttggtggcacgagaactcatgacgtttgaaaatgttatgttggtattttctgctgttgtctttggtgccatggcagcagggaataccagttcattcgctcctgactacgcgaaggccaaagtctcggcatcccacatcattgggatcattgagaaaatccccgagattgacagctacagcacggagggcttgaagcctaattggttagaaggaaatgtgaaatttaatggagtcaagttcaactatcccacccgacccaacatcccagtgcttcagggactgagcttcgaggtgaagaaggggcagacgctccgcctggtgggcagcagtggctgcgggaagagcacggtggtccagctgctcgagcgcttctacaaccccatggctggaacagtgtttctagatggcaaagaaataaagcaactcaatgtccagtgcgtccgcgcactgggcattgtgtcccaggagcccatcctgtttgactgcagcatcgccgagaacatcgcctacggagacaacagccgtgtcgtgtctcatgaggagatcgtgagggccgccagggaggccaacatccaccagttcatcgactcactgcctgagaaatacaacaccagagtgggagacaaagggactcagctgtcgggcgggcagaagcagcgcatcgccatcgcgcgcgccctcgtcagrsagssksaymtstgkrmwkmkggmygwwkcsatcatyarctcttkgrtrcgaswgtgaaacaggtcgtccaggaagcgctggacaaagccagggaaggccgcacctgcrttgtgatcgcgcaccgcctgtccaccatccagaacgcagacttgatcgtggtgattcagaacggmcaggtcaaggagcacggcacccaccagcagctgctggcccagaaaggcatctatttctcgatggttcaggctggagcaaagcgctcatgagctgggagtatttgaggtgctaagtatttctaatattggtgttcaaacatggcacgtaaccaaagttaaaaggttaaaagcactgttaaaggtaatttcatcaagacgagaagccttcagagacttcataattaaatgaaccgaaattgaaaaaaaaatcattaaacagggccacattttttaattgtattatgtgattcaagagaacatatagttttttttwaaaagaaatgtgtagttttgtttcagtttttttaatttctaccctattcccttaaatgatcataaaggctgtaaaaagcacctcatttttttaarykgcctataaaaattaaattttcatataattggagtcatctgttgaacatctgaatttatctattcttccaagtagagtgccataaataatttcagctttcaggaaaagtgggttttaagaacctctcgatttttttttttttttttgtgggatggttaagcaatttaagtaatttccgt

SEQ ID NO: 3400 - DNA, 3679 bp, Rattus norvegicus
cagaactagcagctgggagccccgtgcccagccgactctccaacctgcatcggctcacgctatcccctggaggctatggagttggggcctcctctggtcctgctgctggccacagtttggcatggtcagggggcccctgtcatcgagcctagtggcccagaactggttgtagagccgggtgaaacggtgaccctgcgatgtgtgagcaatggcagtgtggaatgggatggccccatctctccctactggaccttggaccctgaatctcccggaagcaccctgaccacaagaaacgcgaccttcaaaaacactgggacctaccgttgtaccgagcttgaagaccccatggcaggcagtaccaccatccacttgtatgtcaaagatccggcccactcttggaatttgctggcacaggaggtgacagtggttgagggccaggaagctgtgctgccctgtctgatcactgaccctgcactgaaggacagtgtctcactgatgcgtgaggggggcaggcaggtcttacgcaaaacggtctacttcttttccgcatggcgagggttcattatccgcaaggctaaagtccttgacagcaatacctacgtgtgcaagaccatggtgaatggtagggaatccacctccactggcatctggcttaaggtgaatcgagtccacccagagcccccacagataaaattggagcctagcaagctggtgcggattcgaggggaggctgcgcagatcgtgtgctcggccactaacgccgaagtgggattcaacgttatcctcaaacgtggagacaccaagctggaaatccccctaaacagtgacttccaagataactattataaaaaagtccgggctctcagtctcaacgctgtggacttccaagacgctggcatatattcttgtgtggccagcaatgatgttggcacacgcacggccaccatgaacttccaggtggtggagagtgcctacttaaacttgacctctgagcagagcctcttgcaggaggtgtctgtgggtgacagcctcatcctcacggtccatgcagatgcctaccctagcatacagcattacaactggacctacctaggtccattctttgaagaccagcgcaagcttgagtttatcacccaaagggccatatacaggtacacattcaagctctttctgaaccgtgtaaaggcctcagaggcgggccagtacttcttaatggcacaaaacaaggcaggctggaataatctgacctttgagctcaccctgcgatatcccccagaggtcagtgttacatggatgcctgtgaatggctctgatgtcctgttctgtgacgtctctgggtaccctcagcccagcgtgacatggatggagtgcaggggccacaccgataggtgtgatgaagcccaggctttgcaggtttggaatgacacccaccctgaagtcctgagtcagaagcccttcgacaaagtgatcattcagagccagctgcccattgggaccttaaaacacaacatgacttatttttgcaaaacccacaacagtgtgggtaacagctctcagtacttcagggccgtctccctaggacaaagcaagcagctccccgatgagtccctcttcactccggtggtggtggcctgtatgtctgtcatgtctctgctggtgctactgctgttgctgctcttgtacaagtacaagcagaagccgaagtaccaggtgcgctggaagatcatcgagagatacgaaggcaatagctacaccttcattgaccctactcagttgccctacaatgagaagtgggagttccctcggaacaacctgcagtttggtaagactctaggagccggtgcctttgggaaggtggtggaggctacagcctttggtctgggcaaagaagatgcagtgctgaaggtggctgtgaagatgctaaagtccacggctcatgctgatgagaaggaggccctgatgtcagagctgaagatcatgagtcacctgggacagcacgagaatatagtcaacctcttgggagcctgtactcacggaggacctgtcctggtcatcactgaatactgctgctatggagacctactcaactttctccgaaggaaggccgaggctatgctaggacccagcctgagtcctggtcaggactccgagggagactccagctacaagaacatccacctggagaagaaatatgtgcgcagggacagtggcttctccagtcagggtgtagacacctacgtggagatgaggcctgtctcgacttcttcaagtgactccttctttaagcaagatctggacaaagaaccgagccggcccctggagctctgggacctgctccacttctccagccaagtggctcagggcatggccttccttgcttctaaaaactgcatccaccgggacgtagcagctcgaaacgtgctgttgaccagcggacatgtggccaagattggggactttggactggctagggacatcatgaatgactccaactatgttgtcaagggcaatgcccgcctgcctgtaaagtggatggccccagagagcatcttgtactgcgtctacacagttcagagtgatgtgtggtcctacggcatcctcctctgggagatcttctcgcttggtctgaacccctaccccggcatcctagtgaacaacaagttctacaaactggtgaaggatggataccaaatggcccagcctgtatttgcaccgaagaacatatacagcatcatgcagtcctgctgggacctggagcctaccagaagacccaccttccaacagatctgcttcctcctccaggagcaggcccgactggagaggagagaccaggactatgctaacctgccaagcagcggtggcagcagcggcagtgacagtggtggtggcagcagcggtggcagcagcagtgagccagaagaggagagctccagtgaacacctggcctgctgtgagccaggggacatcgcccagcccctgctgcagcctaacaactaccagttcgcctgctgaagtgggagggagagccgagtcctgccgctctctacgtcccagcttggcctcctccatggcacgggcgacatggggagaacatatggacttcgccctcagcttggcccagctctgacacttcagaacatgaggggtctggggaggtcagaggccccgtttgttcccagagcctgggccatcactgccagtggggttctcacagtgctagcctctatatttactatgccaactggtgcacccctagttctctttctccatcctattcccattttaaaaaacccgtcccaaactctcgtgtttcaatggaaagactgatttatgtctcaaaagacaagagtctcaaaggctgtgggtaagctgaaggcttgcctccctgacagatgcttagactacaggcttcttgggacaggtggccccttcctaagctcacaggagtggccaccactcttgaccttcactctgtctatagtcccgcctcatcctggatcttgtactgagcggcagctaaaaagtgttctacccagtgccctgtcactctagactggaaggtatggggcctgatgcaaggctgaccacaccaacaaacaccgtgtgctcctctccaagactgactcgtcctcattaactgtcaacattaaactaacagcattaacacaaaaaaaaaaaa

SEQ ID NO: 3401 - DNA, 2858 bp, Rattus norvegicus
gtgcgcttctctgtctttctggggttggggggggcgtgtccccggcccggagcatccttgtgcttgcctcaaccttctgagaccccggaccccttggattgagtcctcgaccctggtcttcacctcctgcctcccctaggttcttcctgccaaatcccaaccacctgtgcaccacaaaaagccaactcttcctgctccgagccccgggggggtggggtgggggggaggcaggggcagagccactctgcagaaggggccgccaccacctcctgcctcctcctcctccaccacctcctcctccttctcgtctcctccccctccccgttctgacgctgcctccttgggaagggtgtttggagggcagcggccgccccaagccggagccccgcagcgcttcttatgatcagctcggtgtgtgtctcctcctaccgcgggcgcaagtcggggaacaagcctccgtccaaaacatgtctgaaggaggagatggccaagggcgaggcgtcggagaagatcatcatcaacgtgggcggcacgcgacatgagacctaccgcagcaccctgcgcaccctaccgggcacccgccttgcctggctggcggatcccgacggcgggggtcggccagagtcggatggcggcggtgcaggcagcagcggcagcagcggcggcggcgggggctgtgagttcttctttgatcggcacccgggtgtttttgcctatgtgctcaactactaccgcacgggcaagctgcattgccccgcagacgtctgtgggcctctctttgaggaagagctcactttctggggtatcgatgagacagatgtggraccctgctgctggatgacctaccggsagcaccgcgatgctgaagaggcactggacatcttcgagagcccggacgggggcgggggtggcgcagggcccggcgacgaggctggagacgatgagcgggagttggccttgcagcgcctgggcccccatgaaggaggctctggccctggtgctgggtccgggggttgccgtggctggcagccccgaatgtgggcgctcttcgaggacccgtactcatcccgggcggccagggtggtagcctttgcctctctcttcttcatcttggtctccattaccaccttctgcctggagacccacgaggccttcaacattgaccgaaatgtgacggagatccaccgggtagggaatatcaccagcgtgcgcttccggcgggaggtagaaacagaacccattcttacctacatcgagggcgtgtgcgtgatgtggttcactctagagttcctggttcgcattgtgtgctgccctgatacgttggactttgtcaagaacctgctcaacatcatcgactttgtggccatcttgcccttttacctggaggtgggattgagtggcctgtcatccaaggcagctcgagatgtgctgggtttcctgcgtgtggtgcgctttgtacgcatcctgcggatcttcaagctcacacgccactttgtggggctgcgtgtgctcggccacacactccgggccagcaccaacgagttcctgctgcttatcatcttcctggccctgggtgtgctcatctttgccaccatgatctattatgctgagcgaatcggggccaggccatctgacccacggggcaatgaccacaccgacttcaagaacatccccatcggtttctggtgggctgtggtcaccatgacaacgcttggctatggggacatgtatcctaagacatggtcaggaatgctggtgggtgcgctgtgtgcactggctggtgtgctaaccattgccatgcctgtgcctgtcatcgtcaataactttggtatgtactactccctggctatggccaagcagaagcttcccaagaaacgaaagaagcatgtaccacggccaccccagcttgagtcacccatttactgcaagtctgaggagacttcaccccgggacagcacctacagtgacaccagcccccctgcccgggaagagggtatggtcgagaggaaacgagcagactccaagcagaatggtgacgctaatgcggtgctgtccgatgaggagggagctggcctcacccagcccctggcctcggcccccacccctgaagagcgtcgagccctgagacgctcaggcacacgggacagaaacaagaaggcagctgcctgcttcctgctcagtgctggggactatgcctgtgctgatggcagtgtccagaaagaaggcagtgttgagccgaaagcgtgcgtcccagtgtctcacacctgtgctctttaaacacagagacctgccaagacgccctctcgtccaactatgcccatgctgaagtcctcaccctctcttagagcggcaccaacgtgagaaagacagacagacagaaagccagaggcttaggaaaactctggaacccaggcacgaatcttttgctgggaaagatatccttgtttgcacaagactggtggaaaaatctcccatgcaactctcagggcccagagccatctgggtctgatactctgttctactgtacattgaagagacatatatgcacatatagtatctatattcatacatactatatactcttgtgtgtagtgcacgtgctactggtggtctgtcttcatcgttaggctatgtctcccaagtcctctgcccaccctgtttccccaccccctcttccttcatggattgtttcttctgaccatgtttttggagtgtcccaggagaggtatacctgggacctgcccctccagctgggtggtcccaggctgctctcacttgggggtgtcccctgccagcaggtggcctgctgaagtcagttgaaggcacgattgcccttctggggtcactgcttcactagc

SEQ ID NO: 3402 - DNA, 3262 bp, Rattus norvegicus
cgcgccggtgcctcgagggcgcgagggtcgcgccgcctccgcagcccgggacccgccgccgcgccgcccgcagaactkggcagsrsykcccwcccarcccskgcysgacykmmgsgmcvymckmgagctttccgtcttgtccccataacccgagaggagattcaaaccaagaaccaagagctagcctgggtcctcggcagatgggaatccgcatcacttactgaccagcagcatggagaccacacccttgaattcwcagaaagtgctgtcagagtgtaaggacagagaggactgtcaagaaaatggtgttctacagaagggtgtccccaccacagcggacagggcagagcctagccaaatatccaatgggtactctgcagtccccagcacaagtgcaggggacgaagcttcacactcgatcccagctgccaccaccaccctggtggctgagattcgccaaggggagcgggagacctggggcaagaagatggatttcctcctgtccgtcattggctatgccgtggacctgggcaacatctggcggtttccttacatatgctaccagaatggcggaggggccttcctcctcccttataccatcatggccattttcggggggatcccgctcttttacatggagctcgcactgggccagtaccaccgaaacgggtgcatttccatatggaggaagatctgcccgattttcaaaggcattggttacgccatctgcatcatcgccttttacatcgcctcctactacaacaccatcatagcctgggcgctctactacctcatctcctccctcacggaccggctgccctggacyagctgcacgaactcctggaacactggcaactgcaccaactacttcgcccaggacaacatcacctggacgctgcattccacgtcccccgctgaggagttctacttgcgccatgtcctgcagatccaccagtctaagggactccaggacctgggcaccatcagctggcagctgactctctgcatcgtgctcatcttcaccgtaatctactttagcatctggaaaggcgtcaaaacatctggcaaggtggtgtgggtgacagccaccttcccatacattgtcctctctgtcctgctggtgaggggggccacccttcctggagcctggagaggggtcgtcttctacttgaaacccaactggcagaaactcttggagacaggggtgtgggtagatgccgccgctcagatcttcttctctcttggcccgggctttggggttctcctggcttttgctagctacaacaagttcaacaacaactgttaccaagatgccctggtgaccagtgtggtgaactgcatgacaagcttcgtctctggcttcgtcatcttcacggtgcttggctacatggcggagatgaggaatgaagatgtgtcagaggtggccaaagacgcaggccccagcctcctcttcatcacgtatgcagaggcaatagscaacatgccagcatccacgttctttgccatcatcttcttcctcatgttaatcacgctgggattggacagcacgttcgcaggcctggaaggtgtgatcacagctgtgctggatgagttccctcacatctgggccaagcgcagggaatggttcgtgctcatcgtggtcatcacgtgcgtcttgggatccctgctcacactgacgtcaggaggggcatacgtggtgactctgctggaggagtatgccacggggccagcagtgctcaccgtggccctcatcgaggccgtcgccgtgtcttggttctatggaatcactcagttctgcagcgakgtgaaggagatgctgggcttcagcccgggatggttttggaggatctgctgggtggccatcagccctctgtttctcctgttcatcatttgcagttttctgatgagcccaccccagctacggcttttccaatacaactatccccactggagtatcgtcttgggctactgcatagggatgtcgtccgtcatctgcatccctacctatatcatttatcggctgatcagcactccggggacacttaaggagcgsattattaaaagtatcactcctgaaacacccacagaaatcccgtgtggsgacatccgcatgaatgctgtgtaacacaccctgggagaggacacctcttcccagccacctctctcagctctgaaaagccccactggactcctcccctctaagccaagcctgatgaagacacggtcctaaccactatggtgcccagactcttgtggattccgaccacttctttccgtggactctcagacatgctaccacattcgatggtgacwccactgagctggcctcttggacacgtcagggagtggaaggagggatgaacgccacccagtcattcagctagcttcaggtttagaattmggtcwstgagrgtctgtwwcwwgtttttggtaagwwcwwactaccccgcatmtgttagcttctaaagccttcaatgttcatgaatacataaaccacytaagagaaaacakakatgtcttgctagccatatatattttctcggtagcatagaattctatagctggaatctcctagaaccctgtaacccacgtgctgctgtgaggttaaggagggaaggtgtaaggattgctacactgaaaaaatggtgtatatgtgtgagctattgtgtctgtccattatcgtctgtgagccctcgatcccaatactccaggtccatttcaaactgtataaatggcctctaatttttcttacattaaacagattctacstacwmaawwrrrwwmrwrwwawtagaagccatacagtgttaacctctccttttccacagtctcctccaccacccacctccctgttaagcattcaggagaaaggtccatgggcaaacctggcctattctatcagtcaccatggccgctgctttccagatggttgtggcccaatgccacttccccagtcagctgggtacccccagtgtaagctctatttctaaagttctgggactccacactggactttactctttaaccattttttccaggctggagagatggctcagcagttaagagcactgactgctcttccagaggtcctgagttcaattcccagcaaccacacatggtggctaacaaccatctgtaatgagatctgatgccctcttctggtgtatatgaagtcagggacagtgtacccacatacatgaaataaatctttaaagaaaaaataggtttaaaaaaataaaaaaaccagaaaccaaaaaaaaaa

SEQ ID NO: 3403 - DNA, 6951 bp, Rattus norvegicus
gaattcacccaggcttcggaaaggcttttgttggaaacggtgggcgcgactttaggggacgccctccactcgtctcacaatccattccgcggtaggattcgctaactgtctcgcgggggtggcccactcggttccgagctgggcggtgcggctccgtttctgcttgtctccgcgagtgtcgcttcggccgaagaaagcggtaaggcgccaccctcgtagcccgcacttattattttcaaacaaggggggcgccccttcctttcaatttgaaactagaaacctctgcggtctcgttcctacgtgggcgcgtcctcggcctcccattttgcactcccatcgccttctttcgaacacacacgaacagcccctctgccaggccttgttccactttggcctggagctcagcttgcacacacaaacacacacaggcatgcagtccacgcagggaccgggctagaaatctctcttcccattctcagcacacacccagggaccttcaatgggggggaaaaaaaggcacggcagatgcgggtgcaaggccaggggtccaaaagggagagaggagcacgcctcgggtttcccagcttcgcagcttgcagtctgaaaacgagatgggggagggggcgagaagggggagggcaaagggggggagagatggaggggcaggggagggaggtagggggagagagggagagggagcggggtagagggagagggagagggagagggagagggagagggagagggagagggagagggagagagagagagagagagaggaaaaaagaaaagcaaatggcttttggcgcgaaaggctttggcgcctcccctgatttttatggaaatcaagagggcgggaaaagccgcttgcctctgcctttctccctccccctcgtctgcgccacagcccccttctctccccgccccccgggtgtgtcagattttttcagttaataatatcccccgagcttcaaagcgcagccagtgacagtcatctgtctggacgcgtgggtggatgcggggggctcctgggaactgggttggagccgaacggagctagccagcgtaagcgcgcacacactgcagcgtcccgaggacgacccccctcccaccgccgccccctcagcccacccggagacccctgcaccgagtcgctccggatccgccagtctgcgggaggtaaggagcggtacttgcaaacctccgagcgccgggggaacggcggaagcgctgcggctaggcaaacccctagacgcggctccgcaccctgcgcccaaatatgccgggctttttcggggggagggggacaacacaccctgtctgcttccgaaacaaaaccatctgggtttttttttttttttttttcctgaaaagcctattcagcacccgaaggcaccctggctggaagagacccgccctaatcctttttacagccctggcccagtcagagaaatagctttagcgaaaagaaattcgccctgctccacaagatttgtctatgagtatgagctgactgggaaccggtgcgtccccaccccaagctggcttcgctaaaaggtgccgcggggaaggaaggaaaaggggttaggcgaagctacggtgcttgagtgataatgtaggtcacgctcctccagcctagacgcgattctctacgacgaccctcatcgcgtcgcgcccctgcacattcctaggaatggggttcatccttttttcccccctgtggaagaggttgaggtctctgaagtgagggaattgtgaaaggtatatataggtatagacagacggtgaataccaaggatatttgccaagattgagggctgtgcggagagggctgtatataagtgcctgttgttggtctgactggagagaggcccttaataattaataaagttttctgaaccccgttagtgtttgcgctcccgtgatcgcatttctgtaaaggggggatgaaaggtactttaatcccatgcccggtagctggactagtcctggtagcaaggacttcttcctttgagcaactagtgcaagtggggttgtcgcgctagtaagagcggagatctgcagcttgaaccccctcccccaggcagtgcttgtgtgaatgaaacggcagtttccaaagttgcagagagccacaccacccctgcattgcaagccccctcccacccccagtcttagacagcttgtaccacacaaaaggacgggagtaggggagaggctcaactttctccaccttccagagctgtggggagcttgcagaagagattgggggctcccactgcctgtccccaccaactcacccctttggcttattctcgtcttggtttgtctgttggttgtagagttggaggttggagcgactctgctccccgacgggaaggaagcacacccccatattaaaaagagcggagatattaaaagagaggcgaacccatgcccagctgcaccgcgtccaccatgccggggatgatctgcaagaacccagacctcgagtttgactccctgcagccctgcttctacccggacgaagatgacttctacttcggcggtcccgactcgaccccaccaggggaggacatctggaagaagtttgagctgctgcccacgcccccgttgtcgcccagccgcgccttcccagagcacagcccggagccctcaaattgggccacggagatgctgctgccggaggccgacctgtggggcaacccggccgaggaggatgcgtttggtctggggggactgggtggcctcactcctaatccggtcatccttcaggactgcatgtggagcggcttctctgcccgcgagaagctggagcgcgcagtgaacgagaagctgcagcacggccacgggcccccgggagccagctcatcctgtccggctccgggagtgggtgccagtagctccgggggccgtgcccttggtgggtcggcgagtgctggtcgcaccggggccaccctgcctaccgacctttcccacccggctgcggagtgtgtggatcccgccgtggtcttccccttcccggtgaacaagcgagagtcggcttcggtgcccgctgccccgaccagtgccccggcgaccagcgctgtggtcactagtgtgtctgtcccggctgtagccccggtggctgctcctgctcgtggcagcggtcgtcctgccaacagtggcgagcacaaggccctcagcacctctggagaggataccttgagcgactcaggtaaagcctagaacagagttcttgtactcttgggtgttgggaacgtgcgggcccttgttatcttagatttgtgccagtgattctcttctgttcacctctttcccgggacagaagaagctggaaacccccagctacacctttacttaaacttgctctgtcccccttttcgggaatccttgccctagcttgccctcactgtaggaaaagttggtggctagttccgtcagctgtggggtcagaaagctacctgaacggaaatctgttagttcgttggaaatgtccctctaggccaggtcaggaaggggaaaggctccccgaaaagacagggctgttcaaccccacttccaaaagttaggagaacgctggtaattcctcccctccccaccccccagggactctgagccctccgtgggtggtgggctgtttgcgtttggtgcgtggccaacaggcggcgttgtgtcttgacgcaacgtcaggcagggggatcaaaaagactgggggtatgggggcaccccccctccagttcagcagctggcagcaagtgcattagtggttgtgtacgctttctgggagcctctttccggtttcgattgagtgctggtccagttgtgtttcctagctggaatttctgacctaatgagtggagtgtgttccataacccagtgcccttgaggttgagggcgggtccctaccactgcccctccttaggaatgcacacaccctggaaggattcattggttttattgtaagcttttttttccgggccgtccgtggaaaggaagggttaagaaagggaaaaacacctttttttttccttggggctgtgaaagtacctaccatattttacccaaatcctgtctgcccttgtccttcactgtaggtctattagacttggaagctagtgttttcacaacgccaaagaatataaaaagtctgaatttcctcctgggctgaggggggagatcgttggttctaagactcctgggaggaaacttggtgataagcctgcactttgaaagggctctgtcctttaatgtctgtgccttgacagctttctgttaggaagcagtttctccaacagctgtctctggctggaaaccaaaacactggcttaaagggacctacagaccgggagcagcctaacagttcagctttagaagaaacctcacaatgttctgcttccggtcctccctagattaggtagaagatgtgttttgattttcatgctttttttttttttaaactataattttctctcctagcctggcagtaaaccaggaagtcagaatacacataggatgctacatgggtgtgtgtgggttttttttttttggttgttcgggcactgctcccattgggatgtgtgtagctactgtggactagagctttataattgagatctgatctctgcctagatgaaaaactgcttactctgtacaacgcgtgttcgcacaagaaaaggttgttgtcgaggaggttggttcctagagtctaagaatggcagaaccaaacccagccgtgtgttttcaccagaggaggagcctcctggtctgaagggtgtctgtggaagtgtgtataagtaaatccatggggcagactggctggtgattatgctaaaagctcctattacggagcatctgtcgccaagtctacatattgtctgccaaactcaaacatggttattacccccatgactagctgaggaagtgaggacgagaggagttaagtaaccttttccagaaccataccgacaagggtcattctgactcagctttggcttcctcgagtttatgccacatactcaagtctgacaccagaggtgaaccctgggttctgccacattgggcaagttccctgctgccccacacggcctggggaaggaaaaatgcaggggggtgtgggtgtgcacgtcatttgtccacatgtgacaaaacttcagcaaacctagctgacttctataaggtatgtgagaggtgaaaagttaacccggagattttttttttctcctcctcaaagatgatgaagacgatgaggaggaagatgaagaggaggagatcgatgtggtcacggtagagaagagacgctcctcctctaacaacaaggcagtcaccactttcaccatcactgtacgccccaagacctcggctctgggcctggggcgagcacaacctggcgagctgatcctcaagcgctgtgtccccatccatcagcaacacaactatgccgcaccctcaccctatgtggagagcgaggatgcgccaccacagaagaagatcaagagcgaggcttctccacgccccctcaaaagtgtcgttccaccaaaggctaagagcttgagcccccgaaactcagactcggaggacagcgagcgccgccgaaaccacaacatcctggagcgccagcgccgcaacgacctgcgctccagcttcctgacgctcagggaccatgtgcccgagctggtgaagaacgagaaggccgccaaggtggtcatcttaaaaaaggccaccgagtacgtccacgccctacaggccaacgagcaccagctcctgctggaaaaggagaaactgcaggcgaggcagcagcagttgctaaagaagatcgaacacgctcggacttgctaaaatgctaaaacgtttctcacacggacagtcactgccactttgcacattttgattttttttttttaaacaaacattgtgttgacattaagaatgttggtttactttcaaatcggtcccctgtcgagtttggatctgggtagggggcaggacgcggggttctgccatgaccttggaataaaaaaaaaaactgagtttatgggatgctgggtggcttgttttcctcctccatatgacctggtgacagccgtggaagttcgggacacttaggagcttcaggaggctgtgmaskmrscgtgttccggtccaagtttccaaacaagtcattccttctttttcaatggtgcttaagttccacaaatgccacagaaggggggttgccaywygakgcccctgggaacgcttgtgtaaataccattgatacacccgccttttgtatacgttcctgggtaatgagaggtggctctcgggccagtattagactggaagttcacacctaagtactgtaagaatacctcaatgtttgaggagcwtgttttgtatacaaatacaktgtwamtctgttatgtactktactaattcytacackgcctgtatactttagtatgaygctgatacataactaaatttgatacttatatttcgtatgaaaatgagttgtgraagtttgagtagatattactttactcacykkttgaactaagaaacttttgtaaagaaattttactwtawawawawrwwmmwwwwttttttcctagcctgtttctcgttccttgttamtgtaatttgttcatgtttggtgcatagaactggtaaaaatggcaaagttctgtgtttaatgtttcttcaaaatgtgtatatatttagtgctgcaycttakagcactttgaaatacctcatgtttatgaaaataaatagcaattaaawrawrmamrwmaawrwwwwmtttcctagctgtgcgccagactctgaacggccatgcaaatagtccattccttaccgggccattttaacgttgtggaatcctggttccaggggagggtgccagtcccactagctagagggataaatggatttgtggattccacagattacaaccagctattttcaatagaattc

SEQ ID NO: 3404 - DNA, 3985 bp, Rattus norvegicus
caggcgtctctccttactccccctcattctgcctttccgcccacacactgtctcctctccctctcctctctctctctccacctccgaccctccccctcctttccttattttcctcggccttcttatgtcccctgctatctcacatttctgtcatctttggaagtgccttctgtcacccccaactgggtgccatctgaagacccccatcctgtgtccggcacccgccacgtgtcctggagatggggggtgacgtatcaggtgcgggtggcaagtcaggactgaggaccagatgggagaggcgacgtgggctgacgtggcccccgaggacctaggaagggcccaaccaagcccacaagcactggaggagtgggcactgtgtgtcaccccagctggctgtgctctggtggtacctggctgcagaaggttatccagcctggcgactgcaaagggaattcttgccctgtgggcagaatcttggaacctccatgcagcagaatgtcagaactggaccaaagagatgcaagctacccatggcttcccaggccttgagcaccccctcatgctggcagtggtgcatctgaagagtcccttccacctttgcagcaaccccgtaaggtttgggctagttggctgctgactgatcctcatccctgccatggccgctgttacctatccttcatccgtgcctacgaccttggaccctgggaatgcatcctcagcctggcccctggacacgtccctggggaatgcatctgctggcactagcctggcaggactggctgtcagtggcatcttgatctctctggtgtacctggtggtgtgtgtggtgggtttgctgggcaattcactggtgatctacgtggttctgcggcacacgtccagcccatcagtgaccagtgtctatatcctcaacctggcactggctgacgaactcttcatgctggggctacctttcctggctgctcagaacgccctgtcctactggcctttcggctctctcatgtgtcgtctggtcatggccgtggatggcatcaaccagttcaccagcatcttctgcctcaccgtcatgagtgtggaccgctacctggctgtggtgcaccccacacgctctgcccgctggcgcacggcacctgtggctcgaatggtcagtgcagctgtctgggtggcctcagctgtggtcgtgctgcctgtggttgtgttctcaggagtgccccgagggatgagcacgtgccacatgcagtggccagagccagcggctgcctggcgaacagccttcatcatctatacggccgcactgggcttttttgggcccctgctggtcatctgcttatgctacctgcttattgtggtgaaggtgcggtcgaccacacggcgggtgcgggcgccctcgtgccagtgggtacaggcacccgcttgccagcggcggcggcgctctgagcgcagggtgacacgcatggtggtggctgtggtggcactcttcgtcctctgctggatgcctttctatttactcaacatcgttaatgtggtgtgcccgctgccggaggagcccgccttctttggcctctacttcctggtggtcgcgctgccctacgccaacagctgcgcaaaccccatcctctacggcttcctctcctaccgcttcaagcagggcttccgcaggatcctgctaagaccttctcggcgagtacggagccaggagccagggtctggccctccagagaagacggaggaggaggaggatgaagaggaagaagagagaagggaagaggaagagcggaggatgcagagagggcaggagatgaatgggaggctcagtcagatcgcacagccaggccccagtggacagcagcaacggccttgcacagggactgccaaggaacagcagcttctaccccaggaagccacagctggggacaaggccagcacgctgagccatctgtaagaaccttcaaagagccagcatgatcctgaagagagcagaagctatgcttgacctaaggcacgagtaccagacacatggcagtgttctaagcaagcaacagctagagtgagcttatttacatggctgtcctggccctctctggaccgttgtggtactagggtccagtgatggaatgtccataggcctgggctctgtcccactgtgccagggcttgctgtgtatactttggccagtcactagccctctctgggtcttgttttcttcttttgactcagggatgggtaaaatgagccctgtcagaagaggggtctggaatccttattgggattaatctcctaatcagagcccaagttaagaatttgcacagtctgaccaagaaacaagatatcttggggatcagtctgtatcttggccctcaaggagatacaccagggcttgggaaatcagagatgcagatgacctgggggtgggtgcttggctgaaacctaaaggaagtgttagttggtgtggtgggatgccacggcttaggacgcaagtgagccctttccatgctgctctgtggcctcagccactctgttcatgtgcaggcctcctacctcttctgcagggcagtccgggtgtcctacagaccctcaccccagcgtctgagcattgggccttctgtgctcctggacaccaggggaagaacttcccagaaggcaggtgaaaccaagtttcaggggttcttgctgcttgggcccccctgggacctacgtgtgactggtcttctaattttgtattccttctctggagggaagattgcacaccaccaggctcaggccacccggagactgactcaccctattcaggtcagctacctagtccccagggctatgcagcagcctgagggaaggagagggagaaaggaggagagggagctgaggcagtaagaagaggagggggatgggatcggagggagaagagaacagaactttgtggtgatcttgagtcaaccttctcccccttgagctaagctcagtttgcagcactgatggtttcaggaaggatctgaaggasacakgtgaccaggatcccctggagggtgcgtggggctggtgagaggggcacaggtcatgatggagtcgtgggaatgggcttggctcctcaggagggatggtaagtcctttgtgtgggtcagtcctcccatcctctattcccagggctccagctgatgtagagactaacaggctgtcatggggagtagccactgtcccagctgggtcaggacttcattcttcccctcccagagatggtccttctggtcccagcagtgatggccctggaaaggttgaggcttctgctcaaacccccaccctaccctgcagaggcagggttctcagggaacccacaaatccagatgttgagaaagctggatcttctattcacctcaagcctcttggccataccctctgtctctgcgcctcagtatcctcatcatagtgagaatgtgatcccccagttctccagtctgttagaatccaggagggaactgagtcatgccaggcaagctactgctcaccacaatggggctgcgtaaggatacaaagcggccgtgttgtacctcaggctcagcccacaccttgccctttaagtgagtggcttcggtgtcagctactggaggtgaaggtattcatgagaaatggagtgcaggaggtcagaagccaaggaccatggagaatgcaagccaccccagaaggaggaagtttgcaaacataggcatgtatggggcctgaggcccrgcccaggggttcctctgagaaggagctgggtcaggaagtaagcagtccaaccttcctggatggggtaggtgagccacgtcttgcaaaggrgtgggtgaccagttgagaagttctttgctgcttctgacctgagctcctgtcaataaagatagtgactaagaaaaaaaaaaaaaaaaaaaaaaaaaaaaaaaaaaaaaaaaaaaaaaaaaaaaaaaaaaaaaaaaaaaaaaaaaaaaaaaaaaaaaaaaaaaaaaaaaaaaaaaaa

SEQ ID NO: 3405 - DNA, 1508 bp, Rattus norvegicus
cccaactgccagcagcctgcaccctgcacccgctcagctccgcacagccatgtttcagccagctgggcacggccaggactgggccatggagggcccgcgggacggcctcaagaaggagcggttggtggacgaccgccacgacagcggcttggactccatgaaggacgaggattacgagcagatggtgaaggagctgcgggagatccgcctgcagccgcaggaggcgcctctggctgccgagccctggaagcaacagctcacggaggacggagactcgttcctgcacttggcaatcatccatgaagagaagacactgaccatggaagtgattggtcaggtgaagggagacctggccttcctcaacttccagaacaacctgcagcagactccactccacttggctgtgatcaccaaccagccaggaattgctgaggcacttctgaaagctggctgtgatcctgagctccgagactttcgaggaaatacccctctccatcttgcctgtgagcagggctgcctggccagtgtagcagtcttgactcagacctgtacgccccagcatctccactccgtcstgcaggccaccaactacaacggccacacgtgtstacacttagcctctatccatggmtacctgggcatcgtggagcacytggtgactttgggtgctgatgtcaacgctcaggagccctgtaatgsccggacagccctccmccttgcagtggacstgcagaatcctgacctggtctcgctcctgttgamgtgtgggrctgatgtcaacagagtaacctaccagggctactccccctaccagcttacgtgggrccgcccaagtacccggatacagcagcmgctgggccagctgaccstggaaaatcttcagacgctgcccgagagtgaggatgaggagagctatgrcacggagtcagaattcacgraagatgagttgccmtacgatgactgtgtgtttggaggccagcgtctgacgttataagaggaaagtgsccaaaggaacgtggacttgwatatttgtacaaatagagttttatttttctwaaaaaaaaaaaaraaaagaaaaagaaaaaaaataagaaaggatacttagcaccacagcacacagcgcctagccccgagcattctattgtggtgattcagctgttgttcttctcaaatttggggaaacagatcattgaaattcaaaggaaatgtctcctaaggttcatgtttgtgggattttttttttttttttgaggtgattttccagaatctgataaaaggaccacatttaatttatgtgcttttggttgaaccgccatagacgtagctgaccccagttgccctctacgtaagaaccaggtcgatagtggtatgtgcttaagcaccccagctgagatttgtaccactttcttgtaaatgttgtatatggatgtattttgttggtaattatttttggtacttctaagatgtatatttattaaacagatttttacagtatcaaaaaaaaaaaa

SEQ ID NO: 3406 - DNA, 571 bp, Rattus norvegicus
aagaattcggcacgaggcccmaaasmwytckgywcagsacwksctytctmttggymygrkstcaacggtcaccatsgmgagacccttggaggaggmcctggatgtaatagtgtccaccttccrsaaatactcaggcaacgagggtgacaagttcaagytgaacaagacagagctcaaggagctactgaccagggagctgcctagcttcctggggasaasgacagacgaasctgcattccagaagytgatgaacaacttggacagcaacagggmcaatgaagttgacttccaggagtactgtgtcttcctgtcctgcattsccatgatgtgcaatgaattctttgagggctgcccagataakgagscccggaagaastgaakactcctcagatgaagtgttggsccartgggggaatcttccatgtyggctgtgagcatastgcctyactctggcttcttcatacatgtgcacagtgctgagcwwktttwmtrargagwwwtgmavswrmwwwawwaraawmaamatcttctcaacgccaaagattcagaaattcattcgggcaaaccttta

SEQ ID NO: 3407 - DNA, 1430 bp, Rattus norvegicus
ggccgcggtggcggaacgggcggaggctgccggtttcgtaaccgtcgctcctcctcgccgactcgcaggctgcgaggcctgggtagggtcggaccgcgccgcgcggggccgctcggagtggaggccgtctgggggcgggcgggccggccggaggcgcaggtacatgtgaagattttttggcagttgagtgtggccttctcggatcacactgctctgatttctacgtgttctgtgttggtggaggaacgggcccaaatgagcaagctgtcgcagccagcctcgactgcaggagtgaacgggatcagtgtcattcacactcaggcacatgccagcggcttacagcaggttcctcagctggtgcccgctgggcctgggggaggaggcaaagctgtgcctccaagcaagcaaagcaagaagagctcacccatggatcgaaatagcgatgagtaccgccagcgcagagagcggaacaatatggctgtgaaaaagagccggttaaaaagcaagcagaaagctcaagatacactgcagagagtaaaccagctcaaggaggagaacgagcggctggaagccaaaattaagttgctgacaaaggamwyragkgtactgaaagacttgtttcttgrgcatgcgcacaacstcgcagacaatgtgcagcccatcagcacggaaactacggtggcaaattctgataacacrgsrcagkagatctccttccaggcgccacagccttgtgacttgaacatgagaggtgtgaccaccctgcaccccttggttcagtggctgagctcggtcttgttccattggaggttattttttaggctcagcactggacagctggttagccatgtaatttatctggtcttaaatgataatggatttttgaagcactaaaagaaaacttagggtttatggttaaaataaaattcctggcctttaatattcttaawaaawmmwmamwwmmccagaaawrmwwmwwwwrwaggaaggggaaaatggaaggtcatattgaaggttctgggttctaatgagataataccttggactaggaaaagctgaattccatctgtgttcttcaatttgtgattttattctaaattgtgtatgataaattctagggctatagaaaccagccataataatttggcccaattttatagatgtataaacctgtgttagcataatcagcatcgttttttccaacacatacacattttaaaaaatgaccttaggtgaagtaaagaaatcccatcaggtcacgtcgagaggtggttaaaaatacaagttgtgtttaggaaggaaagaggtggttttgtgcttttcccccttgtttgttttaaagggcatagagtgtgattgaactttggggggccttctgcttattggatgagcattatctgtatcctaaaagacagtagccaccgtgtact

SEQ ID NO: 3408 - DNA, 2354 bp, Rattus norvegicus
gaattccaatcagttaaccgaaacaaaagctcatggactaaatgctaacagttggagagcgacactgtatttttgttgttgctttttgcccacgacagcgacagagctgatagcatactgcatgagaattggaaggaaggtctcaawgctktrkkskaawgtartkyykaggtgtgggcagccagaggttagggtgtcttctcagatcggcgarcctctgcttcaggaggagccatggcgctcagggtcactaggaacacgaaaattaacacagaaaataaggccaaggtcagyatggcaggcgccaagcgtgtgcctgtggcagttgctgcctccaaacccctgctgagatcgagaactgctcttggagacattggtaataaagtcagcgaacagtcaagaatacccctcaaaaaggaaacaaaaaagttaggttctggaacagttactgttaaagccctaccaaaacctgtggacaaggtgccagtgtgcgaacsagaggtsgawstggaksagcctkwgscyraaymystyatggaagtgaaacactctcctgagcctattttggttgatactccctctccaagcccaatggaaacatctggatgtgcacctgccgaagaatatctgtgtcaggctttctccgatgtgattcttgcagtgagtgatgtagatgcagacgatggtggtgatccaaacctctgtagtgaatatgtgaaagatatctatgcttacctcagacaactggaggaagagcagtcagttagaccaaaatacctactgggtcgtgaagtcactggaaacatgagagccatcctaatcgactggctaatacaggttcagatgaaatttcggctgctgcaggagaccatgtacatgactgtgtccattatcgatcggttcatgcaggacagttgtgtgcccaagaagatgctgcagctggttggtgtaactgccatgtttattgcaagcaaatacgaggagatgtaccctccagagatcggtgacttcgcttttgtgactaacaacacttacaccaagcaccagatcagacagatggagatgaagattctgagagttctgaacttcagtctgggtcgccctctgcctctgcacttcctccgtagagcatctaaaattggagaggtcgatgtkgagcagcatactttggccaaatacctcatggagctctccatgctggactacgacatggtgcattttgccccttctcaaattgcagctggggctttttgcttagccctgaaaatycttgacaacggtgaatggacaccaactctgcagcactacctgtcccacacggargaatctctgcttcctgtgatgcagcacctggctaagaacatagtcatggtgaaccgtggcctcacaaagcacakgacgaksaagaacaagtatgcaacatctaagcatgctaagatcagcactctggcacagctgaattgtacactagttcagaatttgtctaaggccgtgacaaaggcgtaactcgaatggactacctcgtctgcagatgcagttggcaccatgtgcgcctgtacataggataccatgtttatttgctcttcaataaaggttgtgacttttttamwwwrmawarmwmaamwmawwwrarwrwrrttgcttctgactttaggataacagaagttgtcaaagaatttaggagtatatcaaaaactgcttctagtttaacagtggattcagttaatgtatatatgtgtagcctatattttatatacttgcttcactttgtgtgtccttatcatgtagtcatctgcctagctctgggykrmackmsragtctaccagctagtcctgctgcctgaaaccactgtctcttgagctgtcaactttcagatcykgmmrcraagtgtttttkttatgtaattatttatttgttcttaattggaaggtaggatgttcaaaattaaaggtgtcttaaaataawwwrmmmmhaagtctcagtaccaacagataagggtgtattcttgtatatcctgtatagatataatcatgcatttattgtcgaggagatgtttttatrtgggttcatttatcaacagtattccttttagcatccttcaaggcctatattgcatttcctagygygaataaacgatgtaatatagtcaawmrwwmmmwwarwratattcaagtgcattctctcactgcctctccacaatgctgcttaacgctgtttaataccttgcctggctccatgcatagtagctctcccagggggtgtgctttcaattctgacagccagatgagtgcggctggcaccatgccaagatgccacttctttctcctgttttgtaacaccaactggaaaaaaa

SEQ ID NO: 3409 - DNA, 3791 bp, Rattus norvegicus
ttcaacctggatgtgatgggtgccatacgcaaggagggagaacctggcagcttattcggcttttcggtggccctacaccgacaattacagccccgaccccagagctggctgctggtgggtgccccccaggccctggactcttacccggacagcaggcaaatcgcacatgggaggcctctttgcttgtccctgagcctagaggagacagactgctacagagtggacatcgacaggggagctaatgtgcagaaggaaagcaaggagaaccagtggctgggagtcagcgtgcgaccgagggagtccgggggcaaggttgttacctgtgcacaccgatatgagtctcgacaggaagtggaccaggttttggagactcgagatgtgattggtcgttgctttgtgctgagccaggacctggccatccgtgatgagttggatggtggggagtggaagttctgtgaagggcgcccccagggccacgaacaatttgggttctgccagcagggcacagctgccaccttctcccccgacagccactacctcatttttggggctccaggaacctataactggaagggcacagccagggtggagctctgtgcgcagggctcgtcggacctggcacaggtggatgatgggccctacgaggcggggggcgagaaggaccaagacccccgtccttcaccggtccctgccaacagctaccttggtttctccattgattctgggaagggtctcatgcgctcagaagagctgagttttgtggcaggggccccacgtgccaaccacaaaggggctgtggtcattctgcgcaaggatagtgccagccgcctgattcctgaggttgtgctgtctggggagcgcctgacctctggctttggctactccctggctgtgactgacctcaacagtgatggctgggcagacctgattgtgggtgctccctacttctttgaacgccaagaagaacttggaggagccgtgtatgtgtacatgaaccagggtggccattgggcagatatctctcctctccgactctgtggctcccctcactccatgtttgggatcagtttggctgtactgggggacctcaatcaagatggcttcccagacattgctgtaggagctccctttgatggagatgggaaagtctttatctatcatgggagcagcctgggggtggtcaccaaaccttcacaggtgctggagggtgaggctgtgggtatcaagagctttggttactccctgtctggtggcctggatgtggacggaaatcactacccggacctgcttgtgggctccctggctgatactgctgctctgttcagggccagacctgttctacatgtctcccaagaaatcttcattgatccaagagccatcgatctggaacagcccaactgtgccgacggacgcttggtctgcgtgcacgtaaaggtctgtttcagttatgttgctgtgcccagcagctacagccctattgtggtcctagattatgtgttagatggggacacagaccggaggctccggggccaggctccacgtgtgactttcccgggccgaggcccggatgatctcaagcatcagtcctcgggcaccgtgtcgttgaagcaccaacatgacagagtctgtggagacacatgtgttccagctgcaggaaaacgtaaagacaagctacgggccattgtggtgaccctgtcatatggtctccaaacccctcgattaaggaggcaagcgcctgaccaggggctcccccttgtggctgggatcctcaacgctcaccagcccagtacacagaggactgagatccacttcctgaagcaaggctgtggtgacgataagatctgtcagagcaacctccagcttgtgcaggcccagttctgttcccggatcagcgacacagagttccaggctctgcccatggatctggatgggaccgccctgtttgcgcatggcgggcagccattcataggcctggagctgacagtcaccaacctgccctctgacccagcccggcctcaggcagatggggatgatgctcatgaagcccagctcctggccaccctcccagcctctcttcgatactcgggagtccgcactctggactctgtggagaagccgctctgcctgtccaacgagaatgcctctcatgtcgagtgtgagctcgggaaccctatgaagagaggcactcaggtcaccttttacctcatcctcagcacctctggaatcaccattgagaccacagagctgaaggtggaattgctcttagccacgatcagtgagcaggacctgcatccggtctccgttcgggctcatgtcttcattgaattgccgctgtccatttcaggggtggccactcctcagcaactcttcttctctggcaaggtgaagggggagagcgccatgcggtctgagtgggacgagggcagcaaggtcaagtacgaggtcacggtctccaatcaaggccagtcactcaatactctgggctctgccttcctcaacatcatgtggccccatgagatcgccaatgggaaatggctgttgtaccccatgcgggtggagctggagggtggacaggggcctgagaagaaagggatctgctccccaagacccaacatcctccacctggatgtggacagcagggataggaggcggcgagagctggggcagccggagcctcaggagcctccagagaaggtggaacctagcacatcttggtggccagtgtcctccgctgagaagagaaacgtgactctggactgcccaggcacggccaagtgtgtggtattcagctgcccactctacagctttgaccgtgcagccgtgcttcatgtctggggccgcctctggaacagcacctttctggaggagtacatgtccgtgaagtccctggaggtgatcgtccgagccaacatcacagtgaaatcctccattaagaacttgctgctcagagatgcatccacagtgatcccagtgatggtatacttggacccggtggctgtggttgcagaaggagtcccctggtgggtcatcctcctggcggtgctggctgggctgctagtactggccctgctggtgctgctgctgtggaagctgggattcttcaagcgggcgaagcaccctgaggccactgtaccccagtaccacgcagtgaagatccttcgggaagaccggcagcagttcaaggaggagaagacaggcaccattcagaggagtaactggggcaattcccagtgggagggctccgacgcacaccctatcctggctgccgactggcaccctgagttgggtcctgatggacatcctgtgtcagtcactgcctaacttctcctgtcccaagccagcctctgggttccttccaccctttcccaagatggctctttgggggtggagatagtggagtaggttgctggcttcatgttgaaataaggcaggttctgctttctcaggggcacagatctttcccaccgtgagaaccaccccttccmakcttctccgtacaatgctgtgagacacggggcatggctggaaggacaggcatgacctggtgcaggatggagaagaaggggtamtgagctgcctctctcacccaccctgtaagaccgtcttccccaaagtgcyttagacagagggtcagggaagagatcgtgtcactgtctcaggggcccttccctcctaagtctttcctgtgctctggccttagtgtgctgtaccagcccagcggatcttgtctatttattaaaaagtatttgmcawtaavmaaaawamraawaawwaaacaaacaaaatggaac

SEQ ID NO: 3410 - DNA, 2188 bp, Rattus norvegicus
caaaggaacaaatagcccacrgatcygyrgrmymyttgttccttccacaatgcgcctctaccctctggtctggctttttcttgctgcgtgcacagcttgggggtacccatcctcaccacctgtggtgaacactgttaaaggcaaagtcctggggaagtatgtcaatttggaaggatttgcacagcctgtggctgttttcctgggaatccccttcgccaagccccctcttggctccttgaggtttgctccaccacagcctgcagagccttggaactttgtgaagaatactacctcctacccacctatgtgctctcaagatgctgttggagggcaggttctctcagagcttttcaccaacaggaaggaaaacattcctttacagttttctgaagactgcctctacctgaacgtttatactccsgctgacttgacaaagaacagccggctaccagtgatggtgtggatccatggaggtggaytggtagtgggtggagcatccacctatgatggacaggtcctctctgcccatgaaaatgtggtggtggtgaccattcagtatcgccttggcatctggggattcttcagcacaggggatgaacacagccrgggcaactggggtcacttggaccaggtggctgcactacactgggtccaggacaacattgccaactttgggggtaacccaggctctgtgaccatctttggagaatctgcaggaggtttcagtgtctctgctcttgtgttatctcctctggccaagaacctcttccacagggccatttctgagagtggtgtggtcctcacttctgctctgattacaacagatagcaagcccattgctaakctgattgctacwctttctgggtgtaaaaccaccacatcagctgttatggttcattgcctgcgccagaagacagaggatgaactcctggagacttcattaaaattgaatcttttcaaactggacttacttggaaacccaaaagagagctatcccttcctacctactgtgattgacggagtggtgctgccaaagacaccagaagagatcctggctgagaagagtttcaacacagtcccctacatagtgggcatcaacaagcaagagtttggctggatcattccaacgcttatgggctatccactctccgaaggcaaactggaccagaaaacagccaaatccctcttgtggaagtcctacccaacactgaaaatctctgagaaaatgattccagtggttgctgagaagtacttcggagggacagatgaccctgccaaaaggaaagacctgttccaggacttggttgmagatgtgatrtttggtgtcccatcagtratggtgtctcgaagycacagagatgctggagcccccaccttcatgtatgaatttgagyrwsgcccaagctttgtatcmgccatgaggcccaagacagtgatcggagaccatggtgatgaactcttctcagtatttggatctccatttttaaaagatggtgcctcagaagaggagaccaatctcascmaaatggtgatgaaatactgggccaactttgctcggaatgggarccctaatgggggagggctgccccattggccrgmayrwgrccagaaggaagggtacctgaagattggtgcctcaactcaggcagcccagaggctgaaggacaaagaagtggctttttggtctgagctcarggccaaggaggcagcagaggaaccatcccactggaaacatgttgagctctgaycaggagggtcagccatgtttgagaacctgragcyaaaggggaattattccacagaagwttttgtaaagamataacacttcttgtctttgagactataacatcacatggtattttgtacaaatgcattaaagggaaaatacttaaccttattgcttcaacttgtaaaataaaacattrwytwgaawwtyrmawrrwrwwmwwwraarcggccacttgttgacaatttcatggatgccccagagagcccaagctctgcgttcaactcacctccaggagtaatatcctacgtcagcgttgacagtcagtcgagcgatgtcgaatgtctcgatgacattactgtcccacttctttcggtattctatgtcgtgcaggacatcgtagagcgtctcagctggtacgtcacagcattccatcctgcacttgatcttgtgcagagttcg

SEQ ID NO: 3411 - DNA, 1703 bp, Rattus norvegicus
gactggtgcctgctgttgggagcactgctctgacgatctatctctaaaccactgctgtgctctgtgtttgaaaactttgagcaaatcaactgcccgtcctctaacagcaaaagatgggaagtggaattagttcagagagcaaggagtcagccaaaaggtccaaagaactggagaagaagcttcaggaagatgctgaacgagatgcaagaactgtgaagttgctgctattaggagcaggtgaatctggaaaaagtactattgttaaacaaatgaagatcatccacaagaatggttacagtaaacaagaatgcatggagtttaaagcagtggtttacagtaacacgttgcagtccatcctggccattgtgaaagccatgactacactagggattgattatgtcaatccgagaagtagagaggaccaacaactgcttctctccatggcaaacacactagaagatggtgacatgacgcctcagttggctgaaataattaaacgtctgtggggcgatccaggaattcaagcctgcttcgaaagggcatctgaataccagctcaatgactctgcagcttactaccttaatgacttagatagactcacagcccctgggtatgtgccaaatgaacaagacgttctacattcccgggtgaaaaccactggtatcattgaaactcaattctcctttaaagacttgaacttcagaatgtttgatgtaggtggccagagatcagaaagaaagaaatggatccactgctttgaaggagtgacgtgcattatattttgtgcagccctaagtgcctacgacatggtacttgtagaagatgaagaggtgaacagaatgcatgaaagtcttcacctcttcaacagcatctgtaatcacaagtattttgcaaccacctccattgttctgtttcttaacaagaaagatctcttccaggagaaagtgaccaaggtgcacctcagcatctgtttcccagaatacactggaccaaatacattcgaagatgcagggaactacatcaagaaccagttcctagacctgaacttaaaaaaagaagataaggaaatctattctcacatgacctgcgctactgacacacaaaacgtcaaattcgtgtttgatgccgtgacagatataataataaaagagaacctcaaagactgtgggctcttctgagcaacctgtttgctaccacttgtgatggctatagtctttttaagacataaaaaggtgctgtgtattagcttggatagatattaactgatttagaaatgtgactagcattataaaacaaaaaaattcacacaaaaatattactgtgatatcacgtatatctgggtacggttttcttggggaatggagggtagagttgctgatgttctaaatctgaaatctgatgtatctggtaactgtcacaatatacattcatgctactaaagttttttggaagtgagctgtaagtgaccaatttttaatcatagagtaaacctcagaatgtgctataacattgccccagctagattttgaaagcattcaaagtcatgtctgtactacagaaactgtacaaaatgaacaaggtataattttggtcatcagcctttcaattaggctgccacaagcacacacagtacatgcttttattgatgggaaattgtatgtgtaaaataaatatatatataataaaaaaaaaaaaaaaaaaaa

SEQ ID NO: 3412 - DNA, 1120 bp, Rattus norvegicus
cataagatgtatgtgtagggggtgtaagagtactcgtgaggggtgtskkctagwgctgwawagrgwgcawggwsarcamwctcgackstgggacctaggtggccttccagggaagatgaasstcctcttgctcctgctgascktctctctggcccccamgacagaggcagsggagatcatcgggggacatgaagccrakccccactctcgaccctacatggcctatcttcagwwcawgratgagkattctgggagtamrawrtgtggyggyttccttatacragargactttgtgctgactgctgctcactgttyrggragcaaaataamtgtcacrttgggggcccacaacatcaaagaacaggagaagaygcarcaartcatccctgtggtgaaaatcattccmcacccagcstataatkctaagacaatctccaaygacatcatgctrttaaagctgaagagtaaggccaagaggwctagmgctgtgaagmckctcartctgcccagamgcaacktcaaagtgaarccaggagatgtgtgcwatgtggctggttggggaaagctgggcccaatgggcaaatwcycagacamactrcaagaggttgagctaacagtacaggaggatcagragtgtgagwcytacttwaaaaawkmttwcracaaagccaatsagatatgtgcrggggacccaaagatcaaaygtgcttcctttsrgggggactctggagggcctcttgtgtgtaaaaaagtggccrcrggcmtcgtcbsctatggayvwaawratggttcarctccasrggcmttcaccaaagtctcractttcctatcmtggataragraaactatgaaaaagagctaactacaagawgcaacrtggatcatttcctgactaaccayctkccctatagctgagtccaggattgctctaggayagatggcagcaactgaataaagcactttttttctgasactggwwgactggtttcatgtccattcacagtgatcaaccctgtccttggcagatgaatggaatgcttctgccacaaggctgtgacaacccagctgacatctgctagttcaccctctctacaagagaagaagaatgtttgattgtccg

SEQ ID NO: 3413 - DNA, 1467 bp, Rattus norvegicus
gggcggcaccgagtgacagcgctgagaggcttaagatctccggagccgctcgccatggctggcccgcagcagcagcccccttacctgcacctggccgagctgactgcatcccagttcctggaaatctggaagcactttgatgctgacggaaatgggtacattgaaggtaaagagctagaaaacttcttccaggagctggagaaggcaaggaaaggttctggcatgatgtccaagagcgacaattttggagagaagatgaaggagttcatgcagaagtatgataagaactcagatgggaaaattgagatggcagagctggcgcagatcctgccaaccgaagagaatttccttttgtgcttcaggcagcacgtgggctccagcgctgagtttatggaggcttggcggaagtatgacacagacagaagtggctacatcgaagcaaatgagctcaagggatttctgtccgacctcctgaagaaggccaaccgtccctatgatgaacctaagctccaggagtacacccaaaccatactacgcatgtttgacttaaatggagacggcaaattgggtctctcagagatgtctagactcttgcctgtacaagaaaacttcctgctgaaatttcagggtatgaagctgacctcagaagagttcaatgccatcttcacattctatgacaaggatggaagcggctacatcgatgagaacgagctggacgccctcctgaaggatctgtatgagaagaacaagaaggagatgaatatccagcagctcaccacctacaggaagagcgtcatgtccttggccgaggcagggaaactctacagaaagsacmkggagattgtgctttgcagtgagccccccatgtaaaggggtgaagggacaggggctgcttctgcacctccyctaaaccctkcccsyyactsccmwramwmwmwwraaamwccttcccagacctctccacccctgcaacytgcacacaccagcctgtggggcaggaaaggagagatggaaagagggtggctggtakcattcctttgagytgcaccagcccaaccctggcctgacagacagctgtgcctgtggtgggtgggtcacacggttggtgggtaggggcacaggtggggcttcyctagtctctttgctgtgatgcatgagctcctcgctgtatgattagcttccgagtccaacagagtgcactccttcctcttgytgcaccagcctccttctccccaggccccccactgacccccgcaattccaggttctgtccaccggcttgctaatgatataactgtcttctcagagctactgtggagggtcattgccctcttcttgtgttcttgacttgtgtgttccttttattttggggtttccctgtcttctcgtttaccaaagaagagtttacagagaataaagtggaaatgtcctgccgtgramrmwwammmawwaaaaaaaaaaaaaaaaa

SEQ ID NO: 3414 - DNA, 3804 bp, Rattus norvegicus
ccgacgaggggcagtcgggtgcctctcggagatgtttagtgcgtgaggtctctctggcctccaagcaccatgcagaaagccatccgactgaacgatggccacgtcgtgtccctgggactgctggcccagagagacggtacgcgcaaaggctacctgagcaagaggagttcggacaacccaaaatggcaaaccaagtggtttgcgctgctgcagaacctgctcttctacttcgaaagtgactcgagctctcggccctcggggctctacctgctggagggcagtatctgcaaacgcatgccctcccccaagcgagggacctcctccaaggagtccgacaaacagcatcattacttcacagtgaacttctccaatgacagccagaagtccctagagctgaggaccgatgactccaaggactgtgacgagtgggtggcagcgattgctcgcgccagctacaagatactggccacagagcatgaggcgctcatgcagaagtacctgcacctgctgcaggtggtggagacagagaagaccgtggctaagcagctgcgacagcagctcgaggatggcgaggtcgagatcgagcgcctgaaggcagagattgcaaacctgatcaaggacaatgaacgtatccagtccaaccagctggttgcccctgaggatgaggacagtgacatcaagaaaattaagaaggtacagagtttccttcgcggatggctgtgccggcgaaagtggaagaacatcatccaggactacatccggtctcctcatgccgacagcatgcgcaagaggaaccaggtggtgttcagcatgctggaagctgaggccgagtacgtgcagcaactacacatccttgtcaacaattttctgcgcccactgcgcatggccgccagctytaagaaacccccymtaayacatgwcgacktcmsywktmtctttcwraamarwrarammawmatgttcctgcaccagatcttctaccaaggcctgaaggcccgtatcgccagctggcccaccctggttctggcggacctgttcgacatcctgctgccaatgcttaacatctaccaggagttcgtccgcaaccaccagtacagtctccagatcctagcacactgcaagcaaaaccgggactttgacaagctcctcaagcagtatgaggccaagccagactgcgaggagcgcacactggagaccttcctcacctatccaatgttccagatccccaggtacatcctgacactccatgagctgctggcccacacacctcatgagcatgtggagcgcaacagcctggactatgccaaatccaaactagaggagctgtccagggtcatgcacgacgaagtcagtgagaccgagaacatccgcaaaaacctggccattgagcgtatgatcaccgagggctgtgagatcctccttgacaccagccagacctttgtgcgccaaggttccctcatccaggtgcccatgtcagaaaagggcaagatcaacaagggccgcctggggtctctgtcccttaagaaagaaggtgagcgccagtgtttcctgttctccaagcatctcatcatctgcaccagaggctctggtagcaaactgcacctaaccaagaatggcgtgatttccctcattgactgcactctactggatgatccagaaaacatggatgatgacggcaaaggacaagaggtagatcacctggactttaagatttgggtggagccaaaggattccccacccttcacagtcatcctggtggcctcatccaggcaggagaaggcggcatggaccagtgacatcatccagtgcgtggataatatccgctgcaacgggctcatgatgaatgcctttgaagaaaattccaaggtcaccgtgccgcagatgatcaagtctgatgcttccttatactgtgatgatgttgacattcgcttcagcaaaaccatgaattcttgcaaagtgctgcagatccgctatgccagcgtggagcgcctgctggagcgcctgactgatcttcgcttcctgagtattgactttctcaacaccttcctgcactcctatcgagtcttcaccgatgctgtggtggtcctagacaagctgatcagcatctacaaaaagcccatcactgcgattcctgccaggtcactggaactcctgttctccagtagccacaacaccaaacttctgtacggagatgcccccaagtcgcctcgtgccagccgcaagttctcctcgccgccgcccttggccatcggcacttcgtccccagtccgccgccggaagttgtctctcaacattcccatcatcacaggcggcaaggcgctggaactggcttcgctcgggtgcccctccgacggctacaccaacatacactcgcccatatctcccttcggcaaaaccacgctggacaccagcaagctctgtgtggccagcagcttgaccagaacgccggaggagattgatatgaccactctagaggagtcatcaggcttcaggaagccgacctcagacatcttgaaagaagagtctgatgatgaccagagtgatgtagacgacacagaagtgtctccaccaacaccgaaatcattcagaaacagaatcactcaagagttcccactctttaactacaacagtggaatcatgatgacatgtcgcgatctgatggacagtaaccgcagccctctgtcagctacctctgcctttgccatagcgactgcaggagccaatgaaagccccgcaaacaaggagatatatcgaaggatgtctttggccaacacagggtattcctctgaccagagaaatatcgacaaagagttcgtgatccgcagagcggccaccaaccgtgtactgaatgtgttgcgccactgggtcaccaagcactcccaggactttgaaactgacgacctcctcaaatacaaggtgatctgctttctggaagaggtcatgcatgacccagaccttctaccacaagagcgaaaggcagcagccaacatcatgaggactctgacccaggaagaaataactgaaaaccatagcatgctggatgagctcttactaatgacggagggtgtgaagactgagcccttcgaaaaccactcagccatggagatagcagagcagctgaccctgctggatcaccttgtcttcaagagtattccttatgaggaattctttggccagggctggatgaaggcagataagaatgaaaggacaccttacattatgaaaaccaccagacatttcaaccatatcagtaacttgatcgcttcagmamkwskccgaaacgaggaggtcagtgcaagggcaagcaccatcgagaagtgggtggctgttgccgmcatttgccgctgcctgcacaactacaatgctgtgctggagatcacttcctccatcaaccgcagcgcaatcttccgactcaagaagacatggctcaaagtttctaagcagacgaaatctctgtttgacaagctccaaaagcttgtgtcatcagatggccgatttaagaacctcagagaaactttgcgaaattgtgatccaccctgtgtcccttacctggggatgtacctgaccgacttggcattcctcgaggaaggaacacccaattacacakaggacggcctggtcaacttctccaagatgaggatgatctcccatattatccgcgagattcgccagtttcagcagactacttacaaaatcgagccccagccaaaggtaactcagtacttagtggatgaaacctttgtgttggacgacgaaagtctgtatgaggcctccctccgaattgaaccaaaactccccacatga

SEQ ID NO: 3415 - DNA, 930 bp, Rattus norvegicus
atggtgctggagctctatctggatctgctgtcgcagccctgtcgcgctatttatatcttcgccaagaagaacaatatcccgttccagatgcatactgtggagctgcgcaagggtgagcacctcagcgatgcctttgcccaggtgaaccccatgaagaaggtaccagccatgaaggatggtggcttcaccttgtgtgagagtgtggccatcctgctctacctggcgcacaagtataaggttcctgaccactggtacccccaagacctgcaggcccgtgctcgtgtggatgagtacctggcatggcagcatacgacccttcggagaagctgtctccggaccctgtggcataaggtgatgttccccgttttcctgggtgagcagatacgcccggagatgctggcagccacattggcagatctggatgttaacgtacaggtgctggaagaccagttcctccaggacaaagacttccttgtcggaccgcacatctccctggctgacgtggtagctatcacrgagctgatgcatcctgtaggtgrtggctgcccagtctktgaagggcgtcmcaggctggctgcatggtacaggagagtggaggcagctgtggggaaggacctcttcctggaggcccatgaggtcatcctgaaggtgagagactgtccacctgctgaccccgtcataaagcaaaagctgatgcccagagtgctgaccatgatccagtgacgtcagaagcttcatccctgcaccagccaggccactcgcattacacgactgtgcgccccagccctcacggcatgwtggtttytgggcgagggtccytcttcacccttttcccatgctagccacccatggtcacaactacaaccactacttttccctttgagtttgggcaataaaccgaggctcgdttcgraaaaaaaaaaaaaaaaa

SEQ ID NO: 3416 - DNA, 3269 bp, Rattus norvegicus
agataagctgagagccagctatgcagccatgcttagagacgctcaggacaaacttcccgggtcctttctttctggtcaatctggagcagccttcggagcgagttggtttctcatsmakycsckgcmgmcagagacgggtgacacaggttggaacaattggaagtctcattgtacaacatgcttcgactaagtctcccacccaatgtttcaatgggatttcgtctggtaactctggtggctctcttgtttacccatgttgaccatataactgcagatacagaggcagaaacaggaggaaatgaaaccactgaatgtactggctcatattactgtaagaaaggggtgattctgcccatttgggaaccccaagacccatcttttggggataaaattgctagagcaactgtgtattttgtggccatggtctacatgttcctcggagtttctattattgccgaccggtttatgtcctctatagaagtcatcacctctcaagaaaaggagattaccataaagaaaccaaatggagagaccaccaagactacagtgcgtatctggaatgagactgtgtccaacctgaccttgatggccctgggatcttccgctcctgagattctcctgtctgtcattgaagtgtgtggccataacttcaccgcaggggaccttggtcccagcaccattgtgggaagcgccgccttcaacatgttcatcatcatcgcgctttgtgtttacgtggtcccagacggagagacgaggaagattaaacatctgcgtgtgttctttgtgacagcagcctggagcatctttgcctatacctggctttacataattttgtctgtcagctctcccggtgtcgtggaggtctgggaaggattactcactttcttcttctttcccatctgtgttgtgttcgcttgggtcgcagcaaggcggcttctcttttacaagtacgtctacaagcggtacagggctggcaagcagagggggatgatcattgaacatgaaggagacagaccagcttccaaaactgaaatcgaaatggatgggaaagtagtcaactcccacgttgacaatttcttagatggcgctctggttttggaagtcgatgagagggaccaagatgacgaggaagccaggcgtgagatggcaaggattctgaaggaacttaagcagaagcatcccgacaaagagatcgaacaattaatagaattagccaactatcaagtcctaagtcagcagcaaaagagccgagcattttaccgaattcaagctactcgcctgatgactggagctggtaacattttgaagaggcatgcagctgaccaagcgaggaaggctgtcagcatgcatgaagtcaacatggatgtggttgaaaatgacgcagtcagtaaggtcttctttgagcaagggacataccagtgtctagagaactgtggtactgtggccctcaccattattcgaagagggggtgacttgaccaacactgtgtttgttgacttcaggacggaagatggcacagccaatgctgggtctgattatgagttcacggaagggactgtgatcttcaaacctggggagacccagaaggaaatcagagttggcatcattgatgatgatatctttgaagaagatgaaaactttcttgtgcatcttagcaacgtcagggtctcttcagaagtctcggaagatggcatactagactccaatcacgtgtctgcgattgcttgtctcgggtcacccaacactgccaccataaccatttttgatgatgaccacgcgggcatctttacttttgaggaacccgtgactcacgtgagcgagagcattggcatcatggaggtgaaggtgctgagaacctctggagcgcgaggaaatgttatcattccctataaaaccattgaaggcacagcccgaggtggaggggaggactttgaggacacctgtggagagctggaattccagaatgatgaaatagtcaaaacaatatcagtcaaggtaatcgatgacgaggagtatgagaaaaacaagaccttcttcattgagattggagaaccccgtctggtggagatgagtgagaagaaggccctgttgttaaatgagcttggtggcttcacattaacagaaggaaaaaagatgtatggccaacctgtcttcaggaaggtccatgctagagatcatccgattccctctaccgtaatcagcatttcagaggagtacgatgacaagcagccactgaccagcaaagaggaggaggagaggcgcattgcagaaatggggcgccccattctaggcgaacacaccaagctggaagtgatcattgaagagtcttacgaattcaagagcactgtggacaaactcattaagaagacgaacctggccctcgtggtggggaccaacagctggagagagcagttcattgaagcgatcacygtcagygctggggaagatgacgatgatgatgaatgtggggaggagaagctgccctcctgttttgattacgtgatgcactttctcacagtgttctggaaggttctgtttgccttcgtcccacctacagaatattggaatggctgggcctgcttcattgtctccatcctcatgatcggcctactgacagccttcattggagatctggcttcccactttggctgcaccattggtctgaaagattccgtgactgcagttgtgtttgtcgctcttggaacctcagtgccagacacatttgccagcaaagtagcagctacccaggaccagtatgcagatgcgtycataggcaatgtcaccggaagcaacgctgtgaatgtcttcctgggaatcggcgtggcctggtccattgctgccatctaccatgcggccaayggggaacagttcaaagtgtcccctggcacgctagctttctctgtcactctcttcaccatttttgctttcatcaatgtgggggtgctgctgtatcggcggaggccagaaataggaggtgagctgggtgggccccggactgccaagctcctcacatcttccctgtttgtgctcctgtggctcttgtacattttcttctcctccctggaggcctactgccacataaaaggcttctaaaggaacaatcaagatataataaatttatatatatatgtatacatatatatatacataaaaattatgtataatgaacagaggaaactgacatttgtcatgttcacttaacctgctgatggaatccagcttcaagaacgtactctgtactaggccggaagtcagaaaccatcatctcc

SEQ ID NO: 3417 - DNA, 2064 bp, Rattus norvegicus
  misc_feature (289)..(290): n is a, c, g, or t
  misc_feature (347)..(347): n is a, c, g, or t
  misc_feature (352)..(353): n is a, c, g, or t
  misc_feature (361)..(362): n is a, c, g, or t
  misc_feature (485)..(523): n is a, c, g, or t
  misc_feature (530)..(530): n is a, c, g, or t
tacagcactgcacagactcctcaccatggacatcaggctcagcttrgytttccttgtccttttcataaaaggtaattgataaaagtgtgatyatckstgtkgtgtkcayatgagaataakarartttattttgttttgttgtgttagtgatggttttctaaccagtattctctgttwrmaggtgtccagtgtvaggtvmarctgswgsadwcdgrdggvrgmytdgtrcrgcctkgaagrtchhtrawmctctcytryrymgchwywgrahtcacytwmmryrrctwtnnmatsvmyykgrtshdccrvgcwccarvrarsggkcykgagtgbdtygcrhvhrttanthmynntggyrbynnvamtwaytwtcsrgayyccvtrrargscmdmttyachrtctccarrgatwatgsrvrrrrcwscywatayctrcarrtgrahrstykgavrtctgakramacggccasktayywyygtrcrmnnnnnnnnnnnnnnnnnnnnnnnnnnnnnnnnnnnnnnnhshsksnycmrggvvhyhyvgtcachgtstcytcagmsarwcarymsycssawcygtcttccccctcgtctcctgcgagagccccctgtctgatgagaatttggtggccatgggctgcctggcccgggacttcctgcccagctccatttccttctcctggaactaccagaacaacactgaagtcatgcagggtgtcagaaccttcccaacactgaggacaggggacaaatacacagctacctcgcaggtgttactgtccgccaaaaatgtccttgaaggttcagatgaatacttggtatgcaaaatccaccatggcaacaaaaacaaagatctgcatgtgccgattccagctgtcgttgagatgaaccccaatgtgagtgtgttcattccaccacgtgatgccttctctggccctgcaccccgcaagtccagactcatctgcgaggccaccaacttcagtccsaaacagatcwyagtatcctgrctacaggatgggaagcctgtgaaatctggyttcaccacagagccagwgactgtcgaggmcaaaggatccagaccccaaacctacaaggtcataagcacactgaccatcactgaaagcgactgrctgaacctgaatgtgttcacctgccgcgtggatcacaggggtctcaccttctggaagaacgtgtyctycacatgcgctgycagtccatstacagacatsctakccttccccatccycccctmctttgctgacatcttmctcaccaagtctgctaagctgtcctgtctggtcacaaacctggcaacctatgacaccctgaatatctcctggtcttccaaaagtggtgaaccactggagaccaacactaaaatcatggaaagtcaccccaatggcaccttcagtgctgtgggtgtggctagtgtttgtatggaagactgggataacaggaaggaatttgtatgcactgtgactcacagggacctgccttcaccacagaaaaaaktsatctcaaaacccaatgaggtggccaaacatycacctgctgtgtacctgctgccgccagcccgtgaacawctgatcctkagggagtsgkccacagkcacctgcctggwgaagggtttctctsctgcagacatctykgyrcagyggcttcagakrgggcaaccmttgkcmtcagacaagtatgtgaccagtgccccaatgccagagcytggggctccaggcctgtacttcacccacagcatcctgactgtgacakakgasgaatggaactccggagagacmtacacctgtgttgtaggcyacgaggccytgccacacatggtgaccgagaggaccgtggacaagtccactggtaaacccacactgkacaatgtatcgctgatcatgtctgacacaggtggcacctgmtattgaccatgstagcgytcaaccaggcaggccctrggggtcgagttgctctgtgtatgcaaactaaccatgtcagagtgagatgttgcattttataaaaattagaaataaaaaamaatccattcaaawrwmaaaaaaaaaaaaa

SEQ ID NO: 3418 - DNA, 3585 bp, Rattus norvegicus
cgggtggggccggaagtgccgctcccgggtgggggctgttcatggcggtttcggggtctccaacagcttctcaggttgaaatccaaaagcctcccgaggcgggtctgcggagtttgagatttttgcaggtgtgaaatgactgagtacaaactggtggtggttggagcaggtggcgttgggaaaagtgctttgacaatccagctaatccagaaccactttgtggatgaatatgatcccaccatagaggattcttaccgaaaacaagtggtgattgacggtgagacctgtctactggacatactggacacagctggacaagaggagtacagtgccatgagagaccaatacatgaggacaggcgaagggttcctctgtgtgtttgccatcamkarkagcaaatcctttgcagatattaacctctacagggagcaaattaagcgsgtgaaagactctgatgatgtacccatggtgctggtagggaacaagtgtgacttgccaacaaggacagttgacacaaagcaagcccacgagctggccaagagttatggaattccattcattgaaacctcagccaagacccgacagggtgtggaggatgccttttacacgcttgtaagggagatacgccagtaccggatgaagaagctcaacagcagtgaggatggcactcaaggctgtatggggctgccctgtgtggtgatgtagtaagaccctttaaaagttctgtcatcagaaaygagccactttcaagcctcactgatgccctggttctgacatccctggaggagacgtgtttctgctgctctctgcatctcagagaagctcctgcttcctgcttccccaacttagttactgagcacagccatctaacctgagacctcttcagaataactacctcctcactcggctgtccgaaccagagaaatgaacctgtttctccccagtagttctctgccctgggtttcccctagaaacaaacacacctgccagctggctttgtcctccgaaaagcagtttacattgatgcacgagaaccaaactatagacaagcaawwmwrwwrwmaamartttcttaagctctaaggtaacaattgctggtgatttccccctttgcccccaactgttgaacttggccttgttagttttgggggaaatgtaaaaattaatcctcttccccgagaatagaattagtgttgctgattgcctgatttgcaatgtgatcagctatattctataagctggcgtctgctctgtattcataaatgcaaacatgagtactgacgtaagtgcatccctagtcttctcagctgcatgcaattaaatccaacgttcacaacaaagtgccttgtcctaacagtgctctgtaggcttccgttatagttcgtattgaaatagatgtttcaagaaccattgtataggaaagtgactatgasccatctaccttggagggaaaggtgaatctacctgatggcagatgcttrtatmtgtacacatatgtacacaaagacagtttccctgtttgcggttctcccaggagaaagagggaactgaaacgattatgactaatttcatttaattctagctaatctttttttttttttttggagggggggagtaggttaccacctataaatatttgtaatttcttctagcttactgataatytaatagtcaatgagcttccattataataaattggttcataccaggaagccctccmtttatagttagtcagatactgtmaaaattggcatgttattactttatacctgygattaatgattcttcaaaccttaaatatagktattgcaggcrggttatatctttgctgcatagtttcttcatggaaaaaaaaaaawawatatatatatggagagagtggccctcagttyccatctcaccatccctctctttcagcctagatcarttcaagcatcctataggagcttgaataattatctcagttgaacaaaccatggtgctaatggaccaggtcatggtttcaaaacttgaacaagccagttagatcacagagaaaacagttcatccatatttgcctccctgcctattactcctgcttgtagacttttgcctgatgcctgctgttcgagctataaggataaaarttagtgtggttctacaccaggactgggaatgcctggtgagctgttgggtaagcctagacacctttacattttcagacccgtatttttagccccatggaaactgaagccagagttcacacctccatctcttcccccattagataaatgttcttaatctatatagctttttaaaagtatttaaaacatgtctataagttaggctaccaactaacaaaagctgatgtgtttgttcaaataaagaggtatcctttactacttgagaaaagaatgtaaaatgccattaattgttgtcatgtagaagtttgatatttgtggtaatgccctgataattcattggtgagtttgttagtcatggtgatacttaaaatataactcatctcagtaatttcaatgaaaacataaaatgggatgccttgattgaaaaaagcaaacctaattccaaaatgaccattttctcttctgatcttacgacacctaaaaatctgagatccttgggattcatttgtttataacaggaacttgctatgtaatcttggctggcctcaaactcacaatgctcttcctgcatcagtctccaaaatgatgggattacaggcacatgccaccacacacacctgatctggtttctaatgaatttttattgttaagcaaatccccatcaccttgaaactaatcagaagagggaagaaacatatgttgtgctcctcagtgctaatgctgggatctttcaccaggggtttgcattcttaagtaaactgctgcctttttacaacataggctcagtcatcctcctgaagctgcttgagaccaacacttggtcttgttcttttttaatgtgtctgtatgactggtggtggatctctaaaaagtttattaaactccagttagggagaaagttactccccttggcccttttgaccatatccatgtgtgtgtgtgtgtgtgtgtgtgtgtgtgtgtgtgtgtgtgtamayayrkrtgkrtgtatgtgtgtctgtagttggtctccagttcagatgcccttactagcatatattcccacagggtgtgggtttcggcacaacagtgacaaacttgaaagccaagtaaatccagttggtgtttttagagagcataattagtgaagatctggtttacctcaaagtcacaaagcctctcttcctgaattgaagtgcctggcccactgtcacaaattaacatgtggaaggcagctggttgaagctttgttcacaccattggagagtatgaaaataagtgttctaagacctctgacaccgaatccgtgtaaacctgttaaatgccatgtgttccaggacttagagtgtgtgagttggtaactcagtactttgtttactastgccgtgggagcgctgtgtgcacagtggakgtgggcgtgttttaggcggccatctgcwkagtcagcctttaaactgctgtgaactttgtcatgacttgaaga

SEQ ID NO: 3419 - DNA, 3353 bp, Rattus norvegicus
agggctgctcctgaatgggggttgttcatggtggtttcgcggtctccaacagcttctcaggttgaaatccaaaagcctcctgaggcggggtctgcggagttcgagatttttgcaggtgtgaaatgactaagtacaaactggtggtggttggagcaggtggcattgggaaaagtgctttgacaatccagctaatccagaaccactttgtggatgaatatgatcccaccatmsaggattcttacygaaaasaagtggtgattgacggtgagacctgtctactggacatactggacacagctggacaagaggagtacagtgccatgagagamcaatacatgaggacaggcgaagggttcctctgtgtgtttgccatcaataatagcaaatcctttgyagatattaacctctacaggkagcaaattaagcatgtgaaagactctgatgatgtacccatggtgctggtagggaacaagtgtgacttgccaacaaggacagttgacacaaagcaagcccacgagctggccaagagctatggaattccattcattgaaacctcagccaaaacctgacagggtgtgaaggatgccttttacatgctcataagggagatacaccagtactgcatgaagaagctcaacagcagtgaggatggcactcaaggctgtatggggctgccctgtgtggtgatgtagtaagctgcactgatgccttggttctgacatccctggaggagacgtgtttctgctgctctctgcatctcagagagctcctgcttcctgcttccccgactcagttactgagcacagccatctaacctgagacctcttcagaataactacctcctcactcggctgtccgaccagagaaatgaacctgtttctccccagtagttctctgccctgggtttcccctagaaacaaacacacctgccagctggcttagtcctctgaaaagcagtttacattgatgcagagaaccaaactatagacargcaattctgttgtcaacagtttcttaagctctaaggtaacaattgctggtgatttycccctttkcccccaactgttgaacttgkccttgttagttttgggggaaatgtcaaaawttamtctcttccygagaatagaattagtgttgstgattgcctgatttgcaatgtgatcagctatattctataagctggcrtctgctctgtattcataaatgcaaacrtgaataatgacatgagtgcatcctagtcttctcagctgcatgcaattaaatccaacgttcacaacaaagtgcctttgtcctaacagtgctctgtaggcttccgttatagttcgtattgaaatagatgtttcaagaaccattgtataagaaagtgaatatgagccatctaccttggagggaaaggtggatctacctgatggcagatgctttgtatatgtacacaaagacagtttccctgtttgcggttctcccaggagaaagaggaaaccgaaacaattatgactaatttcatttaattctagctaatctcttttttttgggggggggggagtaggttaccacctataaatactggtaatttcttctagcttactgataatctaatagtcaatgagcttccattataataaattggctcataccaggaagccctccatttatagttagtcagatactgtaagaattggcatgttattactttatacctgtgattagtgattcttcaaaccttaaatatagttattagcaggcagttatatctttgctgcatagtttcttcatggaaaaaaaaatatatatatatatatacacatatatatacacacatatgtatatatacacacacatatatatgcacacacatatggagagagtggccctcagttcccatctcaccatccctctctttcagcctagatcagttcgagcatcctataggagcttgaataattatctcagttgaataaaccatggtgctaatggaccaggtcatggtttcaaaacttgaacaagycagttagatcacagagaaaacagttcawcyatatttgctycctgcctawtactcctgcttgtagacytttgcctgatgcctgctgttcrmgctataaggrtaaaagttagtgtggttytacmccaggactgggaatgcctggtgagctgttgggtaagcctagacacctttacattttcagacccgtatttttagccycatggaaactgaagccagagttcacacctccatctcttcccccattagataaatrttcttaatctatatagctttttaaaagtatttaaaacatgtctataagttaggctaccaactaacaaaagctgatgtgtttgttcaaataaagaggtatcctttdctrcttgaraaaaraawrhaaaawgccattaattgttgtcatgtagaagtttgatatttgtggtaatgccctgataattcattggtgakttttgttagtyrtggtgatacttaaaatataactcatctcagtaatttyaatgaaaacataaaattggatgccttgattgaaaaaagcaaacctaattccaaaatggcctttttctcttctgatcttacaacacctaaaaatctgagatccttgggattcatttgtttataacaggaccttgctatgtaatcttggctggcctcaaactcacaatactcttcctgcatcaatctcccaaatgctgggattacagacacatgccaccacacacacctagctgatctggtttctaatgaatttttattgttaagcaaattccccatcaccttgaaactaatcagaagagggaagaaacatatgctgtgctcctcagtgctaatgctgggatcattcacaaggggtttgcattcctaagtaaacttctgccttttacaacatggctcagtcatcctcctgaagctgcttgaggccaaccaacacttggtcttgttcttttttaatgtgtctgtgtgaccggtggtggatcctaaaaaatttatcaaactccagttagggagagagttactccccttggcccttttgaccatatcccctgtgtgtgtgtgtgtgtgtatgtgtgtgtgtgtgtgtgtgtgtgtacacatacatatatgtatgtgtgtctgtagttggtctccagttcagatgcccttactagcatatattcccacagggtgtgggttttggcacaacagtgacaaacttaaaagccaaataagtccaattggtgtggtatcaaagtgtttttagagagcataattaatgaagatttggtttacctcaaagtcacaaagcctctcttcctgaattgaagtgcctggcccactgtcacaaattaacatgttcctgtaaggcagttgg

SEQ ID NO: 3420 - DNA, 1587 bp, Rattus norvegicus
ctgcgtgccaaggtgcccacagtcctgcagacagccgggaaactagtagccgataactatgcgtcccctgaactgggagccaagatggctgccaagctcagcggtctgcagagccgatatgcaagggtgacttcagaaggggccttggcagagatgctgggggcggacctgcaaatgctctctggggacccacacctgaagacaacacacatcccagaagatgccaaagacagaattcctggaattgtgcccatgcagattccctccccagaagtctttgaggacctgatcaaattttccttccacacaaatgtatttgaggacaacattggctacctgaggttcgacatgtttggggattgtgagctacttatccaggtctcagagctgctggtagaacacatctggaagaagatcgagcacactgatgccctcatcatcgacatgagatttaacatcggcggccccacctcctccatctcagccctgtgctcctacttctttgacgaggcacctcccgttctgctggacaagatctacaaccggcccaacgactcgatsagsgaactttggacacactcgcagctcacaggtgaacgatatggctccaagaagagtgtagccatcctgaccagcggtgtgacagccggcgccgccgaggaatttacttacatcatgaagaggctgggccgggccctggtcgttggtgaagtgacaagtggaggctgccagccaccacagacctaccacgtggacgacacgcatctctatatcaccatccccacagctcgctctgtgggcgccacggacggcagttcctgggaaggggtgggtgtgacacctaawgtagttgtctcttcagaattggctcttaccagagccamggrgatactccagcgggccctgaggssgtaaggcagagccgagggctctgagaaggatcctcatggccagagctgtggtggaaggctctctgggccactactggggctccagcatgggatcctgcctgagaccccaggcagccagccggctggaggcgctgaactcaggcattgggcattgtccggggctcctctgcctgtgcccactaccagcctccctctctgaaaagtgggagctcagtcatctcaaaggtagccccctagtggttgttctggggagactgaagtccatctctctcttatccacacttcctagctgcctgcctcctskmsscatactgtctccaagagcaattctgtcaggagagggaattgaaccacagatgtaaaggcacatgtggcagtctgctctttctagtagcaatcttttcagaaatcaaaagaaagaagtgcttaatgcttgtagcacttcccaatgttacagttcctctttacctcaggacagggttatctgtaaggtcacccctagtagacaatattactaagtcaagatgcatgtaatacccaaaacaaacccatgtgtgtaatccccaaaccgcccatcaatccctctgtttaatgaatctgactttctatatccccrrwmmwwrwraawawwmmgggtaacaatggtggtgagtarmmwraaaaaaaaaaaaaaaaa

SEQ ID NO: 3421 - DNA, 1524 bp, Rattus norvegicus
gaggagagtgagtagtactgttggggacggcgtggcaggcagtcgctagccctggaccgagggactccctacaacacagaaccggctctctagagaaaaggacgatcctcactcgtctttgtcctgagtacaaatgcactgttcttggaagcgacccgtgctcctgtccgtgcatgagcccatgcccaccacagcctctctgggcattgaaatgttcaacatcaccacgcaagccctggggtctgctcataacgggaccttttcagaggtcaactgcccagacactgagtggtggagctggctcaatgccatccaggcccccttcctctgggtcctcttcctgctggccgcactggagaacatctttgtcctcagcgtgttctgtctgcacaaaaccaactgcactgtggctgagatctacctgggcaacctggcagccgcggacctcatcctggcctgcggattacccttctgggccatcaccatcgccaataacttcgactggctgttcggagaggtgctgtgccgcgtggtgaacactatgatatacatgaacctctacagcagcatctgcttcctgatgcttgtgagtatcgaccgatacctggcgctggtgaagaccatgtccatgggccggatgcgcggggtacgctgggccaaactgtacagcctggtgatctggagctgtacgctgcttctgagttcacccatgttggtgttcaggaccatgaaggactacagggaagagggccacaacgtcacggcctgcgtcattgtctacccgtcccgctcctgggaggtgttcaccaacatgctgctgaacctggtgggtttcctcctacccctgagtatcatcaccttctgcacggtgcgaatcatgcaggtgctgaggaacaacgagatgaagaagttcaaggaggtccagacggagaagaaggccactgtgctggtgctggctgtcctggggctctttgtgctgtgttggtttcctttccagatcagcaccttcctggacacgctgctgcggcttggcgtgctgtcgggatgctggaacgagcgtgccgtggatattgtcacccagatcagttcctacgtggcctatagcaacagctgcctcaacccgctggtgtacgtgattgtgggcaagcgcttccgaaagaagtcccgagaggtgtaccaggcaatatgccggaagggaggctgcatgggagagtccgtccagatggagaactccatggggactctgaggacctctatctcggtggaccggcagatccacaagctgcaggattgggcggggaacaagcagtgaacacaagccatcgggcaggacgactgccgagcgtgtgaggactgctgggacctgagcttctcagcctgggttcaggaaggagcttgaagcatcctagggaatcaggcaggtgattccagtcttgtctcacggcataagcgtgctgtgggggatggggaccctggagcatagaggggttgttattactggctggtgctctaaatcccatgagt

SEQ ID NO: 3422 - DNA, 1565 bp, Rattus norvegicus
cttttctcctgatggctgggatctgccctgctgtccttggcttcccagatggcacactgggaaatgacactctactccataaagatcaagacaaggggacacaactggacagtctcacattggagtccatcaacactgactttgccttcagcctttacaagatgctggctttgaagaatccagataaaaatgttgtcttctccccacttagcatctcagctgccttggccattgtgtccctgggagcaaagggcaacaccctggaagagattctagaagttctcaggttcaatctcacagagagctatgagacagacatccaccagggctttgggcacctcctccagaggctgagtcagccaggggaccaggtaaagatcatcacaggcaatgctctgtttattgataagaaccttcaggtcctggcagagttccaggagaagacaagggctctgtaccaggttgaggccttcacagctagcttccagcagcctcgtgtgaccgaaaagctcatcaatgacagtgtgagaaatcagacccaggggaagatccaggaactggtctcaggcctgaaagagaggacatccatggtgctggtgaacatcctcctctttagaggcaaatggaaggtgccctttgaccctgattacacatttgagtctgagttctacgtggatgagaagaggtctgtgaaggtgtccatgatgaaaattgaggaactgactacaccttacttccgggatgaggagctgtcctgctctgtgctggaactgaagtacacaggaaattccagtgccctgttcatcctccctgataagggcaggatgcagcaagtggaagccagcttgcaaccagagaccctgaagaagtggaaggactctctgaggcccaggaagatagatgagctctacctgcccaggttatccatttccactgactatagcctggaggaggtccttccagagctgggcattagggatgtcttctcccaacaggctgatctgagtaggatcacaggggccaaggacctgagtgtctctcaggtggtccacaaggttgtgctggatgtgaatgagacaggcacagaagcagctgctgccacaggagccaatttggtcccacgtagtggaaggccacctatgattgtgtggttcaacaggccattcctgatagctgtctctcacacacatggtcagcatatcctctttatggccaaagtcattaaccccgtgggagcctaaagctcccaatatctaatagttctacccaggtccatgagaccgagcctgcatgtggatctctgtgtataacccaaccttcaaactctgattggctgttgcaaagttggcttagacagtgacatcgactatctctgtggctcccagacattcaggagcgtttggactgtaatgtcaggttctcaggcccttgggagcatctgcacatgtttctgaacctggaatctgtcttttttcttcttcccttgtgactcctctttctgtgttcataccccaaacctagccactgtcaagtacacccagtcccaataaaggctttgagcaccg

SEQ ID NO: 3423 - DNA, 2380 bp, Rattus norvegicus
  misc_feature (1936)..(1936): n is a, c, g, or t
  misc_feature (1997)..(1997): n is a, c, g, or t
gtcagcctggagataagggtgaaggtggtgcccctggacttccaggtatagctggacctcgaggtggccctggtgagagaggtgaacatggccctccaggacctgctggcttcccgggtgctcctgggcagaatggtgaaccaggtgctaaaggmgaaagaggtgcccccggagagaaaggtgaaggaggccctcctggtgccgcaggaccccctggtggttctggacctgctggtcctcctgggcctcaaggtgtaaagggtgaacggggcagtcctggcggtcctggtgctgctggctttcccggtggccgtggtcttcctggtcctcccggcaacaatggtaatccagggcccccaggacccagtggtgctcctkgcaaggatggccctccaggtcctgcaggtaacagtggttytcctggaaaccctggagtagctggaccaaaaggtgatgctggccaaccaggagagaaggggccacctggtgctcagggtcctccaggatctccaggtccacttggaattgcagggctaactggagcacgaggtcttgctggaccaccaggcatgccaggtccacggggtagccctggacctcagggtatcaagggtgaaagtggaaagccaggagccagtggccataatggggaacgtgktcytcctggaccccaaggtcttcctggtcagcctggtacagctggtgagcccggaagggatggaaaccctggatcagatggtcagccaggtcgagacggatctcctggtggcaagggtgatcgtggtgaaaatggttctcctggtgccccaggcgctcctggtcatccaggaccacctggtcctgttggtccatctggaaaaaatggtgacagaggagaaacgggtcctgytggtccttctggtgytccaggtcctgctggagctcggggtgctcctggtccccaaggtccacgaggtgacaaaggtgaaactggtgaacgtggctctaatggcatcaaaggacatcgaggattccctggcaatccagkwcccccaggttctcccggtgctgctggacaccagggtgcagttggtagtccaggccctgcaggtcccagaggcccagttggtccacatggacctcctggraaagatgsaysargtggacatccaggtcccattggaccaccagggcctcgaggtracagaggtgaaagaggatctgagggctcgcccggtcaccctggacagccaggaccccctggaccccctggtgcccctggtccctgctgtggtggcggtgctgchattgctggagttggaggtgaaaagtctggcggcttttcaccatattacggggatgatccaatggatttcaagatcaacactgaggagatcatgtcttcactcaagtctgtwaacggacaaatagwgagtcttatcagccctgatggttctagaaaaaaccctgstcgsaattgcagagacctgaaattctgccaccctgaactcaagagyggagaatactgggttgatcctaaccaaggctgcaagatggatgctataaaagtgttctgtwatatggaaaccggagaaacatgcataaatgccagtcccatgactgtcccgcggaagcactggtggacagatgctggtgctgagaagaaacatgtttggtttggagaatctatgaatggtggytttcagttcagctatggcaatcctgatcttcctgaagatgtccttgatgtacagctggccttcctcagacttctttccagccgggscwcsmrgmwywttacataccactgcaaaaacagcattgccyacakggatcagsccaatggcaatgtaaaraagtctcykrrgcysatkggatccmatsagggrgaattcaaggbtgaaggaaatrgcaaattcacttacacagytbtakaggatggctgcactaaacacantggtgaatggagcargacagtstktgaatrtcaaacacgcaagsccwtgrgactccycatnwtagatwtcgcmccytatgacattggtggtcctgatcaagaatktggtgyggacattggccctgtttgctttktwtaagccaaactbtytgaaaccccmgcawaacadaaaccacayccatgtgttcctcttgctttaatytcgtcaacmmgtgaaagtgvccaactaaattccagttatttatttccaaacttwtggaaaaagcmtaatttgacaaaaatmgamtacaatttttytgctgtttcacccmccaatacagttcaaatgcttttgttttatttttttaccaattccaacttcataatgtytcaatggtgctwtaataaataaacatcaacacttttdtgdtraaaaaaaaaaaamaaaaaaaaaaaaaaaaaaaa

SEQ ID NO: 3424 - DNA, 1339 bp, Rattus norvegicus
cggctgtaactgtagcaaccggtgttgggtggggatgagaagagaccagagagagagagggtcagagcgacaggggatgagacaggctggtcagagtctgcactgattgttggagacgcaaaggaaagttttttctatgtctccaacctccccctcctcccccgtttctctctggagaaactaaaatctagactggacagcatccacaagagaagcacctagaagaagatttttttttcccagcagcttgctcaggaccctgcaggagctgcagccggaactggtcccgccgataaccatgaactcttcctgctgcccgtcctcctcttatccgacgctgcctaacctctcccagcaccctgcagccccctctgccagcaaccggagtggcagtgggttctgcgagcaggttttcatcaagccagaggtcttcctggcactgggcatcgtcagtctgatggaaaacatcctggtgatcctggctgtggtgaggaacggcaacctgcactcccccatgtacttcttcctgctgagcctgctgcaggccgacatgctggtgagcctgtccaactccctggagaccatcatgatcgtggttatcaacagcgactccctgaccttggaggaccaattcatccagcacatggacaacatcttcgactctatgatctgcatctccctggtggcctccatctgcaacctcctggccatcgccgtggacaggtacgtcaccatcttctatgccctccgttaccacagcatcatgacggttaggaaagccctctccttgatcgtggccatctgggtctgctgtggcatctgcggcgtgatgttcatcgtctactccgagagcaagatggtcatcgtgtgcctcatcaccatgttcttcgccatggtgctcctcatgggcaccctgtacatccacatgttcctcttcgccaggctgcacgtccagcgcatcgcggcactgccacctgctgacggggtagccccgcagcagcactcgtgcatgaagggggccgtcaccatcaccatcctgctgggggttttcatcttctgctgggcgcctttcttcctccacctggtcctcatcatcacctgccccaccaacccctactgcatctgctacacggcgcacttcaacacctacctggttctcatcatgtgcaactctgtcatcgaccccctcatctacgccttccgcagcctggagctgcggaacaccttcaaggagattctctgcggttgcaatggcatgaacgtgggctaggaacccccgaggaggtgttccacggctagccaagagagaaaagcaatgctcaggtgagacacagaaggg

SEQ ID NO: 3425 - DNA, 1959 bp, Rattus norvegicus
ccacctataatttattccacctctggcaaaggactgcaaaggcagccaggaaggagattcatcttcacatggacgagatggcaaccactcagatttccaaagatgagcttgatgaactcaaagaggcctttgcaaaagttgatctcaacagcaatggattcatttgcgactatgaacttcatgagcttttcaaggaagcgaatatgccattgcccggatataaagtgagagaaattattcaaaaactcatgctggatggcgacagaaataaagatgggaagataagctttaatgaatttgtttatattttccaagaggtaaagagcagtgacattgctaaaaccttccgcaaagccatcaacaggaaagaagggatttgtgctctgggaggaacttcagagttgtccagtgaaggaacccagcattcctactcagaggaagaaaaatatgctttcgttaattggataaataaagctttggaaaatgatcccgattgcagacatgtcatacccatgaacccaaatactgatgacctattcaaagcagttggtgatggaattgtgctctgcaaaatgatcaacctttctgttcccgatacaattgatgagagagcaatcaataagaagaagcttacacccttcatcattcaggaaaacttgaacttggccctgaattctgcttctgccattggatgtcacgttgtgaacattggtgccgaagatctgcgtgccgggaaacctcatctggtcttgggactgctctggcagattattaagattggcttatttgctgacattgaattaagcaggaatgaagcactggcggctttgcttcgagatggtgagactctggaggagcttatgaaattgtctccagaagagcttctgctgagatgggccaacttccatctggaaaactcaggctggcaaaagatcaacaacttcagtgctgacatcaaggattccaaagcctatttccatctactcaatcaaattgcaccgaaaggacagaaggaaggggaaccacggatagatattaacatgtcaggtttcaacgaaacagatgatttaaagagagccgaaagtatgcttcagcaagcagataaattaggctgcagacagttcgttaccccggctgatgttgtgagcggaaaccccaaactgaacttggcctttgtagccaacctctttaataaatatccagcactaactaaacctgagaaccaggatattgattggactcttctagaaggagaaactcgtgaagaaagaacctttcgtaactggatgaactctcttggtgtgaatccccatgtcaaccatctctatgttgacctgcaggatgccctggtgatcttacagctgtatgagagaattaaagttcctgtggactggagtaaagttaacaagcctccatacccaaagctgggtgccaacatgaaaaagttagaaaactgcaactatgcagttgaattagggaagaatcaggctaaattctccttggttggcattggaggacaagacttgaatgatgggaacccaaccttgaccttggctgtagtctggcagctgatgagaagatatacccttaatgttatggaagatcttggagagggtcagaaagcaactgatgacatcattgtaaactgggtcaatggaacattgagtgaagctggaaagtcaacttctattcagagttttaaggacaagacgatcagctccagtttggcagttgtggatttaattgatgccatccagccaggctgcattaactatgaccttgtgaagactggaaatctaacagaagaagacaagcacaataacgccaagtatgcagtgtcgatggctagaagaataggagccagagtgtatgctctccctgaagaccttgtggaagtaaaaccgaagatggtcatgaccgtgtttgcctgtttgatgggcaggggaatgaagagtgtaa

SEQ ID NO: 3426 - DNA, 8239 bp, Rattus norvegicus
tcagctaggccccaccccagaagtagtctgacaacacaaaactaactcaatggtatattttgtcccacttagctttgtttgggttcatttgttttgtttttgtattgttttgtctgctatgtcttttccctgtttgattccgttgggagtttttatttgcgcgcgtgtgtgtgtgtgtgtgtgtgtgtgtgtgtgtgtgcgcgtgtgtgtttgtgtgtgtaggggttggtctcctggctgttgttcatatttttgggttttttgtgttaaagatgagtgggagggaggtagggaggatctgaaagaatagggaggcacaatacaaaagaatttgatcttagaatcacacaaaatagagatttttgtatgaattcatataaaatttaagaaactacataagattttttactatctcaggatgactaaaattgtatttcctgttatttcaactatctaaaaaaaatctgaaaccaagcaccaagggtgtgtgtgtgtgtgtgtgtgtgtgtgtgtgtgtgtgtgtgtgtgtgtatacacattttttataatcatttgctcagtttggtttgattgcacaaaaatgcaatcatgactactcagtaggcattgttagtttccagaccacctagactggtgggtcagtatcactttggggtcacatatcagacattcttcatattagatatttacgttgggatttatgacaattattaagcacagacaaaattaactaatggttggaagtcactaaaatatgaggaactatatgaaaaagtcaagcattagaaaaatagaggaccactgacctacgctatagtggatcagcctgagcaacgtagtgacacactgccccaaatttaaaaaagaaaacgtgatcacaaacaaacaaaacattaagccccctggaaatacattgctctgggttcactcccagcactacacataaacagctctgctaagtcaactttgtgtaagtgtgagaatagtacatgagaacagatgtttagaaacccacaagttcaaaattaaaatactacttcatcattttcgattaacacttaaaactcaggctcacattatcgaagatgagtcatttattttagaaactatgggagttattaacattatatatatatatagagagagacaggcagacagagagacagagacagagagacacagagacagcgagagacagagacagagagagacagaacacacagagagacagagacacacagagagacagagacacacagagagcagagacagagacagagagagacagagacacacagagagacagagacagagagattgtgtgagaatgtgttattttgcaatagagaaacatgcactcagtagtgattttaatgctttctcatttttcttactaaatactctcttacaatcacaggaaaattcaatttagtatttatttcatttattttagaaactatggatgttattagcaaggtacactgtgtgtgtgtgttatttagtaataaagtaacatatattcaatagtgatttttaattctctgtctcagttttcttgctaaattctctcatagtcacaagacaattcaattttttaaaatatttgtacttcccacattacatttattttaagatgacttaggaaattccacaagattaacacataagaaaagatgtcctataagaataatcagaataaagaatttatctcttcttccttaaaataaaaaacatgcactatagttccccctgtgtttatctgaaacaatcacatttcaactcactgtaaagcttccgaaggaagcctcacgctcttagttactgaggatattcagaaatggaaaaactgcaggagcacactgccaaattggcaaggatgcctcctgtctgtgaagcatcagttcctttatctcccaacttgtgtctctttattgccaatgaaattatcctacaacatatataagagctgagacgtctggtcctccacattccaccactcaaaattagctgaccagagagcttctgaccagcacatttccccgctcagaagtttctccaaggtaggaacctgggagtttgaagccctttaacttcatgttaaaagttgctcatccttcagaggtagcattttaatgggttgcttattagatattcttgttttactagctagttttaaaagttgaaatatttataatgtgtagcttttaagttgtttttctaacgtgtggctcttctgtaaccatgatagtgccctggaccatgcatctaggctacccagagtgttgtctccgggcacactcgtggcaggtgtcattcatctcagttttgggcactaggcatgagccctgtctcctttcttgttctccctccataagctgctcctgattcctgtcccttaacaccaaagagtcccctctaccctctttctatgcttcctttgagcacagctgaagtctctcaatattctcaaatggactcaaatccctcagctctctgacttctgcttaatcagattatggttcttttttaatcccacatagcactctggtcctggctccctactcatagtaaaccagccttaaatgccccacacaagagggtggtttcgtaggggctgccatgctggtatttaaaagtgtgcacaatcaatgtactatacaattttacaataaagacagtgcaacttaaaaaatgatattcttgtttcaatactgcaagaataagtatctacatgaaactgtgagtcatcaaatgtattacattttgcaaaacttatgcaagcagccgaaaagtattcgtgttgatcacttaggatagtaagtccaccaaagtctgccgttcccttttctccttccatgcacctttaacattctcaataaagggctattctcagatgtattttgaaagagaattattctaaagtatacatttgcaaataattttgcttgctttaagcatcatatgaaatataacttaggaaaacccaatacatgacatttgctcataattcccagggaaaaactgttcctaagattcttcccaggtttgtactagtcaactcccatatttacaatatcagcagggttggctagaggatgtgacagaccactgtgcaatgctgtgaaggaaggattcacacagtctggctccagaaacttatcacaatccttgagataactgagaagaaaatagacctaaataattctgtttggttctgtccaacttactgattgaacacagttgcataaaagaaagcagatttgagaactttcattgcacacaaaatgacccagtgtactgtcaaaacttgtctattaagtcattctttgatctttgctgtatttagtaggaagacttcttccttagctattacacaccataagaaattaaacataatcaagttaaagtggtagcatctcaaatatgagagtacagaaacttgatgctgtagaactgcgattttaaaataaaacaaaatgcacgaatagaaaatgtccatctctaaataatcaatgttaagccaaagccttcttttttagatcttctgttgctcagactcttcaaggacaaaggtgtggcactgttcctgcatcagctcacaagacaaaaatgaatattaggcccatcattttagagtcagatgttatgacctgacaatattatgctgttaatactgagtccaagataaaattcagggttattttaaaatacgctgcacaacatatagaccatgttccgactaataccattttgttgtataaatgatgctaaccagtcattgtgcttacattcagaggctaccaaaagatgaagccactgtatttggtgtttggcctttgggttctcataggatgcttcctggtgagtatcacaggtcccttccacaaaccttcatgctctcttcttaacttttatgtcagatattttaccattatttatttgcatttcctaatatagacaaactacaagttactgatgaaatgccaatcaagtagtttaatttccattttgaaaacctgttttaatagtcacagagtttgcaataaatcattaggaaaataacagatatacccccagaaagtttactactgcataatattcagatcaatatcaggatgaccaaagggaaatatggatatgttcagctcattattaagttgcatcaaaaagaaaaataatgtgaactatttttcccaccttttatgcctaggtaactaaaactaaaattctgaatgaccttgcaaacagttatcaacatttaaaatggcacacgttctaaccaatgtctgacatgagtgaatgaagtaataagatagagagagcactagtaacataaatgcatcatgaaataatatagttcattgaaaatatggataaaagatatagggcatgtaggaggaaagagacaaacaggactgtgagggaccatgaggcatgaacagggcgcacatgcctgatctttaccacagagatgcaaagaaagaatgaggtcagagtaaaaacaggcagtagaaagatcctgaggagcaaggtctttaagtagatacgatgttaaatgaggttcattttctgaggaacgtttttaaccaaatacatatcagaaaaaaatgagagaggctaagagcaggcaaaacagaactgtggggaaggtgcaaagctctgggatggtgttgggtgactggacataggtgtggtcattttctaaatgaagtttgctcattgaatgaggtgacatactgttacagagtaaaaggaagtcaaccccccaaggaacaatggagaagttgttccctgaactcatcagtgactttacaggctgcaaggcttagacagtggacttcattgctacaggctgtgacctcttggtgaagtaagagggggtcatctgcaggtaaatatggggtctcaagttgaggtagaaagctgagagaaagaaagagagagagttggtgtcaaggtggaaccttacaaacctctacaaaactggaaagggcagacaaagaaactagagaggattataagcagtgcctaaggacaaaagtcttgccataaactgtccttggcatcttctgtgactgctcacaaaattaaacttgaggggacaagtttttagggttagcttgaactttagaattgcagaaggcaatgtgtcagatgacaaattatggaaagaactaaacaaataagtgaatgaatggggattctctccaacttatgatctagagacaagctggacttaggatcagtagcacaggaacaagagaacatactgtccctctacttgacatggccctttatgttctagagtcttcccacctcatttcaaagacttccctgacattgcaaccatacttaacctgtcaactctacgaacactccaacttcctaatgcatttgtttctgccaatgcctttcagctgtgattatttttaacactgaagcttaagaaaattcactaaatttaattagcatagcaaacaagacactgaacactcaccaagtgctgtgccgaggcaagcactggctaggccctaggcaacattaagtcacttacagcaaatgagagcttaggcatgaatctcagtatcacatgacaaaccttgggactccaggattttgaaacatgtataactgtcattttcaaaggacaaaacccagagttttagtcttgcagtgggaacatgacagaggcaacagaggcagaactacaaccacagcatttacacttcaaagaggagtattctgcacccctttggcctatatttgtaacaccttgtattgtaaattctctgtctatagacacacaggaagcacatttgtacctggcgccaatgctatgtttaagatcttccttcaagtaaaaatctgtaacatatttttaaatttattggaaataaaacccagaacaattataagctcttgaattacagggacatttttcttttctcttttcttttattggatttttttatttatatttcaaatattattcgctttcctggtctcctgaatataagcccccattccctcctcctcctccccttcctctttaagggcgttcatgtattgaactaaaaaatatcatcctgagtgaggtaactcaatcacagagacatttttcaattctgtatggcaactacttccatttgggattgatttcagtgaccatgtctactaaaacagcttaagattttttccatgatcttttctttccattcaatgacatctgagctttcattgataccttgtaggctcagaccaaagggggaaaatatattctcagagtggtttgaggatatttttacttagaaacacgtaaccattttctgtttctgcataataaattaccacaagttaggactgtaagaagcttattgtcatagcaaagtctacccttggcctagacatgtcctcctttccggtgactcaacaggcagaagaggaacctggaggtcaattccatcctcatcccatggccatcatttcatacttcataaaattccatcccgcatcatagtgctgagtggctccaattttgtttaatgtttaattaacatgaagtaacaagcttccgtgtaggattttcatattccaattgggtggacttccttgatctcacactagtctccccaacccagatccataatcttcttacccacattggactagtttactcaatatcattcttttttctttctattgcatccccaccagtttcccttcaagtttatttttttgatttttaaaagaaatataataggaaactttcagaaatgcaggtgaaactataaaatgtagtaagcacagtaactaatgctcagaagacaagtaccatgtattatctcttcacttcctagactataatctcaatgaatgtatcaagatcaggggaaatatgggtaaagccaatacagtagaaaggggccatgagaagagtcccctttttttcgcaggtcatgagccagaagccactactatctaatatagctaactgccatctatttctttctagtacaaagaacctttactataagtcaatacatcattccctacaacatgaaatctctaacatcttctgtttccagaattacagaatttgttttaaaagaacataattgataaactcaagacatcacatatcttgggagaactggacttttagaagccaccttaaattacacctagctcagaaagtatatgtgctaataattctgtgttatgtctaatttaaaattgtttattttccttctcccacagtctggtgagtgtcacagaggccccagaggacatgatcctagacgacgaccaccaccacctcctcctcctcctccccctccctttggtccaggaattggtcaaccaccccctccacattttggtccaggatttggtccaccaccccctcctcctcctcctccccctccctttggtccaggatttggtccaccaccccctcctcctccctttggtttttatcctccttatataccacatcctccacaccatagacctccagccaatcctcctacaaggcctcctccaagcaatcctccttctcgacctcctcccacagtacaagcaaatacaataccagctgccaatatctctgtaactactggtattgccccaaattccactgataatttctagaggtggtagcgattaataaattccatttggcagccagaataaaaataaaccaaagcactgtgaaatttgggagcaataatctttaaaagcttaagaaacaacctttacccaagaattatgcaaaatgacaataaagagcagagcagcattatacagcatctactgctgtcctcattgtgatgaccatactacctactgtgttactggcataaaattaatctttccagaaacctaacgttgttctagaaggcaaagtggttattggggaaaatacaactgtaatgtgcaatcatgaaaacagatgaaaagaaaataatatgcccccttgagtgtcacccatcaaataattactcatcatagaacatggtggtatatatccacacagcatttcctgaaaattaatgggtaaggtttcttcattatatttacccaaaaagggtctacatccatggattcaaacaatttttgcatgaaagagactcaaaacatacaaaggatgtttactgagcatgatcttttctaccatgattccttcaaccaatctactcggggcattgattagaatataattgacttttgttttgttcta

SEQ ID NO: 3427 - DNA, 6501 bp, Rattus norvegicus
ggatcctggagacctggaatgggccataaaatatcccgtctggtatcgttagtctgggaagtattctctcttgtctctcttgtcttgggaagagagtcttgtctctgtttgagacaggcaagaacctacttcagtggctacttctcaagctcctgtggccacccttggccctttctcagtaaatggggctaccaggacttcttcgtcacctgtggctgtgggctcaagccctgcccaacgtgatggtctgtaagacctgtgtcaagattgcagcctcgaggggcaggtgaatctggcggtcttttgagcctggtctacatggcaccactctctctggttgaggcagtcccacctaactagagagctcgttgcagtacagcctgaggtgaggaggcattgctcaaagtgtccctgtgtggctaagcatggtggtctggaggctgcctgtttgagcctgagttggggaaagaccggtctgcgaagacccaaaagtcacattcgagcttccacagtggcggccatgaggagtaaaggtccaatagactcactgccttgaagtgaggtttkggratggactccattttcaggkatatatatttatccagtccccttcaggactcagagtggtaaatgcccagcctggttcttcccacacaagctgtggagaatcctccttgaggctgggttggagcagggccccagacaaaacaggtgtgtgtgtgtgtgtgtgtgtgtgtgtgtgtgtgtgtgtgtgtgtgtttaatactagcttttttatatattgttttgttttttatttttttaaggatttatttatctattctatgtatagagtacactgtagctgtcttcagacacaccagaagagggcatcagattccattacagatggttgtgagccaccatggggttgctgggaatcaaactcaggacctctggaagagcagtcagtgctctaaacccccgagccatctctccagccctgctttttgtgtgttttgttttgtttaagatttatcattttatgtgtatgagtgtttttgcctgtatgtagttatatgtatcccctgtgtgcctggtgcctttggagtcagatgaggttgtcagatatcctgggattagaattacatttgattatgagctgacaggtgggtgcttggaagacaagtgctcttaaactgctgagtcatcgctcagtcctcgaagtttcttcttactctagtgctcttccacggccatcaggtaggctgcatgagcatctggggcagtcaaggccaatgcttcctgtaccctagccaccaacatcggctttttctgagctacggagaggtctcctcacactgctctggaggaaggacctctttttctgttggtcgagaggttcctctccaaacctttgctttgggtccaagcggtttccatttttaagatttgttttaaagtatgggtctctgtgtggctatgtggaggggagcgtggtgccaagggaggccagaggcatgtcatccctggaactggtgttacagttttgagctgcctgttgtggtgcctgtgctgagaacagaactcaggttctctacaagaggcgctcttaaccgcggatccatctctccagtttcccctttccacgttaacttttttttttttgcccttaatggggaaagtggaggcagcaacagggtggttgaagcccactagtcgcttcccaccaggagtgagtagtcagtgagcttttttagtgtctctggaacctgcgaggaagtcggtcctcagtctctggcactcagatggcagcagagggcgctcgcagcacagagacgcattctttgcatctcgcaagtcggacggaatggagtttgggtagggaagcattagggaaggggttcggaactctctcccaactctggcccggcccctacggttctctcggttgctggggtgctggatggaggtgtggcttatcatgcttaagcgcccaattctcttctgcaagttttctggagctgtcgggctgctgcaggctacttgagctctggcttaccgccctagatctgggtgctctgtgccagactcgcacgcagagagaaggcaagtggaccctcgggataaaccagcgccgggtctcggcacgcaccggttctcttcggtatgtattcttcccagaacgccgaccactccagactccctgctctccagacttggccgcgaggcggtgggaaagagaaaggcgttggggcccggggcgagtaaaggatgcgcgtcgcaggtccaagtcccgcacagctcaccttccacctaccccagtcggatcgcccgccccgcctccttccctcctccagctcccgcccccagtctcctccctcctcctggcgagctagctctgctcctcacgtccckgcgcggcgggttgactgcaggcgcggctccgggagagagagcgccttttcggagcgcaggctgcssttccccagtcagttctgtgcgtcctgcagctgtgcggtgcgacggcgcaacttccctctagtcccgggacagcagtgggacaacttggaaaacttctctgggacagactgtagggacgctgggcaccggtggaagaggatataagagaccgatggctggtcctgggtatccccggacctcctaggccgctttccgtcaggctacggtgcttcagagccatctgcacctcctgggggacgacccccaacagtagcggagccagagtggcgctatctcctgcgtaccgtgagtttggccagcatcgttccctctggacatgtccggccccaccatggaccatcaggagccctactcggtgcakgccaccgccgccatcgcgtcggccatcacctttctcatccttttcaccattttcggcaatgcgctggtcattctggctgtgttgaccagccgctcactccgtgcaccacaaaacctgttcctggtgtcactggcagcagccgacatcctagtggctactctcatcatccctttctctctggccaacgagctgctgggctactggtacttctggcgtgcgtggtgcgaggtctacctggcgctagacgtgctcttctgtacctcctccatcgtgcacctgtgtgccatcagcctggacaggtactgggcagtgagccgagcattggagtacaactccaagcgcactccgygccgcatcaagtgcatcatcctcactgtgtggctcattgcagctgtcatttctctaccgcccctcatctacaagggcgaccaacgccccgasscccgcgggctcccccagtgtgagctcaaccaggaggcctggtacatcttggcttccagcatcggatctttttttgctccctgcctcatcatgatcctcgtctacctgcgaatctacgtgattgccaaacgcagccactgcagaggtctcggagccargaggggctctggagaaggtgagtccaagaagccccagccggttgctgggggagtgccaacctcagctaaggtgcccaccctggtctctcctctatcttctgttggagaggccaatggacaccccaagcctccaagagagarggaggagggggagacccctgaagatcctgaggccagggctttgcccccaacttggtctgcccttcccagatcaggccaaggccagaagaaggggactagtggggcgactgcagaggagggagakgaagaggatgaggaagaggtggaagaatgtgaaccccaaacactgccagcatctcctgcctcggtatgcaacccacccttgcagcagcctcagacttctcgggtactggccacacttcgtggccaggtgcttctgggcaagaatgtgggagttgccagtgggcagtggtggcgcagacggacacagctgagccgggagaagaggttcacctttgtgctggccgtggtcattggagttttcgtggtctgctggtttcctttcttcttcagctacagcctgggggccatctgcccacagcactgcaaggtmccgcatggcctcttccagttcttcttctggatcggctactgcaacagctctttgaaccctgtcatctacaccgtcttcaaccaggacttccgccgtgcctttcgaaggatcctttgccggccgtggacccagactggctggtraggctgcctgttcgctgtctatgccagggttggtgccaggaccacccggtggtagtgccccacctccacagtctctatggccatttctctggggcccacttgcagacctcatcctcagactctcctgaaggggaaaggacaaaaatgctgttcctagggcccatttgaaaccttcccttgctggctgtactgtgggatggctyttcccttctctctccctggcaaggggaccttcttgaatatggccaaagccagmctggattagaatacctccctcccagccacctgtaagccaacaggcaggctaccctctcctggagaccccctgtsscttggcaggccacttgtggwgttwttgkttttcttcttcttcttstttttrtttktwmwtttgttcayytttatttyattttawtttwatttttwttttttwttttttgagacagggtctcaggtagcccagaccagcctcagacttgctgtgcagcccgaggatgctcttaagattctgatcatcctgccttcacctctccagcagtagagttaacaacaatccctaccataccwggtttacctgatgctggggaatgaattcagggcttcaagcatgctagggtagtcaaccgagttatatccctagccttgatcttcctcttgcttctcaaagagccggaagcccaacgtcgacatttcccaggaggacctgatgctgagaaagaggacggaaggaagaggattcagccatgccgagcacctgtgcttctcattggctattgggaaggctggttatgggctagtattgtggttttttgtttgtttgtttgtttgtttgggtttttttttaaagcttcctagctcctttaagctccagaagcatgggttggtttttcttactcagcatccccctgggaggcaagtggacacatggatgcctcagtggagaggtctggaatcctggcctcagcctcaccatgggctcctgatcactggcattcacccttgcaaagagcggggtgacaattgcctgccgcctacttgcggcagggagatgaaaggctttgcagagagctttgagctccgtggggggaacgagctagagagccagcaaatgtgattatctggtgatataaaaatccctttcctatgtgtttaccactgtgagccttcctgtagacctttgttctgggcttggggtgtgtgaatgcctaccccaaactggaagtgggttgaggtgtgcccgagccactctttcaaattccagaatwwckwkgagaatgcattcttgtgcattctcaaaggttttgagttattgtgctgttgtcagctcccccatctgttacctgtaacacagacagagttttcagtggcttggccccaaccccattagaggataagttctttgtcattgagcaggcaaatcggtttcctaagctaaaaatactcacatcaaggaagcagtctgagacgagatcctcaggtggggtgctggggctagagcaggcagcctgtggamtyctgggagagccaccctytgcggtggcccrgacaattctctgaacccccaagcaacacctttggagatataaccagttccaccccagctcagraggacgtctcatttgccgccaagraccctcacagtgatatggctgtgcactagggtgtctctacctcctggttgtcttcccaacttgggaattgctccccagagtgactggggatgtgtctaggccttccccacaagcagcctgacttcaactttgggcaataaacctcaacctcagggaaggtgtagtttgarccatggaggctacaagcgacacaggcttgggtgttagcttagkgtggakykrycrgattttgaaggtgctaagggagttttctcaggtagagacagtgatggttcctaaatagaattcctcctggagaggatgagtgtccagcttggttctcagttggttggcggcagttgtaaggccaggacattgatttggagtgtggctgaggggctgatttgattttctgcttttgttttktttkttttgagacagggtttcccctgtgtaaccctgactgttstggaactcacactccatagactaggctgccctagaactcacagagatctgcctgtctctgcctcctgagtgctgggrataaaggcgtacgccaccaccgcctggcagaggggcagatttataaccatttgccagctgmgactgtgtgtgctccgtgggacccaagccccctgttgtgacatataggtgtttctaagactctgagctattttatcartaaaggctattttgtmrtragmaaaaaaaaaaaaaaaaaaamkgatygygrscggcccctcgtgcc

SEQ ID NO: 3428 - DNA, 408 bp, Rattus norvegicus
  misc_feature (10)..(10): n is a, c, g, or t
  misc_feature (20)..(20): n is a, c, g, or t
gaattcaggnacccaaaatncraacagggacatctgtcaaagtggaacttcactgaaaatccagtgtgttgttgatagtcaagttgctttgatgttctggtaccaacagttccagggacaaaacttgatgctcatggcaactgcaaatgaaggctctgaagccacatacgagagtggattctccagggaaaagtttccaatcagccgcccaaacctaacattctccacactgacagtgaacaacgcaagacctgaagacagcagtgtctatttctgtagttctggaaccgggacaggggtctatgaagccaccttcggcccagggaccaggcttttggtaatagaggatctgaaaacggtgactccacccaaggtctccttgtttgagccatcagaagcagagtcgac

SEQ ID NO: 3429 - DNA, 1181 bp, Rattus norvegicus
caataattattggcccagatggacatcctctcactgtctacccttgcatgatttgtggcaagaagtttaaatcgagaggtttcttaaaaagacacatgaaaaaccatcctgaacaccttgccaagaaaaagtaccgctgtactgactgtgattacactaccaacaagaagataagtttacacaatcacctggagagccacaagctaaccagcaaggcagagaaagccatagaatgcgatgagtgtggaaagcatttctctcatgctggggctttgtttactcataaaatggtgcataaggaaaaaggagccaacaagatgcacaagtgtaagttctgtgaatatgaaacagctgaacaaggcctattgaatcgccaccttttggcagtccacagcaagaattttcctcatatttgtgtagagtgtggcaaaggtttccgtcatccatcagagctcaaaaagcacatgcgaatccatactggagaaaagccctatgaatgccagtactgcgaatacaggtccgcagattcttctaacttgaaaacacatgtaaaaactaagcatagtaaagagatgccattcaagtgtgacatttgtcttctgactttctcagataccaaagaggtgcaacaacatgctcttatccatcaagagagcaaaactcaccagtgtttgcattgtgaccacaagagttcaaactcaagtgatttgaagcgacacataatttcagttcatactaaggactatcctcataagtgtgacatgtgcgataaaggctttcacaggccttcagaactcaagaaacatgtggctgcccacaagggtaaaaaaatgcaccagtgtagacattgtgactttaagattgcagatccgtttgtactaagtcgccatattctctcggttcatacaaaggaccttccatttaggtgtaagagatgtagaaagggatttcggcaacaaagtgagcttaaaaagcatatgaagacccacagtggccggaaggtatatcagtgtgagtactgtgaatatagcactacagatgcgtcaggctttaagcggcacgttatctccattcatacgaaagactatcctcaccgctgtgagtactgcaagaaaggattccgaagaccctcggaaaagaaccagcacataatgcgacatcataaagaagttggcctgccc

SEQ ID NO: 3430 - DNA, 5339 bp, Rattus norvegicus
  misc_feature (2937)..(2937): n is a, c, g, or t
gggccacccaccaccttcggagctacagtggaatcactgtcccgaaggatccggacttcagggaccccaatgtcgggggagggagggcaagaggaatgagctcggaaagtgaggggtttgtgtcttgcgtgccgcctagacgccttgcgctcccttaccagtttcttcggggacacgaaagtattccggggagaatatgtgaatagttcgcctaacttggggtcggatactgtgaaaacgttcccaaaactagggaaataatagaccaaggtggtggaacctcttcattctaaaaatatttgactataaatttaaaataggcttagggatccattctggtatccacgagtatctatagaatgtctttaaatatcaccttatcggctcacacatttatcttgattctcaccagtccccacccccaaactctgtaaggctgccccagctgcaattctaaaggtgggggaacacaaaacacccccaacgaagccaatcgggaagcttccggtggtctggttcctggaagggcaactaatacttgcagtgatttacttttcttaattaaaaaataaattacacaaagagcctatcgtgtctcaacctttccttcaaagattttattttttctccggcagtggaggagggggataccagaggaccctggccaggataaaccggtcactgtaagaaggcaaatctcagaccccatccccacccccaccccacccccagcgaggaggaatagatgaaggaaataatggccaccatcttgagctgttgctgagattttcggggttttattttattttatttgtgagcgagtacatgccaggctggggaccctttaaagctcaaagatacccctctggccctttgcaaccaccccagtgcgccaggagggagcctgcacgagaacttagggctcgtctggcatcttcgcctgttacacagttcctgaattttacacgtgttgatgaaattgaaagaagtcgaggacgacgggatttcttagcaatcggtccgcccgtgggtgccctcgtggcgtcctcggaaacgcgcccattctctccgcttaagtatagggtgtccttgcaccccccacgatccccttccatacattctttcttggcttgcgtgtggcctggcctccctcctagctgtccccctgtccagagccgccgctaccccaccttcacaggtctcggaggacccacttggggaaagaagcccccctccccattgcccttgaccgctctttcccagcttagagagaagcagtcccggcgatttgcatatctacgaaggccgaggggggagggggcaggctttggtttgattsmccccccacccccgccgmtcactgctcccgagccccctccccctgcgcccgcctcggccgccccccctcctttttctctgcccggctttgatctctgcttaacaacagtaacgtcactcggactacaggggagttttgttgaagttgcaaagtccgtcgacrgccattaccaakmgsgmwryyggcgcagtagmagagagctrcagactccgcgcgctccggagaccggtcgtagagckcgagrcarckcscgycagcagcagacacsggagcccaaccmggaysacarccctccccaggcksccrckccatgkaacaccagctcctgtgctgcgaagtggakaccatccgccgcgcgtaccctgacaccaatctcctcaacgaccgggtgctgcgagccatgcttaagactgaggagacctgcgcgccctccgtttcttacttcaagtgcgtgcasagggagattgtgccatccatgcggaaaatcgtggccacctggatgctagaggtctgcgaggagcakaagtgcgaagaggaggtcttcccgctggccatgaactacctggaccgkttcttgtctctggagcccctgaakaagagccgcctgcagcttctgggggscacctgcatgttcstggcctctaagatgaaggagamcattcccctgactgccgagaagttgtgcatctacactgacaactctatccgccccgargagttgctgcaaatggaactgcttctggtgaacaagctcaaatggaacctggccgccatgactccccacgatttcatcgaacacttcctctccaaaatgccagaggcggatgagaacaagcagatcatccgcaaacatgcacagacctttgtggccctctgtgccacagatgtgaagttcatttccaacccaccctccatggtggctgctgggagtgtggtggccgcgatgcagggcctgaacctgggcagccccaacaacttcctctcctgctaccgcacaacgcactttctttccagagtcatcaagtgtgacccggactgcctccgtgcctgccaggaacagattgaagcccttctggagtcaagcctgcgccaggcccagcagaacatcgatcccaaggccaccgaggaggaaggggaagtggaggaagaagctggtctggcttgcacacccaccgacgtccgagatgtggacatctgagggccaccgggcaggcgggagtcaccaagtagtggcatccgcraagrgaaaggagccagcccgggtgctcctgacgaggtcccccttggggatgtgttgttacyagaagsggmaskwkkgttytytttkttrgttgtttttccttaatctttctcctttctatctgrykkmmgcawaagrkaaaaaaaawammwraaarctgtcttaaagagagagagagagatagaattcgcatcaccctgagtawagggagacgggggggtgctacaaaaatagaattctgtaccccagtaatcaactagttttctattaatgtgcttgtctgttctaagaataggattaacacacaggaarwmwwraraarrawwwttgattcttttatgtgttyamgaaaaaamanmwhrwgaaayattgctttaaaaaaagaagraaaaaaaaymcmkcrwrccattgttaaagtagaagggttttaggtagagaaatgtactctgctttggtgaaaaggcacagatttgggaaggtcctcaacctcactcccctgcttgttcagtgcctacagacctgttacctgatgatacctgtgctttatcccaggagtggggcagacctcttaaccttactgatggtcgattcgacctctagcgggctcgtgggtgtggcaacctccagggctcatgttatgggccctctgccccccacaacctgcaggttcacagagcgccagccagcacgcaggggtagggatgaaatagtgacataatatattctatttttggggaaccttcctgttttgggggttcctgtttagagagatgctggtttttggctggtggccctgcagcccactcaacatcaggttgaacccacagcttttcttttgtgtgtggtttgttttgttatgtttttccttctccatgttcccaaaaccattccatttcaaagcacttttggtcagctagctggaggcagtgttgctgggtgtgtgtgtgtgtgtgtgtgtgtgtgtgtgtgtgtgtgtgtgtcggtgggggagggggtctagtggaatggttggggatgtccacacactcaattctgatggctgcacagcaggtgtgtagggctggtagcatgaggtgcttgggaagttgtgttgggtcgagaagagaaagctctgttctcgtaccaccgggatcttcctgcaaagtcggagggatcttttggtgccagctggcgtttggaagtagggaccgtgatggcattacctggacaaggggattcaggacgactcttaagtctttcacacaggaggcttttaaacactaaaatctctaatttatacgtaaggctacagaagagtatttattgggaaggttgcccatgacccgtgtgactcaaagcaatgtgatcttcccttgattcaaacgcacaccttctkccctgctggcgaaggtttwrggccattgtctgagagactggtcttttattkgscaagtggggtgtcctcmaaaaaaamcaaammamammgamgvrrmygygggtctccttgactttcmmaacssamtysvccscrktgrmgagccmtcyaaacywgwggawwattmsgggacyscaaargagkcttgagtctggcacattcttgccgccgctcccaagttagcaacagtaggtaatttgcacmcctctggytctstgcctttytgttcagratgtkwyggwsgrrggtggagarcgggtggctggagaggggatgtgagagaagaagtatggagggtagggaccacacgggacagrccgcggctcctttcacagcgctgctaccaatgactcccaggatccccggcgttcggaaccagattcaygttgctttgtatctttcatgttgttttcgctgctattggagggtcagttttattttgttgttgttgktttgtttgtttttttttacaatgtcataaactgccatgttcaagttttaatttcctcgtagaagagtgtatttacagatgccctytyykgkactttttytatttattgtgattcaattttggattaatgtgattaccgctgtattcccaamaaaarrwrwwwwmmacacacacacacacacacacacacacacacacacacacacacaggttcctgtacacaatacctcatgtatcacctaacaatacataggcctgccaggcgggtggggcggtctgcctccagggaccctgggaccctgctggggatcatcctgtcatgctgggccttcatttgatctgggacatagcatcacrgcaskmvggscaactgtgttctgttagttatcaatattgttacttgtagcggcctgttgtgcatgccwccatgctgctggacccggmrmgmkdwrwtctrasyctcwsgtrmaksrwwtaakctgtkmggykmwarkgttyykkyhykwkktgtgtwactcacagcattgtgytaatgtaaagccagccgcaatgctgtaggccccaggttccctagcaagctsccaawccaaarggrtyrcsrccrgcttagytgaggcgtcccaaccaggcaggacccttgagggctgctgtgyccatggtgatggggtgaagttttgkccaaagggccaaaggctggtggatcyacacagtytgccctgtgacatgaatggctttgaggggctctggctggtggtcaggttggctttgtgtattctggttgacacaccatggcgcttcccagcacakacatgtgaccagcwtggtccaggaaaaaaamaaavamaaaaaamyctmgwrmyraawtyggtaaawtcccaaaaaaaaaaaaaaaaaa

SEQ ID NO: 3431 - DNA, 517 bp, Rattus norvegicus
cgtaagctcccagctgcgggcagtcctctaggctgtcctaaggagatctccaagttccaggcgtgcaagcagaactcgcacagccatgcgacagcacactcagtccctggaagttcagagtcactggatcagctcgagagtgaccaggaactcagctaccttgtcgtatctcacatactgctttcattctgatgactgcctcagggcacaatatggccaccagagctccagacctggtgactacattccaggcagaagaaaagaggaaagaaacccaaaaaaaaatttatttgttttgtaagagttttctttctagaaatcccagaaactcatgaagttctatttatctttccggccccctttatcatatggcaaagagagaaaggaaagtgaagtcctttggctagggaggaagttaccctaagtaacataaaaggggtgtggcttcaaggggggcaactcaacagccagcccttagacgatctgccctctaacctctgacctctgccctctccag

SEQ ID NO: 3432 - DNA, 628 bp, Rattus norvegicus
ctttskmdcrggsssgkrcgssggywagatgggyamgwkkcgtgktctccgtactgccsrraagctccgcagtcaccgacgggaccaraagtggcatgataavbagtacaagaaagcccacttgggcacrgcmcwsragsccaatcckkttgggggtgcctctcacgcaaagggaattgtrytkgaaaaagtaggggttgaagccaaacagycaaattytkccatccggaagwktgtcakggtgcagctcattaagaacggcaagaagatcacagcrttcgtgcccaatgacggttgcttgaacttcattgaggaaaatgatgaarktytggytgctggatttggtcgcaraggccatsccswggstgatattcytggrgtccgctttaaggtggttaaagtagccaatgtgtytcttttggctctgtacaaaggcaagamsgaaaghccaagatchyaaaattttgacaatggaaacmgmmtmatmaaytttwtwtccvrmaamaaaaaaaaaaaaamcaatggcggccgcaagcttattccctttagtgagggttaattttagcttggcactggccgtcgttttacaacgtcgtgactgggaaaaccctggcgttacccaacttaa

SEQ ID NO: 3433 - DNA, 614 bp, Rattus norvegicus
gccccactgcagcaggccgggctcggcctgggcgggcggggacggtagccggcgtgggccctgcagcttctcgtgtctgcgggtgctgtggagtcccgagtgtcccacgcggccktssccaggkycggywcgggkmmykcggcwyakvsdckwsbctshymrkcacsakggtgcgaatgaatgttctggcasatgctctcaagagcatcaacaacgcggasaagaggggcaaacgccaggtcctcatcaggccgtgttccaaagtcatcgttcggttcctaactgtgatratgaagcatggctacattggtgaattcgagatcattgatgatcacagagctgggaarattgttgtgaacctcacaggaaggttgaacaagtgtggagttataasccctagatttgatgttcaactcaaagmcctaragaagtggcagaacaatytgctccsrtcacggcagtttggtttcattgtgctracgacctcggctkgcatcatggrccatgaaraggcamgacgawaacatacaggagggaaaatcctggrattctttktttaaatgtaaagcataaataaaaagcctctgtggactgtgaaaaaaaaaaaaaaaaaa

SEQ ID NO: 3434 - DNA, 2000 bp, Rattus norvegicus
gtgcgcaagtggctggtgcgtgtggggggcagctggggccaagagggtccaccagaccccgggatgaccgcagccagtcgggccaacccctacagcatcgtatcatcagaggaggacgggctgcacctggttaccatgtcaggcgccaacggttttggcaatggcaaggtgcatacacggcgccggtgccgcaaccgctttgtcaagaagaacggtcagtgcaacattgaattcgccaacatggatgagaagtcacagcgctacctggctgacatgtttaccacatgtgtggatatccgctggcgctacatgctgctcatcttctctctggcctttcttgcctcctggttgctgttcggcatcatcttctgggtcattgcggtcgcccacggagacctggagccggctgagggccgcggccgtacaccctgtgtgctacaggtccatggctttatggcagcctttctcttctccattgagacgcagaccaccattggctacgggctacgatgcgtgactgaagagtgcccagtggctgtcttcatggtggtggctcagtccattgtgggctgcatcattgactccttcatgatcggcgccatcatggccaagatggggcggcccaagaagcgagcacagactctgcttttcagccacaatgccgtggtggctctgcgtgacggcaagctctgcctcatgtggcgcgtgggcaacctgcgcaagagccacatcgtagaggcccacgtgcgagcccagctcatcaagcccagggtcacagaagagggtgagtacatcccactggaccagattgacattgacgttggctttgacaagggcctggatcgtatcttcctagtatcgcccatcaccatcttgcacgagattgatgaggccagcccactgtttggcattagccgtcaggacctcgagacggacgactttgagatcgtggtcatcctggaaggcatggtagaggccacagccatgaccacccaggctcgcagttcctacctggccaacgagatcctctggggtcatcgctttgagccagtgctcttcgaagagaagaaccagtacaagattgactactcacacttccacaagacctatgaggtgccatctacaccccgctgcagcgccaaggacctggtggagaacaagttccttctgcccagtgccaactctttctgctatgagaatgagctagccttcctgagccgagatgaggaggatgaggtggctacagaccgggatggccgcagccctcagcctgagcatgactttgacaggctgcaggccagcagtggtgcccttgagcggccctacagacgggagtcagagatttgagtgcccttggcttagatgcagcaccaccctgaccacgataggttccatgtcccttggggacctgtgtttgagcagagcaggccgaattccttgggtcacagactcagtaacatcttagtctttttcatgttttcttgcaatagcttgggaaagttggcaggagggtggatkgccagaatgaccagctcatggcctcggaggctgatgtatacacacgggcaaggaagtgatttyttggggtagggttgtacaggagttggggactytgytggaggcctcgggagcaggtcctasccatggtgggagaaggctgtgtatgtacacttcattggtttttaatttgggcaagactgtttacaaacaaaaacaaaaaaaacccmcaaaacmcaagaaaacmctaacaggtggttcaatttttaaaattcatggtgtagggacagctggaatattytactcagcgctgcgaagcaatcagttgtwtggrgacccctgaaggttytcagaggtcgggtttytccctcacgtgggccagggctgcaagttgtcattyttaaggrtggatcaggcagtttgtgrccatgttacgatcctaataaagtatytgggtgtctytgggggtggggcccccttgggtgaaaaaaaaaaaaaaaaaa

SEQ ID NO: 3435 - DNA, 1923 bp, Rattus norvegicus
aattccctggggcgccctcttttaaaaatggagtcccaaatacagagaagatttcatcaccatggtctccctgtgtcaaagagctcttgttcttccgccatgtggctctgtgctctggtctgggcttctcttgctgtttgcccaatttggggacacccatcctcaccaccagtggtggacaccacaaaaggcaaagtcctggggaagtatgtcagcttagaaggatttacacagcctgtgsscgtcttcctgggagtcccttttgccaagcctcctcttggatctctgaggtttgctccaccagagcctgcagagccctggagcttcgtgaagaacaccaccacctacccgcctatgtgctcccaagatggagttgtgggaaagttactcgcagatatgttgagcaccggaaaagagagtatacctctcgagttttccgaagactgtctctacctgaatatttacagtcctgctgacttgacaaaaaacagccgattgcccgtgatggtgtggatccatggaggtggactaataataggcggagcatcaccctatagtggactagctctctctgcccacgaaaacgtggtggtggtaaccattcaataccgcctgggtatttggggattgtttagcaccggtgatgaacacagccgggggaactgggctcacttggaccagctggctgcactacgctgggtccaggataacattgcaaactttggagggaacccggattcagtgaccatctttggagagtcagcaggaggtgtcagtgtctctgctcttgtcttatctcctctggccaagaacctcttccacagagccatttctgagagtggtgtgstcctcactacaaacctggacaagaagaatactcaggctgtggctcaaatgattgctactctttctgggtgtaataacacctcatcagccgccatggttcagtgcttgcgccagaagacagaggctgagctcttggagcttacagtgaaactggacaatacctccatgtccactgtgattgatggagtggtactgccaaagacaccggaagagatcctgactgagaagagtttcaacacggtcccctacatagtgggcttcaacaagcaagagtttggctggatcattccaacgatgatgggaaatctactctctgaaggcagaatgaatgagaaaatggccagttctttcttgaagaggttcagccytaaccttaacatctctgagagtgtgattccagcaatcattgagaagtacttaagaggaacagatgaccctgccaaaaagaasgaacttctcctggacatgttttcagatgtctttttcggtatcccagctgtactcatgtcccgtagcctcagagatgccggagcgcccacctacatgtatgagtttcagtatcgcccaagcttcgtgtctgaccagagaccccagacagttcagggagaccatggtgatgaaatcttctctgtatttgggactccatttttaaaagagggcgcctcagaagaggagaccaatcttagcaagttggtgatgaagttctgggccaactttgctcgaaatgggaacccaaatggagaggggctgcctcactggccaraatatgatcagaaggaagggtatttssagattggtgccaccacccagcaagcccagaaactgaaaggagaagaagtggctttctggactgagctcttggctargaayccrmytcagwcagamcacwytgaaswcacakarrtgggtctctgccagcctcagtaccagaggagcaaagatggggctattccacaaaggatggctatttgccaaagatgaatcttacagaggaaactgcacaattgtacagttggggtatttgtatctcaactttgaaataaatttccttttagaaakcaaaaaaaaaaaaaaaaa

SEQ ID NO: 3436 - DNA, 1025 bp, Rattus norvegicus
actccgcccgtgctgggtctgtcgatcctcgttccgtcaagsaccgtgaaggggtcaacgtgaggtcggtggggttagtaacgcggtggcggcggctcctcctccaaaatttgagcaggtacagggtgccaaacaggatgtacacgctgctttccgggctgtacaagtacatgttccagaaggatgaatactgcatcctgatcctgggcctggacaatgctgggaagacgaccttcctggaacagtcaaaaacacgatttaacaagaactacaagggaatgagtctatccaaaatcaccactaccgtgggtctaaacattggcactgtggacgtaggaaaggctcgtctcatgttttgggacttaggtgggcaggaagagctgcagtcgttgtgggacaagtactatgcagagtsccatggtgtmatctatgtcattgatyccactgatgaggagaggctgtcagaatcaaaagaggcatttgagaaggtggtttcgagtgaagcactggacggtgttcccatcctggtgttggccaacaagcaggaygwggagacttscctcyccattcctgacatcaagactgcatycagtgactktacctgcaagattgscaggcgagattgtttgacccaggcytgmtytgccctcacaggcaagggarytcgagagggcatcgaatggatggtgaagtgtgtyswacggaatgttcaycggccrccacggcagagsgacatcacataagcaccttcatcctcacagtcytggactgtycatcccctagtgttggaagagtattytctgctggcttctgtcctcstgawrmwrrrrvwwrarmwrggtttgtctgttcawtytwawhtgcywtatgtttyctcwaaramaaamwwhhmwmwvwrwmwrrraaarwrwarrwawwmaragacaaamawrrrrwamawwracagtccagagctacatgccctacacttccatcccctgacccagattagagccctccttacaggtcaaaaaaaaaaaaaaaaa

SEQ ID NO: 3437 - DNA, 1490 bp, Rattus norvegicus
ccagcatcctcggacaccatgtcagactctgaggaggagagccaggaccggcaactgaaaatcgtcgtgctgggggacggcacctccgggaagacttccttagctacgtgttttgctcaagagacatttgggaaacagtacaagcagactatwggactggatttctttttgagaaggaktaccttaccaggaaatttgaatgttactcttcaagtttgggatataggagggcagacaatargtggcaagatgttggataaatacatctatggagcacagggaatcctcttggtatatgatattacaaactaccaaagctttgagaatttggaagattggtattctgyggtgaagacagtaagcgaagagtcagaaactcagcccctggttgctttagtaggcaataaaattgacttggagcatatgcgaacagtaaaacctgataaacacttacgattttgccaggaaaatggttttagtagccactttgtttcasscaagacgggagactctgtcttyctgtgttttcagaaagttgcggcagaaawyctgggaatcaagttaaacaaagcagaaatagaacagtcmcagagagtgktgaaggcagatattgkwaactwcaaccaggagcccatgtyaagaactkktaatccacctysgagctycatgtgtgcagttcagtgagcacacactgtattgatagttctggctgctcttccctggattgggcccaagctgcctaggaacatgttttatcagtgactgtctctgtagtcagctcacacttcctcctgctctgctccttcatcccttagtcgcctcagagtatcgggcagctccctggacaggaaggaattcagatttggaaccacatgttttgaaatctgaatggaaagtccattytytggattgagactgcctcctcgctccagaagaaccatgtkgcttctttatctcttctttttycccmgatttaaaaaatttaaacrgatwtgargatgcyccacgctktgatcatmattttytawhtgaacttgtwtatgtgaacgtgtacttkaragcactgatggkggaagttatcaaraaggkgttcctwtgctkgctwttaagagtaamctatmcaaagctgcwtytgattgaargtscttywratrwkgswksrrymrraakrttttytywtttttaaaargagcctaatgkgkttawattgkagkttawwactywyhagkmcysmkkattdrawawdrdawwwwwawyamhrdatsabggbcawtgcatattttatcawatttggcttarakggctttatgaattttgataaatggttcagctgatccyccacatggaatttytcctacaggctgtatgagagtgcttccagatgagtcatgawayccttggatcattgtggatcgatcacwctgwaccysaygtthtgatgtttttctcmcataaataaatttatttaaattmmaaaaaaaaaaaaaaaa

SEQ ID NO: 3438 - DNA, 3573 bp, Rattus norvegicus
acaccaattgtgcttacagcttgttttgttttatatttacattcatgtaacataaataacagttctaaaaaagaaagggggaccaaaaaacagaaaaaggaaagtcttaagaggcaaaggagcgggactcgggaccctctgcagacccttgactcagcccacccaggaccgtactagccatccgaacttctaattcatcttatccaactgaaagggagggcggcacaagccagaagcaaacttcggcggtctctgcggatctgtgattcccacattgagaggggtcgagagccagaaggcacaggaccccaccaggaggaggagttccgcgccttctcgccccttccaccaagcctgaaccttagactgaaccacgcgggacctaagaggcagaagagggtagtagaaaatgcggggctccggaccccgcggtgcggacgccgacggacccagggcacaggcatcgtggtgtcacgctcgtcgcggcgacaccccccgcgtccctgcctctctggcaggctgctattccgcacctctaaaggggcccctctggacgtgccttctcctgtgtgcggcgctccggacccttttggccagccccagtaacgaagtgaatttattggattcgcgcactgtcctgggagaccttggatggattgcttttccaaagaatgggtgggaagagattggtgaagttgatgaaaactatgcccccatccacacctatcaagtgtgcaaagttatggaacagaatcagaataattggctgttgaccagttggatctctaacgaaggtgcttccagaatttttattgaactcaagtttactctgagggattgcaacagccttcctggaggactggggacttgcaaggagacctttaacatgtattattttgagtcggatgatgagaatgggagaaatatcaaagagaaccagtacatcaagatcgataccattgctgctgatgagagcttcaccgaacttgaccttggagaccgggtcatgaagctgaatacggaggtcagagatgtaggacctctgagcaaaaagggattttatcttgctttccaagatgtcggtgcttgcatcgctctggtttctgtccgtgtctactataaaaaatgtccttctgtagttagacatttggctgttttccctgacacgatcactggagcagattcttcccagttgctagaggtgtcaggctcctgcgtcaaccattctgtgacagacgatcctcccaaaatgcattgcagtgctgaaggggagtggctggttcccatcgggaaatgcatgtgcaaggccggatatgaagagaaaaatggtacctgtcaagtgtgcagacctgggttcttcaaagcctctcctcacagccagacctgcagcaaatgtccacctcacagttacacccatgaggaagcttccacctcttgtgtctgtgaaaaggattatttcaggagggaatctgatccgcccacaatggcatgcacaactccttctccagtcaccaacgtgaagaaggggaaaatcgcaaagaacagcatttctttgtcttggcaagagccagatcgccccaatgggatcatcctggagtacgaaatcaagtactttgaaaaggaccaagagaccagctacacaattatcaagtctaaagagaccactattacggcagagggcctgaaacctgcgtctgtgtatgtcttccaaattcgagcacgtacagcagcaggctacggcgtcttcagtcgacggtttgagtttgaaaccacaccagtgtttgcagcatctaatgatcaaagccagattcccattattgcggtgtcagtgacggtgggagtcatcttgttggcagtgatgatcggcttcctcctcagtggcagttgctgcgaatgtggctgtgggagggcttcttccctgtgcgctgttgcccatccaagcctaatatggcggtgtggctacagcaaagcaaagcaggatccagaagaggaaaagatgcactttcataacgggcacattaaactgccaggagtaagaacgtacattgatccacacacctacgaagatcccactcaagccgttcatgaatttgccaaggagatcgaggcctcatgcatcaccattgagagagttattggagcaggtgaatttggtgaagtttgtagtggacgtttgaaactacccggaaaaagagaattgcctgtsrckaksaaaactcttaaagtaggctacactgaaaagcagcgcagagattttctgagtgaagcgagtatcatggggcagtttgatcatccaaacatcatccatctagaaggcgttgtgactaaaagtaaacctgtgatgatagtgacagagtacatggagaatggctccttagacacatttttaaagaaaaacgatggccagttcactgtgattcagcttgttggcatgctgagaggcatcgctgcaggaatgaagtacctttctgacatgggctacgtgcacagagaccttgctgctagaaacatcttaatcaacagtaaccttgtgtgcaaagtgtctgactttggactttccagggtgctggaagatgatcctgaggcagcctataccacaaggggaggcaaaattccaatcaggtggactgctccagaagcaatagcttttcgaaagtttacctctgccagtgatgtctggagctatggaatcgtaatgtgggaagttgtgtcctatggagagagaccgtactgggagatgaccaatcaggatgtgatcaaggcagtggaagaaggctaccgcctgccaagccccatggattgtcctgctgccctctatcaattaatgctggattgctggcagaaagatcgcaacagcaggcccaagtttgatgacatagtcaacatgctggataagctgatacgaaacccaagtagtttgaagacactggtgaacgcgtcaagcagggtatctactttgttggcagaacatggatctttggggtctggggcctacagatcagtaggtgaatggctagaagcaatcaaaatgggccggtacacagagattttcatggaaaatggatacagttcaatggacgctgtggctcaggtgaccttggagtgagtagtttktctgataattttwacatagctgttggggcaagaaaagtatattcagacaacagagtggatgcaatsaagggaaaacagtttacctgtgtccatatgtgtcagcttcaaagaagcctcatctttttttagcctgtgctgttaacagctgcatggttcctgcttcttgtgtccagtatctttgctattttgttcaycaaacagcacttgrgagtttggataattggattacaacccttggcaaagtaytggtactttgtgttktgaaaaaaaagacatttccttgagtttttawactggwacttwtgtyacwtgaatgtaaatwtaaaacaaaacaagytktaagcacaattggtgtggttagtcttgtgtaacaaaaacwtaaaargrttwaaaaraaaraaaaraaamaraaraaaaagtgraaggaaagggaaagaaaggaaaaaaaaaaaaaaaaaa

SEQ ID NO: 3439 - DNA, 2005 bp, Rattus norvegicus
tgcaagactgtcagctgggaaggaaacttggaggcctgaactgctgaaggagagctaagatggagatcattcccaacctttctatagagacctgggtgcttctagctactagcttgatgctcttctacatatatgggacctattctcatggcctgtttaagaaactaggaattcctggacccaaacctgtgcctttatttggcaccattttcaactacggtgatggcatgtggaaatttgatgatgactgctataaaaagtatggaaaaatatgggggttttatgagggcccacagccttttttggctatcatggatccagagatcatcaaaatggtgctggtgaaagaatgttactcagtcttcacaaaccgtcggtgttttgggccaatgggatttatgaaaaaggccattaccatgtctgaggatgaagaatggaagagacttcgaacaatcctgtctccaaccttcaccagtggcaaactcaaggagatgttccccctcatgagacagtatggagatacattgttgaagaacttgaggcgagaagaagcaaaaggggagcccatcaacatgaaagacatctttggagcttatagcatggacgtgatcactggcacatcatttggagtgaacgtcgattccctcaacaatccacaggatcccttcgtgcagaaagccaagaagatcttaaaatttcaaatttttgatccatttcttctctctgtagttctgtttccatttcttactccaatatatgagatgttaaatttttcaatttttccaagacagtcaatgaactttttcaaaaaattcgtaaaaacaatgaagaaaaatcgccttgattcaaaccagaagaaccgagtggattttcttcaactgatgatgaatactcagaactccaaaggccaagagtcccagaaagctctttctgatctagaaatggcagcacaagctattattttcatttttgggggttatgatgccacaagcacctccatttccttcataatgtatgaactggccactcgccccaatgtgcaaaagaaactccagaatgagattgatagagctctgcccaataaggcacctgtcacctatgatgctctgatggaaatggagtacctggacatggtggtgaatgaaagtctaagattgtacccaattgctaccaggctagacagagtctcaaaaaaggatgtggaaatcaatggagtttttattcccaaagggactgtagttacgataccaatctatcctcttcatcggaaccctgagtactggctagagcctgaggaattcaaccctgaaaggttcagcaaggagaacaagggcagcattgatccttatgtatatctgccctttggaaatggacccaggaactgcattggcatgaggtttgctctcatcagcatgaaacttgctgtcataggagtcctgcagaacttcaatatccagccttgtgagaagacacagatccctctgaagatcagtaggcaaccaattttccaaccagaaggacccatcatcctaaagcttgtgtcaagagattaaacccagatttggacagtgaatttccctcaggaaccatgttataatcttcaaggagactgtttcacagaacaccagagaatttaattaacattagaataagagcaatataatataggcttcatcaattttcctcgattactgagtattcagaaattcactgaacaggctcagtggctctgcggtgtatcatctattttatgattcaaagaaaattattaactcaatggtagatgtggaggttcatyatatgattcttgtggaccatctatacagattccagttagttccatcagttctgtattctaactgcagtagctgtttctctagagttctatcaatagaaactgttgtattgacagttagtaaatgtgtagcaaattttctctttgtaaaaatatatgatattaagaatataaataaatatatctttcawgaaaaaaaaaaaaaaaaaa

SEQ ID NO: 3440 - DNA, 4703 bp, Rattus norvegicus
agcacaatgttattttatactgactgtatattttaaagtatactttcagatatggcctcttmcagtatttaagatatagcaaggacatggctgatttttttttatatatatatataaaaaattggcactaataagtgggtttattggtcttttctaattgtatmatttaatttagtacamagtttgtaaactatcagaggatatatatatatatacatatatawattgtttctacgacacggtattgcatttctatctttttactacagtgatctgtggcagcggcttcatgttgtattttwtttactgaaattgtaaaatatccatcttaaagacatcaactattctgaaaattgtgtacaggatattcctttagtggtggaattaaaatgtacgaatatttgctttttcaaaaaaatgtattttctgttaaaggtttaaagatttttgctatatawtwtggaakaaatgtaatcgtaaatattaattttgtacctatattgtkcaatacttkaaaaaadcrgtataaaagtattttgagtcagtgtcttacatgttaagagggactgaaatagtttatattaagtttgtattaaaattctttaaaakkaawwmmmwmwamaamawmaagaaggcatgtggagatcccaaggctaaaccatcctaccttattgacaaaaacctggaatctgctgtgaaattcatagtcagaaaatttcctgctgtagaaacacgcaacaacaatcaacagcttgcacaactacagaaagaaaaatcagagattctgaaaaatatggcattatattactttacatttgtagatgttatggatttaagggaccatgtctgtgacttgctgaatactatcgcggtctgccaagtcttctttgatattactgtgaactttgatttaacaaagaactacttagacttgactgtcacctacacaacattaatgatactgctgtcccggattgaaggaaggaaggccatcattagactgtacaattatgcacatgaaatgacccacggaggaagtgaccgagaatacccacgccttggtcagatgattgtggactatgaacaccctttaaagaagatgatggtagaattcgtaccccacagcaagtctctttcagatgcgctaatttctcttcagatggtgtatcctagacggaatctttcagcagatcagtggaggaatgcccagttgttgagtctcatcagtgcacccagtacaatgcttaatcctgcacagtctgacaccatgccttgtgaatatctctctttggatgcaatggagaaatggattatctttggctttattctgtgccatgggatgctaaataccgaggctacagcactgaacctttggaagctagctcttcagagtagctcctgcctctctctctttcgggatgagtttcacattcacaaagctgcagaagatttatttgtaaacattcggggctataataaacggattaacgacataagagaatgtaaggaggcggctgtatcccacgctggctcaatgcacagagagagacgcaagtttttacggtctgcactgaaagaactggcaactgtcctctcggatcagcctggcctgcttggtcccaaggcactttttgttttcatggcattatcttttgcccgtgatgaaattatctggctactccgtcatgcagacaacatgccaaagaagagtgcagatgactttatagataagcacattgctgagctgatcttttacatggaggagctcagagcacatgtcaggaagtacgggcctgtcatgcagaggtactacgtgcagtacctctccggcttcgatgctgttgtccttaacgagcttgtgcagaatctctctgtttgccctgaagatgaatcaatcatcatgtcctcctttgttaacaccatgacttccctaagtgtgaaacaagttgaagatggggaagtgtttgatttcagaggaatgagattagattggtttaggttacaggcatacactagtgtctccaaagcttcacttagccttgcagatcaccgagaactcgaaagaatgatgaacacaataatattccatacaaagatggtcgattccttggtggaaatgttggtggaaacatccgatctctccatattttgtttttatagccgtgcttttgagaagatgtttcagcagtgcttggagttgccttctcagtcgcgatactccatcgcctttcctctgctctgcactcacttcatgagctgcacacatgagctgtgtcccgaagagcgccatcatataggggatcgtagcctttccctgtgtaatatgttccttgatgagatggccaaacaagctcggaacctcatcactgatatttacacagaacagtgtactcttagtgaccagttactgccgaagcattgtgccaaaaccatcagtcaagcagtgaataagaagtcaaaaaaacagactggcaagaaaggggaacctgaaaggaaaagcccgggtgtcgagagcatgaggaaaaacaggctggtagtgaccaaccttgataagttgcacactgcactttcggagttatgcttctccataaattatgttccaaacatggcagtgtgggaacacaccttcacaccgcgggagtacttgacttctcatctggaaatccgattcactaaatcaattgttggaatgaccatgtataatcaggctacacaggagattgcaaagccatcagaacttctgacaagcgtaagagcatatatgactgtactccagtccatagagaactacgtgcagattgatatcaccagagtatttaataatgttctccttcaacaaacacaacacttagacagccatggagaaccaaccatcacaagcctgtatacaaattggtacttggaaacgttattaagacaagtcagcaatggccatatgccttattttcctgcaatgaaagcatttgtgaatttacccacagaaaatgaattaacattcaatgcagaggaatactctgatatatcagaaatgaggtcgttgtcagagctcttagcgccatatgggatgaagttcctaagcgagagtcttatgtggcatatttcatcacaagttgctgaacttaagaaacttgtggtggagaatgttgatgttctaacacaaatgaggaccagctttgacaaaccagaccagatggctgcactctttaaaagattatcatctgttgacagtgtcttgaaaaggatgacgataattggtgttattttatgcttccggtcactggcacaagaagcactgagagatgttttgtcctaccacattccttttctcgtgagctccattgaggatttcaaggaccacattccacgggaaaccgatatgaargttgcaatgaatgtgtatgagctgkcatctgctgctggattaccatgcgagattgatcctgccttarkagyagmkstttcctcacaaaatcagagaacattagtccaagaagaagatataaagatcgcttgcctcctgatggtctttgtagcagwttccctgcctacactggccagcaatgtgatgtcccagtacagccctgcaatagaargacactgcaacaatattcattgtctgccaaagccatcaaccaaattgctgctgctttgtttacaattcacaaaggaagcattgaaagacagacttaaagaattcctggcgcttgcgtcctccagtctactkraaatcggccaagagacagataaaactacmacgagraatagagaatctgkttatttgctactggatatgattgtacaagaatcaccgttcctgacaatggatctcttgraatcttgtttyccttatgtgktgctgagaaatgcataccacgctgtctacaaacaaagtgtcacatyctctksatagaatgctcacyycagacaagcacgagtttctgttgccttgttctatctgtaaactgtggaactattttaccttaaagcctgaaaacagttttgtggattaaattttcttcatgctgttgtattttckgmwcrwkggcttcctaacatggttgtactacaatatatttggttgattgagttatmcattctcaaaacycagtgaattctatgattttagagtatcatttgtttgaacyaccattaacaytatgtttttgataactgataatgaaammcctkgcttgttwatttctgaaaaagaattgtawttagtgattattttagatagtgatatgatagcacccatctgwgtgtaaattatttmatatagskagagttctgatctgtacvtamggttctttytgagatcaagactggatgtgcatatcggtgatgcttacgaawacatttytactktattytgracatttgccaaamtaaatacctaacastgtttaaccttrgaaatgttrgacaacttgagcattggaagcagamtcagtttctcaaacagcagmttatgctgttgcctgtagaaagcctactgatcctctcacccgtgmtgcctggtgggcatmtgcastaycttggaccctgytgtataataaacaaccagactcttgtcaactgttgatacagatgttagtcccgaatcmctttttatatgttttaaaatttgaaattcaagtgwmcctgccataacatmaataaacmytrgrcygtwwvvhwwwwwraawrmwaaaaaaaaaaaaaaa

SEQ ID NO: 3441 - DNA, 1813 bp, Rattus norvegicus
  misc_feature (1004)..(1004): n is a, c, g, or t
  misc_feature (1133)..(1133): n is a, c, g, or t
  misc_feature (1206)..(1206): n is a, c, g, or t
  misc_feature (1209)..(1209): n is a, c, g, or t
  misc_feature (1218)..(1218): n is a, c, g, or t
  misc_feature (1259)..(1259): n is a, c, g, or t
  misc_feature (1359)..(1359): n is a, c, g, or t
aggcmygmsrccagcgccagcccagctgaacccagccgcccaaagcacgcctacagatcmcasasragstgyacsaggatgtgtgacsacgaggagaccacagctttggtgtgcgacaatggctccggactggtgaaggctggctttgcgggtgatgatgctcccagagctgtcttcccatccatcgtgggtcgcccacgccaccagggtgtcatggtaggtatggggcagaaagactcctatgtaggtgacgaggctcagagcaagcgaggcatcctgactctgaagtaccccatagagcacggcattatcaccaactgggacgacatggagaagatctggcaccacaccttctacaatgagctccgtgtggcccctgaggagcacccgaycctgctcactgaggccccactgaaccccaaggccaaccgtgagaagatgacacagatcatgtttgagaccttcaatgtgcctgccatgtaygwggccatccaggcggtgctgtccctgtacgcttctgggagaaccacaggcattgttctggattctrgcgacggtgtgactcataacgtccccatctatgagggttatgccttaccccatgccatcatgcgtctggatctagctggtcgggacctcactgactaccttatgaagatcctcactgagcgcgggtactsstttgtcaccaccgctgaacgtgaaattgtccgagacatcaaagaaaaactgtgttatgtcgccctggwtttkgwgrwksasrtggcyamyrytgcatcttcctcctctctggagaagagctacgaacttcccgatggccaggtcatcaccattggcaacgagcgtttccgctgtcctgagactctcttccagccctytttcattkgwaygrarwytgccggcatymamgrmackamttwtaacrgcatcatsamswktgacatcgakatcsscaaagacbtktacgcyaacaatgtcytgtytggaggcaccvcyakkyacvnksgrmwyghkratsgtatgcaaaaggaawtwacygcabtggctcccagchccrtgaagattargmttattgctccccbtgrgcgtaaatactctgthtggaktgggggctccatcytggcytctvtgtntacytyccaacaaatgtggatcagcargcargagtamgwtgagsccggsccytccattgtccacsgcaagtgnttntgaggcgsntmchttacastcaggmcgacagtattgtgcttggamtcctntgagsccctytcccatytmccatcagtcattgkacagtttgtwtacacacgtgcagtttgtktgtgcwwcaaatatttattgckktataaataarccagnscaggacttgchvmhhhhaawwarvmmmrwmwwmwwwcttgtgtgagtagscctggggtgaagaaggtrttctgtctgatacccccrgcatcacaatagtagagcaacacgaagtttacccaatagattcatgtggcattgaactgaactaggagttacagagctaccctttgatttcaccttttaggatggagctatgaagacttttgaatcttataagcaaaagattagttctgtggtttagttgttaggttggttctgtgtgagggataaagatagataacatagttatctataactagttgccatatttagtattaaaatatcacatattgaaatatgaatatcacatatttcatagctttatagaaaatgcacatgttggtaataagagggtcaaggctattaaatgagcttatctctatgttttcmttgtaaaaaaaaaaaaaaaaaa

SEQ ID NO: 3442 - DNA, 4663 bp, Rattus norvegicus
tgagctcctccctgcctttcctccttcccctatcccgtcttctcccctccccttccttgtggcccgaggatacaactgtctcggtttctctacttgctttcagcattgaaatgttcaacatcaccacgcaagccctggggtctgctcataacgggaccttttcagaggtcaactgcccagacactgagtggtggagctggctcaatgccatccaggcccccttcctctgggtcctcttcctgctggccgcactggagaacatctttgtcctcagcgtgttctgtctgcacaaaaccaactgcactgtggctgagatctacctgggcaacctggcagccgcggacctcatcctggcctgcggattacccttctgggccatcaccatcgccaataacttcgactggctgttcggagaggtgctgtgccgcgtggtgaataccatgatctacatgaacctctacagcagcatctgcttcctgatgcttgtgagtatcgaccgatacctggcgctggtgaagaccatgtccatgggccggatgcgcggggtacgctgggccaaactgtacagcctggtgatctggagctgtacgctgcttctgagttcacccatgttggtgttcaggaccatgaaggactacagggaagaggggcacaacgtcacggcctgcgtcattgtctacccgtcccgctcctgggaggtgttcaccaacatgctgctgaacctggtgggtttcctcctacccctgagtatcatcaccttctgcacggtgcgaatcatgcaggtgctgaggaacaacgagatgaagaagttcaaggaggtccagacggagaagaaggccactgtgctggtgctggctgtcctggggctctttgtgctgtgttggtttcctttccagatcagcaccttcctggacacgctgctgcggcttggcgtgctgtcgggatgctggaacgagcgtgccgtggatattgtcacccagatcagttcctacgtggcctatagcaacagctgcctcaacccgctggtgtacgtgattgtgggcaagcgcttccgaaagaagtcccgagaggtgtaccaggcaatatgccggaagggaggctgcatgggagagtccgtccagatggagaactccatggggactctgaggacctctatctcggtggaccggcagatccacaagctgcaggattgggcggggaacaagcagtgaacacaagccatcgggcaggacgactgccgagcgtgtgaggactgctgggacctgagcttctcagcctgggttcaggaaggagcttgaagcatcctagggaatcaggcaggtgattccagtcttgtctcacggcataagcgtgctgtgggggatggggaccctggagcatagaggggttgttattactggctggtgctctaaaatccccatgagtggagggggtcatggggtagggatgggagtgacaaagcttccttccctttgggggaaggacagatctcctgccggttttggccctgtggctacatgcacagttggcatggctgcctcatttcccagtttcaagagtttaagatttattggtcttctgaaggctgaattctaaggagtctctggtaagagcccagagactgggattctgtggttcctctcacccctagacaaggtggacggtacaaaagaagaaccccaaagcatttatggagcacttgcagagtacacagcattgaacactgtgggcaggagggaagacacacatagtgtaatgtcttaaaggagccctgacgttagtggagaaagccaaggacttgcagtctccagaaggctgctgatggcgtgccaaagcaaggaactgtgggagaggggagagcacagggcctaggggaaccggtaaccctgaacacggtagcctgatccctgcctctgcttcttctgctgtaatgtgagggtgtcctgtgctttgaaaagtggggtgctatatggctgtgaggcgtcagaacacacatcactgggtctggacacacgtcacatgcagacgcatcagaacacacatcacatggagatgcaccagaacgcacatcactgggtcaggatacacatcccgtgcagatgcaccagaacgcacatcactagatcaagacacacatcacacggagacacttggcacagagaaagccactcaggcttactctgcctgcaggtacaagaggccctcactccctcctacctttccctcctagtatcccacccctatgcacacacaacaaagcgtttggtacttgggaagggcgggagaaagcaagtgtttgttttgcaatgagacaaagaaaaagatttctggtgggacctgcccggagaatccacacctcacagcatggctgcaaattggtagctgactgggggagtctaagctgcttcccagggctcctggctcagtgaccaagggatgccaattagtggtttatctgagagtgactcacaaagcagggatgctaccaaagagctgacccatcatccaaggtcacttaactgagggcgtcaattccaggcccagctccctacatggctgcagggtgcctcgtgagtgatgtcaggggtgggtagggctgcctgggccctggggaactctgacaggagaaccacccccaccttgggggagaggggaacaacacatctgcatattgagcaggtcttccaccagagataggatagccttccggatggtttcagggccagtgggttccccattagaacctattccaggggccttgggtgagctcagtgtcagtggagacagttgccccagcaacgccatagactcgggtgacagacaccatactcatagtccagaatcttccatgggagtttatttttccacgtgtccgcatcctgtgataaacttaacgacaggggccacttaagggaaagagaagggttactttgtctctcagtgtcaaaaaaaaaggctatggtccagtgtagccggggtctgtatggtaaacagagcagtaaatggagacccggctggaaccagggcggcatatgaccttcaaatgtctgcccctagtgacctttcacctactaggtcctacatcttaaagcttccatcgcctttcaaaataggaccagcagtcaggaatgaagggaggtgcctttcagactcaactataacaatttcactgccaattggctggcttctgaggctaacacactgtcaagcccctggggacatctgagggacatatcaaacaacctccaacaccaagccacgcaggagctgaccgctcgatagccgggggctacggagactcaggaaatgggcagagttcactggtgtttctggccaggctggagccaagggagagcctacatggcaaaaggcccgtgaatccccaccaatctgactctgaatttcctaagagagaagaccccaggaaattcttttttccaccccatcskccacttgtagccaaargaaggaaacmgatggcatacgctgagaatggactcagccacacccatactgtgaaggcgaagcagggccccaccctcagaggagaagytggtgggstacgggcgtgagkgacgcggcctgggtccctcagggtggctgaagggtctgaaactgggtcactgcagggtctgcaactaggtctgcaggagggaagcccccttgtgccttksgtcracaccctgatgagaaaccatgtccattgaaggacggagaaagctctgtaccgtgcagaggaagtggccgacaagggaggagcactstgtgtaagaacacacctcctctgtgcgctggaataaacagatgaattttgmawrrwrwwwmmmwrwrwcaaacttcctgaacctctgagctctgactcggggacactgcctttggtagtcaaaagccttgggagatgagggatgcattccgttcccatggaaatgatcattggtctcccamgmkktygaaattgagyggcaggtggtgggactggggctgagcrggcaacacacaccacaatttgcatactgactaatatgcattgaaatatgcgtgaatatatttaacaaatagcgttaggactttctcagaaatgcattttgggtatttcctcccacgctgctttactccatgacacctgatgaccaagcctctttcagatgttcagatgtcagagacggccaagcccagtcgctcatgtctgccaaacacttccatttgaccttcaccttgaaccaagagcatcctgcattatatggagacgaaagaccagtgtttgtgtcttcccagagatgggaatctctgtacttcacattccggttccacatccactctccatgtttctgttcatccatcaaacaagacctcattctgtgactccacaaacagcattgcctagtcatatacccatctgtccattccagaaacctggagctcagtgttccctgaaccccgtcttgttcacccctgggtggagaagcatccctttcagattctgccccttatgtttcctgggtctttattaccgaccgtcctagcagaaatgatgctgatggttggtgcagaagctgttgaccagggtggtgaatatggtggggacgggaatgtcaatgaggacactcttcacaaggaaaccttttgtaataaagttacacattcttaaaaaaaaaaaaaaaaa

SEQ ID NO: 3443 - DNA, 1352 bp, Rattus norvegicus
tagaccacctctgagtaatacaagataaagtagatttccaagatacggctcaacttcatgcagcataaattygattcaacacattcaattaatctcatcaatartgacttaaacgcaagacasswgytccgcgcagaaactcgaagggagccctttgcccgccgtcctatttagtcaactctttcctagccgcgaatgaccatgtgtagcggassaaggttggccctgttggtctacgggataataatgcataacagcgtctmctgttcacytgccgccggactcagcttccctgggatcagaccagaagaagaggcttacgatcaggacggaaacccgctgcaagacttctacgactgggaccctccgggcrcarssagcccsgcytycgcgctgcgtracgcytrsgccctwwmctrmcmagmygrsassmgagatgtcgcccacgaaatccttaacgaagcctaccgcaaagtcttggaccagctgtccgccaggaagtacctgcagtccatggtggcsargggcatgggcgagaacctysccgccgccscggtggacgmccgggcaccccttaccaaacgccactcggacggcatcttcacagacagctatagccgctaccgaaaacaaatggctgtcaagaaatacttkgcggccgtgctagggaaaaggtataaacagagggttaaaaacaaaggacgccgratagcgtacttgtagcgatgagktgccagctaccgygtgtataaaatgaaaagtcgtttyccaaattgactkrccagtcatyactcatgkgtyytttccaaacatgkatttatgtatcaagtaaagccattaaatgactattttgataawaawawwrdwwwwmwwtttacgaagcactwgagratgsmcagatatmctttgtggaccaatwatkgatatatattataagtatatattaarratatatataggtatagcagagagcaattcataagcgtgcacaaagattgaaaaattcgcctgagctkkttatgtttttwtataaaatgratagagraaatagacamccaatkgtttgaatatwmctcytatgtttgtaactggaattaaaggatagtatttttatccacaaccggctcgaagatacaataatggccatttgtcaaaaaaaatgatgccctgcttcacgagaattctgaggtaatgactttggaattgctgagggctttttttcttgtgagtctttgggcagctgtttgaccccagcttactaactaaaggggcattgtccactgggtgcggacaattccacactttattttcttgactatactttatgtgatctgctctcctaagtccaacct

SEQ ID NO: 3444 - DNA, 342 bp, Rattus norvegicus
gagacggctgttttccagactccaaagtatcgtgtcacacaggtgggaaatgaagtgttcttcaagtgtgatcagactctgggccacaatactatgtactggtacaagcaagactctaagcaattgctgaaggttatgtttagctacaacaataagcaacgcattttaaatgaaacggcttcaagtcgcttcttgcctcagtcttcagataaagctcatttgaatcttcgtatcaagtctgtagagccgggtgactctgctgtgtatctctgtgccagcagckswctcaggggrtkgwkwyycgkmcwtkgraccargcwstcystcctkgwgkakctgaaa

SEQ ID NO: 3445 - DNA, 356 bp, Rattus norvegicus
ggtggtgccattactcagacacccaaattcctgattggtcatgaagggcaagagctgaccttgaaatgtaaacagaatttcaatcatgattcaatgttctggtaccgacaagatccagggaaaggactkagactgatctactactcaataactgaaagcgatcttcaaaaaggcgacctatctgaaggctacgatgcctctcgaaaggagaaggcatctttttctctcactgtgaaatctgcccagaagaggcagatggmtgtttatctctgtgccagcagcatrmagwggacagkkkcmsagrmsywktmyttkgkasmaggvackmgvctshywgtkbtagaggatctgaaaac

SEQ ID NO: 3446 - DNA, 6000 bp, Rattus norvegicus
aagaagaaaaagaagaggaagaagaaggaggaggagggggccgagaagagcagttcaccgtttgcggccaccatgggagaagacgacgccgcgctccgggcaagcggcagggggctctcggacccgtgggctgactcggtgggagtgagaccccgcaccacggagcgccacatcgcagtgcacaagaggcttgtgctggcttttgccgtgtccatcgtggcactgctggctgtcaccatgctggccgtactgctcagcctgcggttcgacgagtgtggagcgagcgcggcgatgccgggcaccgacggtggcctcggaggcttccctgagcgtggtggcaacagcagctacccaggatctgcccggcgcaaccaccacgcgggtgaggaatcctcgcagcgtgagatcggcgaggtgggcaccgcggggaccccgtctgcccatccgccgtcggaggaagagcaggagcagtggcagccctggactcagctgcgcctatccggccaccttaagccgctgcactacaatttgatgctcaccgccttcatggagaacttcaccttctctggggaggtcaacgtggagatcgcgtgccagaacgccacccgctacgtggtactgcacgcctcccgggtggcggtggagaaggtgcaagtagcggaagaccgggcgttcggggctgtcccggtagcaggctttttcctctacccacaaacgcaggtcttggtggtggtgctgaatagaaccctggatgcgcagaggcactacaatctgaagattatctacaatgccctgatagagaacgagcttttgggcttcttccgcagctcctacgtgatccacggggagagaagattcctcggtgttactcagttttcacctacacatgccaggaaggcatttccatgttttgatgaaccaatctacaaggccactttcaaaatcagcatcaaacatcaagcaacctatttgtctctctccaacatgcccgtggaaacatctgtgtttgaggaagatggatgggtaacagatcacttttcacagacccctctcatgtccacatattatttagcctgggcgatttgcaacttcacatacagagaaactactaccaagagtggggttgtagttcgattatatgcaagacccgacgctatcagaagaggatccggggactatgctctccacattacaaagagattaatagaattttatgaagactactttaaagtgccctattctttgccaaaactagatcttttagctgtgcctaagcatccttatgctgctatggagaactggggactaagtatttttgtggaacaaagaatactgctggatcccagtgtgtcatctatttcttatttgctggatgtcaccatggtcattgttcatgaaatatgtcaccagtggtttggtgaccttgtgaccccagtgtggtgggaagatgtgtggttgaaggaaggctttgctcactactttgaatttgtgggtacagactacctctacccttcctggaacatggaaaagcagaggtttctgacagatgttctgcatgaagtgatgctgcttgacgggttggccagttcccatccagtatcacaggaagtgctacgggcaacagatattgacaaagtgtttgactggatcgcatacaaaaagggtgctgctttaataagaatgctggctaattttatgggccattcagtttttcagaggggattgcaagattatttaaccattcacaagtatggcaatgcagccagaaatgatctctggaatacattatcagaggctttaaaaaggaatggaaaatatgtgaacatacaagaggtaatggatcagtggacactccagatgggatatcctgttattaccatcctggggaacatgacggcagaaaacagaatactcatcacccaacagcacttcatttacgatatcggtgctaaaaccaaagcacttcaacttcaaaacagcagttacctgtggcagattccattaaccatcgtcgtaggaaatagaagccatgtgtcttcagaagcaattatttgggtgtccaacaaatcagaacatcacagaataacatacttagacaaaggaagctggatccttggaaacatcaatcaaactggctacttcagagtcaactatgacctaaggaactggagattactgatcgatcagttaatcaggaaccatgaggtactttctgtcagtaaccgtgcaggcctgattgatgatgccttcagcctggccagggcaggctatttgcctcagaatattcccctagagatcatcagatacctctctgaggaaaaggattttcttccttggcatgctgccagccgagctctttatcctctggataaattactggaccgcatggaaaactacaatatcttcaatgaatatattctaaaacaagtggcaacaacctacagcaagcttggatggccaaagaacaacttcaatggctctgtcgttcaagcttcctatcaacatgaagagctacggagggaagtgataatgttggcctgtagctttgggaacaagcactgtcaccagcaggcgtcaactcttatttcagactggatttccagcaatagaaacagaataccactgaatgttagagacatcgtctactgcacaggagtgtccctgctggatgaggatgtctgggaattcatctggatgaaattccactccaccactgcagtttctgagaaaaagatattgctggaggcgctaacttgcagtgatgacaggaatttactaagtaggcttctgaatctgtctctgaattctgaggtggtgttggatcaagatgcaattgatgtaataatccacgtagccagaaatccacatggccgagaccttgcctggaagtttttcagagataaatggaaaatactaaataccaggtatggagaagcattatttatgaattccaaacttatcagtggagttacagaatttcttaatacagaaggtgaacttaaagagctaaagaacttcatgaagtcctatgatggggtagcatctgcttctttctcacgagccgtggaaaccgtggaagccaatgtgcgctggaaaaggctttatcaagatgagcttttccagtggctgggaaaagccatgaggcactaatatccatcaaatagagaattcaccccagaactgtgtaggaggacctgctttttgtgggatgaggaggctagccagaatgtcagtgttaacacgagggaggattttttctttcttttctttctttgttgggggctatttttcttgtttcatcaactctacatttgtgtttccactggatattcctctgtaaagaaactcttgaaagtgacacttgccctggttacttcagctgtacattccccactgttcgggaccaagtatgatagtggtgcatgttgatcttgttgtcagtttgggaaatcctattcagaatattctgtgcatggatatatggtcctgcccgtgttccggcatgcttatttaacatgtccaatgttgtatgtgaacattttatatgtacatccagaatgggcattatgcgaaagcacaaagattacctatgacaatcagtgtggcaattgacagttaaaagaaacgttagaagggaattctcttctttgccatggacaacaggagaggtacaagagctcttatgcaatctgtatcgattgtttcagcactcggattgtctggcaatgattactgtgttgctaactcattttctttgagttaaagctgtgtatacaccttgcaaagatgtatagatagtgtgtacatatacattatgtacatagggaagccctatatgtatatagtatgttgtacatgcacctgttcaaagaatctcttcagatcaaaggaaatttaactttttggttcttttttaaatatatatatatatatatatatatatatatatatatatatatatatatatatataaatgtgtggacacactgaaaaggcttcaagaagttgatctcaacattcctactttgtatcttgctctcttaagtgctgttcttcttgtctatgtcctgaagaatgatctgttctatcacacgaagctgaattctaacaaaatatacatgtaaactaaccacactgcaaatcctcttaggtcagtggcaatattttgttgttttctgtaattatgttggtcaacattttctactgcataaagcgattttgggtaaacttagaatgatcgctgctaagaaaatgtttatgtacagcttctctgtctttctaagtttcgctactgcagagttaaactctctctgtgtgttgatctttgtgtgtactcctgtcctccattaagcgaccatacctcaacaggtctattagtacttaatgaccttctatgccagttgtgccctcccttaagacacaaagttgcttttatgctatgttactgtacaaagcctttggaaatttgcacccccgttctacctaggaattttgaagagtcagttctatggctgtgtgtaacacaactagatttcactgcttctctcacccaataggcctgctccctgcttcagaatcaacatatcttaagtttaacattgtaaaattcctatataattattatattgagtcaactattgtgtaacccctttttggttttcctgtgatgttcagcttttccaaatgttgcagttcagagactgtcattcaatgctggaaaaaaattctttataaaatagaggtcatagaattatttttgtttgtagaaatgaaaagcaatttcccaatccatagactacataaaaacaaaatttgatcctgatcatgtaagcagttaatgttcatttcttacagctataattttcaatacttccgtcaattaaaatacatgaattttaagtactgtgtggtactaaagagtcatggtcatgcctaatgtgaaacctgagatttaagtcacttactgaaagtgagcaagttttaaaatataatcttcaaaactagtatacagccaggaagaccctaaatatctatgatagcattggtgaattcattcatagactgaaactgcctaaaggggcagacryasgwgkcttgttttgctccctgaaatattgcaaattttttgagttgggggtggtgcttttcattttgagtgagtggtcgcttccgactgactttgagtttgaaggtctttcttgtctktyktagttctckttcctccccatttstaacagttgtcatcctcattcagtgtwktagtggccttgaacacaactgctttrgctatgatctaaatcstcagtgtataatkatgtgaaatgtttatacctcagtcytgtggtaccaacggcgtcgagatggcagttttgmgvtacacatttttcagttaktgaacctttccaasgtttaaattatgycaggtttgaagtctcsttttagttgtttaaataagtaatattttcaaartaataaaaawcaatgwtatctcttggaawawwmwrwaaaawrtagctataaaattatattttvtactttararwwwwwammwwwwwgctcttgtgtgttttacaaatcaattatctacatgaaataacaatgttttgaaagtgwmmawrrwmwarwmwmaaaatttcctttataattatatgtataagagcaaagctttgttttaattagaaaatattattattttcatcttgggtattattatctccatgtaacttgtaaatataacgttttgcccaatttttacacattttctcattaatttccttatagtctttgaagtttcaaaaataacatgatttcaaacctagaaggctgacatgtatagccttcaagaagcagatgtgctccttgaaattcactaacatatacttttgctgggccttactttcttttgttttatgtgatttttaaggtaattgtgtaatattggaattttctgaaactcagctggtacatgtaactaaaatattacaaggtcatgaatggtaa

SEQ ID NO: 3447 - DNA, 443 bp, Rattus norvegicus
caagatcatcgaagacctgagggctcagatctttgcgaattctgtggacaatgcccgcatcgtcttgcagatcgacaatgcccgtcttgccgctgatgactttagagtcaagtatgagacggaactggccatgcgccagtctgtggagagtgacattcatggactccgcaaggtggtggatgacaccaacatcacgaggttgcagctggagacagaaatcgaagcgctcaaggaggagctgctgttcatgaagaagaatcatgaggaggaagtccaaggcctggaagctcagattgccagttctgggttgactgtggaagtggatgctcccaaatctcaggacctcagcaagatcatggcggacatccgtgcccagtatgaacagctggctcagaagaaccgtgaggaactggacaagtactggtctcagcagattgaggaga

SEQ ID NO: 3448 - DNA, 1002 bp, Rattus norvegicus
caagatccgcgactggtaccagaagcagggacccgggcccttccgtgattacagccagtacttcaagaccatcgaggacttgcgcgacaacatccttggcgccaccattgagaactccaagatagtcctacagatcgacaatgcccgcctggctgcagatgacttgcggaccaagtttgagacagaacagggcctgcgcatgagtgtggaggctgatatcaatggcctgcgccgggtgctggatgagctgaccctggccaggaccgacctggagatgcagatagagaacctgaaggaggagctggcctacctgaagaagaaccacgaggaggaaattagtgccytgaggagccaggtgggtggccaggtcagtswsgaggtggattccacaccaggcattgaccwwgccaagatcctgagtgagatgagaagtcagtatgagsccatggcagagawgraccggaaggatgytgaagcctggytactcaagattgatgagacgttgaacacccaggtcgctgtccacastacgcagatccagataaacaagactgaggtcacggaactcsracgtaaggtccaggacyttgagattgaattgcagkcwcagctcagcatgaaagytgccctggaaggcactgtggcagagatagwggcccgywacggagcccasctgtcacacatccarggtgtratcagcagtattgaagtccagytgagtaacgtgcgtgctgacacagagcgccagmrscassagkatcagcagstcatggacatcaagtcgargctggrgcaggmgatcgccacmtaccgmagcctgcttgagggccaggaagcccamtacaacagtstgtccatcgccaaggccctytgagctgatcctggcctcmtaccytgvtaccagtgcgacttccccagggaggggcatgataaagttcacaccagcccttcccttgacttgtcaataaaactatcctscarrggraaaaaaaaaaaaaaaaa

SEQ ID NO: 3449 - DNA, 3051 bp, Rattus norvegicus
  misc_feature (2702)..(2702): n is a, c, g, or t
gaggccaaacagaaggacgtggtcactctgaacggttcaacccaagggacaacatgcagtgggcctccatcctgctgctgcgcgggctctgctcgctttcccagggccagtatgaagaagactctcactggtggctccaatacctccgaaaccagcagtccacctactacgacccctacgacacttacccctacgagacctccgacccttacccctatgaagtagaggagggcccagcctatgcctatggtgccccacctccaccagagccccgtgattgtccccaagaatgcgactgtccccccaacttccccacagccatgtactgtgacaaccgcaacctcaagtacctgccctttgtgccctcccgcatgaagtacgtctacttccagaacaaccagatcgctgccatccaggaaggtgtctttgacaatgccaccggcctcctctggattgctctgcatggcaaccagattaccagtgacaagataggcaggaaggtcttctccaagctgaggcacttggagaggctgtacctggaccacaacaacctgacccggatgcccggaccactgcctcggtccytgagagagctccacctggaccacaaccagatctctcgggtccccaacaacgctctggagggcctggagaacctcacagcattatatctccatcacaatgagatccaagaagtgggaagttccatgaggggcctccggtccctgatcctactagacctgagttataaccaccttcgaagggttcccgacggtctgccctcagccctggagcagctgtacctagaacacaacaacgtctacaccgtccctgacagctacttccggggctcacccaagctgctgtatgtccggctgtctcacaacagtctcactaacaatggcsyygctaccaacaccttcaattccagcagccttctggagctagacttgtcctacaaccagctgcagaagatccctcccgtcaacaccaacctggagaatctttacctccaaggcaacaggatcaatgagttctccatcagcagtttctgcacggtggtggacgtcatgaacttctccaagctgcaggtgctacgcctggatgggaacgagatcaagcgcagcgctatgccggtggacgccccactctgcctgcgccttgccagcctcatcgagatctgaggggcttcgccttgggctcggggctccgccttggactccgggctccgccttgggatcggagatcggggctcagggctccgggctccgggctccgggcactggactccgggctccaggcatcgggtaccgggcaccggggtcccggcatatgccctgccacctgctacactcagcttgaaggtctggtttggcttttgctggatggtctgggacaagcacgtgacagaagtccacaggatcttattcagtctccttccgataggcaaagttaggtgggatcaggggccaggccagtttctgcaggggatgaaagtggtggtaaaagaaatggccgcagagtctagcccccaaatcttactatccctcaacccttccccatgacctagtctggcagaccatccccttgcttggataatagcatataaccagacaatctgacttcagctgtgctcactcaatggcttggccagttgcttctgcagtcgctctgggctcctactccttgctcctcaaaacatcaaaacgtacttcctgcccagccacttcctctaggcccagctcatcccctctgccctctttcattgaggcctcttctaaggtcttagacaatcaggagacacccacaccccaaggttggtggggagctgtccaacaacctgtggaggaagaccacacattattatctgaggttaaaaggatatctaaaaccatcacacacacacacacacacacacacacacacacacacacacacaacgtcacctgtttaaagtcagcgtattgaacagtataatggtgactgatagtcatgacttaattacaaggggataaccagccctataatggaggatccatcagaggagagaagggtcaaatgctcatttttaggatccacaataagatggggaagagtcacacctcagaatggcaggactgaaggggcagccccccttccagcttcacctgaccaacatgatctgtgccccttcttgggcttttagtatcaaaggggccagtgtggtttccaaaccatgagaaagagcctctgcccatccttggatccaggtatggaggtttgttacacasasgcagrggcagactgtgccagccgtggacccacccactaacccagacaagggtgtgatctccataactggtttgtccctaaagctagagtttaaggtaccagctcttctggagatggtcactggggtacaggaagccctagccaggcccaaggcttacctacactagacatagtttcctctgcttccacactgtgggaccacaccttatactgatggtgcctgtgaygtgtagcttgkyygagagcaaccctgtyttytcctttttaaaggtgatgtygsctasgwrsagchatysggttywykagrctcwytgggaaagasccacgggtagccagtggcaagawccagttgtgagatgttascctgaggtaggtcccttcccaratgccttagrccsatgactmtgtgtgcwcttaggagcwagcttccntgaaaaggacagggtggggtggggtgcttagmctgtgccatgggttccagatcctgaaatccacaaaasccaaaccagmttgtttgaaccagggrgtbccacatgtgragcaaggytgccstgcccagagctyttgrkaagcacctgcatgcagataccatytggcctytwtaaagggtcctcagcaagaagcaagcatgrgtggtgrccaacctgaccaataaagttaktttwtaagtgcawmwrmaaraawrrawwmrwwrrwggcagcccttggtgttgccttggggcatctagtcagtcacacagaccttgaacggtatcaactctttcttttataagtgctttt

SEQ ID NO: 3450 - DNA, 3923 bp, Rattus norvegicus
gcactgccacaggaagccgctgcgccgcgcttgtccgtgcggcccgcaggagccgcccgacccggtgctcatgaggcgggcccgcgagccccaccgcctgcagccccgggcggcgcggtgagggccgcassscgctgagcgccatggaactgaacgcgggaggtgtgattgcctacatcagttcctccagctctgcctccagccctgcctcctgtcacagsrasssctctgagaacagtttccagtcctcgtcctcgtccgttccgtcttctccaaacmgctccaactgtgatgccaacggcaaccccaagaacacggatgtctctagcattgacggtgttctcaagagcgaccgcacagactgtcctgtgaaaacaggcaaacctggtgcccctggcatgaccaagagtcacagcggaatgacaaaatttagtggcatggttctgctatgtaaagtctgtggggatgtggcctcaggattccactatggagttcatgcttgtgaaggctgtaagggcttcttcaggaggagcattcagcagaacatccagtacaagaagtgcctgaagaacgagaattgctccatcatgaggatgaacaggaaccgctgccagcagtgccgcttcaagaagtgtctgtccgtgggaatgtcgcgggacsstgttcgatttggscggattcccaagcgtgaaaaacagagaatgctaattgagatgcaaagtgcaatgaagaccatgatgagcacccagttcggtggccacctgcagagtgacaccttagcagagccgcatgagcagtcagtaccaccggctcaggagcagctgcggcccaagccccagctggagcaagaaaacatcaaaagcacccctcctccttctgattttgcaaaggaggaagtgattggcatggtgaccagagcccacaaggatacctttctgtataatcaggaacatcgagaaaactcatctgagagcatgccaccccatagaggagaacggattcccaggaatgtggagcaatataatttaaatcatgaccatcgtggcggtgggcttcacagccacttcccctgtagtgagagccagcagcatctcagtggacagtacaaagggaggaacatgatgcactacccaaacgggcataccgtttgtatttcgaatggacactgtgtgaacttctccagtgcttaccctcaaagagtctgtgataggattccagtaggtggatgttctcagactgagagcaggaatagctacctgtgcagcactggagggaggatgcatctggtywgtsmwatgakcwwkkctccaymtgtgkatcmwsagaaakctggaswtkwmwtytgggaagaattttcaatgagttttaccccagcagtaaaagaggtggtagaatttgcaaaaygtattcctggcttccgagatctgtctcagcatgatcaggtcaacctgttaaaagctgggacttttgaggttttaatggtgcgatttgcttcgttatttgatgcaaaggagcggactgtcaccttcctgagtggtaagaagtacagtgtggatgacctgcactccatgggagcaggcgatctgctcagctctatgtttgagttcagcgagaagctgaatggcctccagctcagcgacgaggaaatgagcttgttcacagctgttgttctggtgtctgcagatcgatctggaattgaaaatgtcaactcagtggaggctctgcaggaaacactcatccgtgcrckaaggaccttaataatgaaaaaccatccaaatgaggcctccatttttacaaaattacttctaaagttgccagatcttcgatctttaaacaacatgcactctgaggaactcttggcctttaaagttcatccttaaggcctttgaasatsaayygatgctaatgtacattttatgctgagatgtttatttatatgtgtataccatattgtgaaaatagaaaaggacttagcgccaggtcctggacwgtctgtagtcagtcaccagtagctgttcaratgagaactcattgtcttgttaracattggcccaccctccctgtaraccaaccagctgtgttgcacttagactggagaagttacactgaattataatcacactgaatgttagactttttcatctgccaaagccaaaataccatgttgatctccccgkggtataaatctagcgcacattgsagatataggrrggacttaaacattacccctgtgtgacaggattcgggtgccccacaagattgatatgtggtaaaggagactgagagacaagaggtgtgctctggcactgacaaagaacatggtcctgggagtcccctgggttgtgggaaatgataattgatagtgtccccaatgtcctgcctcacagagatactgaaaaaatgtccataaagcgtctttacctcttgggagataggcactatgtaaataaggtgaagtttttattataattgctcataataatattcttgtcttatctctaagcatttctgggaaackktgasagtccacaccaatttattcagggttccwgctcaagtggggttccctactgataaacacatattccaggtttatggacacstcagatagtatgtgtacatagtgtgtatgtgaatataattatatataaaatcttacttcayaatattttaaactgtgaagaactttatcatacaataaacttaaacaagaggtgtcaaggacccaaattaggtgcattttacctgttgctgctgatgtataaccattgctttatgatgtttagatggtagaatactgaagttaattctcatatttttgtttaagcaacatttaatgtaaaagtgtaatgagcagtcaaatccaggtcagaaaaaacatggattttagaatacatctttgatacaatctgcagttgaaggtaatagatgtttcagtgtttcagatttctaccttgcgctattaatagaggtggtgttgctgcttcttacctgctgcaggtggatggcagatttggattctgtgtggaggatgttttgtttggggaaaacctttgtgacctattggcatgtctgtgcccaagtccacttttctttctttcccttaaataacactacagggattttgtcaatttagatttaatataatttgaaaaacctttaataagtgacctacctacaggcttagagatcgtggtaggagaggtagccaaagttaaagattcgtgaacaacacccctgttcccccytgagctgtaattcattgtattttggggsmaaaattattttctgtgtaatgctagattatgtgaaattgtaaagacattaagaacatgctttactatttaaagcatgcctattacttttatgacatgtaagcagaatgccttattttgtagttctaacttgttgctacaggatttgaacttctgtggtacagttaagagagcttgaaaaagataaacccctgttgtcgaagaagaaagctgatggtgcgtctgttatgcagtagggaccataactgctgtttacattcagtgggtatggctttcgtgggatacacagctagggtttgtgaattctttacatgatagcattatcattttatatttttttcaaggataaaccaatgcatagttttcttctatgggggatagagagctkkgtgawgtaatactgaaaacctcaaaggttatgttgattcttcatttttgcctttttcataagtgtstttataacatgtatctttaaagcagtttgcgtstttggaaatatgtaaccagasctgttagtgttgcttgtgatgcttgagttakggtcagtwtatacatgtwcacacctagatagaagcatgyasattygtatttygtctcgtaaaattttmtttsaataaattcttcctgargtwamrrraaaaaaaaaaa

SEQ ID NO: 3451 - DNA, 1851 bp, Rattus norvegicus
cctctcgcccccccttcaggagcggttgtgcgatcagatcgatctaagatggcgactgtggaaccggaaaccacccctaccactaatcccccacctgcggaagaggaaaaaacagagtctaatcaggaggttgctaatccagagcactatattaaacaccctctacagaacaggtgggcactctggttttttaaaaatgataaaagcaaaacttggcaagcaaaccttcggttgatctctaagtttgatactgttgaagacttttgggctctatacaaccatatccagttgtctagtaatttaatgcctggctgtgactactcactttttaaggatggtattgagcctatgtgggaagatgagaaaaacaaacggggaggacgatggctaattacattgaacaagcagcagagacgaagtgacctcgatcgcttttggctagakacactgctgtgccttattggagaatcttttgatgactacagtgatgacgtgtgtggagctgttgtcaatgttagagctaaaggtgataagatagcaatatggacgactgaatgtgaaaacagagatgcagtcacacacatagggagggtatacaaggaaaggttaggacttcctccgaagatagtgattggttatcagtcccacgcagacacagctacaaagagcggctccaccactaaaaataggtttgttgtttaagaagacaccttctgagtatcctcacaggagactgcgtcacgcaatcgagattgggagctgaaccaaagcctcatcaaagcagagtggactgcactgaagctgactccatccaagtgttgctaagatataagagaagtctcattcgcctttgtcttgtacttctgtgttcattctcctccccaccccaatttttgstagtgtgtccacatcccaatcaaagaattacagtatacgtcaccccagaacccacagatgtgttcctggcccgctctgtaacagccggktagagttaccacgacacacacttgcctttccacagtattcgaaaaagaacgtgcatttctgtcaccttagcaggaaaagatctggttttgttccactccatgcaggagcggatttgctggtgtgakagtctaagtacagctttctagcaaccttctgttttctgtcacagcattgtccttgctgtcctcttgctgatggctgctagatgttaatttatttgcttccctccttgataacattagtgattctgatttcaggtttttywtttktttkkytkkydttwttwkccbcaygtaacattggtgaaggatccaggactatgacagaaaggtggaataaacattacatttgtgcawwmwwwrrhaagwwwwwwtgttttttgtaactacaaagctttgctacaaatttatgcatttcattcaaatcagtgatctatgmtgtgtgatccctmaacataattgkggactakaaaaatgtaacaccataattacattcctaactagaattagttgtctgctwttgtatctttatgctgtactttaacactttgtattacttaggttattttgctttggttacmatkgctsawgtwgraaagcggyccmatccatattaaracagtgtacaaaactgtaaataaaatgtgtmcagtgrawwrwmwwwwvrmmaamhadmhhwvwhmwwwwawwwcwccrkcyctmgwrggaatctgtactccatattgcaaggcagtctcttgtgtcttcttagtgtcttccccatgmacagcytaagtttggagcactagtttattattatgtttattacaatttttaataaattgaataggtagtatcacatgtaattaaaaaaaaaaaaaaaaaa

SEQ ID NO: 3452 - DNA, 1265 bp, Rattus norvegicus
cacgaggctcgtatggctgtggacctgaaatctcgagcgaascgywatgagaaactggacttcctcggmgagggacagtttgctactgtcyayaaggccagagataagaacaccaaccagatcgtcgccattaagaaaatcaaacttggmcacaggtcagaagctaaagatggtataaatagaacagccttaagggagataaagctcttgcaggaactaagtcatccaaatataattggtctccttgatgcatttggacataaatcgaacattagccttgtctttgattttatggagactgacctagaggttatcataaaggataacagtctcgtgttgaccccatcccacattaaagcctacatgctgatgactcttcagggcttggaatatttacatcagcactggattctacacagggatctgaaaccaaacaacttgttgttagatgagaatggagttctgaaactggcagattttggcctggccaaatcatttgggagccccaattgggcttacacacatcaagttgtgaccaggtggtaccgggcccccgagttactgtttggagctaggatgtacggtgtgggagtggacatgtgggctgtcggttgtatcttagcagaattgcttctaagggttccttttttgcctggagattcagaccttgakcagctaacaagaatatttgaaactctgggtacaccaaccgaagaacagtggcctgacatgtgtagtcttccagattacgtgacgttcaaragtttccctggcatccccytgcagcacatcttcattgcagctggagacgacctgcttgagctcatacaaggcttgttcttattcaacccatgtactagaattacagcttcacaggcgttgargaccaagtacttcagtaatcgtccagggccaacacctggatgccagcttccaagaccaaactgtccagtkgaagcrttaaaggaacagtsaaatccarccatggcracaaaacggaaaagagcggaggccttagaacaaggaatattgcccaagaagctaattttttagttgcagcgaacaatggacagtttcactgctgaaagaaatgatccaaaggcaaataacggaaaaaaaatagggaatattaaatactatataagaacttgtaaatactctacagatgtaaaatatgtaaagctatgggttatttttattaaatgtattttaaaataaaawawwwrwrawwwawgattcgagtacaagaataaaaaaaaaaaaaa

SEQ ID NO: 3453 - DNA, 2218 bp, Rattus norvegicus
gggcccgtgttccatccagggcgggctgaggagggctggggaggctgtaggccacgcgaggcaggcaggcaggcaggcagcccccgggctggggcgtgcggatggggctcgggcaggggtgaggggcgcgcggaaggcaggacgcgacgactttcttaggtgtgggctctctgtcgtctgggctctgggctctgggctttgggctctgtgctggggactcgggactcgggagcttggggcttgctggctgtctgacgtgccaccggtgggggtgggccgggcgggcctggcgggcggctgagcgagcgcagcaggctcttggggcttgtcggcgagggccgccctcgtctacggccataccaccctgaacgcgcccgatctcgtctgatctcggaagctaagcagggtcgggcctggttagtacttggatgggagaccgcctgggaataccgggtgctgtaggctttttggactcccttttggcygcggcgggggaccagtctcaggccaggccatccccacccacatgcatcccacagcccacaggccacagcccaggccccggggagagcccaccctcgccctctcagatgcctggcatatgcacggtggctccagacagagtgggcgccccgacacccaccaccctggaggcagcaagacaggaggtgagagagcctctytmcatttgcagcgagcccaggctggcctcgaacaccacatcctcgcccaccaccgcactggtctctctccccgtgtagtgtgtgggattgcctgggtgggtgggtgcccctgtgggggygcctcttaggaggccacggcgcgtgggtgactgctgcggtggtgggtgtggctgtgagagcgtgcaaaggtctgtgtgaccaccggtgtgtgagagtgtgtgtcgctccccctcctgcctcctgctaaggtgactcctgcgagagtctgtgtgtgagtgagtgtgtgagtgtgtgagtgwgtgtgtgactkagtgtatgtgtgtgtgtgtgtgtgtgtgttrtgtgtttgtgagctgtccttaggttccgtgcctgcttatgckccctaggggssctgtctacctgttcggtccggctttcttaccccggtgagttcatgcctggcgcgcgtgtctgcctgcgtgggtcttgcctctgcgcgcccgcgtatgtgtgcccctataaaggggtggcacgcacgtgtgtgtgtgtgtgtgtgtttgtatgtttgtgtgtktgtatacttgtgtgaatgcccgcacttgggagggagggcaagggcagtggggcctggctcttgggccagcctctccgctgggtgggcgtggctagtgtgtgtgtgtgtgtgtgtgtgtgtgtstgtgtstgtgtgtgtgtgwcccgggtgggattggatgcsagccatcaccaaatgttcagttgacttcccgctcccaggytgagggcccctgtcctggacacagggwggasggtgggtcccgggtgggtcgggattccaggagctgctggaagctccgccctcggccccctcgagggcaagaggaaatcccgggtgggtgggtcagggcgctgttgtactgagcctgtggaaggaagagtctctctgtcsgggaggggacgagaggaggagaggaggagaggaggagagacctctgcgcatcctgcgtggggaaaggctggcactcacaggctgggcccgtgttccatccagggcgggctgaggagggctggggaggctgtaggccacgcgaggcaggcaggcaggcaggcagcccccgggctggggcgtgcggatggggctcgggcaggggtgaggggcgcgcggaaggcaggacgcgacgactttcttaggtstgggctctctgtcgtctgggctctgggctctgggctctgggctctgggctctgggctggggactygggactcgggactcgggactcgggactcgggactcgggggcttggggcttgctggctgtctgacgtgccaccggtgggggtgggccgggcgggcctggcgggcggctgagcgagckcarcaggctcttggggcttgtcggcgagggcygccctcgtctacggccataccaccctgaacgcgcccgatctcgtctgatctcggaagctaagcagggtcgggcctggttagtacttggatgggagaccgcctgggaataccgggtgctgtaggctttttggactcccttttggccgcgg

SEQ ID NO: 3454 - DNA, 1966 bp, Rattus norvegicus
gggcagaggtgagggrgcararkwckgrcgsrcggrmscgssrykargccagattmggmwcagmgrgcacttgaggayttakggccacaaaaaaccgcacaagatcgacagactatttctggagagctgcagaacgggcacgctggggtcgctggtgctggccatggtgatggaggtgggcatcctggacgccggggggctgcgcgcgctgctgcgaragcgcgccgctcagtgcctgcttctggattgtcgctccttcttcgccttcaacgccggccacatcgtgggctcagtgaacgtgcgcttcagcaccatcgtgcggcgccgcgccaagggcgccatgrgcctggagcatatcgtgccgaacaccgaactgcgcsgscgcmwgctkrbysgagcctwtmrygssgtagtgctgykggacgaacgcagcgccgccctggacggcsscaagcgcgacggmaccctggccctggccgcgggcgcgctctgccgagaagcgcgctccactcaagtcttctyyctccaaggaggatatgaagcgttttcggcttcctgccctgagctgtgcarcaracagtccacccccatggggctcagcctcccgctgagtactagtgtgcctgacagtgcagaatccggatgcarmwsctgkagywcccckckstrcgrccmkskrgrmcyagtggakmyccygksctkcmkgwayctsggcagkgcttaccatgcttcccggraagatatgctcgacgccttgggtatcactgctttgatcaacgtctcggccaattgtcctaacmactttragggtcactaccagtacaagagcatccctgtggaggacaaccacaaggcagacatyagctcctggttcaacgaggcgattgaytttatagactccatcaaggatgctggaggaagggtgtttgtgcactgccaggccggcatctmcaggtcagccaccatytgcsttgcttacctcatgaggactaaccgagtgaagctggacgaggcctttragytygtgaagcagaggcggagtattatytcccccaacttcagcttcatgggccagctgctgcaatttgagtcccaagtactggcccctcactgttctgcagaagctgggagcccggccatggctgtccttgaccggggcacctmtactacaacsstcktsaacttccctrtctccatccctgttcaccccacgaacagtgccctgaactaccttcaaagccccatcacaacctctccgagctgctgaagggccaggggaggtgtggagtttcacgtgccaccgggacgacactcctcccatgggaggagcaatgcaataactctgggagaggctcatgtgasctggtccttatyyatttaacmcccccccccccaaacacctcccgagttccactgagttcccaagcagtcataacaatgacttgaccgcaagacatttgctgaactcagyccgttcgggaccaatatattgtgggtacatcgagmccctctgacaaaacagggcagaagggaaaggactctgtttgagccagtttcttcccttgcctgttttttctagaaacttcgtgcttgacawacctaccagtattaaccattcccgatgacatacacgtttragagtttwmccttatttattttkgtgtgggtgggtggtytgccctcacaaatgtsattgtctactcatagaasaacgaaatmcctcactttktgtgtttgcgtamtgtactatcttgtaaatagacccagagcagrctttcagcactgatggacgaagccagtgttggtttgtttgwagcttttagctatcaacrgttgtatgtttgtttatttatgatctgaagtaatatatttcttcttctgwgaagacattttgttactrggatgactttttttttatacarcagaataaattatgacrtttctwwwraaaaaaaaaaaaaaaaaa

SEQ ID NO: 3455 - DNA, 1601 bp, Rattus norvegicus
cgcatcactagtctgctctccctagctccgagctgctgtggccattgcctccagcgctgttttctgaggcctcgcctccgccgtctttcctgcccgagctccggtgcaaggcctccgctgccagacggtgcctggtgtcccgccgttcccatcctcggttggtccgccgttaggccgtgcctcaggcccaatccgcggcgacgccggcaggtgatgccaaatacagccatgaagaaaaaggtgctgttgatgggaaagagcgggtcggggaagaccagcatgaggtcgatcatctttgcaaattatattgcgcgcgacaccaggcgcctgggtgccaccatcgacgtggagcactcccacgtccgattcttggggaacctggtgctgaacctgtggsacwgkggcggccaggacacctttatggaaaattacttcaccagccagcgggacaacatcttccgtaatgtggaggttctgatctacgtgtttgacgtagagagccgcgaactggaaaaagatatgcattattatcagtcgtgtctggaagccatcctccagaattcacctgatgccaaaatcttctgcctggtgcacaaaatggatctggttcaggaagatcaacgtgacctgatttttaaagagcgagaagaagacctgaggcgtttgtctcgcccgctggagtgcgcttgttttcgaacgtccatctgggatgagacgctctacaaagcctggtccagcatcgtctatcagctgatccccaacgttcagcagctggagatgaacctaaggaattttgcccagattattgaggctgatgaagttctgctgttcgagagagctacgttcttggtgatttcccactaccagtgcaaagagcagcgagatgtacaccgctttgagaagatcagcaacatcatcaagcagtttaagctaagctgtagtaaattggccgcttctttccagagcatggaagtgaggaattctaacttcgctgccttcatcgacatctttacatcaaacacgtatgtgatggtggtcatgtcagatccatccatcccttctgcagctactctgatcaacattcgtaatgccaggaaacactttrrraagctagakagagtagatggccccaagcayagcctcctcatgygctgacataatgccaaatgctctttagtaamtgctgaattatggtggktttttttttttgcatcatttgtttttaatattcataatgkcayskgcttaaaarwrrvmwwwraaacgtgtgcwkamtatstcatctcttccvtagthttagkattggacgctatttwctcagctatccagtagagatcctcaagacggcctttatgaaaagttagtgtggtgttaacmctaaagtaggtggtgtgtatgggtgtgtgtgtgtgtgggtgtgttatggttacctggttataatagagtattaaagcagttatcttctgtatwatcagatcmcaaaggtggaatgttacyattttatcagcaagatattamaatgtatttctaaatcctccttggtttcaatcatgaataaacatttattattrgcaatttaaaaaaaaaaaaaaaaaaaaaaa

SEQ ID NO: 3456 - DNA, 2507 bp, Rattus norvegicus
cgctcctgaagggcgggcgcggaagtaagagcatcctcaggcggtctgtgactggcagcgaggtcgagaggagccaccargcagtgaccgctttgcttctgcagctcggctcagctcattccgytatctcagcctttgcagtctgcacagaagctgaccaagttacctttgggtcttgagacctgggagagtgaggcccaaactcgggaccaactcctcatctaccttgccctccctctcctscatctcttyctttgsatgcacgaatcgcttgctcctttgggctggsttgctcggctgtgcctggagactaagttcgggtcggtaaaggtaactgygggaaaagcggcccyycagtggacaaargcggwggcagggatagagcaggccccgcgggccctgbgcgctgagcataggcagtagagaargtgagccagaagaacagtactgcggatttagaasgcactgtgaaggacttgttgcgcgatggaagaatctgactccgagaaaaagacggagaaagagaatgtgggcccaaaagtggagcctcctctaggggagccggaaggatcgcttgggtgggcaatgccaaatgcagccatgaagaaaaaggtgctgttgatgggtaaaagtggatctggtaagaccagcatgaggtctattatctttgcaaattatattgccagagacacacgtcgtcttggtgcaacaatactagaccgtatacatagtcttcaaattaatagcagtttgagcacctactctctcgtagactctgttggaaatacaaagacatttgatgtagaacattctcatgttcgatttctgggaaacctggttttgaacctgtgggattgtggtggacaagacaccttcatggaaaattacttcactagccagcgtgacaacatcttccgaaatgtggaggttctgatttatgtctttgacgtggagagccgtgaactcgagaaagacatgcactactatcagtcatgccttgaggctattctgcagaattccccagaagccaaaatcttttgcttggtacacaaaatggatttggtccaggaggatcagcgagacttgatttttaaagaacgagaagaagacttaaggcgtttatcgcgtccgttagaatgttcttgtttccgaacatctatctgggatgaaactctgtataaggcttggtccagcattgtttatcagctgattcccaatgttcagcaactggaaatgaacctgcgcaattttgctgaaattattgaggctgatgaagtacttctgtttgagagagctacctttctggtgatttctcactatcagtgtaaagaacagcgagatgcccaccgatttgagaaaatcagcaacattattaagcagttcaagctgagctgtagcaagctggctgcctctttccagagtatggaagtcaggaattctaactttgctgctttcattgacatattcacatccaacacttacgtcatggtcgtgatgtctgatccatccattccttctgcagctactctgatcaacatccgcaatgccagaaaacactttgaaaagctggagagagtggatggaccaaaacagtgtcttctcatgcgctaaacattgccgaatattgtttcacacaaaataattgaaacactgtttcttaattttattgtattcatatatgtaggctctgaaatattgtgatgctcactgcttctgtatttcttctctactctccagtcttaacatttatctttgaatgctatttattcaaatagcttgaggagttagaagatgaggtgtctatgaagttgatgtaacgtatacgtaggcgatatatgtaagtgttctgataacatgattctaatggtgttttaagtgttctgataacctgcttttaatagttgtgtatgccaaagtctttcccagaacctcttgtattcactatcaaatatatacatgtaagttttaagtattactgttttctcagcatgaattaaaaatattccgtaactcaaccaggcaacgtagctcatgcctgtgaccccagcagttgagaagcagagacaagaggattgctgcaagtttgaggccagcctgtctacatagggaggtccaggccaagcatatatcaagatcttgtttcaaaaacaagatacacacacacacacacacacacacacrmayyawaamkwmgmtsywartmwrgcttykgcystywgkgaawaaawaaamamwrargaacacgtgtgtaagagtgtttcatatcatcggccgtcagagagatgcagggaaaaccaggaggaagcagcaagcacatcactgcagctaggaagactgtcatcaaaagaatcatcgcagatgtcagtgatcgagtgggaaaagggggcctcctgtgctctgttggtgggagtatagatgagtgtagctattatagaaaacctaaaaatagatccaccatctgaatcagctagtacacttcttagtatgtataaaaaaaaaaaaaaaaa

SEQ ID NO: 3457 - DNA, 2684 bp, Rattus norvegicus
aggagagagatcgtggctggccaagtaaggggagccacgcggccttccgtcctttttccgggcatccgacaaactccactcccactcatcccagcctcagtgtggccatcagctgcggctggataccttcctgggcataccttctctggtttcaaggtggggagatggagggctaggcagtgtcccagtaccactgggtgaagtgggcaaagccaggccctgacttcggtggctgacattctgacagagaaactgtgcagacaagtggaagacaggccacaggcaccttctctgaagtccccactcttttccaagtctgggaaatgggacagtaccaccaatgtctcagagtagctttcaccaagtgtgtgaagtagtcaccaactttaaaagaagctgccaaactacaaagtgccttggacatgccaagggccatacccatctctgttctggtcctatccctcactccagccccaagggcaggctttgtgacagccagctgcaccgggaagcttggtctcagaaccttccatgcctagaggtttcaaccctgcaggccctgcatctccccaggtgaccacgacgacggcctcaggtcatgcacggacacagccgcaacgggcaggcccacgtgcccaggcggaaacgccgcaaccgcttcgtcaagaagaacggccagtgcaacgtgtacttcgccaacctgagcaacaagtcccagcgctacatggcggacatcttcacgacgtgcgtggacacgcgctggcgctacatgctcatgatcttctccgcggccttcctcgtttcctggctctttttcggcctccttttctggtgcattgcctttttccacggtgacctggagcctagtccctccggscccacggcgggaggcccggggggcaatggcggcggggcagccccgacagcggccaaaccgtgtatcatgcatgtaaacggctttttgggagccttcctcttctcggtggagacacagacgaccatcggttatgggttccggtgtgtgacagaggagtgcccgttggcggtcatcgcagtggttgtccagtccattgtgggctgtgtcatcgactccttcatgattggtactatcatggccaagatgssacggyccaagaagcgggcgcagaccctgctgttcagccaccacgctgtcatctccgtgcgggacggcaagctctgcctgatgtggcgcgtgggcaacctgcgcaagagccacatcgtggaggcccacgtccgggcccagctcatcaagccctacatgacacaggagggtgagtacctgccaytggaccagcgggacctcaacgtgggctatgacattggcctggaccgcatcttcttggtgtcacccatcatcatagtgcatgagattgatgaggacagtccactctacggcatgggcaaggaggarctggagtcggaggactttgagatygtggtcatcctggagggcatggtagaggccacggytatgaccacacaggcccgcagctcctacctggccagtgagatcctgtggggccaccggttcgagcctgtggtcttcgaggagaagagtcactacaaggtggactactcacggttccacaagacctacgaggtggctggcaccccttgctgctctgcccgtgagcttcaagagagcaagatcacggtgctgcccgccccaccgccccctcccagtgccttctgctatgagaacgagttggccctcatgagccaggaggaagaagaaatggaagaggaggctgctgccgcagcagccgtggctgccggcctgggcctggaggctggctccaaagaggagacaggcattatccggatgcttgagtttggcagccacctggatctggagcgcatgcaagccgctacccttcctctggacaacatttcttaccgcagggagtctgccatctgacctccaggccctgccctcctctatccctgaaagagcctctgccaggggtgggacatcaggacaagccttccactcttaggacagagttgttcatggctctgtggacctggaggaatgtgggggcttcaaagactgggagatcccctcctgttgactgcagggcccaggactgggaaggacccaggtactcagtcctgatggcctgggccccctggcatctccccacggtggctctgggcccccagatcttccacccttttcccactgacccttcaaggatgtaccccttctactctcaggaccttggggaaggcggctggactgctggggggtgggcatcatggggttctgggtgggcagggtgggtctgggggagggggaagggtgtgtttcttttggatgactgtggtctgtgctcttgactctcttttgtaaatatctataaatggaagagatggagacacaagtccacctctgcccatttctacctgtgagacagagagaggccgccacccctctctgtgcacccccgtccagcctcagccctacccacctacccagctggctgggcctctgagacctttgaagccagctgtgtatggtgttggattgggtagagaggggactcagacgtgggatgagtaccccctccctccttgcagtccccagattgatgatggcgtttggtaactatttttaataaagcatatggtcctttaaaaaaaaaaaaaaaaaaaaaaaaaaa

SEQ ID NO: 3458 - DNA, 2365 bp, Rattus norvegicus
gtttaacttgcagggggccgtggaacccatgcagattgatgtagatccgcaggaagatccccagaacgcacctgatgtcaactacgtggtggagaaccccaccctggwtctggagcagtatgcagccagctacagtggtctgatgcgtattgagcggctacagtttattgctgaccgctgccctccgttgcgagtggaggccttgaaaatggctctgtccttcgtgcagaggaccttcaatgtggacatgtatgaagagatacaccggaagctctctgaggctaccagggagctgcagaatgcacctgatgccatccctgagagtggagtggagcccccacccctggacacagcctgggtggaggccactcggaagaaggccctgttgaaactggagaagttagacacggacttgaagaactacaagggcaattctatcaaggagagcatcaggcgcggccatgatgacctgggtgaccactacctggactgtggggacctcagcaatgccctcaagtgttattcgcgagcccgagactactgcaccagtgctaagcatgtcatcaacatgtgcctcaatgtcatcaaggtcagtgtctacttgcagaattggtctcatgtgttaagctatgtcagcaaggctgagtctactccagagattgctgagcagcggggagagcgggacagccagactcaagccatcctcaccaagctcaagtgtgctgcaggcttggctgagctggctgcacgaaagtataagcaagctgccaagtgcttccttctggcttcctttgatcactgtgatttcccagagctgctgtcccccagcaatgtggctgtctatggtggcctatgtgccttagccacctttgaccggcaggagctgcaacgcaatgtcatctccagcagctccttcaagttgttcctggagctggagccacaggtcagagacatcatcttcaaattttatgagtccaagtatgcctcatgcttgaagatgttggacgagatgaaggacaacctgctcctggacatgtacctggcccctcacgtcaggacactgtatacccagatccgtaaccgggctctcatccaatacttcagcccctatgtgtcagctgatatgcacaagatggctgctgccttcaacacaacagttgcagctctggaggatgagctcacacagstcatcctggagggccttattaatgcccgcatcgactcacacagcaagatactgtatgctcgagacgtggatcagcgtagcaccacctttgagaagtccctgcygakgggcaaggagttccaacgacgggccaaagccatgattctgagagcagstgtgytacgcaaccagatccatgtcaagtctcctcctagagaagggagccaaggggagctgactccagcaaacagccagtcacggatgagcaccaacatgtgaaaggcattcccgtgaccttcagavtagtytgcacagctcctctgccagtggaagcagcamytgggcctcctschtgckttcmtcaagatgagaccccagaytgtgtggttcattasassagkccagccchtgggatgccagttcattggcmttccgcttcggaggccccctykgcygwggtaggcaggytgcccrgtrtggccattcgggcctgactytaggtttctgtcccaatgaaacagaccatgtgcaattcccaggtaagggttcctcaacccttcctgtccatgtagttctgactgcagcagtgtcactaaccaagtagtccattaaagtacagattgatcwttvmvmmarrmwmmmwwmmwwtctscctgtgtsccctggatactctgaccacgtgaaagaggagggaggtccatgatgagggctgggagagtagccatwkkyyktthytwtkkwtykytkywwwtgcggcyctgaaatggtttaktgttgagttcygaaaacacatgtgggaacakggcaagtccaaccargactacccttggygtarcattgmcggtccccaccarcaracatcaacatgttcytctgtgtcammraggagattccctgagtaaaggcatttccttwaagaawrwmmarrmwwcagtggctgtcctgrgtggagatgrytcytgcyggctttcaggcyasggcactacccatgacttcagagaaaccacttggtgttacaggcctcacctgctgagcttcctgcagtccaggctggatccctttccaggcsagagacttctctaatttggtcttaaaaagcaatccatgacctgggcagtctgmggtctccctgaaagctcgcttcttgcmsymgysmcggcacagattaaacacaaatctattgcccttttggatttcaca

SEQ ID NO: 3459 - DNA, 3144 bp, Rattus norvegicus
ataacaattcacacagaacacgtatgaccatgattacgccaagctcgaaattaaccctcactaaagggaacaaaagctggagctccacgcggtgcggcgccttccycctastgcacctggycctgcagccgtggmagcgggcgggcgcccaggccacaccccaggtctttgaccttctgccatcctccagccagaggctgaacccggccgccctgcagccagtcctgacagaccccaccctgcacgagctctatgtcatctccaccttcaagctgcagagtaagagctcagccaccatctttggcctctactcctcgagtgacaacagcaaatactttgaattcactgtgatgggacgcctgaacaaagccatcctccgttacctaaaggatgatgggaagattcatctggtggttttcaacaacctgcagctggcggatgggaggcgccaccggattctcctgagactcagcaatttgcagagaggggccggctccgtagaactctacttggactgtgtccaggttgattcagtgaacaacctccccagagccttctctggtctcacccagaacccacaggccattgaattgagaacattccagaggaagccccaggacttcttggaagagctgaagctggtggtgaggggctctctgttccaggtggccagcctacaagactgtttcctgcagcagagtgagccgctggctgccacaggcacaggagactttaatcgacagtttttgggtcaaatgacacaattaaaccagctccttggagaggtgaaagatcttctgaggcagcaggtcaaggaaacatcatttttgcgaaacactattgctgagtgccaggcttgtggccctctcagcttccagtccccaaccccaaacacgctggtgcccatagctcctccagcacccccaacccgaccaacacgtcgctgtgactccagcccttgtttccgaggtgtccgatgcacggacaccagggacggcttccaatgtggaccctgcccagatggctacacggggaacgggatcacctgttctgacgtggatgagtgtaaataccatccctgctaccctggtgtgcgctgcacaaatttggctccgggtttcagatgtgacgcctgtccagtaggcttcacggggcccatggtgcagggcgtggggatcaactttgccaaaacaaacaagcaggtgtgcactgatgttgacgagtgtcggaacggagcgtgtgttctgaactccatctgcattaacactctgggctcttaccgctgtgggccttgcaagccagggtacactggtgaccagacgaggggatgcaggaccgaaaggagctgccggaacccagagcagaacccgtgcagtgtgcatgcgcagtgcattgaggaacggcaaggggatgtgacgtgtgtgtgcggtgttggttgggccgggcgagcgggctatgtctgtggaaaggatgtggacatcgacagttaccccgatgaagaactgccgtgctcagccaggaactgcaagaaggataactgcaagtatgtgccaaactccggccaagaagacgcagacagagatggcattggagacgcctgtgatgaggatgcggatggagacgggatcttgaatgagcaggacaactgtgtcctgactcacaatgtggaccagaggaacactgataaagatatctttggggatgcctgtgacaactgccggggcgtcctgaataatgaccagaaggacactgacggggatgggaaaggagacgcctgtgatgacgacatggatggagacggaataaaaaacattttggacaactgtccccgagttcccaaccgcgaccaacaggatcgggatggcgatggtgtcggagacgcctgtgacagctgtcctgatgtcagtaaccctaaccagtcggatgtggataacgatctggttggggactcctgtgacaccaaccaagacagtgatggggatggccaccaggacagcacagacaactgccccaccgtcattaacagcgcccagctggacaccgacaaggacgggattggcgatgaatgcgatgacgatgacgataatgacggcatgccagacctgttcccccctggcccagacaactgcaggcttgttcccaacccagcccaggaagatagcaacaatgatggagtaggagatatctgtgaagctgacttcgaccaggacaaggtcattgatcgcattgatgtgtgtcctgagaatgcggagatcaccctgactgacttcagggcctatcagactgtggtcctggaccctgaaggggatgcccagatcgaccccaactgggtggtcctgaaccagggcatggagattgtgcagaccatgaacagtgaccctggcctagcagtcgggtacacggcatttaatggagttgactttgaagggaccttccacgtaaacacccagacagatgacgactatgccggctttatttttggttascaagacagttccagcttctatgtsgtcatgtggaaacagasrgagcagacatactggcaggctacgccattccgtgcagtagcagaacctggtattcagctcaaggccgtgaagtctaaaactggcccaggggaacatctccgaaactccctgtggcacacaggggacaccagcgaccaggtcaggctgctgtggaaggactccaggaatgtgggctggaaggrcamgrkgtcctaccgctggttcctgcarcataggccmcaggtgggctacatcagggtgcggttttatgaaggctcagrgywsgwggctgactccggggtcactatagacaccaccatgcgcggaggccgactgggygtgttctgsttctctcargaaaacatcatytggtccaacctcaagtaccgctgtracgacaccataccagaggacttccaggagttmcagatscagacctttgwccgcctggataattaaacyaagaaggcaatmtcrcaactgccttctaaacgcaaaccaacatcttttgywtaaaacttcctataattctctykatrttaccgtggcttttcttttrccaagcccaamwrctdyrrawcyttttatacgaawtaamgaagagmmtatttctaawaamraraaaaaaaaaaaaaaa

SEQ ID NO: 3460 - DNA, 2116 bp, Rattus norvegicus
ctggagtcctctgtagaccttgccttggtctaggtcgcttgagtagatttaggttgaccatgactcacatgaattaagattttcttttgttatgatggagatgcagatggtaggcaagtgattctaagtttccagcaagttctggatgttttaacttgccgcaagatattcctgaaacgtaacacaagaagaagaatcttctgtgtaaattagtcacatactttattctcccacatgtcacaatccttctaatctattgcatcaaattctggacagactgaagtatataagaagaaataagtgcttacatagtaattattctccgtaatgggagagttgcaatttaagtggctcttttggaggagctttgctgagtctgggggcacattccaaacagtgttaatctttcttttcattccatattccttgactgtggattatagggcaacaccagttctgtcagatacaactttcgtttgggtctggaatgttccaactgaagcttgtgtagaaaacgttactgaaccaatagatctgagcttcttctctttaattggaagcccccggaaaactgccatagggcagcctgtcacattattttatgttgatcgacttggtaactatcctcacatagatgcacagcaaacagaacatcatggaggaatacctcagaagggggatttgacaactcatttggtgaaagctaaggaagacgtagagcgttacataccaacagacaaactgggtttagctatcattgactgggaagaatggaggcctacctggatgagaaactggacacctaaggatatttacaggaataagtctattgaattggtccaggcagctgatccagcaattaatatcacagaagctactgtgagagccaaagcacaatttgaaggggcagctaaagagtttatggaagggactttaaaattggggaaacatattcgaccaaagcacttatggggtttttatctatttcctgattgttataacaataaatttcaagtcgataactatgatggccaatgccctgatgtggaaaagaaacgaaacgatgatcttgactggctatggaaagaaagcacgggcctttacccatctgtctatttgaagaaagatttgaagtcgagtcgaaaagcaaccctttatgtccgctaccgagttttagaatctatcagagtgtccaaagtttcagatgaatcgaatccagttccaatttttgtctatatccgtcttgttttcactgatcatgtctctgaataccttctagaggatgatcttgtgaatacaattggtgaaattgttgctcagggtacctctggaattataatatgggatgctatgtctttagcacaacgttcggcaggttgcccaatcctacgtcaatacatgaagacaaccctgaatccatacatagtcaatgtcaccctagcagccaaaatgtgcagtcaaacactttgtaaggagaaaggcatgtgttcgagaaaaacagaaagttcagatgcatatcttcacttggatccaagtagtttttctattaatgtaacagaagctggaaagtatgaagttcttggcaagcccgaggttaaagacttggaatacttttctgaacattttaaatgcagctgttttagcaaaatgacatgtgaggagacatctgatatgcgaagtatacaagatgtgaatgtgtgcatgggtgacaatgtttgtataaaagccacgctaggacccaactcagcattccacctcctacctggcaaaggcctcctccttatgacaacacttgctcacatcttgcaccatctaccacatgatatttttgtttttccgtggaagatgctagtcagtactccttagttttctctatccagagcatttgctatattatttttttgcaggcctcggtaatttgggattatgaatgtgattctattttgcaaaagcaattcaattttaataatcaagattctatttttgagtttcaaagacaaattatatactcttccaccaaagactgattgcaagcaaggctactgaacttagagattattttttgtttaaagagaatgaaaactgaataaaataactaactataaaaaaaaaaaaa

SEQ ID NO: 3461 - DNA, 2439 bp, Rattus norvegicus
  misc_feature (1865)..(1878): n is a, c, g, or t
  misc_feature (2098)..(2098): n is a, c, g, or t
tgaagagattgtccctggtccaaagtcaaggtacagaattaaagtggaaggcaaaaagcacactttgatcatagaaggagcgacaaaggctgacagtgcggagtactcggtcatgacaaccggaggacagtcatcggctaaactaagtgttgacttgagacctctaaagatcacaacgcctctgactgatcagactgtaaaacttgggaaagaagtatgcctgaagtgtgaaatctctgaaaatgtaccaggaaaatggacaaaaaatggactccctgttcaggagggggaacgtctgaaggtcgttcacaagggaaggatccacaagttagtcatagccaatgctctcattgaagacgaaggtgaatatgtgtttacaccagatgccatcactgttcctttggtctgccaaattcacgtcatcgaccctcccaagatcatccttgacggcctggaggctgataacaccgtgacagtgattgccggaagcaagcttcgtctggagattcccgtcacaggggaaccacctcccaaagccatctggagcagagcagataaggctatcatggagggcagtggtcggataagggcagaatcctaccccgacagcagcacgctggtcattgacgtggcagagagagatgactctggtgtgtacaacataaatctgaaaaatgaagctggagaagcacacgcaagcatcaagttaaggttgtggatatccctgatcctccggttggcaccaaatgtgacagaagtgggagatgactggtgcatcatgaactgggagcctcctgtctatgatggagggtctccaattttaggatactttattgagaggaaaaagaagcaaagctccaggtggatgagactgaattttgatctctgcaaagagacaacttttgagcccaagaagatgattgaaggggtggcctacgaggtccgcatatttgcggtcaatgccattggcatctccaagcccagtatgccctccaagccctttgttcctttggctgtgaccagccctccaactcttctggctgtcgactccgtgaccgactcctctgtgacaatgaagtggaggcccccagaccagattggtgctgcaggtttgagtggctatgtgctagagtattgctttgaaggaagtacatcagcaaaacagtctaatgaaaatggggaggctgcgaatgatctaccagctgaggactggtcactgcaaacacagaccggatcgacaagacccaagttcaccatcactggtctgcccacggatgcaaagatctttgtacgcgtgaaggctattaacgcggctggggccagtgagaccaagtactattctcagcccatccttgtgaaggaaatcattgagccaccaaagattcgcatcccaaggcacctgaagcaaacttacatccgtagagttggagaagctgtaaatctggtgattcctttccagggcaaaccaagaccagaactgacctggaagaaggacggtgcagaaatcgacaagaatcaaataaacattcgcaactcagagactgataccatcatattcattaggaaagcagagcgcagccactcaggcaaatacgacctggaggtcaaggtggataagtacgtggaaaacgcctcgatcgacatccagatcgttgaccgcccaggcccaccccaggctgtgactattgaagatgtgtggggagagaatgttgctctaacatggacaccaccaaaggatgatgggaatgctgccatcacagggtacaccatccagaaggccgacaagaaaagcatggaatggttcgccgtcattgagcattaccaccgaaccaatgccaccattaccgagctggtcataggaaacnnnnnnnnnnnnnnagaaaatcccmaagcccraaatcacstggatgaaaaacaaagtsscsattgtggatgacccaagatacagaatgttcagcaaccaaggagtctgtaccctggagatccgtaagcctagtccctatgacggaggcacgtactgcgcaaagcagtcaatgacctcgggacagtggagatcgaatgcaaactggaggygrmastgrrkrksdrwgwdrdrbsnywgbaaksmwgthtsmmtgtakakkgkcascmaaggtgggctgtaccttctrcgaggctcctcctagcacaggcgtgcctccaaacataatcgattcatatttgcgagacttacagtcaagcaatccggaggaatactgagggctgggcacggcctctacacaccagtgccttgacattcgattgaaaacggaaagcattttctggttttctcccaggcccycaaatgtggtcattttctctcctcctaaccttgaagaaagaaagaaaaataaattgtttgcacagatggcttgattaaaaawcgcaaacwgwtwaaaaaaaaaaaaaaaaaaaaaaaaa

SEQ ID NO: 3462 - DNA, 231 bp, Rattus norvegicus
gacctgcagctcctgcatcagaaagtggaagaacaagctgctaaatacaaacaccgtgtgcccaagaaatgctgttatgatggagcccgagaaaacaaatacgaaacctgtgagcagcgagttgcccgggtgaccataggcccacactgcatcagggccttcaacgagtgttgtactattgcggataagatccgaaaagaaagccaccacaaaggcatgctgttgggaagg

SEQ ID NO: 3463 - DNA, 2122 bp, Rattus norvegicus
gcacgagacggggttggatctgaggtgcagcctcagagggattaggagctgctagacttttttcttttttcctttttctcctctcagtggcacggagtccgaattaattggatttcattcactgggtaggaacaaaactgggcactttcattcagagagattcattgactctgagagtgatctggtgcagagggaccaccggcttggcttctgtcgccttccctaaccgctagcttcggcttgggaaaggccgaatcaaacccggctccgagagccggagcttctcacggcktgcttggcctatgcctgcctcgaggggcgtctgctaggcaccccgccttctcctgcagctcgacccccatgatagatacgctcagacccgtgcccttcgcgtcggaaatggcgatcagcaagacggtggcgtggctcaacgagcagctggagctgggcaacgaacagctgctgctgatggactgccgaccgcaggagctktacgagtcgtcgcacatcgaatctgccatcaacgtggccatcccgggcatcatgctgcggcgtctgcagaagggcaacctgccggtgcgcgcgctattcacgcgctgcgaggaccgggaccgctttaccaggcgctgcggcaccgacaccgtggtgctctacgacgagaacagcagcgactggaatgagaacacaggtggagagtcggtcctcgggctgctgctcaagaaactcaaagacgagggctgccgggcgttctaccttgaaggtggcttcagtaagttccaggccgagttcgccctgcactgcgagaccaatctagacggctcgtgcagcagcagctccccgcccttgccagtgctgggactcgggggcctgaggatcagctccgactcttcctcggacattgagtctgaccttgaccgagaccccaatagtgcaacggactccgatggcagcccgctgtccaacagccagccttccttcccggtggagattttgcccttcctttacctgggctgtgccaaggactctactaacttggacgtgttggaagagtttggcatcaagtacatcttgaacgtcacccccaatctgcccaatctgtttgagaatgcaggggagttcaagtacaagcaaattcctatctctgatcactggagccaaaacctgtcccagtttttccctgaggccatttctttcatagatgaagcccgaggcaaaaactgtggtgtcctggtgcattgcttggcgggcatcagccgctccgtcacggtgacagtggcttaccttatgcagaagctcaacttgtccatgaacgatgcttatgacattgtcaaaatgaagaagtccaacatctctcmcrasktcaacttcatgggccagctgcttgactttgaaaggaccctgggactcagcagcccctgtgacaatcgtgtccccgcacagcagctctacttcaccgcgccctccaaccagaatgtctaccaagtggactccctgcaatctacgtgaaaggcacccacctttcctagccgggagtgtctcattccttcagtttctcttgggcagcatcgaccaggctgctttctttgtgtgtggccccaggtgtcaaaaatgtcaccagctgtctgtattagacaaggttgccaagtgcaaaattggttattacggagggagagatttgctccattywttkttttttggaaggacagggtatgckgwckagatccaggcaataggtttgcttytgtaccccagcctacccaagcagggactggacctccatccagatagagggtargmcaaaggagccggggataggagcatgtgttccttavggccacatatggctgtttcctgttgcatstggaaccaamyatattgtcttcwgtgaagactgattcaactttgcgtatagtggagccaaagagattttagctctgtakttgtggtatcggttytgaaaacaaaagaactgatccytyrwkyygattattgtaaatatttgatcyycwcyygagagtgtttgtktgscbtgtgyttggtttttawtykytgggtykaaacgagatccmaagggagaaagagcagtatsccwcktsyykrrwhcaaaaaaaaaaaaaaaaaa

SEQ ID NO: 3464 - DNA, 1309 bp, Rattus norvegicus
acggctgagtggcagcccgagcccggcgcccccgcctcggttctcggcctgctcctgcagaagctgcgagacgacggctgccaggcctactacctccaaggtggtttcaacaagttccagacggaatactcagagcattgtgagactaatgtggacagctcgtcctccccgagtggctcgccgcccacctccgtgctgggcttggggggcctgcgcatcagctctgactgctcagatggagagtcagaccgggagctgcccagcagtgccactgagtcggatggcagccctgtgccatccagccagccagcctttccggtccagatcctgccctacctctacctcggctgtgccaaggactctaccaacctggatgtacttggcaagtacggcatcaaatatatcctcaatgtcacacccaacctgcccaatgcctttgagcacggtggtgagttcacctacaagcaaatccccatctctgaccactggagccagaacctctctcagttcttccccgaggccatcagcttcattgatgaagcccgctccaagaagtgcggtgtcttggtgcactgcttagcaggcatcagccgttcagtgaccgttaccgtagcctacctgatgcagaagatgaacctgtccctcaacgacgcctacgacttcgttaagaggaaaaagtctaacatctcacccaacttcaacttcatggggcagctgctggactttgagcggacgctgggcctcagcagcccgtgcgacaaccacacacccagtgaacagctctacttctccacacccaccaaccataacctgtttccgatcaacacgctcgagtccacgtgaggcctgatgcgctcgaataggcgcagcaccagggtctcccagccctccacagggcctggtgaggggccctagcctgctgccccttctggcttgaagaacccacagatgtcacctgtgtccggagaaccaggctgagcagtggccgagctcccatgccatcctgtgcaggacccacagcaaggccgcctgtgatagcaacttggccagattgcctcaagctttccaagacatgttgccgaagtgagcgttggcctcagcttgcagacttgtggcttgggggccagcggggccttgtctctgccccaggacatccattctgctgatggcccagccaatctggcaatttttaaagacatatccacaaacctgagtttgctacttttagcaggtaaatccgagctccctggagcagtgttcaggctctccttggtttttcttttcttttccttccttccttgccttcctt

SEQ ID NO: 3465 - DNA, 2544 bp, Rattus norvegicus
ccgggcaggtgacaaagccgtggagatctatgccagtgtggcccagctgacccctgtggactcggaggctctagagagtgaagcaaataaaatcaagaaagaagctgcagatctggaccgtctgattgaccagaagctaaaagattacgaggaccttagggaagacatgcgaggaaaggaacatgaagtaaagaaccttctagagaaggggaaagccgaacagcagaccgctgaccaactcctagctcgagccgacgctgccaaggctcttgctgaagaagctgctaaaaagggacgcaataccttacaagaagctaacgacattctcaacaacctgaaagattttgatagacgagtgaacgataacaagacagctgctggaagaagctctaagmgaattcccgccatcaaccggaccatagctgaagccaatgagaagacaagggaggcacagctggcgctgggcaatgcagcagctgacgccacggmggccaagaacaaagcccacgaggcggagaggattgccagtggcgtgcagaagaatgccaccagtaccaaggcggatgcggagagaaccttctcggaagwgacagacctggataacgaggtgaatggcatgttgaggcagctagaggaagcggagaatgagctgaagaggaagcaagatgatgccgaccaggacatgatgatggcrggaatggcttcacaggctgctcaggaagctgaacttaatgccagaaaagccaaaaactctgtcagcagcctcctcagccaactgacygacctcttggagcagctgggacagctrgacaccgtggacctgaacaagctcaacgagatcgaaggctctctgaacaaagccaaagacgaaatgaaggtgagcgacctggacaggaaggtgtccaacctggagaacgaggcccggaagcaggaggcagccatcttggactatgaccgagacatagcagagatcataaaggacattcacaacctggaggacatcaagaagacactaccaacaggctgctttaacaccccgtccatcgagaaaccctagtggtgggagggctgtaaggcagtgtccctgacagggggccctgtgaggcctcggtgccttgacagcgaaaaaattacacttttcagaccccccccacttctctgctgctctctgtcactgtccttttgacccaagaaaagtcagagtttaaagagaagcaagttaaacatccttaaccaggaacaaagggttttgcctaataaagtgtctcctccacttctgtcagcaccctaccggaactttcccttgtttgcctgaagtcatagcatcttccagtggcatacccacatcacgtgagcctttgtatgccagggcagacccagccccctcccctctctcaagcaccatcagaacctatcttagtactccatttttctatgaaggagatgttcagctcctcacgtatgcactgagatggccaatatgtccagtcgcatcttctgcctcctcttgaagcaaaggaaataaacatcctgtgccaaaggtattggtcattagacgttggtagccatccatcagacatgctggctgtttgagcataggccactgagccattacgggtaacagtgtagttacgtgtgggtctctgagagagcatggctcaaagatgcttacatttttctcctgtgctaattgactaggaagataaacgtttcccaatcctcagccgcctgatagagagtctggatgggcagcttgcacataccactacactaggtagcttttgatagttttataagcaggactcagtgcagaagaaacagagatgtgataaccactcacgttttttttcccccaaatcttactaattcttggagcttcgttagtgtgttagaattggaacttattgttagcatatctatcaaaacagtcgtcctctaaggtcttgaccaatgaaagaaaagcaaatctcctttccacccattttctgggaagtggatgtaaccggtatgattaggattccataagtgaatttctctttctctgttggagagagatgtgacatttggcccttagctccaagtctcttctgacatttacattctttcaaaacacatcattgttggccagatccwsgwggcaaacgctgctctcagtgtttctcaaggccgtggaccccatctagttcctgcgctttgtsgtccgcccactctaagcctttcctctgtgtggggagggaagaaccatgcatggcgtttcctagtgggcttctcgacctctgatcctcagctctgtggttcccttaagaccacaccgggacagttccctgccacacgcccccttcctcctatctacctgcctctgagattcgtatttagcctttaacactatgcaattttgtactttgcgtagcggggggggaaagaaactattatctgacacactggtgctattaattatttgaaatttatatttttttgtgtgaatggatttttgtttatcatgattatagagtaaggagtttwtgtwaaaaaaaaaaaaaaaaa

SEQ ID NO: 3466 - DNA, 255 bp, Rattus norvegicus
cccatcatttttggtcagcgtggctgtccaggttcttacgtttctcagagcttgcctctaaagtccctcttccccaacccgcccccgcctgctaatgaggaagccatcatggacgggacggagattgctgtttcgccccggtcactgcattcggagctcatgtgccccatctgcctggacatgctgaaaaacacaatgaccaccaaggaatgttgccacaggttctgctcggactgcatcgtcactgccctgcgg

SEQ ID NO: 3467 - DNA, 673 bp, Rattus norvegicus
ccccagcaccaagccctgccgtgctcccgggaccctgcccccttttcattagcctcackcccttctgaagagtggaacggagctccccakaaaggggtgttgtggggcaggcccccaagccggtggtcttgggagggagcagggctcggacagcccttcagcctcccaggctcggcakgtggggcagaggaggscctscctctgtcctgtcasccctttccacagtacctgctgcagtcagactgaagamcamaraggctgtgaaggggccgytkaggagkagsccattgctatttttaatttcctgtraggaragactgggagttagactcaaagaagtactgwacatccccaggttgacttawatgtcagggctsraggtggcatgtgggcaaggagscccctcaggtggtctgtcctggasctgtctgggctctgccttcctcatcttccctgcagcthtggamtgaraggcggtggcccctccttgccccgctcttccctaatcctcagcgcagctagtytgggaacagggagaatgtggggtggccagcctgcaragatgggtgctgggctgcatggtttttgccctggatctcttttgggggggggttccctcccatctttcacttgcacataaagtcgctttccwgttwaaawarwmrwwwwmwrr

SEQ ID NO: 3468 - DNA, 1784 bp, Rattus norvegicus
gaatagcgtctcgggagtgtccctgggtaatcgctgcatctcgttttgtgtgtgtgctctgtcgaaacgtctgtgatgtgtgtatggttttcacgtgaacggaggcaggcagagttgggtctgtgggttctagtgtgttcttaatctttttggaagtttgtgcagtgacttcccctctgggattgtttcctatgcataccttcaagtatgtgtgaatgtgttttctgtggtcccttgatcttactgggcttctctaaggagggtggctggaccatctgctacgtgtctgggagcccctctctagctaccacatgtcccgacatgtgcttactcccaatatttgcacccactcgcattcacaactcccaggcaaaaagaaaaaatcaaaaaaacaaaaaaaacgtgcactggggcacctagaaaatgggcagccaaggctccgcctacattttgcttcctccttggaatttccagccctgtgcagccaactgctccctagctgcgaagggcggagtttcccggctctataagtagtggtgccttaccggggatccgcactcctccgtaccctctgtacagcgcgcgaattatgtgccattcgcgtaaccacctccacaccatgactggcctgagggctccggcgccagttccctccaccggcccggaactccggcggggctccggtcccggaattttcaccttcgaccccctcccggagcgggcggtagcgtccgccgtgcgtccgaacacttctcgcgggcacggaaaacgcagccgacgggtgctctaccctcgagtggtgagtatcgcccgagtgggcagcaagaggtcgagtcgccccggaacctttgggaacaactagatgcggggactttcgtctgacgtttccctcttttctctgctcaggtccggcgccagctaccaaccgaggaacccaacattgccaagaggatcctctttctcctgctcgccatcatcttctgccagattttgatggctgaagaaggtgtgtcgcaggccctggctccggaggatgctaccagcgccatatcacctgagcccatctctgcgcccattactgcgcctcctgtcctcgagcctttgaacctgacctcggagtcctcggactatgctctggatctcaaagcttttctccagcaacacccggcggcattctaaacgcgatgggtcacagtccggaaaaaaaaacccaaagagcaccaggggtacctggtssgcaagaacgtatcccaaactgggacttataaggcaacgctaactcagaacactaccscmaagatsccggttcttggggcgagcccgaggcaccgtgggtcctggctaggctcaytggtgacggacgsaggtcttctcsgtgtctaattaatatttatgtayttatgtatatcctcmtaggtgaaggaggggtgtatgtaatatktaktstaactyatgcaggggtgcgagatatscccccktgctgtgacacagatatttaytacgatktatagggtccgtgagacagagytgtgggaggattagtytmgycwtggtcgggggrcatagrttkaggggtaacaykccatttyccagcacytmgactctgytgtaagactktggcagacccttgggaatacggtctstgygccdwtgatgtcttcctgactggaagycwtgggyccatggattgtcagagggcgrctgtctgggktcgcctagtatgttctgtgaacacgaataaacttgayttgcctktcdttwwdawvaaaaaaaaaaaaaaaaaa

SEQ ID NO: 3469 - DNA, 3641 bp, Rattus norvegicus
ctaaggaattcgtcgtcaggggccggggtggggtggggcaggatgctggatggcccgttattctccgagggcccgacagcccccgggagctccaggatgaggagtccggcagctgcctctgggtgcagaagtccaagctgttggtgattgaagtgaagactatttcctgtcattatagccgtcgcgctgcttctcgacagtccatggacatccaggccagctactgggcccgtgggccccagaaccgcacgtgtaggctgcgccccggatcccctgagccgccaccccgccgaccctgggcctccagggtgctgcaggaggcgaccaactggcgggcagggccccccgccgaggtccgagcccgagaacaggagaaaagaaaggcggcgtcgcaggagcgggaggccaaggagaccgagagaaaaaggcgcaaggctggcggggccgacggagtccctaggtcagccccgcccagagctccggaacgccttcgggcggcccaacctacagggtttccagttttctccagaccagagcgcttcgggcaggtggggcgagcgccccgaccatccgcgctcccgcagggtgacccaggggttgcatgggcggggccatggggagrcagaaggccagggcctcctagctacgaggctcacctgctgctgagaggcgctgcaggcacagccccaagacgccgctgggaccggccgccaccctacgtggctccaccttcttatgaaggtccccacaggaccctggggactaagcgaggcccggagctctcccgggcgcccacctcatcagccccagtgccagctaccaccaggacagagggagggcgcacgaagaagaggctggatcctcgaatctaccgggatgttctaggagcttggggtctcagacagggacggggactcttaggaggagctccaggctgtgcagcagccagagctaggccagagtcttgcaaaggggctgtagagaaaagttcaggcctagctgctgctggcctaaacagtggtggtgatggtcattcccaagccaaaactactggtccagtcacggaggtcgctctctctgggtccacgatcagtagcccaccacgtcctgttcccaggtctaggcagcacctcaggggatcaaggaaagggaaagaaggaagtgaggagatgtggcttcccacgtgttggctttcctcccctaaaaagcctccagttaggcatagccagaccctccccagaccctgggctcctggaggcaccgggtggaaagagtccctgggtcaaagagaggggacagagcatgagaccctggaagtctggaaggtgacccgccgtgcccacaccctgccccgcagttcccgaggtcccgctggtagagaaggcatctttgtcattgatgccacatgcgtggtgataaagtcccagtacgttccaacccctcgaacccagcagaggcagctcgcgccctctggggagtcatgcatcgtgagcgacagcctcaggcaacccaaaccctgccttgaggaggagggcaaaggggccgctgccaacccttcagtttgccaaaagcgactgttgagcagtcgagtcttaaacccaccgagtgagggtcgcgagttcgaggctgagggcagacagcagggggattcttcattggaggagcgctcctccagcggtttggggttccctgtcggcgaagtgaacccgcgagatgcccccacgcatccaggtagcccagagcactcgaccttaggcccagcggctccgggatgcgcgggcagcgtgaagggcccagaagcagctggggtcccgcggcgcgcgggcgggggctgggcgcggactccagggccctacgccggagccttgcgggaagccgtgtcccgcatccgccgccacaccgccccagattcggactcagacgaagccgaggatctcagcgcccatagtggctcctctgatggaagcgacacagacgccccaggcgcctcctggcggaatgagaggaccctgcctgcggttgggaacacccggcccagggaaggcgggaagacagctgagctgggcgacagtatcggggagattctagatgtcatcagtcaaaccgaggaaggcctcgtccgagaggacaccaggaaaacgccacagggaaagagagagtgagagtgagcgacgcccctccttgtcctcgtgtcgctcggcccagccagccttgggctcaccgcgctcctttcctctctccaggcttcgtttgcttccttttcttctttcctacctgtacctgttcccttgagacagaggagaggggaggaacgagggaactgactcaagagtcagtttcagggaaagagagggyrsgaksccacacctgctacattcggtgtggaactgttcagagaggcaaagtgaagggcagggcagggtccctggcaggagaggaaaagtaacggagaggcttttgaacctagtgacctagtgcaggagacagagggcttttagcagagaagaaatgaatgcagaatgcatacactcaaccagcaaattggcaagagggctctcctagatgttacaactcaagtttcaattccaactctgccactgacttagctggtggatctcagagtgactacttttctgcccgggcatcagggactaatgtaaatgtaaaacgagcgatttctgcctcccattcttttgtccctagaattttgtgaacgagcgagtagaatttgagggttcttacccacttctgccatcctcagttcggaagacagtcagggttttcagatttaaacgggcaaagggcttctattccaatttcccgagtttaggtgaatgctccccaaagcagggcaagataaaggtccggtcactgcctctggcctgctgtgatccaagctggagagggaaggtagccaatgaatcagcttggaacacttttaggcctgcccctttcctccatctccgtgtccttagtgatgctctacgtgttaccggacgcagacggtatggcccaccggatagaccctgactatctctgtgtctctcctggaaaacagccaggcaaggaggaaggttgatmacagcagacggtgtgggtgtgatactcgctgtagccactacggggcgcgcgcaggtcgcggattcccccccggttgctggtgctcgagtgcccctacaccagcactgccagttatctggatcccttatttcccggcgccggtttcccgccttgacacctccaaaccgcgcgcggggccgggagcaggctccggtctcccagacttctggggcgcgccgagcccttctttgtattaatccacgcctaccggtttgagactgacattcaagwctwhkttttttttttctttccttttcctttttctgttttyttttccttctttccaaccctgggcacttcctstgtgtctgccacttactagccatgtgaccttggccaaatcacttcacctccctgwgcctcagtttcctcatctgtcaaatgggggtttataaacacctacctcgcagggttgttgtgaggatttaatgasgtaatgtatataaagcgtcttgcacagtgcctggcacatagtaggcgcccaataaatctactcgtccctttaaaaaaaaaaaaaaaaa

SEQ ID NO: 3470 - DNA, 636 bp, Rattus norvegicus
gtaagtcctagcagtgcctgacgggtcccagcctgctccactgggatagcgggtgggaggcagagccggtgcgcgcctgccccgggagtgggcatccagtggtgcctaaggtgcctcattcctgcctgcccctccgacccccccatgcctggctggtctcatggcctcttttctctttccagaggtgagcagtgtgggctcctcatgggttggccttgctgcctgactgtggggagccccaggcagcccttccatggcagaggcgagatgtaggcgaaagaagtctggtgtccaccttacccgctccctccctgctgcttgcctccctgcaccctgaccccttcaagctgctaaccttgcttagcaactgtccccttgtgcccgagtctgtccagggggatggacagaggccttactctgacagatcccgggagctccctagtcttacttcaatctgtcgccagaaagctgtaccctgacgccacctatgtttggccgagctgctgctctaagcctcctgtgggaagcccacaaccctgtctgggcaggacactaatggccgtggtcagccctaatggtgactaatggcagcgctgtgcctctctctctcccttcatgtcttccctgtccctccag

SEQ ID NO: 3471 - DNA, 2163 bp, Rattus norvegicus
cctcactctgttttgatactttaatcttcctcgaatgataatctggagcctgctctacctttcccttcacattgccttcaaatattgcacatcaacataaagtgactaggcttaactactctacataccaccgaaacctgttaaagtggtcatctaacaacaggttgttttcgtctccagtagaagctcagaaatgccatcagagtcttcagtaaaggcaacggcggcgccgcctccattcccacttcctccggacggagggtggggctgggttgtagtctgcgcatccttcatctccattgggttctcctatgccttccccaaagccgtcacggtattcttcaatgacatcaaggacattttcaagaccacctccagtcagatcgcgtggatatcctccattatgctggctgtcatgtacgcaggaggtcccatcagtagtgtgttggtgaataactatggcagccggcctgtgctgatagtaggaggattactgtgctgtactggaatgatcttggcttctttcagcagcagtgtgatagaactttacctcaccgtcggcttcattggaggtttaggattagcattcaacctgcaaccagccttaacaataatcggaaaatacttctataggaagcgaccccttgcaaatggctttgccatggctggaagtcctgttttcttaagcacactggctcctttcaatcagttcctatttaacagctatggctggaaggggagttttttgattttgggggccatatttttgcactcctgtgtggccgggtgcctcatgagacctgttgggccaagtccacgtgctgcgaagtctaaaagtaaggttggctcaagacaagattcaagtacgaagagactcagtaaggtatcaacagcagaaaagattaatcggtttttagatttcggcctttttacacatagaggatttttgatctacctgtctggaaatgtcgtgttgtttttagggatgtttgcccctattatattcttggctccgtatgctaaggacaaaggagtggatgactataattcagctttcttgctgtctgtgatggcttttaccgatatgtttgctcggccttcggtaggattaatagccaacactagcttaatccgtccacgaatccagtacttgttcagcgtggcaatcatgttcactggcatatgccatctcctctgccccctagcccattcctacacagctttggtggtctacgttatattttttggaataggatttggaagtattagcagtctcctctttgaatgtcttatggaccaggttggagcctccaggttctccagtgctgtggggctcgtcactatcgtggagtgttgcccagttcttttcggccctcccctggctggtaaattgctcgatataactggacaatataaatacctgtacatagccagtgggatagtcgtgttatcatcaggcatttacctactgatttgcaatgctataaactatagacttctcgagaaggaaaggaagagagagaaagcaaggaggaagaaatcagcctcgcaggcatccaaagaaatggaggctttgagcagatctaaacaggacgatgttactgtgaaagtttcaaatacacacaatcctccctcagacagggacaaagaaagtagtatttaacaagtctcatctccgaatcagtgttcagaaatttaattatgagtttctttgtgtttttttcaatgaattgcaaaggattttagctgcaacaaaagatcgcaaacagtaacgaaactggtatcttcctcaatgacgaactaaaaatcagtgctttaatatttgttaaagatggttaacttttgagattgtgcacataaaaaatccacacagctgcttatctgcacaccaaagctgtgatgaaaatgaatttttttaaatctttctgscaacttttacttttagstawagaatgagatytgcatcccaraccccggstgacctaagcmcmattyaacmttaattccacataactaccctyttcaaggttcatttttcgtcggatactaagtcatgaagtgaattgaagacaatcattctttytattcaacacmcaaagaattacacatgkagccacgcaaacmctgagtaacgggatatcataaagaaataaatgaatttgg

SEQ ID NO: 3472 - DNA, 1501 bp, Rattus norvegicus
gcggattcgaaagcttcagcagctcctcctatggcgcagcgggcggctacacgcagtcccccggtggcttcgggtcacccacaccgtcgcaggcagagaagaaatcaagagcccgagcccagcacattgtgccctgtaccatatctcagctgctctctgctactctgactgatgaggtgttcaaaattggggatgtcgagatttcacaggtcactattgtgggaataatcagacatgcagagaaagcgccaaccaacattgtctacaaaatagacgacatgaccgcagcgcccatggacgttcgccagtgggttgacacagatgataccagtggcgagaacactgtggttcctccagaaacatacgtgaaagttgctggccacctcaggtcttttcagaacaaaaagagcctggtggcctttaagatcattcctctggaggatatgaatgagttcacggcgcacattctggaagtggtcaattcacacttgatgctcagcaaagccaacagccaggcctctgtagggagaccatctatgagcaacccaggaatgggtgagccaggaaacttcagtgggaataacttcatgccagcaaatggcctcaccgtggtccaaaaccaggtgctgaatttgattaaggcttgcccaagacctgaaggattgaacttccaggatctcaggagccagctccagcacatgcctgtagcctcaatcaaacaagcagtggattttctatgcaacgagggccacatttactctacagtggatgatgatcactttaaatccacggacgcagagtaacgagctctgggaactggcatcccagcgggcctgtcatcatctatctgttcttcccagctctgcaggttttggacagaagttccctgtagaaggtctcagytgaagtccttttggaacgcattgctctttgttttgtcacttattgtttagaggttcaaaaggagataggcagttgagaaagaagtaaactgagcaggatttcttaagagaaattccgataagctagtcaggactccagatggatggtgggaatggaaggaggaccagcagagcagagcagaaccacgtcatgcttgggagcctctgttcttgaaaggcttycstcgagaacgawccatactagggccaasggccsargaagaacctaccttccttccccttgtcctgcctgcagttgaaagwaggtttaaatgagcctgaggttctgtgcaaaggcctcatggggcagacaggaagaaatgttactgtgtttgtaatataaatgttcatatgtttgataaaacagttcacttgtarwaaaaaaaaaaammwwhdmrrvcgcaagcttattccctttagtgagggttaattttagcttggcactggccgtcgttttacaacgtcgtgactgggaaaaccctggcgttacccaacttaatcgccttgcagcacatccccctttcgccagctggcgtaatagcgaagaggcccgcaccgat

SEQ ID NO: 3473 - DNA, 1799 bp, Rattus norvegicus
cggggttgatgaactggactctgttgctgaaaggagctggcacaatgaagtttctcctcgtgctggtgctgcttgtgtccttacaggtatctgcctgtggggctgctcccatgaacgagagcgaatttgctgaatggtacttgtcaagattttttgactatcaaggggacagaattccaatgacaaaaacaaaaaccaatagaaacctcctagaagaaaaactccaggaaatgcagcagttctttgggctagaagtaactgggcaactggacacctcaactctgaaaataatgcacacgtctcgatgtggagtgcctgatgtacagcatcttagagcagtgccccagaggtcaagatggatgaagcggtatctcacttacaggatctataattacactccagacatgaagcgtgcggatgtagactacatatttcagaaagcttttcaagtctggagcgatgtcactcctctaagattcagaaagattcataaaggcgaggctgacattacgatactttttgcatttggagatcatggagacttctacgattttgatggcaaaggtggtaccttagcccatgctttttatcctgggcccggtattcaaggagatgcacattttgatgaggcagaaacctggactaaaagttttcaaggcacaaacctgttccttgttgctgttcatgagcttggccattccttggggctgcggcattccaataatccaaaatcaataatgtaccctacctacagataccttcaccccaacacatttsgtctctctgctgwtgacatacacagyattcartccctctayggagccccagtgaaaaacccatcckwgrcaaatcctggaagtccaccatcaactgtgtgtcaccaaagcttgagttttgatgctgtcacaacagygggagataaaatctttttctttaaagactggttcttctggtggaggctgcctgggagtccasccaccaacattacttcaatttcttccatgtggccaactatcccatcwggtattcaagctgcttaygaaattggaggcasaaatcaactttytctttttamagatgagaagtactggttaataaacaacttggtaccagagmcacactatcccaraarcatacattckctgggcttccctgcatctgtaaagaagattgatgcagctgtctttgatccacttcgccaaaaggtctatttctttgtggataaacaatattggaggtacgatgtgaggcaggaactcatggacgctgcttaccccaagctgatttytacacacttcccaggaatcagsccaaaaattgatgcagttctctatttcaaaaggcactaytacatcttccaaggagcctaccaattggaatatgaccccttactgsatcgtgtcrscamaasrykgmrcarkrcgagctggttcggttgttaggaagaatgtagtgaaggatgcttgctggtttttgtttcataaacatttattacatatccactgtatgctcagggtgtaactacatggcaatgatgtaatgtgaaatgaggcgagatatacaagccacatacacatagttacacagaaaagtgcttttacaaaattaaagctcttttggtaaactttwhhrmwwrawwmwmwwmwwaattttgaaagcaaatgcctccaaaggccaacttttttatctgtaagttgtttctaacaaccttyaagtaggaaaattagaattactcccctatctttactgaaatataccatttttcttaaataaatttaaagaaamcaaaaaaaaaaaaa

SEQ ID NO: 3474 - DNA, 2120 bp, Rattus norvegicus
ccgtgcgtcagtcagaacacgttcctgtttgcagaccacaaacccaggaaagccaggatggacactgctggaaaagttattaagtgcaaagcagctgtcctatgggggacgaaccagcccttctccattgaggacattgaagtggccccaccaaaggctaaggaagttcgtgttaagattttggccacgggaatctgtggcacagatgaccacgtgatcaagggaacgatggtgtctaagttcccagtgattgtgggacacgaagcagttgggattgtggagagtgttggagaagaggtcactacagtgagaccaggtgacaaagtgatccccctctttctaccacagtgtagagaatgcaacccctgccgcaacccggaggaaaatctctgcattaggagcgacctgacaggccgtggagtattggctgacggcacgaccaggttcacatgcaagggcaaaccagtccagcactttatgaacaccagcaccttcactgagtacacggtcctggatgaatcctccgtagctaagattgatgccgaggctcctcccgagaaagcctgcttgattggctgtggattttccactggttatggggctgctgttaaaactgccaaggtcagccctggctccacctgtgctgtgtttggcctgggaggagttggcctgtcagtcgtcatgggctgtaaagcggccggcgcctcccggatcatcggaattgacatcaacaaggacaaatttcagaaagccctggatgtaggggccacagagtgtatcaatcccagggacttcaccaagcccatcagtgaggtgctgtcagacatgacaggcaacactgtccagtatacttttgaagttatcgggcgccttgagaccatggttgatgccctctcatcttgccatatgaactatgggaccagcgtggtggtcggggctcctccgtcagccaagatgctcagctatgacccaatgctgcttttcactggacggacatggaagggctgcgtctttggtggttggaagagcagagatgatgttcccaaattggtgactgaattcctggaaaagaaatttgacctgggccagttgataacccacaccttgccttttcataacatcagtgaaggatttgaattgctttattcagggcaaagcattcggactgtcctgacattttgagatccagagagctgggtgttctgtgctgggcgaccgtgacctgaagccttgttcctgacagtgttctctgatatcacgagtctgtctcagaaatgccatgcagaggccaggttggggacaagagagagaagctctacagaggtttataaaccttcatatgtttagtttaccgggtgcctagcattagcagagaacagtaagagtaaatgttctagtctgcgttttcctaagacgataattctacacttcataagcatatacttggggttccaatttgttggaagagggactgttttccagaattttaccacaagttgttgttacttaaaaacagacaaagcatgtcgagagatgtagagaatacatttttcaagagatccccaccaaagccacccgagctctcattctgtttttcaacagaaacacttttaaaaatgttataaattaacttgaattagattgtgaaattgcacacataacttgattagattaagaaagaaagttgggaaatttaagggaagggcacgttttkkaaygaktaactttgaaaattatcgttatktaayttagtgacatgggggaagcacatctgtgcctggrgatatcgtcagcgtttattaatataaagcacttttayagtagcgattacagatgaaccatagatataaccacattgggatatttatgatattaagkttaataaagtagaatgacaagtccttaaggrcatagtartaactmcatttaacatgaagattattctcagattgctttaactacrccagcctgtatctgcatctgtctgtggacatgtacacacacgtaataktcattaaattttcaytgtggtawrwkwmawrwarmmrtagagctctctgtgtaacccagtataacctcaaaccaggattaccagtatgcacgccaggctgagagttctt

SEQ ID NO: 3475 - DNA, 1800 bp, Rattus norvegicus
tcaggccatggcgggtgaggaccacccgtggcatggcagcatcctctacaatctgttgatgagcgcgaagcagaagcacgggtctagggaagagcgagaggtgcgcttgggggctcagtgctggggttgcgcctgcggtactcagcccgtcctgggtggggagggactgcccggcgggcaagccttgtcccttctgtaccgctgctgcttttgtggggagaaccacccgcgccagggtggcatcctctactctatgctcaccaacgccaggcagcctagcggggcgaccgaggcgcccagggcgcgattcagaactccttgctggggctgcgcctgcagcaacgcaaagcccctggtgggcagadargggctgccagctggccaagtcccctcgctcctgtaccgctgctgcttctgcggaaaaaaacacccgaggcagggcagcatcttatacagcttgctcactaatgcccaacaaacgcacgtgtctcgggaagtacccgaggcacatcgcggaggcgagtggtggcagctgtcctactgtacccacaatgtgggtggcccggaagggcttcagagcacacaggccatggcgttcctgtaccgtagctatgtgtgctgtgaagagcagccccagcagagcagcgttgcctccgacacgcccgtgagagcagatcaaacaccagcagctccgcaagagcagccgagggccccctggtgggacacctcctctggtgtgcagcgtccgattgcactcaaggatccacaggtggtgtgcgaggcagcgtcggctggcctattgaagaccctgcgctttgtcaagtacttgccttgcttccagatcctgcccttagatcagcagctggtgctggtgcggagctgttgggcgcccctactcatgcttgagttggcccaagatcacctgcacttcgagatgatggagatttccgagcccaacctgatgcacgaaatgctcaccaccaggcggcaggagaccgaaggcccagagcccgcagatccccaggccacagagcagccacagacggtgtctgcggaggctgggcacgtgctctcagtcgctgcggtccaggccatcaagagtttcttttttaagtgctggagtctgaacattgacaccaaagagtacgcctatctgaaggggaccgtgctttttaacccagacctgcctggcctgcagtgcgtgaaatacatcgagagtcttcagtggagaactcagcagatcctcactgagcacatcaggctgatgcaaagagagtaccagatcagatcggctgaactgaatagtgcccttttcctgctgagattcatcaacaccgatgttgtcactgaactctttttcaggcccatcattggtgccgtcagcatggatgatatgatgctggagatgctctgtgcaaagctgtgaaggcatgcagccactcaagtgcattttactacacatggagaaagggggggctgtaggcagaagagtgctcaaatttgtgaaaacaaactttcttgtatttttacatgcatagtatatttgtatccaattgaagaaatactttagttacagacaatgtaaaaacccctctgctccatactggttgccttgtgaagaaaagcatttgttaacaaataattatttccatagatctttaagagtgttatactatgctaacaagctaatttccacaaaaataacatctctttccattaaccctgccaaataaaatttataatattaacttttaataaaatttaatgtactaaccattaaaaaaaaaaaaaaaaaaaaaa

SEQ ID NO: 3476 - DNA, 416 bp, Rattus norvegicus
cacgaggagcaggatgaggaggaagatgaggtgcctgatgatgagaccgtcaaccagatgattgcccggcacgaagaagaatttgacctcttcatgcgcatggacttggaccgccggcgtgaagaagcccgcaaccccaagcggaagccacgcctgatggaagaggatgagcttccatcctggatcatcaaggatgatgcagaggtagagcggctgacatgtgaagaggaagaggaaaagatgttcggccgtggttctcgccaccgcaaggaggtagactacagcgactcactgacagagaagcagtggctcaaggctatcgaggagggcacgctggaggagatcgaagaggaggtccggcagaagaaatcttcacgtaagcgtaagcgagacagcgaggccggctcctccacccc

SEQ ID NO: 3477 - DNA, 4027 bp, Rattus norvegicus
gtctttgtcacagggcaaggaacaaccgacgatggactggacacaacagagattgttcttctgcctcaaactgaccctttacctgctcgcaccactgaattcacacccccaagsatctctgaaagaggaaatggctcctcagagaccacatatcttccaggtttttcatccacgctgatgcctcacctgaccccacagcctgactcacagaccccctctgccagaggagctgacactcagacactcagcagccaagctgacctcaccacactcacgkctkstcmcagcggcragamyraccsacsaggtgtgcccgaagagagtactgtaccggagacctttcctggaggcacccccatccttgcacgcaacagcactgctccctcacctacacacacttccaatgtcagcaccacagatatctcctcaggtgccaacctcacaacccctgcaccatccactctgggctttgcaagcaataccaccacaagcacagaaatagctacccctcaaacgaagccatcatgtgatgaaaaatttgggaacgttactgtgcgttacatctatgatgacagtagtaagaattttaacgcaaacctagaaggtgacaaaaaacctaagtgtgaatatacggattgtgaaaaagagttaaaaaatctaccagaatgctcacagaaaaacgtcactctctccaatggctcatgtactccagataaaattataaatttagatgtaccaccagggactcacaactttaacttaacaaactgcacaccagacatagaagctaatacctcaatttgtttggagtggaaaataaaaaacaaatttacctgcgacattcaaaagatttcatacaatttccgttgtacaccagagatgaaaacatttgctttggacaaacacggaacactttggttacacaaccttacagtccgaacaaattacacatgtgctgcggaagtcctctacaataacgtaatacttttaaaacaagacagaagggtgcagactgattttgggactccagaaatgcttccccatgttcaatgtaagaattcaactaacagcacaacattagtctcctgggctgagccagcatctaaacaccatggatacattttatgctataaaaagaccccttcagaaaaatgtgaaaatttggctaatgatgtgaacagttttgaggtgaaaaacctgaggccttatacagagtacacagtgtctctatttgcctatgttattgggagggtgcaacgaaatggccctgctaaggattgcaactttcggacaaaagcagctcgtccaggcaaagtcaatggtatgaaaacctcccgggcgtcagacaatagtataaatgtcacgtgtaattctccttatgaaattaatggccctgaagcgcgttacattttggaagtcaaaagtggaggttctttagttaaaactttcaaccaatccacatgtaaatttgttgtagacaatctctattattcaactgactatgagtttctggtctatttttacaatggagagtacctgggagacccagaaataaaacctcaatcaacatcttataattctaaagcactgattatattcctggtgtttctgattattgtgacatcaatagccctgcttgttgttttgtataaaatctatgatctgcgtaagaaaagatccagcaatttagatgaacagcaggaactcgttgaaagggatgaggagaagcagctgataaatgtggacccaattcattctgaccttttgttggaaacatacaaaagaaagattgccgatgagggtagactgttcctggctgaatttcagagcattccacgggtattcagcaagtttcccatcaaagatgcccgaaagtcccaaaaccagaacaaaaaccgttatgtggacattctcccctatgattacaaccgtgtggagctctctgaaataaatggagacgcagggtccacctacataaatgccagctacattgatggcttcaaggaacccaggaaatacattgctgcacaagggccccgggatgagacagttgatgacttctggaagatgatctgggagcagaaggccacagttattgtcatggtcacacgatgtgaagaaggaaacaggaacaagtgtgcagaatattggccatgcatggaggaaggcactcggactttcagagatgttgtcgtgacgatcaatgaccacaaacgatgtcctgattacattatccagaagctgagcattgcccacaaaaaagaaaaagcaactggaagagaagtgactcatattcrrywcassagttgsccagaccatggggttcctgaagaccctcacctgctcctgaaacttcgacggagagttaatgcttttagcaacttcttcagtggacccattgtggtgcactgcagtgctggcgttgggcgtacaggcacctacattggaattgatgccatgctcgaaagcctagaagcagagggcaaagtggatgtctatggctatgttgtcaacctaaggcgacagagatgtctgatggtgcaagtggaggcccagtacatcctgatccatcaggccttagtggagtacaatcaatttggggaaacagaagtgaacttgtctgagttacattcatgtctacagaatctgaagaagagagatccacccagtgacccgtctcctttggaggctgagtaccagagacttccttcatacaggagctggaggacacagcacattggaaatcaagaagaaaawaaaaaraaaaacaggagttctaacgttgttccatatgactttaacagagtgccacttaagcatgaactagagatgagcaaagagagcgaggctgaatccgacgaatcttcagatgaggacagtgactcggaagaaaccagcaaatacattaatgcgtcatttgtgatgagttactggaaaccagaaatgatgattgctgcccagggtccactaaaagagactattggtgacttttggcagatgatattccaaagaaaagtcaaggttattgtgatgttgacagagttaatgagtggagaccaggaagtctgtgctcaatactggggagaaggaaagcagacttatggagacatggaagtaatgttgaaagacacgaacaaatcctcagcctatattctgcgagcatttgaactgagacattccaagagaaaggagcctagaactgtgtaccagtaccagtgtaccacatggaaaggggaggagctccctgcagaacccaaagatctggtgactctgattcagaacatcaaacagaagcttcccaagagtggctcagaagggatgaagtaccacaagcatgcatcaatcctagtccactgcagggatggatcccagcagacggggttgttctgtgctctgttcaatctcctggaaagtgcagaaacagaagatgtggttgatgtttttcaagtggtaaagtctctacgcaaagcacggccggggatggtgggcagctttgagcaataccagttcctctatgacatcatggccagcatctatcccacccagaatggacaagtgaagaaagcaaacagccaagacaaaattgaatttcataacgaagtggacggagccaagcaggacgcaaactgtgttcagccagctgatcctctgaacaaagcccaggaagacagcaaagaagttggagcttcagagcctgcaagtggttctgaggagccagaacattctgcaaatggtcccatgagcccagctctaaccccgagctcataggaacggattcgagtgggacaacgcaaaatgtcaaattagttgtttctatttttctagacctaatgaaaaaatatggctgtacagtggtccgtggaatctgtgttcacctttgccactgtataaaaatatttaagtttgtcaaaaggttttgtacagttttatgcctattttaaaaatgtatctatatcatttagcaagagtgtgtgtaggagagtatgtctgtgtgtgagagagtgtgtgcttctgttagtgtgtgttt

SEQ ID NO: 3478 - DNA, 3735 bp, Rattus norvegicus
ctgggcccaggtggtgagccaagaaaatctgccgaatacgatgacgatgttgccatttactccgaatagcgagtccccaagtacctctgaagccttgagtacctactcatcaattgctacagtgccagtgacagaggaccctaaggagagtatcagcccctgggggcagaccactgccccagcttcctcaatccccttgggaactccagaattgtcttcttttttttttacatcagctggtgccagcgggaacaccccagtacctgagcttacaacctctcaggaagtttccaccgaggcatcattagtactgtttccaaaatcatcaggtgtagccagtgaccctcctgtcactataactaatcctgcgacaagcagtgctgtggcatctacctctttagaaacttttaaagggaccagtgcacctcctgtcactgtgacaagctcgaccatgaccagtggaccctttgtggctacaactgtaagctccgagaccagtggtcctccagtcactatggctactgggtctctggggccctccaaagagacacatggactctctgccaccatagcaaccagttctggtgagagttctagtgtggccggtggcaccccagtcttcagtacaaaaatatccacaacgtctaccccaaatcccataaccaccgtgccaccacgcccaggatcgagtggcatgttgctggtttccatgctcattgccttgacggtggttttggtccttgtggcgctactgctgctgtggcgccagaggcagaagcggaggactggggccctgaccctgagcagaggtggaaaacgaaatggtacggtggatgcctgggctgggccagctcgggttcctgacgaagaggccaccaccgcatcagggtcagggggcaacaagagctccggagcgccggagacggatggctccgggcagcggcccacgctcaccactttcttcagcagacggaagtctcgccagggctcggtagcactagaagagctgaagcctgggacgggtcccaacctgaagggggaggaagagcctctggtaggcagtgaggatgaagctgtggaaaccccaacttctgacgggccacaagccaaagatggggctgcacctcaatccctatgagtaacggtattcatctagtctgctccttgaccccagatcctgctgtcagctgcctctcactctgcatttgtgaatatttgtgggccagatccattcgttcattcattattcagccattcattcctctccaacccccgctgttttccacctccccttcctctgtgctccctttgaatctccagaagataagcttagttgacccacattttccaagcatcccccttggaatgctgggatccgacaagaagaatgaaaatgataagccagaaaactccggaggaggggccccctgaggactgcctctcaactaccatttgctttggggacagcttagagctggatgtagccattcagtttgctcttgggtgaactgtgacctgtgacttttcccagagcactccgattttgggctggccggtagctgcttggggtagcctgccagagatcagtcacttctcctggaggtggggatggggagacttcctggctccatgtggtccctgcacctgttttgtccactcggaagtatggtttatgtgcaagataggacaatttaggcgatggctgtgaacagtactggtgagtatagaccatggagagagcaggggagatgcaaaaggaggggcacgggagctgccgagccctcagatcccttcattgtgctcagacaggatatggctgaaaacctaagtttgtctgtagttccccaaaagaatgcaaacatgatggggactaaatgtctccatacttgtgccatcaagaatgagttcttcagcttagctgccacagcctttcctcaaaggctccctcagaccagcacacaccaagcacccatgcaagaaggggagaagaatcagcccaatgcagggactgggtggtgcaaaaccactgcttttgatgatgctttccctacaggctcaatttgtccgtttcctctgaagtccttcccatctctggaataagaaagagttaaatgaaagacaggctcagggggtggggcatggatgcccaaagggtctgaggtagagaggggacagaccacaattgtgctgttttctgactctgataccagcccggctcgtggtccaaagctggttgctggaagagctgtgcaaggggaagtcgttgagtcagaggacactgtccttgagaacagcctgacctacaaaaagatgtgtgtgtgcggctgtgtggcctgggtggaaaaggggaaggtgggtaggagggaggggacgaggagtggaaagggacaaggatcagctgccaccacatcatcatctcctccccaagtctgtgggaagaggaagggccaagatgggcacacctgagcsataccgaacccatttcttataggcgcagtgtggagcagctctaacagatggctagtgagttgcaartgtcccttaaggaacataacaactgttgtggctgatttttgccaaaccgaatgtccctatttcaggcttagaggagaatgttaccaagctgagaggtcaatggctctacccatcatgttccactgacactcctgaggtattacaggtttccaggtacagggaggaagacaaggaaatggggtagggatggtggatggcacgcaataggacctcagccctgacagacaaaatgtcacaagaggctaggacatgattggtattccacctccgaaggaggacaaggaagcttaatgtttgtcccagggtcttggccatatctctctttctagtggctccagtacctggcaagcagcaaggactgagtgcatgctccgatggatgsmtggawgsatgsawggaygtkrgatgsatgmwysgatggatgaatggacagatggatagatgaggtattggcagctagcaagagagaaggcatttaacacaaagattagtaatgcaaaaatatataagtgagtggaacagagatcatggtggatacacacagctgtctttcagctcaggagagcgagcacccagtaagcaatagaaaagcaaaaatagargargaaaaagaagaaaaaagcaggcaaacagaaacagggaaatgtaaaacacagagaccgtttgaacyccgtcagttatgaamccatagtaagtggcttgtgtttgtgacatcctgsccttgtyttcagaaatgtgtaatgacttcagaaatgcctgcggctgacacggggtagggaagtaaatgatctgtaaatacatskgyrykaktgcatttgtgatagcagctacatcctgaatgtttagtacggtcctcctaaaggggaatttaagtgtgatttttttcacctaacttgtctttgttttacacaataaatgtctttacttttmmrrwwawraaaaawawwrrwragggggctgggaaatagctcattggttacgagcaccggttgctcttccaggggtcccaggttctattcccagcacctaagatggccgctcccaaatgtttgcaactccagttccaggagatccagtgccctgttctgaccctcaagggcaccaggtacacaggtggcacacatacatacacacaggcaaaatatctatatgcatagaaataaatctttttaaaaatggraaaaaaaaaaaaaaaaaatc

SEQ ID NO: 3479 - DNA, 1182 bp, Rattus norvegicus
tcttctgaccccaccaaacacacaagaagaaaatggccacamttggagacctggwrataagatttttyttcatggctgtcctmatgagcccccagaagtcgtgggctatcaragaggagcacaccatcatccaggcggagttctatctttcccccgaccaaaatggagagttcatgtttgactttgacggygacgasattttccatgtagatattaaaaagtcagagaccatytggagacttgaagaatttgcamagtttgccagctttgaggctcagggtgcattggctaatatagctgtggacaaagctaacctggacatcatgataaakygctccaacaacacyscagawgccaabgtgattccagaggtgactgtactccccaaaagcccggygaacctgggagagcccaacatcctcatctgtttcattgacaagttctcccctccagcgstcaatgtcacctsgcttcggaacsgacagcctgycaccaaaggcgtgtcagagacrgygtttctcccamggsaggaccamctctwycgcamattccactatctsaccttcctkscctmcryggaagatwactatgacygtgargyrgmyyactgssgyctrsasgassctcwkcssaascactggsmgyttgaagagraaaccctcctcccagaaactaaagagaatgtcctgtgtgttctcgggttgtttgwgggtctggtaggcatcgtcgtcgggattgkgcwcatcatcaaggsccttcggaaacgcaasgcastggarggccgccaaggagccctgtkagatmccrggagktgawgrmkwssryrmgrgstcatwgarraartgtgctgtgasdgcatctgasgmtaccycttytywcarctyttcacctcagcarasacatywtbygcagktkccahsctcawkcytcgcgsyagattctstdgtyyaatgtctggctggrgttckcygtctgctycctkkrtvwawawtytatwtymyatcattymtwvtwattcststgtgscacatatcacasrgmwcwkscyycgmtgcggaactwtytaagaatggasgcatcttctshycacttacggcttgacatttcwccaaactgkgkyhtytyywtctytttttymataaatartaaacmccttgrrwmmwraawaaaaaaaaaaaaama

SEQ ID NO: 3480 - DNA, 552 bp, Rattus norvegicus
gatcaaatgccagcggtactggccaagcatcctcggmacaactaccatggccaacragaggctgckcctggccctcctgagaatgcagcagctgaagggcttcgtggtgcgggtgatggccctggaggatattcaracaggggaggtgcgacatatttctcatctgaatttyactgsctggccagaccacgatacgccgtmacatccagaggacctcctsacgttcatctcctacatgagacatatccgkaggtcgggcccggtcatcacacactgtagtgcyggmryyggacgatcaggaaccctcatttgcatagacgtggtcctagggctaatcagccaagatctcgaattcgacatctctgacctggtgcgctgcatgagactacagaggcacggcatggtgcagaccgagggtcagtatgtcttttgctatcaagtcgtcctctacgtcctgactcacctccaggcggaagaacagaaggcacagccagggctcccacagtgacgcagcgcaacctctgaaggttcctcgcctccagccgggacgcc

SEQ ID NO: 3481 - DNA, 2185 bp, Rattus norvegicus
cacctccaccctgagccaaatagggtgcaccgtcattaattccaataactcaaagagattgaaagtgaagagaaaccctgaattgaagttagcccagcctggggctacgagaggaattaaggagtttggagataactcaaatctgcaaaataaatgagataaacataaaataaacccaggattgcgatgtgcacctccttggttgctcgaatttgttctgcaagacccctgtctcagtaacagaagcaacccttctcaaaactacatcgagagagaatgggggggtgtctctgcaaaattagtctgggctaaggaggtacctgttcaggtctcataggagggctttatattttgccaggaaaggccatgtgtcttcccaccaagcatgcaagtcacccctcaggtcacccctgtccttcaggatcttgggagcacctttgctgctgctgctgccgagatggttagcagaaggctcactgttcagcatcctgtttggaccaaactgatcaagacttctgggataaccgggagaattgtgggaaagggcaatactaattctctctctcaacttgcaaagacggtatgagcaggcaccttcaagaagcgggctgcagtggcaagggagtggacagcgggcagaataagctacttcggtctacggtcttacactcagcggggactcgggacacgtgccgcagtgcacacgcacagagagcaggcgctgtgcgtgcgcaggggcgggagccaagtcgctcgttgcgcgcccccgcctggggctataaaagccttgccacctgctgccctagctacgcagcgcatccgcttgcctggaggaactaagctacagtctctcgcggctgctggcctggatatggaccctgagacctgcccctgtcctactggtgccctcccctcctgctagcactttgccctttactggcaaacccactcctctgtcttcattcaaggacgtttgggggcgggtccaaccacacccccatctttaaccccgtgatggtcccatcttttaaccccgtgatggtgataatcttcatttaggtatggggacgccaggtttccctagtataattcttcctgtgccctcttaggtggttcctgcacctgctcggacaaatgcaaatgcaagggctgcaaatgcacgaactgcaagaagagtaagtgcacccccacccccacccactcccacccccctccataacctccagccgcacccaccccaccctcaccagacactatgtatgcaaagcttcctgcatgcagaccttcagataccgaggctattgcagccggtgttaattaacacagtgtaaggggagatattttgatgaatttccagaagctattaaaggtagctgatttgagagctaagcccctgctcaagccccgctctttttcagtgcctggggatccccaagcaagaatcgggggcggggggggtgtcagctttaaagttgtagtgccttggtccttctcaggccttgtgggtctcctcaattagctctttccagaactcaacaatataatatccttggggtgaggtgtagaggtgagaccaatgctctcttctcttgagtgtggctatgcatagatcctacgaatttgctggcttcaacattatccctgcccttcccctgctgcaactcccctctcaaatacctttcacattggtctgccttctccttgagacctaattctccctctggcccaggcctgagcccagcattcccaagggattccctagcacccacccaagaagctgtgggctagttaccagggcgactctctactgagacccagcagccactgcagtaccatagacgctgagtcagacctgatgtggcagtatgaagggagagccacctgtcctgggcaaagcctgatgactctccatccacccccccccccaatactgcttttccctctcctttgatggagacagatgctggcaccagactgggcacacatccacccacccacctacccattttatctccaggctgctgctcctgttgccctgcaggatgtgagaagtgtgccaaggactgtgtttgcaaaggcgaagagggggccaaggccgagaaatgcagctgctgccagtgaggactcccacacagcctatgtgaatagtgctgcgtgtccctggtggggcgtggctgttgccccc

SEQ ID NO: 3482 - DNA, 765 bp, Rattus norvegicus
ggacacgagcgagaccagtgagaagatcgctcacgccaaggctgtggctgcagaagcccgcgacacggccgcccatgtgcagtctcagcttcagggtatgcagaagaatgtggagcggtggcagagccagctggggggcctgcgaggccaggacctgagccaggcggaacgggatgcaagcagttcagtgtctaccctggagaagacattgccacagctgctggccaaactgagccgtctggagaaccgaggggtgcacaacgccagcctggccttgtctgccaacatcggtcgtgtgcgcaagctcattgcccaggcccggagtgccgccaacaaggtcaaggtgtccatgaagttcaacgggcgttcgggggtacggctgcgcaccccacgagacctcgctgaccttgctgcctacaccgccctcaagttctacatccagagcccagtgccggcgcctgaacctggcgagaacactggggaccgctttgttctgtacatggggagccgccaggccaccggggactacatgggagtgtctctgcgtaatcagaaggtgcactgggtgtacaggttaggtgaggctggccccacaactctcagcattgacgagaacattggggagcagtttgcagccgtcagcattgacaggaccctccagtttggccacatgtctgtcacggtggagaagcatatggttcatgagatcaagggggacacagtggcccctgggagggagggactactcaacctgcatcctgacga

SEQ ID NO: 3483 - DNA, 396 bp, Rattus norvegicus
gatgaaatgctgcaagtgtgactccaggctgcctcgcaactacaacagtcaccgagtggagaacgttgtatcgtcttcaggccccatgcgctggtggcagtcccagaacgatgtgagccctgtctctcttcaactggacctagacaagaggatgcagcttcaggacataatgatggattttaagggtctcatgccagctggcatgttgattgagcgctcttctgactttggcaagacatggagggtgtaccagtacctggcgacagactgtgccagcacctttccccaggtccaccagggccagcccaagaactggcaggacgtccggtgccggcccttgtcccagaggcctaatgggcatctgactgggggaaaggtccaacttaaccttatgga

SEQ ID NO: 3484 - DNA, 286 bp, Rattus norvegicus
tgtacccagtgtttctgctatgggcattcagacagctgccacacctctgctgacttcagtgtccacaaaatcacctcaactttcaatcaggatgaagatggttggaaagcagttcagagaaattgggcgcctgcaaaactccactggtcaccgcgccatcaggatgtatttagttctgcccgaagatcagacccagtctatttcgtggcacccgccaaatttctcggtaatcagcaagtgagttacgggcagagcctgtcttttgactaccgcgtggacagaggag

SEQ ID NO: 3485 - DNA, 6702 bp, Rattus norvegicus
aaaaccgaaaatgttgacttccccagagccgaagggccttgtcccattcacggcagagtcacttgaacttataaaaaatcacattgctaaaaaatgcaacgaagagcatgaagaagaagatttaaaaccaagccgggatatagaagcaggcaaaaaacttccatttgcctatggaacccttcctcaaggaaccgtgtcagagcccttggaagatgtggatccatactactatgttaagagaaatactttcatggtcttaaacagaaacagagtcatcttcaggttcaatgcggtttccatcctctgcacgttgtctcctttaagctctctcagaagagctgttatcaaggttttggtgcacccccttttgcgcctgctgattttaattagtgttctcaccgacagcatacttatgtgcatgagtaayctaccggaatggatattggcagtagagaatacttgcttgggaatttacacattygaaatactkgtaaaagtcattgcaagaggtatctgggcagggtcattttccttccttggggatctttggaactggcttgatttcagtgtaactttgttcgagcttatcacaaggtcttcacctctaagctcccttccaatgtttaaaacaataagaaccttgcgaattttgaagatcatycctttgaaccatggcctgcagtctattgtggtgacgctggtccagtgtttgaagaaactactcggagccattgccctagctctgttttttctgactgtgtcttcgctattcgggatgggtctcttcatgggcaacctgaagcacaaatgtgtgcgatggccccaagaagatggaaatgatgtgatgtacartggaactggaagccagtaccatattctagaaagagaaaacttctactatatggaaggcgcgagatacgctctcctctgcggcaacaagacagatgccggcctgtgtccagaaggttatatgtgtgtaaaagagggctcaaatcctgacaatggcttcacaagttttgacaattttggctgggctctactggctatgtttcgattgatgactcaggattaccctgaattactttatcaccagatcctttatgcttcaggaaagatctacatgatattttttgttctgatcagtttctggtttgccttctatatggcaagtttgttcttgggcatcctcactatggcctatgaacaggagaagcagagagcttctgaggagtctagagacatggattctaaatgtcatcagactgtgaaagaattcgaggaagaacatgaaggagctgagcttcagtgtatctggttttatgaggaggttcttgatctacttggacttgagctttgtatcaaggagatggaaactacacaaatagaaatgaagaaaagatcaccaacttctataaacaccacattggatatactggaagacactgcccttggacacaaagaagaaccagaaacatccaggaaggaatgcccactctgttggtataagtttactaaaacctgctttatctggaaatgctctccctgttggataaaactgaatgagtttgctgacagaattataacacacccattgtttgatcttttccttgttatatgcatcattttaaacatatgcttcctggccctagaacactttccaatgagtgaggagctcatgtcactccttgccattggaaacttggtttttattggaatttacacaatagaaatgattttgaagataatcgctatgcatccatatgggtatttccaaataagctggcatatttttgacagtattcttgtggttttgggattaacagaaatgttactagcagatattgaagaaataactgtttttatattagtcccattgatatttataaaattgggaaaatatgcaccaccatttaagaatttgatgcgtattcttggtagagcattggtggccctgaaagacttggtcctgttggtctccattttcatttacttctctgccgtgtttggcatgaagctgtttggtcgaagttacaaagattgtgtctgccacgtagatcaagactgtcaacgccaacgttggcacatgagtgacttcctccacgcctacgtgactgtgttccgaatcctctgcggagagtggatagagacattatgggagtgtatggaggttgcaggcgaggcctggtgtattccattttacatgatggtcattttaattggaaatttattgatactttacctctttgtgggattggtgagctcatttgcttcatacgatgctaccacagaagtgagcaaagaagccaaaaaccttcagcttgcagtggcatggataaaaatggtaataaactgtgtgcttcttaaaatactgtgcaaagaaaaaactgtttctacagaagcaacagaccaaacatgtgatccaagtgttaaagagaatatttctggtcatactctttctgaactgagcaacacccaaacattcctcagatacaaggaccagagcagtggtactgagaaaactccagtgactgagtctgagagccaatccctgattgctagtcccagtgtatcagaaactgtgccaattgcttcaggagaatccgatatagaaaacctggataacaaggagactcggagcaagtctgcaaatggaagcagtaaagagaaaatgaagcaatctagttcatctgagtgcagcacggttgatattgctatttctgaagaagaagaaatggtctatgaacatgaaaagtcgaagcttcataaaaatggttatgaacgcaaatcttcagctggccaagtcagtagagaatctaggaatggaaagatttggaggaacataaggaaaacttgctgcaagatagtggagaacagctggtttgagtgtttcattggcctggtcactctgctctgcacaggcactctggctctggaagacatatatattcatcagcggaaaaccattaaaatcttcctggagtatggagacatgatatttgcttacatcttcattctggagatgcttctcaagtgggtggcctacggctttaaagcctacttctctaacaactggtacaagctggacttcatggtcgttatcgtgttgtgtcttagcttaaaaggcaaaactcgagaggacctgaaccctctgccttccataaagttccttcgagcacttagagttctgtctcagtttgaaagaatgaaggtggttctgagagctttgataaaaacaaccttacccgctgtgagcgtgtttctggtctgcctaatgatctggctgcttttcagtgttatgggagtgttcttattcgctggcaagttctatgaatgcattgacccaacaaggggagaaagattctctgtatttgaagttatgaataagagtcagtgtgaaaacctggtatttaatgaatcaatgccatgggagaatgcaaaactgaactttgataatgttggaaatggttttctttctttgttccaagtggcaacatttaatgggtggatcagtattatgaattcagcaattgactctgttggtgtgtacatgcagcctagttttgagcacagcctccacatgtacacttactttatcatctttgttgtgtttggattatttcttcccttgtgtatgctgattggtgttattatcaggaatttcaacaagcagaaaattaagcagggaggatcaaatatctttataacggtaaagcagaagaagcagtaccgggcactgaagaagctcttgtatgcagactctcagaaaccagcagcccgccctagaaacaagttccaaggcttcatttgtgacgtagtaacacatcgtgtctttaatgtcrtcrtcrtacttcttatctgtttccaagcaacaaccattatgatacaaaatgatgagcagagtccacaaattgaaaccgctgtcttctggatgaactccctttttassakgctgttcactctggaatgcatactgaagctcaccgccttccgctgccactatttcaccagcgcayggaatgttcatgactttatggtggtcgttttctccattacaggactgctgctgcctttgtcaataggacaatactttgtgcctccttcactggtgcagctgcttcttctctctcgcatcatccatgtcctgcgtcctgggaaaggaccaaaggtgttccatgatctgatgcttcccttgatgctgtcactcccagcactgctcaacatwggtcttctcatcttcctggtcatgttcatctacgccatctttggaatgtacaacttcgcctacgtgaagaaagaagccggaattaatgatgtgtccaastttgagacctttggaagcagtatgctttgtctctttcaagttacaacattttctggttgggacgggatgctggatgcaattttcaacagtcagtggtctgactgcgatcctgataaaattaacccagggactcaggtcaggggagactgtgggagcccttctgttgggatttttyattttgtcagttacatcctcatatcatggttgatcattgktamtatgtacgyygktttgatcatggrgktcttaagtattccttctaagagaamaaacaggaccttgagcgaagatgactttrrgagattcttcaaggtatggaacasgtttgaycctgacaggacccagtacatagactctactargcytwctgatwttgcagctgctctcgatcctcctcttttcatggcaaaaccaaacaaggkycagcttgtwgccatggatctccccatggytgsrggasacwgaatccattgscttsatattttgcttgcctttacgaaaagagtgatgggaaaggatgagcgggtggagaagatcctttcagagatagaatctgggtttatgttagcgaaccctttcaaaattacgtatgagccgrttacaacgactttgaaacgcaaacaagakkcagtctyagscactatyatycagcgggcatacaaaarkwmccgsttaaggcmvagkgacmvaaagawacaagatatyccggraatagatgatggcagggaggatcctaactctaaaggtgkccactctkgtcaaatcgaggaraaggcatytattcagacccarawytaacggkacttyccaawtcttctttytttacatattcccacacacactmaaaacgcttaactwagcaggagawcggrgactwgrrataatggkcacatytgdgtgcccacacathtycatgamaagstytgstttatgtycarkctcgkgatacctyargaaaramarassytyardwttgstgcargtagstwaardgggtcacacytgkcatttggstatttaaaawgdttctctkdggcthgdctagdgdkgsctatarkggaagakgtgtwagaggaaaagagaggaaagggraataaagktyarcagktatacagktttcctcatatawtttatatttaawtttacaggccgggtmaccacccctggggcctagttgcaaatatgaggkatttycytaaagkggawtgkgsyycaaaaattygggaagsctgscttyaatmwtgagcatgcctaaataamcrctwctgggtgggahwggagamkscwkgyyttcagaaartgcctttcarktctamatytcttaaaatgtttaactggccsctcmmsmwmdhdktgctttcywcstgatggcttywwgaawtwytgkttyrttttttgtttgtttgctcgctttgttttgctgbtgktctttggtgtttcgytgtccctcgtgactatgcaggttctacaagagctccaggtcagaaagaactgagatttatggagcaagaagcgtaggagtcacacttaacaatgagcacattttctgtatttcattcacatttatacctttttataagtacacatttactaaaaggatacamtagagttaatggactggagctttaccttgttstaaaaactggtttattttttaccatytatccatagcasgtgcatgctgtcatataaawtakaagagttgggggcaaccakcatgtttaggggttttyagtgccctgatycttaatttaaaaactggtcacttgaragttcttcccattgtacgttgwatttcttgcaacttgaagaaaatgaccyttywaacaatakgggtagtgaggaascwsatgaaagttaagwkgscmytytwtamcatcwttatwtscawatwasctcmcttatgtttcccttatttyttttatatctyctcatacmtactcatgcaratgtkttatatttgagaatctmtwawatwrcamacmttrsttktaactactgwtrttwttttygytaawwtaaatagytggktttgrttyyttcacataswtgtttacttccmctcatgtrktttgagaatctgwtatyttctcywtttgtataaagactgattacaccgtgcctatgaagccctccagaattgaaaagaaaaaaaaaatatwtatatatatatattctactggcttaaataagaagctttaaatgggttttatgatactcaatgccattgtattctcgagactgtattttgtaatgaacgcatggactcgagccttaactcttgttatctactttcgatcctcagaaactcaatgaatttaccaacttgcsttggacaatcaagtaaacgtaatttcararwmaaaaaaaaaaaaaaaaaa

SEQ ID NO: 3486 - DNA, 1782 bp, Rattus norvegicus
ccgttgctgtcgggtcaccacagagcccaggagaagccaggacatggaccccataagtaacgacagcagtgaaatcacctatgattactctgatggaaccccaaatcctgacatgcctgcagatggcgtttacattccgaagatggaacctggggacattgcagcccttattatctacttggccgtgttcctggtaggagttaccggaaatgccctggtggtgtgggtgacagcctttgagsscaaacgtactgtcaacgccatttggtttctgaatctggcggtggcsgwcctcctctcgtgcttggcactgcctatcctgtttacgtccattgtaaagcataaccactggcccttcggtgaccaggcctgtatagtcctgccctcgctcattctgctcaacatgtactccagcatcckkctgctggccactattagtgccgaccgtttcctgctggtgttcaaacccatctggtgtcagaagttccgccggcctggcctggcctggatggcttgcggagtaacctgggtcttagcattgctcctcaccattccgtccttcgtgttccggcggatacataaggacccctactcagatagcattctatgtaatattgactatagtaagggtccgttcttcatagagaaggctatagccatcctgcggctgatggtgggtttcgtgttgcctctgctcactcttaacatctgctacaccttcctcctgatccggacctggagtcgcaaggccacgcgctccaccaagacgctcaaagtggtgatggcggtggtcacakgtttctttgtcttctggctaccctaccaggtaacaggggtgatattagcttggctgccccggtcctcatccacttttcagtcagtggagaggctgaactccttgtgcgtttccctggcctacatcaactgctgtgttaacccyatcrtctacgtcatggctggccagggtttccatgggagactccgaaggtcactccccagcatcatacgaaacgtgctctctgaggactccttgggcagggacagcaagagtttcactcggtccacgatggatacctccacccagaagagtcaggcagtgtagaggagatgccacaactgcctagctgctccttttccagtcctcctccccttcctccttcctcctctcacccctcctcccttcctcccatctctttgcatgtttaattttatgtgattctctttaaattgccctgactagccttgagcccaggatgctcacggatgctgagattataggtaaaaattcctttggagagaaacatyacattaagatattactgggctttttttctgaggcagccttggcctcgttgcccatmtgcagtgtctaggcagatacacctagtgatgacgtctaggggtcaggtaacagagaacccaggtctcgagggaacccggggctcacggatacactacgtgagtaagctatagccctagactccaggcaacaaataagcacccaccctttatttcttttctatgtctgatttttttgtttatttgagacaaagtccatgtaggctagtctagccatggactcctcctgtgatcatcctccagaggtcgagactgtagacctgtgctaccatgcccggacctatcctttatttctgcaattttgtcttttcaaaaatggtattcgacagaacccaacatatccaagttttgtaaaaacaactgtgcacggcttacacgataaaaaatttttgtttttttaaaaarrhaaaaaaaaaaaaaaaa

SEQ ID NO: 3487 - DNA, 2682 bp, Rattus norvegicus
cgcggagagttccaggctgggaccggactctggacagcgcacgctcgatggctgcgcacgcctggccgacggccgccttgctgctgctgctggtggactggctgctgctgcggyccgtgctcccgggaatcttctccctgttggttcccgaggtgccrctgctccgggtctgggccgtgggcytgagtcgctgggctatcctgggactaggggtccgcggggtcctcggggtcaccgcgggagcccgtggctggctggctgctttgcagccrctggtggcggcgctgggtttggccctgcctggacttgcctcgttccgaaagctgkccgcctggggagcactccgggagggtgacaacgctggactgctccactggaacagtcgcttrgatgccttcgttctcagttatgtggccgcattgcccgcagctgccctgtggcacaagttggggrgcttctgggcgcccagyggccacaagggcgctggagacatgctgtgtcggatgctaggcttcctggactccaagaaggggcgtctccacctrgttctggttctcttgatcctctcctgccttggggaaatggccattcccttcttcacaggccgyatcactgactggatccttcaggataagacagcccccagcttcgcccgcaacatgtggctcatgtgtattcttaccrtagccagtwcagygctggagtttgcaggagatggaatctacaacatcaccatgggccacatgcacagccgcgtgcatggagaggtgtttcgggccgtccttcaccaggagacaggatttttcctgaagaacccaacaggttccatcacatctcgggtgactgaggacacctccaacgtgtgcgagtccattagtgacaagctgaacctgttcctgtggtacctggggcgaggcctgtgtctcctggcgttcatgatttgggggtcattctacctcactgtggtcaccctgctcagcctgcctctgcttttccttctgcccaggaggctggggaaagtgtaccagtcactggcagtgaaggtgcaggagtctctagcaaagtccacgcaggtggccctcgaggccctgtcggcgatgcctaccgtacggagctttgccaacgargagggagaggcccagaagtttaggcagaagttggaagaaatgaagccgctaaacaagaaagaggccytggcttacgtcacygaagtctggaccatgagtgtctcgggaatgctgctgaaggtgggaattctgtacctcggtgggcagctggtggtcagaggggctgtcagcagyggcaacctcgtctcctttgttctctaccagcttcagttcaccagggccgtggaggtcctgctctccatctatccctccatgcagaagtccgtgggcgcytcggagaaaatattcgaatacctggaccggactccctgctctccgctcagtggctcactggcacctttaaacatgaaaggcctcgtcaagttccaagatgtctcctttgcctacccaaaccatcccaacgtccaggtgcttcaggggctgacttttacgctgtatcccgggaaggtgacykccttggtgggacccaatgggtcagggaagagcacsgtggccgccctgctgcagaacctgtaccagcccaccrggggcaaggtgctcctggatggcgagcycctggtccagtatgatcaycactacctgcacacgcaggtggccgcagtgggacaagagccrctgctatttggaagaagttttcgggaaaatattgcctatggcctgackcggactccaaccatggaggaaatcacagctgtggccatggagtcyggagcccacgatttcatctctggattccctcagggctatgacacagaggtaggtgaractgggaaccagctgtcaggaggtcagcgacaggcggtggccttggcycgagccttgatccggaagccacgcctgcttatcttggacgatgccaccagtgccctggatgctggcaaccarctacgggtccagcggctcctgtatgagagcccsgagtgggcctctcggacggttcttctgatcacccagcagctcagcctgrcagagcgggcccaccacrwsstcttcctcaaagaaggctctgtctgcgagcagggcacccacctgcagctcatggagaraggagggtgttaccggtccatggtggaggctcttgcggytccttcagactgacsggcttctggactgcamgctgcgcgagtccctccccctgctgtcctctgctctgtgtggcrgagaacstgggagcaaagattttaccacatccacggagatrgwygaggagcgatggtgtttgttacatgagraaaatgtaacctctaggagatgcccggaatttmccaccaatgttttcccsccccsccccctrttagacgggggatgggggtaggtaccccaggctaacactgagctgctgagtctcctgtctcccgtggagtttgcatcacggcatgcrcccacaaacctggcttatgtggcgttgggacagartgagaagaaacgcycaaaatgtacagagaaggggcaaatagcttgcaattamccaaaggcataggctggcctatgggtrttcygcgggttctygatatttataataaaactggtgttttgtamaaaaaaaaaaaaaaaa

SEQ ID NO: 3488 - DNA, 2807 bp, Rattus norvegicus
ctggcgcctttaaggaggcgaagccagcggagggaggagctggcccaggtgtgtgcaggagagcgcctcgccggcgggactcggggctggagtccagggcggcagagcggagcagttgctcgccacccggcccggcccactcgcccgcctcgccactggcttcgcctctctgccctccgcttgggctgtatcttcaccgcagaggtgcggcatgggcggccaccgcaggggtgtacgtttcccccactgactgctcctgcacgagaccccagcccgcagcctcctctacgcgcaccgcctcgacagtcatcctccgacccgcaggaactcccaaacagttgccaccacccgagcctccgagccacctctggaccccctgatctcttggcaccagaacttcaaggaccctctggcccgtgccccgcaggagccgtcggtggacgccgcgctccagaccccgaagtcccctgctctcagtgctctccgtgccagccgcgaagcccggcagagtcggctctcggggttcgggatctggggccggcgcggccgtccgcagctgcagacgacggggggtacgggggaccgcggcgccatgacagccgagagcgcgccgccgcccccgccgcagcccgaggcgctggcggccgtgaaggaagagcgcggtgaggcggcggcgggcgcgggggtcccggcggaggtggcgggtcgcggcgccggaggacggcgacgcaagcgccccctgcagcgggggaagccgccgtacagctacatcgcactcatcgcgatggctatcgcgcacgcgcccgagcgccgcctgactctgggcggcatctacaagttcatcaccgagcgcttcccgttctaccgcgacaaccccaagaagtggcagaacagcatccgccacaacctcaccctcaacgactgcttcctcaagatcccgcgcgaggcgggccgcccgggcaaaggcaactactgggcgctcgaccccaacgccgaggacatgttcgagagcggcagcttcctgcgccggcgcaagcgcttcaagcgctcggacctgtccacctacccggcgtacatgcatgatgcagccgctgctgccgccgccgccgccgccgccatcttcccgggtgccgtgcctgccgcgaggccggcctacccgggagccgtctatgcgggctacgcgccgccgctcgccgcacccccgccggtctactaccccgcagcgtcgcccgggccctgccgggtcttcggcttggttcccgagcggccgctcagcccggatctgggccccgcaccatcagcagccggaggttcgtgcgccttcgcggctgcggcgggcgcgccgggcacagggagcttccagcccgcggtatgcacgggcgcgcggccggtcaacccggctgcctatgccgctgcctacgcgggccccgacggcgcgtacccgcaaggggcgagcagcgcgctcttcgccgctgctgcgggccgtctggccggacccacttcgcccaccgcgggaggaggcagcggcggcgtggaggccacggtggacttctacgggcgcacgtctcctggccagttcggagcggcgctggggccctgctataatcccagtgggcaactcggagccggtggtggaggtgcctatcactcccgccacgccaccgcctacccgggcgcggtggatcggttcgtgtctgccatgtgagccgggggtaggcacaaaacctcactgactccggcacgttctgaaagatgtaaatcccccggaaccggtggacaggactaaaagagtatcggactgagactcacgagtgtgcgagggctccgagggtcgcggaggctcggtgtcttgccctgttcacagaccggatttgctttggacgtgggcggacgtagggaggccatagccacgtttgggctgacacaggggaccctcgatgatgcgaagctccaaagagcatgcctttccgccattctactagggagggccctagctgtaaagggtggagtgttgcgttgttgcccgcaccagaatctagaatcctgaactgtggtggagtcgtttggcttcagcgtgtgctatgctgggctaaactcgggctttttacacgttcgcctcttaacttttgactaccgtaccccaaataaaaggctcggacagtgcctttataattaaagtgagagcaagtttgcaaaaagagttgctttttaaaaattagttcsgwksagctgggttagttttccctgcctctgagagtcacaagcctgggtcgcaatcgtaactgaattctcggtgtgatcyasccctaacacctgaattttgagtctgtctgttatacagaactgtgcgattccgccgtctcatttttaaaccccctcccattatcttgggtgccaaccttccatatttggcagcattggtcaaccacctagggcttcccagtagccatgacagaaggccatccaggaatgggaacagaacattggcaagtatttaacccaaagtyyyaggaytggctccaagtagagattgtgcttaattattgattttttttttttgttgttgttgttttgagagagagagagagattggtcakkccgcagcagtgactacccagtcaaaaatctgattttctgataagaatgtaggtggggagactttccttaactggggcttgtctrttctgtttcctgtgcgctccttcttcggcgccctcctcgaacaaaaaggaaaagtaataaattagatggttamcaaararawmwwwwwwwaattttttatttcattctgtatcttgtttgttttg

SEQ ID NO: 3489 - DNA, 1022 bp, Rattus norvegicus
tccgacactagggtcgtgctacagaaagtcattcagatcatcggtttcattaacactatgttctccaagttgaaactgacggttttaataaattccgttgaaatctggtcgaaggaaaacagaattgatttcccagaggcacctgaaaacttactggtccagtttttacattggaaacataagtatagaccgcagcacatttcatacttactggcatttgtggagcatcctgcttccacgggagccctctatccggggaatctgtgcaaaccgatctatggtgctgccattgccctgtaccctaaaggtttgtcactagagtcctacagcgtcatcgtcctacaactactgagcatcggtataggcttaacctatgacaacgctgacagctgccactgtacaggagacgtctgcctgatgacgcccaaggcaatatattctgggggtgtgaaggacttcagtacttgtagcttggatgacttcaaatacctgtcaacacaagaccttgaatgtctccaggacttgcctatggaaagacaaaagaagaagccttccaggccaaggagaatctgtggcaacgggatattggaaatgaacgagcagtgtgactgtggcactttgaagaattgtacacacaaaaaatgctgtgaccccatgtcgtgccgactgaagtccaaagccgtgtgtggctccggggagtgctgtggtcaggactgcaaggtaaaaccggttaatgtactctgtagaaagtcgaagaatgaatgtgactttgaggagtactgtaacggaaatgacgcttactgtgtccctgacacgttcgcacgcaacgggcagtactgcgactcagggcaagccttctgctacagtggtctttgtatgacgagtaataatcaatgcatgaacttgctcgggaaatatgtgagaggagcttccttcgcatgctatgaagagttcaattccagaaacgatagatttggcaactgtattagaaagttttgtagtttcgaaaattctctctgtgg

SEQ ID NO: 3490 - DNA, 1478 bp, Rattus norvegicus
atttacaggaaacatctgaaatacatcggagctacgtcaccgggtgaattatgcaatgaaagctatgtcgcgggggttggtacgtatccagaagacataggtttggagggactctccatggttatcactcaactgattggccttcacataggattaacatacgacgatgttgataattgttcctgccccagagctccatgcataatgcaaccggaagcattgagttccagtgggatgaagacttttagcaactgcagcgtgcacgactacacgcattatgcttcgaagcttgacatgcaatgtcttggtgacctgtcaaatgtattacaaccaaagcaatccgtgtgcggcaatggaatcgtggaaggcagtgaggaatgtgactgtggtaacgagacggaatgtcaatttaaagagtgctgcaaccacgaaacatgcaaactgaaaggctcagcacagtgtggatctggaacgtgctgcacacccaagtgtgagctgtcagcagcaggcactccctgtaggaaggctgttgacccagagtgtgatttcacagaatattgcgatggatcctctagccactgtgtccctgacacctttgcgttggatggtcatttgtgcaggttgggatcggcatattgctacaatggacgatgccaagctcttaacgaccagtgcgtcagtttgtttggaaaaggttctcaaggcgcttcctacgcctgttttgaaaaagttaattcgcaacgtgaaaatctggcaaactgtgactctaaaaattcatactcgttaccttgtggacagaaggatgttctgtgtggaaaattagcttgttttcggccaaacaagaattataaaagctctactcaatctgtcctgtattcgtatgtccatggcagcgtgtgtctctccatacctcctgggttatctatgagatcagacggcaaagataacgcatacgtggctgatggcactgtgtgtggaccacaaatgtactgtataaatggaagctgcaaagaagttaatttcacgggaaacgactgcaacgccgctaagaagtgcaaagggaatgggatatgtaataactttggtcattgccaatgcttccctgactacaggcctccagattgtaacttacagattggatcaccagggggcagcattgacgatggaaaccttctccgaactgattcggctttggctacaaagcgtctgagtcaacacgcggacagctgggtgatcctgggcttcttcatcttcctgcctttcatcatgactctcttccttgggatcataaagagaaacgaaaggaaaattgtgccccagaaagaacaagaaagatgagggcaactcactgccccgtaaatctgctgaagaggttagcagtggatggaccaaaggaggaagtgcgtgctctaatctctctgttaccctggaaacgctttaggtctcagacttttggaaaataaaactgacaaacgcac

SEQ ID NO: 3491 - DNA, 608 bp, Rattus norvegicus
atgagtgaatttcctactcttctggacatgatgagcaattgttcccatcataatctacatgagaagatcattggttgggacgcttgcttgagtcaaccgcgggttgcatataagaatttcaaatatgcagttcctcgttgtggaaataaggtagtggatgacaatgagcaatgtgactgtggtactttaaaagactgtctctctaatcactgttgtggaaccaattgtcagttaattgggagcagcacttgtgctgaaggactttgttgtcaatcttgtaggtttgcacccactggaaaggtatgcaggcacacgaatggcatttgtgatcttccagaatactgtagtggagtctcagagcattgcccacaaaatttctacatcatggatggaaccccttgttctccactagcagtctgcatgtcaggaaactgtagcgaccgccaattgcagtgtcaagctctttttggataccatgtaaaggatgcttcaccagcatgctataaagaattaaataccaaaggtgaccgatttggaaactgtggggttagagaggtacgtggaggaagtaaacctctcgcatgtcaagaggaggatattttctgtgg

SEQ ID NO: 3492 - DNA, 1457 bp, Rattus norvegicus
tatttaggtggatttgtactgctctcctagcaagagaaggtgagacatccgttccctctacaagaaactctggctcttgcaggatggattttcaagggtcgattccaacctatatctatgacatcgattatagtatgtcagcaccctgccaaaaagtcaatgtgaaacaaattgcagcccagctcctgcccccactctactctctggtattcatctttggttttgtgggtaacatgatggtcttcctcatcctgataagctgcaaaaagctgaagagcatgactgatatctacctgttcaacctggccatctctgacctgctcttcctgctcacactcccattctgggctcactatgctgcaaatgagtgggtctttgggaatataatgtgcaaattattcacagggatctatcacattggttatttcggtggaatcttcttcattatcctcctgacaattgataggtacttggctattgtccatgctgtgtttgctataaaagccagaacagtcaactttggggtaataacaagtgtagtcacttgggtggtggctgtgtttgtctctctcccagaaataatctttatgagatctcaaaaagaaggttctcattatacatgcagtcctcattttctacatattcaatatcgtttctggaagcattttcaaacattaaagatggtcatcttgagcctgatcctacccctacttgtcatggtcatctgctactcaggaatcctcaacaccctgtttcgctgtaggaatgagaagaagaggcacagggctgtaaggctcatctttgccatcatgattgtctactttctcttctggactccctacaacattgtcctcctcctgaccaccttccaggaatactttggactgaataattgcagtagttctaatagactagaccaggcaatgcaggtgacagagactcttgggatgacacactgctgcctcaaccctgtcatctatgcctttgttggggagaagttccggaattatctctctgtgttcttccgaaaacacattgtcaaacgcttctgcaaacactgttcaattttccagcaagtcaatcctgatcgtgtaagctcagtctatacccggtccacaggagaacaggaagtttctactggtttatgaactggttgagttttgtgtatcacttagtttttctatgtagcttgagggtagagatggttcttttagaaaagaaattaatatagagggcctaaggtacgtgcattgttttaatatttatttgagatagattgggtctttgaaagctgagtagttttataaacgtgaatgagaatgtattgatgagacagtaatttctggcttcattcctatttaactacaattattcccaaactcttctttagccacaaaagttcactattaaaaaatactgagcattgggaaaaaaaaaaaaaaaaaaaaaaaaaaaaa

SEQ ID NO: 3493 - DNA, 2412 bp, Rattus norvegicus
gcggcgtggagccaggcagggctcaggctggtggagcgaccggggctggaggctgggagtgaggcgctcacggcctccccgcgccattatccgcgctcgctacgggcgaggccggcgccaggatggcagagatggggagcaagggggtgacggcggggaagatcgcaagcaatgttcagaagaagctgactcgagctcaggagaaggtcctgcagaaactggggaaggcggatgaaacgaaggatgagcagttcgaacagtgcgtccagaatttcaataagcagctgacagagggcacccggctgcagaaggatcttcggacctacctggcttctgttaaagccatgcacgaagcctccaagaagctgagtgagtgtctccaggaggtgtatgagcctgagtsrcswggcwkkgatgaagcgaacaagatagcagagaacaatgacctgctatggatggactatcaccagaagctggtggaccaggctctgctgaccatggatacctacctgggccagttccctgatatcaagtcacgcattgccaagcgggggcggaagctggtggactacgacagcgcccggcaccactatgagtctcttcaaaccgccaaaaagaaggatgaagccaaaattgccaagcctgtctcgctgcttgagaaagccgccccccagtggtgccaaggcaaactacaggctcatcttgtagctcaaactaacctgctccgaaatcaggcagaagaggagctcatcaaagcccagaaggtgttcgaggagatgaatgtggacctgcaggaggagctgccatccctgtggaacagccgtgtgggtttctatgtcaacacgttccagagcatcgcgggtctggaggaaaacttccataaagagatgagtaagctcaatcagaacctcaatgatgtcctggtcagcctagagaagcaacacgggagcaacaccttcacagtcaaggcccagcccagtgacagcgcccctgaaaaagggaacaagagcccttcacctcctccagatggttcccctgctgctacccctgagatcagagtgaaccatgagccagagccggccagtggggcatcgcctggggctaccatccccaagtccccatctcagctccggaaaggcccaccggtccctccgcctcccaaacacaccccatccaaggagatgaagcaggagcagattctcagcctttttgatgacgcatttgtccctgagatcagcgtgaccaccccctcccagtttgaggcccctgggcctttctcagagcaggccagtctactagacctggacttcgagccccttccaccagtggcaagccctgtgaaggcacccacaccctctggtcagtcaatcccatgggacctctgggagcccacagagagtcaagctggcgtcctgccttccggggagcccagttctgctgagggcagctttgctgtggcctggcccagccagacagccgagccagggcctgcccaaccagcagaggcctccgaggtggtgggtggaacccaggagccaggggagacagcagccagtgaagcgacctccagctctctcccggctgtggtggtggagaccttctcagcaactgtgaatggcgccgtggagggcagcactacgactggacgcttggatctgcccccgggattcatgtycaaggtgcaagcccagcatgattacacggccactgacactgacgagctgcaactcaaagctggcgatgtggtactggtgatccccttccagaacccagaggagcaggatgaaggctggctcatgggtgtgaakgagagcgactggaatcagcmcaaggaactggagrmaykmsgcggcgtcttcccggagaatttcacagagcgggtgcagtracggragagccthtgcagccttccggtgtgtgaaraacytttycccaaaaratgtgtgcttktytwttytttgwttttcttcctcttcwwttckgywykhkgtyttgttktkaaactcttgaaaagtgtcgggaaattggggagcggaaacctaagccaagaggtgtacccccaaagatgaggtggttttccaaaaagccgtccgacccagttcagtggacttytccagtattcccgaagytgctgtgtccccctcctagttgagttcccgatgcccgcatgttcagggcgggccgggggtgcagagccaccgccgcamttgcctgacgcttggccgsgccaccggacagggcttgggtcctyttytggcagytgccytgggcagggcctgcaytgtggcccagcytggtccgctytgcagaccaaccgtgtgctgtttgaaaataagccctagtgttcaaaatgcagsgaaacaaacaaaawtgaaaaaccggacaaammmmmmrraaaaaaaaaaaaaaaaa

SEQ ID NO: 3494 - DNA, 1315 bp, Rattus norvegicus
tagtaaataacaaaacggaagaactgtaacatgttggtatctctctgaaaacttgcaaaacctgagaagctagcctgtttaaaacaggaagctctgttgtttactacctgactggtgtatgtgatcaaatgttatctctgtttcattagcagtgagacctaagttactactggactcataaaggacttagcaaaaatcatcagagacaagtaaaatggcatccaacgaagaggaactcaagactgttgttgaaacctttgagaccacaccctatgaatatgagtgggcaccaccctgtgaaaaagtcagcatcagagagctggggtcatggctcctgcctccactgtattccctggtgttcatcgtcggcctcctgggcaacatgatggttgtgttgatcctcataaagtacaggaagctgcaaattatgactaatatctacctactcaacttggcaatttctgacctgctctttctcttcactgtcccattctggattcactatgttctgtggaatgagtggggttttggccactgcatgtgtaaaatgctctctgggctttattacctggccttgtacagcgagatctttttcatcatcctgctgacaatcgacaggtacctggctatcgttcatgctgtgttggcccttcgagcacgaactgtgacttttgctactatcaccagcatcatcacttggggtyttgcagtattggcagcattgcctgaatttatcttccatgagtcccaagacaattttggagatctttcctgcagtcctcgctatccagagggcgaagaagacagctggaagcgtttccatgctctaagaatgaacatttttggtttagctcttcctctcctcattatggttatctgctactcaggaatcattaaaactctgcttagatgccccaataaaaaaaaacacaaggccatccagcttatttttgttgtcatgatagtcttttttattttttggactccatacaacctggttcttcttctgtctgctttccacagcacatttttggagaccagctgtcagcagagcatacacctggacctggccatgcaagtgactgaggtgattacccacacccactgctgtatcaatccaataatctatgcctttgttggtgagaggttccggaaacaccttcggctctttttccacagaaatgtggcaatctacctgagaaaatatatttcattccttcctggcgagaaactggaaagaacaagctctgtctccccatcaactggggagcaagaaatctctgtggtgttttagttgggcagagaaaattgtcac

SEQ ID NO: 3495 - DNA, 2040 bp, Rattus norvegicus
ggtcttccgccgtcggaggaactcttagttaccgaccggtgcggagttcatcgtgtcagtacgcttcgtaggacacacgcaccgaaacacgcgaggactcgggaaaccagacgcacaggcagctcaggcccgcctctgccctcccccaaggccgtccctatcccgcccagtgtttgtttgcgcggtgccagttggcccggcggtctccggcgcagagaggctgggcttgtgtgccctgcagctccggaggtcgccttgggctgagaacgcaggccagtcgagactatgctgggcaaggattatatgctggccatcattctggtcaactgcgatgatgacttgtggggggaccaaaatctggagggggaaacaggcctaccccctggctggagaaagatccgtgatgctgcaggaacttattattggcatgtacccagcggtagcactcagtggcagcgcccaacctgggaactagcagaggacccaggaacgggaaaagaggggatttgggaactacgacctcccaaggggagatctttctccagcctggacagctcattgaaccgaagtaactctctaacatggtataatgaagattcctatgtccggagcctggagccaggagctaagtgctttgcagtccgctctctgggctgggtagaggtccctgaggaggacctggcaccagggaagagcagtattgctgtcaataactgtatccagcagctagcccaggcccgaaaccggagccagcctcatgatggtgcctggggtgagggccagaacatgctgatggtcctgaaaaaagatgccatgagcttgctgaatcccctggaccacagtctgatccattgtcagcctctggttcacatccgtgtatggggtgtgggcagctccaagggccgtgacagggactttgcttttgttgcgggtgacaaagacagctgtatgcttaaatgtcatgtgtttcgctgtgatgtgcccgcaaaagccatagcaagtcgtctacaggggctctgtgcacagatcttgtcagagagggtaggactcagtggagaagctgcttgttgttccccagatcctatttcccctgaagacttcccaaggcaagtggaattgctggatgcagtgagccaggctgctcagaagtatgaggcactgtacatggggatcctaccagtcaccaaagccatgggtatggatgtgctgaatgaggccattggtaccctcactggccgtggggaccggaaaacctgggtccccgctatgctcagtgtgtctgactctctgatgactgcacatcctattcaggcagaggctggtgcagaggaagagccactgtggcagtgtccygtycgccttgtaacctttattggtgttggccatgatccrcatacctttggcctcatcgctgatcttggttgtcagagcttccagtgtgcagctttctggtgccaacctcatgstgggggactctctgaagctgtgcaagctgcctgcatggttcagtaccagaagtgtctagtggcctcagcagctcggggtaaggcctggggtgctcaggctcgcgctcgcctgcggctcaagcggaccagctccatggactccccaggcggcccccttcctccccctctactcaaaggaggggttgggggtgctggagcagctcctcgaaagcggggtgtcttctcatttcttgatgccttcaggctaaaacctctcttctccatatgtcctaaattgatcttagagggctggggaaagaggctctatactcttccagtccctagggttctgtagcctctcaccttyctgccatccctgatcccttgcctactctgtatttatgaccaagttcgttgtttatatggatgactgagaggccctgcactctaacttaggcctgtagcaccactttcctttggtccttttgttccttgcccctgtccagccctgacaattggctctacctcatcaactttatagcagaatcagtgaaaataaaaatccctcagtaawmwmaaaaaaaaaaaaaaaaaa

SEQ ID NO: 3496 - DNA, 1982 bp, Rattus norvegicus
ctggcacatctcccagaatgagtaccacaggagctaaggctgtgaaaatagagtctgagaagtcacaatcaagtgagccacctgtgattcatgagaaaaagccaaaaggaaagccaaaggaagggtcagagacaaaatttcaagatgctccttctgctgatggagagagtgtggctggaggtgtgactgtggccactgcctcagacaaggtggttgttaagtcaggcgtgaatgctgctttggatgacctgatagacaccttaggtgaatgtgaagatactarcaaagatgatccaccatatactggaccagtagttctggacccaatggattctacctaccttgaggcactgggtataaaagaagggactattcctccagagtataggaaacttctggagaaaaatgaagctatcacaggacctcttccagattctcctaaacctatgggaatcgaccatgctatagatgccttgtcatctgatttcacctgtagctctccaactggaaagcaaactgagaaagagaagtctactggggaaagttcgaaagctcagtctgcaggagtgaccagaagtgctgttcctccccaggagragaaaaggaaagtagaagaggaggtcatgaatgatcaagccctgcaggctctgtcagattcactgggcacccggcagccagaccctcagagccatcttaggcaagccaaacaagtcaaagaggcaaaagcaaaagaagaaaggcaggagaaatgtggtgaagatgaggacacagtacctgctgagtacaggttaaaaccagccaaggataaagatggaaaaccactattgccagaacctgaagaaacatctaagtgcctgagtgagtcagagctgattggggagctttcagcagattttgtccaacctacatatcaagaaaaaccatctatgccagctgcaaaaataaagaagggcgtagtgccagatgatgctgtagaaaccttggctagaagcctggggacaaggaaagaagatccagaagatgaaaaatctctggtggataaagtcaaggagaaagctaaagaagaagatcatgaaaaacttggtgaaaaagaagaarcaattcctcctgattatcgactagaaatagtcaaggataaggatggaaaaccgctcctgccaaaagaagccgaggaacaacttccacccttaagcgatgacttccttcttgrtgcattgtctcaggacttctccagtcctgcaaacatattgtctcttggttttgaagatgccaaactttctgctgctgtttctgaaacagtttcccaggtgcctgctccaagcaaccacacagcagccccaccgcctggcactgagaggagagacaaagaactcgatgatgccttggatgaactttctgacagtcttggacaaagacagcctgatccagatgagrwcaaaccmctagatgataaagtaaaggaaaaaatcaaagcagagcatagcgagaaactgggagaaagagacgacaccatcccccctgaatataggcatytcctggataatgatgggaaggmcaaaccagagaagccactgacaaagaacacasagaagcctggtcaggaccaggaccccattgatgccctctcagaagacttggatagctgccccccaactacagagacttcacagawtwcamcaaaggagaagggtaagaagacttcaagttccaaagcatccaagaatgaagagaaaacaaaggattcctccaagaagacagaggaagtgcccaagccaaaggtggatgaagatgcaacataaagtttatgcattttggkatctgaataaaaattcttcagctggtggatggtgacttttgaagatcaaaggctttgatgacaatttttctgggtggcttytagacagttgkatttgttatgtcttttgacaccttaaacattgagttgawattcttttccagaacaaaaaaraawwwrwctggtt

SEQ ID NO: 3497 - DNA, 5469 bp, Rattus norvegicus
  misc_feature (324)..(324): n is a, c, g, or t
ccgcggggcgggcgggtgcagcggtttgggctcggcctccgtccctggcccgggtcgcagcagcgcgagcctcccgagcggggatgcgcggcggcggcggtggcggccagcaggtagccgagcgccgccgggtccagagctggcgcgcggccgggcgcggcgacagtagcgggtctcgttctcctcacgatgggcagggacgcgccggcctgccctgaggagcccgagcgcccgtgaaggcggagtcgccggccgccctccgctgccatggccggccccggcgcgtggaagcgcctcaaatccctgctgaggaaagacgacgcnccgctgttcttaaatgacaccagcgccttcgacttcttggacgaggtgagcgacgaggggctttcgcgctttaataaacttcgagtcgtggtggccgacgatgactcggaagccccggaaaggcctgtgaacggggcgcacccggccctccaggccgacgatgactccttattggaccaggaattacctttgaccaacagtcagttgagtttgaagatggacccctgtgacaactgcagcaaacggcgcgagttgctgaagcagaggaaggtgaagaccaggctgaccatcgctgccgtcctctacttgcttttcatgatcggagagcttgtaggtggatacatggcaaatagcttagcaataatgacagatgcacttcatatgctaactgaccttagtgccatcatactcactcttcttgctttgtggctgtcttcaaagtcaccaaccagaagattcacctttggatttcatcgcctagaggttctgtcggccatgatcagtgtcatgctggtgtatgtacttatgggattcctcttatacgaggctatgcagagaaccatccatatgaactatgaaatcaatggcgatgtcatgctcatcactgcagcwskwggagttgcagttaatgtgataatggggtttctrttgaaccagtccggtcaccaccattctcacgctcattcccactccctaccttcaaattctccgagcatggtatctagtggacacagccatgggcaggacagcttggccgtgagagctgcatttgtacacgccctgggggatttggtacaaagtgttggtgtgcttatagctgcatacatcatasgattcaagccagaatacaagattgctgaccccatctgtacgtatatattttcattacttgtggcattcacaacgctccgcattatatgggacacagtagtgataatactggaaggtgtaccgagccatttgaatgtagactatatcaaagagtcgttgatgaagatagaagatgtatattctgtggaagatttgaatatctggtctctcacttctggaaaagccactgccatagtgcacatgcagctaattcccggaagttcatcaaaatgggaggaagtgcagtcgaaagctaagcacctcttgctgaacacattcggcatgtacaagtgcactgttcagctccagagctacagacaggaagccaccagaacttgtgcaaattgtcaaagttccagtacctgattctatgtccttggggtctacagccttatttatcccgcagtcacagacttgagagcaataaacgcaaacctaatggarwmmmwramarmwrwrtccatgtcaagccccagtctccccaaaacagactctgttctgactgatatttgcatgattttcaggcaaagaagttccaaagtactgtttacagaatgagctgtaactctgaagatacctcatagaagacaatccaagaccatacttcattaatttgacagagtacgcaacatgtacaggaagactcagaattcagtatttgcatctaaaaactacttttttcgcgccttttatatgaagtcagagctagcaaactcagttgaactatttcgagatttttgtctatgtgtaatcttggcatccagtttctggaattgtgttctctttttataaaaattagccctcaacagatttcagaaaatatttatatccagaaaatggaataagcatgtattcctaagtgtttcagaactgttttatttcacaaataacttataagcagattttccagatagtactggattttgaatctcaacacttttgattatttgtaatcttgtctgaaatattcacttatgccgtcactgtccttcagttatgtaggaaaactttaatataattacgaatggcagaaattagatttaacctcaaattcccttaccatatgatgatcttaaacagagaagccaagtggtaggctgtggagttttggattctgtcttcctgaacatcacttctgtgctttatgtagaattggttttagaacagtaagagacaacagagtttcagcagttgtccagtgtgctccttagaactccgacgtttgttagtaagtttgcttagcaccttgttctcaggtgtactcagtatcatttgtggacatcttccccagtacctacaaatggccaagacggaggttagtaacacctaccactggagtaccttcgttactccagagagaatttatgttatgatataggctaggggttctccacagattgcagaaaactcccaaggtacaatcttgaagttttacaataatgccatagcagaaagatacaaaggcgttgggtggagaaagctctttgagaaaacacaaggtaaaaggttctgttttgtcttgtttagttttgtttgaccatgtatgtgcacagaagaactgaaataaggatggacactaaaactgtctgggaagcagcgtaaatatttccaagctcaagggaaggcagctgactgcagttgtgttaaagagacagtcatgaatattcatgcttcattcccagcagttgctttgataggagctcctttcagcttagacactgtggatggctcttgtctcctcagaatcagagtggagtaacactgtcccaaacaggttgtgaagttctagaaatccaagagacgtgtaaatgaagagtgagaagttgagacattctctgtgtgtaaaactaaaataagaaatagggtcaaaaaacagctggtgttactccataaaactcaatgggtatgtgttgaattcaaagtttactttgaaaaaaacaaaaagtttactttaacttttattgtaagtccatttaaaattataaatatttgaacttcaaattttcttagaatataaataaaacaatgattaacctgagtagatggcaggcatttaagtggctgcctgggcatttgtggccttttgatatctaggggaaaaggaaagtgtgcattttatacttaacattttcccacattgggtgagctcatttcttgtaaacaaccctttaccatagtgtgggtatatccggatattcatgttgacttagtccttaagaccagttctggaagtcttaactgtcatattcacgtaaastgkgmygcctgaggtctctgcacttcaccttgcagcaggacctagactctgtgcctcactgggtccacaagatggaaagctggtagaccttatgagttaaattgtcaacccatagaggaaagacattaagkcagcagttacatcagggactacacagctgtgaggtttgacctgtctttcccccattgagacacagtgcaccgtgcacagcctctcagttaactatgaaaactctttgctctgcaaaaagcaggatctgaattgatttgggagatatagtgctaatcttgtactgggaaacaccatggcatttctccacggcagtatgttctaaggagtatttcagataattagttactkkagacattaacctgtatttcacaccttkggcccatgaagtcttttgttttwrgaagactgtctgactaacagtcttgctgtctkragaagaccaagaatgmmgttgagtwagcatactcaatargcagaactggagctactgtgcttyttactggcagctatgtwaacttccacagywaaagktcttawtgtgagcatagattttyacattcacagsttycatccsmattgttwagmagatcactarawgkcttggkttamcaywtttcttgkcagkttggggwaraggttttcawtttccyctatgrtatatttccygwkatawgactctcarkgktckgtcttaagcccaaggtcacccacttgtccagtatttgtcttcaggagatccttcccacagtggacacagtgaagatcagagagatacacaagcttctctccatttttcagagactttctgccaatacttagaaatacgtttccaggtgagaaaggttttaaaacctcagatcatcccctgaccaggatttctgcatgggaaaatggtagagaatatgagacagaaatagactgagcagctactgtgaacctttgaggttctcacagtgccagtccgcaagcacacttagagattttgatcctgaagcctacttcagctccatctggttttctgtagttataaccattggttcatcatcatatgatgctctcacagactctgagctcgtttgctgttgactaccttgtaggtagtaaactgaaaggtctagaatgtgccactctatatacctataataaccattcagttcagttcatctttggaccctcttagttacaaatgatcagtgacatctcactagctactgtcctgagggagggaggcaaagtctgatctctagataattgacttaacatctctgtagccagaacaccatttgcaaatcataattccaactccaggtctgtcaaatgaatcctatggaccagggctgcagatttgattctacaggtagatatattgtttgtgatgttagtgggagcatgcaaactagagagaaaaatttgtgggaattcctcagtattgtgtgtctccatttaggcaacacatcagtagttcttgktwmcagaatgtttgttggagatcaacagtcwttttytkwtttttkttaagattggkaagtgtttatggagascttgccagctaaatccatggcagtgtcatttaaatagtgcrattaagaataccccgaamtaratggaacccaaagttgaaacatrccassatgccccttttcwacccaggagaaasctwabakttggraactgtykgcctctctaaakaaawatgtgattaayaagccatatcacagtttaaggaattgtatatcwttcctgtatagcccctccaaaarccaagtatttttgcaaatagattgattttagaaagatttyraagyyggggtttatctgkgtaatgaagaccagattctttgyataygtactgtatttgtaattttcaaatgaaatttccyatatgattattaaataaagtgttgttttgcmwwrwrrwwwawwaaaaamwwamaawrtacagccammwaaaaaaaaaaaaaaaaaacctttgggccgctccaacatcagcctcgtgccgaattctt

SEQ ID NO: 3498 - DNA, 1424 bp, Rattus norvegicus
cggctcccgccgggcgccccgctccctgccctccgggggccccgcgccacccccgccgggccatgcgagcgcgggccccgccgcgatgagctcgcacatcgccaagagcgagtccaagacgtcgctgctcaaggcggcggcggcgagcgggggcagccgggctccccgccacagctctgcgcgggaccccgggctgcgtggccgcaggctgcccggtccctgccccgactcgcctgcaacgtgcggggaccccagctcgcggaggcccctgtgccggccggtgccgcgggacgagggcgcgcgcgggagccggcgtgggctgccccaggcgcactgcaggccccgggagacgctaccgccggcccgcgggcgcgatggggaggaacgggggctggcgccggctctcagtctacggggctccctgcgatcgcggggtcgcggggacccggctcccgctggcacccccgaggcggacccgttcctccaccagctgcgccccatgctcagctccgccttcggtcaggatagatcgttacgaccagaggagatcgaagagctccgagaggccttccgggaatttgacaaggacaaagatggctacatcaactgccgggacctggggaactgcatgcgcaccatgggctacatgcccactgagatggaactcatcgagctgtcccagcagatcaacatgaacctgggtggccacgtggatttcgatgactttgtggaactgatgggccctaaactcctggcggagacagcagatatgatcggtgtaaaggaactgagagacgcctttcgggagtttgacaccaacggtgacggggagataagcacgagcgagctgcgagaggccatgaggaagctcctgggtcatcaggtgggacaccgggacatagaggaaattatccgagacgtggacctcaatggagatggacgagtggacttccsamgakktgtccggatgatgtctcgctgaggccgctgaggggctcctccaggtctgccaactcccacaggcggggagaagagctgagctcgcctcaccccgcagtagctgccgagagcccaggatgtactggcggatggggcctgcctgcaccccggggaggtgcccaccccggacccccacccctstgcactgtgaaagactcacaactcctgcaactggaaaagggggcgcccgccggcgaggaggccacagtgccaagccggtagaggacacgcaaggcgccaagtgccatctgcccarccgmtgctggctggktgggccagggagcccgccagcagaccccacacagcatgtmtgccccgagggcagagcctttcagcgccctcccgatgcccgtcccagctcgcctagccmtttgatytcagaaccawtaaaaaaaaacggagaatgamaaaaaaaaaaaaaaaaa

SEQ ID NO: 3499 - DNA, 284 bp, Rattus norvegicus
cctcccagaacccattcttcccttccccatgggctgttgaagataaacaagagggactgtacttctgtggaaaacaatttgcataatactaatttattgccgtcctggactctgtgagcgtgtccgcagagccgtagtaaatattgtgattttatttaaactcttcagaggaaaccggatgctgaagtgcagtcccagcacacttcctctttttttaggcaaacctcgactcgacgtattttaaattttcagtcattcactcacagtataaaagcactcctgac

SEQ ID NO: 3500 - DNA, 1418 bp, Rattus norvegicus
gcgcctccttgttcccagcgtcaccactgccgccatgcccggagggctgcttctcggggacgaagcccccaactttgaggccaataccaccatcggccacatccgcttccacgatttcctaggagattcayggggcattctcttttcccacccacgggactttaccccagtgtgcaccacagaacttggcagagctgcaaagctggcgccagagtttgccaagaggaatgttaagttgattgctctttcaatagactctgttgaggaccattttgcctggagcaaggacatcaatgcttacaatggtgcagcacccacagaaaagctaccatttcccatcatcgacgataaggacagggaccttgccatcctgttgggcatgttggatccagcagagaaggatgaaaaaggcatgcccgtgacagcccgtgtggtattcatttttggccctgacaagaaactaaaactgtccatcctctacccagccaccacgggcagarrctttgatgagattctcagagtggttgactccctccagctgacagcatcaaatccagttgccactccagttgactgraagaagggagagagtgtratggtccttcccaccctccytgaaragraagccaaacaacttttccctaaaggagtyttcaccaaagagctcccatbtggcaagaaatacctccgttatacgccccagcyttaagtctgcgggaaytggggctgcaactgctcgmccagcaytgggacctgaggatgmcagctgacagctgcagttccgtagaaagattgtggcgtggtcacagccgaagtcgsgtaggtcgctcgctatactactggctcmttaamtggaaatggcmccaaammawwhwmrrrawwctttactctgtgccttcgccagcattctgcccctccatccatcacagcgccctgctgactggctttctttgaaacgaattatgtgttggtgactgmagggwmkcyrmasrrkcwbtkmbsdrcaaggtagtktcaswrwgrgctccatgctagaatgrtaaacatcttttgtaggttyccaaactgaatcttytgttmcccattgtggrgamccmtaaagtggggrgaamcttwcaattytgtactttcmgtaaataaascaggggagktggggggggggggagagttytytwtaggaaatccatggtgagtttytaycaaagtgggctyccaagaaygkswsgargacagcacatgtacttcbtggagtttccaggtctgctctytagtgatctgtgaatgtgaactcgcyttwtgaaagacaggcmgtgacattgtttgccactaaatgtcctaaaggagtgggttkccatttytaaattctgstgtgtgaggttcaacaataaaatcctgrttvgaaaaaaaaaaaaaaaaaa

SEQ ID NO: 3501 - DNA, 1504 bp, Rattus norvegicus
  misc_feature (1470)..(1470): n is a, c, g, or t
  misc_feature (1472)..(1473): n is a, c, g, or t
agatctgatccatttcgaagaaccctaacagtccgtttgtctaatccataacaacaaaacgtaaaaaatgaattcaactctgttctccagggttgaaaattactcagttcactataatgtctcagagaattctccatttctggcctttgagaatgatgactgccacctgcccttggctgtgatattcaccttagctcttgcttatggggctgtgattattcttggggtctctggaaacctggcattgatcataatcatcctaaaacagaaagagatgaggaatgtcaccaacattctgatcgtgaacctctccttctcagacttgctggtcgcagtcatgtgtctcccgttcacctttgtgtacacactgatggaccactgggtcttcggggagaccatgtgcaaactgaatccttttgtgcaatgcgtctccattacagtatccattttctctctggttctcatcgctgtggaacgtcatcagctaatcatcaacccaagagggtggagaccaaacaatagacatgcttacataggcattactgtcatttgggtactggcggtggcttcttctctgcccttcgtgatctatcaaattctgactgatgagcccttccaaaatgtatcacttgcggcgttcaaggacaagtatgtatgttttgacaaattcccgtcagactctcacaggctgtcttacacgactcttcttctggtgctgcagtattttggcccactctgtttcatattcatatgctacttcaagatatacattcgcttgaaaaggagaaacaacatgatggacaaaatcagggacagtaagtacaggtccagtgagaccaaacgaatcaacgtcatgctgctctccatcgtggtcgccttcgcggtctgctggctgccccttaccatcttcaacactgtgttcgactggaatcaccagatcattgccacctgcaaccacaatctgctgttcctgctctgccacctcacggccatgatctccacctgcgtcaaccccatcttttatggattcctgaacaaaaatttccagagagayttgcagttcttctwyaacttttgtgacttccggtctcgagacgacgactacgagactatagccatgtctaccatgcatacggacgtgtccaagacttctttgaagcaggcaagcccggttgcatttaaaaaaatcagtatgaatgacaatgaaaaaatctgaagctgctgagaacatacggtcccaggctacatctgtkkawwwwcaagcacagcctgtcacatggtttcattacctgtgctcccagsgmatggattgaggcaggtttggaaagtccargacatcctgtgttgggttttactgcttttgtgatggttgccgtgattacttggcaatctagattactttgtaatctatctggcaacagttttgaccagactctgtgtgtgtgtgtgtgtgtgtgtgtgtgtgtgtgngnnccttgctggctggctggctggccggctggct

SEQ ID NO: 3502 - DNA, 1225 bp, Rattus norvegicus
tgctgtgacaggtgtgttaggtcatcatcaaccaccccatcatgctcctggtgtctaccgtgtccgctgtgcctgggctcttttcaccccctagctctcccagcaacagcagccaggaggaactactggatgaycgagacccgctgctagtccgggctgaactggccctgctatctacaatttttgtggctgtggccttgagcaatggcctagtgctgggggccctaatacggcggggccggcgtggacgctgggcacccatgcatgtcttcatcagtcatttgtgcctggctgacctggctgtggctctgtttcaagtgctaccccagctggcttgggatgccactgaccgcttccatggccctgatgccctgtgtcgggccgtcaagtacctgcagatggtgggcatgtatgcctcctcctacatgatcctggccatgacactagaccgccatcgtgccatctgccgccctatgctagcataccgccatggaggtggggctcgctggaacaggccagtgctggtggcctgggccttctcactccttctcagcctgcctcagctcttcatctttgctcagcgtgatgtgggaaatggcagtggggtgtttgattgctgggcccgatttgcagaaccatggggccttcgtgcctatgtcacctggattgccttgatggtgtttgtggcacctgccctaggcattgctgcctgtcaggttcttatcttccgggagatacacgccagtctggtgccagggccatccgagagggcagggaggcgccgcagagggcgccggacaggaagccccagcgagggagcacatgtatcagcagccatggccaagaccgtgaggatgacactggtgattgtgattgtctacgtgctatgctgggcacccttcttcctcgtgcagctgtgggcagcgtgggatccggaagctcctctggaaagacccccctttgtgttgctcatgctgctggctagccttaacagctgtaccaacccttggatctatgcttccttcagtagcagtgtctcctcggagttgcgtagcctgctttgctgtgctcagaggcacaccacacacagcctgggtcctcaagatgaatcctgtgccacagccagctcctctttgatgaaggatacaccctcctgagtagctactgggctctttctactcaaaaaccctctgtagctcaactgactatctagggttggccctga

SEQ ID NO: 3503 - DNA, 2942 bp, Rattus norvegicus
skcttagagacagggtctctacgctgccccggctccaactgctagtgctgttgttgctgccgctgctgcttgtgccccagcccatcgcakgtcatggcggcaagtactcgcgggagaagaatgagcccgagatggccgccaagcgtgagtccggggaggagttccgcatggagaagctgaaccagctatgggagaaggccaagcggctgcatctgtctcctgtgaggctggccgagctgcattctgacctgaagatacaagaaagggatgaactcaactggaagaagctgaaggtggaaggcctagacggggatggggagaaagaagcaaaactggtccacaatctcaatgtcatcctggccaggtacggactggatgggaggaaggacacccagacagtgcacagcaacgccctcaatgaagacacccaggatgagctgggggaccccaggttggaaaagctgtggcacaaggcaaagacatcagggaaattctccagtgaagaactggacaagctgtggcgagagtttctgcactacaaagagaagatccacgagtacaatgtactgctagatacactgagcagrgytkragmmsgtwatgagaacmkwmwmarmmmmwmwracatgacccacatcaagagtgacaccctggccagcaagcacagtgaactraaggacagaytgcgtagtatcaaccagggcctagaccgcytgaggaaggtcagccaccagggctacggccccgccactgagtttgaagagccccgagtgatagatctgtgggacctggctcagtctgccaacttcacygagaaggaactrgagtcgttcagggaggagcwtaagcacttcgaggccaaaatcgaaaagcacaaccactaccagaagcagctggagatttcccaccrgaagctgaagcacgtggagagcatcggtgacccsgagcacatcmgscrcrasraggagaagtacgtcctgctggaggagaagacaaaggagstgggctmcaaggtgaagaagcatctgcaggacctgtccagcagggtctmaagggctcggcacaatgagctctgagaccagaagccactggcagtagcctagagaggctcttgaagacactgggaactgtcaacttgtcatactggtgtggctgtccacagtggcaaggagaaataccgatctgatcctgctgcggctggcaaggactaattttctttcaagcaagtgtagctgtcaccgccctggttgagggctttgggtacatctaccaatgagatatgaccggtctccatgctgcagcaaaagtttacattgaaattatataaatctgtcactggaaawrwwawrwamararwccttaaatacatggcagggttttgarmmawmwarwmmwwrmmwrrwawmtcgagarawrrrwmmamwwrarccaaaggtggcaccatggcaaattaagttatagatttatagatgaaaggcggaactaccccttgtaattgatatagatgactggtctaccccctggaagcattgccctccccccacttcacttaccccctctctccccagggatctgatcccagatagttttaaagtcaagagatttcaggacaaagatggcagaggtgaaagccttcaagtcttgtcgggcaaacattttctgcctccccaaagaccccagttggtttccatattctggtttaagtatctgatccctcacacagagtagccaaaagttcattcgaccccagcaactgatcctttaagatcatggcgtttattagctgctggatctcggctcaaaactctgcctatgaggagtacacagtcagccatgtctgtaagaatagcaaagctgcaaagacgctcagtgaacaactgctcacccagcattaggtctccaskwgrgatctgcagagccgtgtaaatgccttgctgtgattacttacctgtagtcccagcacttagaggaaagacagcagggcaagctgggtagctatcccagcccaataagcaaaagtggagcatgacgggagaaggcacatcattgtgatgtgtgcacacactaacatgtatgtatacctatacacaagggaacacacacacactcatatatgggcaaaacccccwggacatcatgcaagaagcccgtgggttaaggacagcagcagcatagagcagcaggcagtgtggttccctcacccaccctgtctgccactatcaggccagctgggatatctaagtatcttcccagagccctcagcagtgtctgaggcccagagarakkcttgttgcwaggatctcgctctgcctttctggttcacccaacacatatactcgggtacccaccaaggcytcytgcgccatccagcccaggggahtgggctcaccactgggccctagacatcagactcagagtcaagtgcaggaggagcgcctggytatcggtgcatcttcaccaatgtgtgcgtccytagagccagaggccatgamtgcattctagggcttagaaatakacatgttgamktaaaatgtgtwtgtggcabwacacakcycagcgaacctstcagtgtgadtgacatakagcccayagytgmgttagggagcgggtgtgacctgtstaggagmtgcytgctggggctgacctcagtcatgagggccaccctgaccctgcaaacttccytgggtgagtgtgacttmtacggcaagggarcctcaagcyacaaacctagatgaggttctggctrgtcacstarcaaaggtgacamsgtcctcagsktggcaggtcaagsyctktgyttaagcctaacktcaatccatatggtgaaggaggacaggyttacgcagctktcmkctgaccacgtgtrctkcagcacgcgagttcacmcawtgaaataaaatgtsttytaargcawwmwwwmwrrrraaaaaaaaaaaaaaaaa

SEQ ID NO: 3504 - DNA, 2163 bp, Rattus norvegicus
cacgaggagggtctctacgctgccccggctccaactgctagtgctgttgttgctgccgctgctgcttgtgcctcagcccatcgcaggtcatggcggcacgyrctcgssggagaagaatgagcccgagatggycgccaagcgtgagtcyggggaggagytccgcatggagaagctgaaccagctatgggagaaggccaagcggctgcatctgtctcctgtgaggctggccgagctgcattctgacctgaagatacaagagagggatgaactcaactggaasaagctgaaggtggaaggcctagacggggatggggagaaagaagcaaaactggtccacaatctcaatgtcatcctggccaggtacggactggatgggaggaaggacacccagacagtgyacagcaacgccctcaatgaagacacccaggatgagctgggggaccccaggttggaaaagctgtggcacaaggcaaagacatcaggaatctcagtgagactgacaagctgtgcgagagttctgcactacaaagagaagatccacgagtacaatgtactgctagatacactgagcagagctgaagaaggttatgagaaccttctcagcccctctgacatgacccacatcaagagtgacaccctggccagcaagcacagtgaactgaaggacagactgcgtagtatcaaccagggcctagaccgcctgaggaaggtcagccaccagggctacggccccrcsaskgagtttgaagagccccgagtgatagatctgtgggacctggctcagtctgccaacttcacygagaaggaactggagtcgttcagggaggagcttaagcacttcgaggccaaaatcgaaaagcacaaccactaccagaagcagctggagatttcccaccagaagctgaagcacgtggagagcatcggtgaccccgagcacatcagccgcaacaaggagaagtacgtcctgctggaggagaagacaaaggagctgggctacaaggtgaagaagcatctgcaggacctgtccagcagggtctcaagggctcggcacaatgagctctgagaccagaagccactggcagtagcctagagaggctcttgaagacactgggaactgtcaacttgtcatactggtgtggctgtccacagtggcaaggagaaataccgatctgatcctgctgcggctggcaaggactaattttctttcaagcaagtgtagctgtcaccgccctggttgagggctttgggtacatctaccaatgagatatgaccggtctccatgctgcagywwwwktttwywttkwwwkkwtwtwwwyckgkcsysgamakkttatkkamaggaratcytgctwwatmcatgmagysacttccatggaggtagctgtgataaagtgtctcttccccatgacaacgcatagcaccaatccctactraaagacctgcccgagtacaccaactgtcctggtggaatgacactctrgagcaggaaaaacaaatttctaaaaggcatacagtgattrtcttctgagctttgcagctggcaacatgtatgttttcacacaagatatttttaagctagcgaaagaaaatactcaagcaggattagttcttaaagcaataarcaggggaataaaaacatcatgtwtatataagaaaaccaaggcatgctcacaggtttgagccaagaaagacctggagccctaatccccaccttgtcccaggatgcacctgtcatgatcacagggaagaratgagtctgggatttacaaacctctctctaaacctcagtccagtgttgtgccgctggctgtaccacacacaccgcacaagccccgactgctcccattccattacggcacaggagacatgttctcaccctgcctagcctgctttggtggggggaggcggcggcagggaactctacaagtgtttccagtggtgacctctgttctccctttcaggagctgttttccttcatgtagctagccccatggctaccagaaagaactagaataggagctggctgattttgtcaaaccccaaaacaaacacccctttcctccgggtcttgattttgtcacctgaatctctgggacgagtggccaaggcatttctaggcttactgcaagtatcagatgacgacataagattctagaagtcaag

SEQ ID NO: 3505 - DNA, 675 bp, Rattus norvegicus
ctgcctctctgctgctacctgcgtctggtcwgcgcysagggggatcccattcctgaggaactctatgaaatgctgagtgaccactccatccgctcctttgatgaccttcagcgcctgctgcacagagactccgtagacgaagatggggctgagctggacttgaacatgacccgagcacattctggagtcgagtcggaaagctyrwctcgagggaggaggagcctagggtctctggctgcagcagagcctgccgtaatcgccgagtgcaagacgmgtacagaggtgttccagatctcgcggaacctcatcgatcgcaccaatgccaacttcctggtgtggccgccctgcgtggaggtgcagcgctgctcgggctgctgcaataaccgcaatgtgcagtgccgggcctcgcaggtgcagatgcggmmggtgcaggtgagaaagatcgaaattgtgagaaagaagccagtcttcaagaaggccacagtgaccctggaggaccatctggcctgcaagtgtgagacagtagtgacccctcggcccgtgactcgaagtcctgggacatccagggagcatcgagccaagacacctcaaactcgggtgaccgttcggacggtgcgaatccgccggccccccaaagggaagcaccgaaagtttaagcacacccatgacaagaag

SEQ ID NO: 3506 - DNA, 1023 bp, Rattus norvegicus
atgaccatggaaacagttgaatcacagcaggatcgaagtgtaacacattctgtggcagagcatagctccttgcatatgcagactggccaaatttctgtccctactctagctcaggtttctgtagctggatcaggcactggaagaggctccccagctgtgactctagtacagttaccttcaggccaaactgtacaggtccagggagtaattcagacaccacatccatcggttattcagtcaccacaaatacaaactgttcaggtagcaacaattgcagagacagatgattctgcagactcagaagtaatcgattcgcataaacgtagagaaattctttcacgaagaccctcatatagaaaaatactgaatgaactttcctctgatgtgcctggtattcccaagattgaagaagaaaaatcagaggaagaagggacaccacctaacattgctaccatggcagtaccaactagcatatatcagactagcacggggcaatacattgctatagcccaaggtggaacaatccagatttctaacccaggatctgatggtgttcagggactccaggcattaacaatgacaaattcaggagctcctccgccaggtgctacaattgtacagtatgcagcacaatcagccgatggcacacagcagttctttgtcccaggcagccaggttgttgttcaagatgaggagactgaccttgccccaagtcacatggctgctgccacaggtgacatgccaacttaccagatccgagctcctactactgctttgccacaaggtgtggtgatggctgcctcaccagggagtctgcacagtccccagcaactagcagaagaagcaactcgaaagcgggagctgaggctgatgaaaaacagggaagctgcccgggagtgtcgcaggaagaagaaagaatatgtcaaatgtcttgaaaatcgtgtggctgtgcttgaaagtcaaaacaagaccctcattgaggaactcaaggccctcaaagacctttattgccataaagcagag

SEQ ID NO: 3507 - DNA, 1472 bp, Rattus norvegicus
agctccaccgcggtggcgccgcgcgagacacaggacctgcaggctgcagaggcaaawgctccggarrtcatggagcasgractcagsagyaycycrkcctsgragctggacaagttcatagaggtttacctccttccaaacaccagcttysgtgmtgaygtcaaatyagckatcaatgtcstgtgtgatttcctgaaggagagatgcttccgagrtrctgyccacccagtgagggtctccaaggtggtgaagggyggctcctcaggcaaaggcaccacactcaagggcaagtcagacgctgacctggtggtgttccttaacaatytcaccagctttgaggatcagttaaacagacggggagagttcatcaaggaaattaagaaacagctgtatgaggttcagcgtgaaaaacattttagagtgaagtttgaggtccagagttcatggtggcccaacccccgggctctgagcttcaagctgagtgcaccacacctccaacaggaggtggagtttgatgtgcttccagcctatgatgtcctasgtcatgttagcctctacagcaatcctgatcccaagatctacaccatcctcatctccgaatgtatctccctggggaaggatggcgagttctctacctgcttcacggagctccagaggaacttcctgaagcagcgcccaaccaagctgaagagtctcatccgcctggtcaagcactggtaccaactgtgtaaggagaagctggggaagccgctgcccccacagtacgccctggagctgctcacggtctatgcctgggaacgtggaaatggaattactgagttcaacacagctcagggcttccggacaatcttggaactggtcacaaagtaccagcagcttcgaatctactggacaaagtattatgactttcaacacccagatgtctccaaatacctacacagacagctcagaaaatccaggcmygwgrtcctggaccctgctgacccaacagggaacgtggctggtgggaaccaagaaggctggcggcggttggcctcagaggcgaggctgtggctgcagtrcccatgttttatgaacagggrtggttccmcagtgagytcctgggragtrycggtggatgaggcctggtcatgcatcctgctgtgaacccagcagcaccagcccaggaggctccggagtcaggggcacgtgctgctctgctgcaggaccttgacacagtgagggaggccccactcgggatcacagtccatgcttctgatgcccgcccgccatgtttgaatactgtccaatcacagacagccttcctcaacagattcagaaggggcggaaagaactcaagcttgacttccatctgacygtccacctgttgggaggttctgtccaaccatgtctgtcaacaacaataaagtacagcaggtgccawaaaaaaaaaaaaaaaaaaaaaaaaaaaaatctcgcggccgcaagcttat

SEQ ID NO: 3508 - DNA, 822 bp, Rattus norvegicus
ggctgtggaggcaatggcctggtgctgtcggctacggacagcagggcttgccggaaggtagccgtgaagaagattgtgctgagtgacgcacgaagcatgaagcacgcgctccgagagatcaaaatcatccggcgcctggaccacgacaacatcgtcaaagtgtacgaggtactgggacccaagggtagcgatctgcagggcgagctctttaagttcagcgtggcttatattgtccaagagtacatggagactgacctggcatgcctgctagagcagggcacgctgaccgaggagcacgctaagctattcatgtaccagctgctgcgtgggctcaagtacatccactctgccaacgtgttgcacagggacctgaagcccgccaacattttcatcagcacggaggacctcgtgctgaagatcggggatttcgggctggccagaatcgcggaccagcattactcccacaagggttatctgtcggaagggttggtgacaaagtggtaccgctctccacgactgctcctgtccccgaacaactacacgaaagccatcgatatgtgggcagctggctgcatcctagcggagatgctcacggggaaaatgctctttgctggggctcacgagcttgagcagatgcagctcatcctagacaccatccctgtagtgcgggaggaagacaaggaggagctgctcagggtgatgccgtcctttgtcagcagcacttgggaggtgaagaggccactgcgtaagctactcccggatgtcaaccgtgaagccattgactttctggagaagatcctgacgttcagccccatggaccgg

SEQ ID NO: 3509 - DNA, 1416 bp, Rattus norvegicus
catcatagaaggtgaaagtctgtcctgattgagccttcctcagcagccaagaaactgcaaggtacacgaatgcagagctccaggctccgagggtcctgtgcactctggaagttggtgtggacgatgttcatcttgcttgtgttagtaactggggtttcagctttcaccactccagcagtggtgcacacaggaagggtttctgagtctcccgttacatcagagaagcacccagttcttggagacgattgctggtttcgtggcagagatttcaaatcggaattgaggctggaaggtgagcccgtggtcctgaggtgccccctggtacctcattcagacacctccagcagttcccgcagccttctgacatggagtaaatcggactcttctcagctgatcccaggagatgagccaaggatgtgggtgaaggatgatacgctctgggttctgccagcagttcagcaggactctggtacctacatctgcacattcagaaacgcgtcccactgtgaacaaatgtctctggaactcaaggtctttaagaataccgaagcctctttccctctcgtctcctacttgcaaatctcagctctctcctccaccgggttacttgtgtgccctgacctgaaagagttcatctccagcagaactgatggaaagatacagtggtataagggctccatcctcttggataaaggcaataagaaatttctgagtgcgggagaccccacacgcctattgatatccaacacatccatgggagatgcaggctattacagatgtgttatgacatttacctacgagggcaaggaatacaacatcactaggaatattgaactccgggtcaaaggaataaccacagaacccatccctgtgatcatttctcccctggagacaataccagcatctttggggtcaagactgatagtcccrtgcaaggtgttcctgggaactggtacatcttccaacaccatcgtgtggtggatggctaacagcacgtttatctcagtggcctacccaagaggccgtgtgactgaggggctacascaccagtactcagagaatgatgagaactacstggaagtgtcgctgatttttgatccagtcacaaaggaggatctraatacagattttaaatgtgttgccacgaatccacggagttttcagtsactccataccacagtcaaagaagtttcttccacgttctmctggggcatcgcgytkgcacctmtgtctctgatcatcttgrttgtgggggcgatatggattcgcagaaggtktaaacgccaggctggaaagacktatgggctgaccaagctaccgactgacaaccaggacttccyttccagcccaaaccaaataaaggaawtgaawtawwamaaaaaaaaaaaaaaaaaaaaaagggcctaaaaaaaacat

SEQ ID NO: 3510 - DNA, 1808 bp, Rattus norvegicus
ccggagaccagcagcgagtggacagtggcaggcggtgactgaatctccaagtctggaaacaatagccagagatagtggctgggaagcaccatggccagagtcctgcagctctccctgactgctctcctgctgcctgtggctattgctatgcactctgactgcatcttcaagaaggagcaagccatgtgcctggagaggatccagagggccaacgacctgatgggactaaacgagtcttccccaggttgccctggcatgtgggacaatatcacatgttggaagccagctcaagtaggtgagatggtccttgtaagctgccctgaggtcttccggatcttcaacccggaccaagtctggatgacagaaaccataggagattctggttttgccgatagtaattccttggagatcacagacatgggggtcgtgggccggaactgcacagaggacggctggtcggagcccttcccccactacttcgatgcttgtgggtttgatgattatgagcctgagtctggagatcaggattattactacctgtcggtgaaggctctctacacagtcggctacagcacttccctcgccaccctcactactgccatggtcatcttgtgccgcttccggaagctgcattgcactcgcaacttcatccacatgaacctgtttgtatccttcatgctgagggctatctccgtcttcatcaaggactggatcttgtacgccgagcaggacagcagtcactgcttcgtttccaccgtggagtgcaaagctgtcatggttttcttccactactgcgtggtgtccaactacttctggctgttcattgaaggcctgtacctctttacactgctggtggagaccttcttccctgagaggagatatttctactggtacaccatcatcggctgggggacacctactgtgtgtgtaacagtgtgggctgtgctgaggctctattttgatgatgcaggatgctgggatatgaatgacagcacagctctgtggtgggtgatcaaaggccccgtggttggctctataatggttaactttgtgcttttcatcggcatcatcatcatccttgtacagaagctgcagtccccagacatgggaggcaacgagtccagcatctacttaacaaatttaagactgagagtccccaagaaaacccgagaggaccccctgcctgtgccctcagaccagcattcaccccctttcctcagctgcgtgcagaaatgctactgcaagccacagcgggctcagcagcactcttgcaagatgtcagaactatccaccattactctacggctggcccgctccaccctactgctcatcccactcttcggaatccactacacagtattcgccttctctccagagaacgtcagcaagagggaaagacttgtgtttgagcttgggctgggctccttccagggctttgtggtggctgtactctactgcttcctgaatggggaggtacaggcagagattaagaggaaatggaggagctggaaggtgaaccgttacttcactatggacttcaagcaccggcacccgtccctggccagcagtggagtaaatgggggaacccagctgtccatcctgagcaagagcagctcccagctccgcatgtccagcctcccggccgacaacttggccacctgaggcctgtctcctcctccttctgcacaggctggggctgcgggccagtgcctgagcatgtttgtgcctctcccctctccttgggcaggccctgggtaggaagctgggctcctcccaaaggaagagagagatagggataggctgatatt

SEQ ID NO: 3511 - DNA, 2121 bp, Rattus norvegicus
ccgagagaccaggctcggcgcgcgctccgcggcgcacacgctccagccggtgcggctctgggcgcggattcgcgggttgcgcgccctcctgcacattcagtcccggcgcccagcagtctggaccggcccggagaccagcagggagaagataacccagaatctcaccttggatctcacagtaaacttggcaggacctcaacagcctaggcaggagagaggagctccttgttcagagctggagccrgagrsyagmakaacgagtggacagtggcaggcggtgactgaatctccaagtctggaaacaatagccagagatagtggctgggaagcaccatggccagagtcctgcagctctccctgactgctctcctgctgcctgtggctattgctatgcactctgactgcatcttcaagaaggagcaagccatgtgcctggagaggatccagagggccaacgacctgatgggactaaacgagtcttccccaggttgccctggcatgtgggacaatatcacatgttggaagccagctcaagtaggtgagatggtccttgtaagctgccctgaggtcttccggatcttcaacccggaccaagtctggatgacagaaaccataggagattctggttttgccgatagtaattccttggagatcacagacatgggggtcgtgggccggaactgcacagaggacggctggtcggagcccttcccccactacttcgatgcttgtgggtttgatgattatgagcctgagtctggagatcaggattattactacctgtcggtgaaggctctctacacagtcggctacagcacttccctcgccaccctcactactgccatggtcatcttgtgccgcttccggaagctgcattgcactcgcaacttcatccacatgaacctgtttgtatccttcatgctgagggctatctccgtcttcatcaaggactggatcttgtacgccgagcaggacagcagtcactgcttcgtttccaccgtggagtgcaaagctgtcatggttttcttccactactgcgtggtgtccaactacttctggctgttcattgaaggcctgtacctctttacactgctggtggagaccttcttccctgagaggagatatttctactggtacaccatcatcggctgggggacacctactgtgtgtgtaacagtgtgggctgtgctgaggctctattttgatgatgcaggatgctgggatatgaatgacagcacagctctgtggtgggtgatcaaaggccccgtggttggctctataatggttaactttgtgcttttcatcggcatcatcatcatccttgtacagaagctgcagtccccagacatgggaggcaacgagtccagcatctacttacggctggcccgctccaccctactgctcatcccactcttcggaatccactacacagtattcgccttctctccagagaacgtcagcaagagggaaagacttgtgtttgagcttgggctgggctccttccagggctttgtggtggctgtactctactgcttcctgaatggggaggtacaggcagagattaagaggaaatggaggagctggaaggtgaaccgttacttcactatggacttcaagcaccggcacccgtccctggccagcagtggagtaaatgggggaacccagctgtccatcctgagcaagagcagctcccagctccgcatgtccagcctcccggccgacaacttggccacctgaggcctgtctcctcctccttctgcacaggctggggctgcgggccagtgcctgagcatgtttgtgcctctcccctctccttgggcaggccctgggtaggaagctgggctcctcccaaaggaagagagagatagggataggctgatattgctcctcctgtttgggtcccacctactgtgattcattgagcctgatttgacatgtaaatacacctcaaatttggaaagttgccccatctctgcccccaacccatgcccctgctcacctctgccaggccccagctcaacctactgtgtcaaggccagcctcagtgatagtctgatcccaggtacaaggccttgtgagctgaggctgaaaggcctgttttggagaggctggggtagtgcc

SEQ ID NO: 3512 - DNA, 2876 bp, Rattus norvegicus
cggcacgagcgcctctcccgcagacatagcggccaagcagcacggggtgggcgacacaggacgaggggcgcctcgctccgattcccggctgcgactggcggaggctctggagcaacgcggtcccggtgtgcaatacgcacmmgccgcggcgcagggacacagacccgactgcccgcggycacacgcaccgagagaccaggctcggcgcgcgctccgcggcgcacacgctccagccggtgcggctctgggcgcggattcgcgggttgcgcgccctcctgcacattcagtcccggcgcccagcagtctggaccggcccggagaccagcagcgagtggacagtggcaggcggygactgaatctccaagtctggaaacaatagccagagatagtggctgggaassaccatggccagagtcctgcagctctccctgactgctctcctgctgcctgtggctattgctatgcactctgactgcatcttcaagaaggagcaagccatgtgcctggagaggatccagagggccaacgacctgatgggactaaacgagtcttccccaggttgccctggcatgtgggacaatatcacatgttggaagccagctcaagtaggtgagatggtccttgtaagctgccctgaggtcttccggatcttcaacccggaccaagtctggatgacagaaaccataggagattctggttttgccgatagtaattccttggagatcacagacatgggggtcgtgggccggaactgcacagaggacggctggtcggagcccttcccccactacttcgatgcttgtgggtttgatgattatgagcctgagtctggagatcaggattattactacctgtcggtgaaggctctctacacagtcggctacagcacttccctcgccaccctcactactgccatggtcatcttgtgccgcttccggaagctgcattgcactcgcaacttcatccacatgaacctgtttgtatccttcatgctgagggctatctccgtcttcatcaaggactggatcttgtacgccgagcaggacagcagtcactgcttcgtttccaccgtggagtgcaaagctgtcatggttttcttccactactgygtggtgtccaactacttctggctgttcattgaaggcctgtacctctttacactgctggtggagaccttcttccctgagaggagatatttctactggtacaccatcatcggctgggggacacctactgtgtgtgtaacagtgtgggctgtgctgaggctctattttgatgatgcaggatgctgggatatgaatgacagcacagctctgtggtgggtgatcaaaggccccgtggttggctctataatggttaactttgtgcttttcatcggcatcatcatcatccttgtacagaagctgcagtccccagacatgggaggcaacgagtccagcatctacttcagctgcgtgcagaaatgctactgcaagccacagcgggctcagcagcactcttgcaagatgtcagaactatccaccattactctacggctggcccgctccaccctactgctcatcccactcttcggaatccactacacagtattcgccttctctccagagaacgtcagcaagagggaaagacttgtgtttgagcttgggctgggctccttccagggcyttgtggtggctgtactctactgcttcytgaatggggaggtacaggcagagattaagaggaaatggaggagctggaaggtgaaccgttacttcactatggacttcaagcaccggcacccgtccctggccagcagtggagtaaatgggggaacccagctgtccatcctgagcaagagcagctcccasstccgcatgtccascstcccggccgacaacttggccacctgaggcctgtctccctcctccttctgcacaggctggggctgcgggccagtgcctgagcatgtttgtgcctctcccctctccttgggcaggccctgggtaggaagctgggctcctccccaaaggggaagagmgagatagggtataggctgatattgctcctcctgtttgggtcccacctactgtgattcattgagcctgatttgacatgtaaatacacctcaaatttggaaarwwrmmmmawmwmwgcccccaacccatgcccctgctcacctctgccaggccccagctcaacctactgtgtcaaggccagcctcagtgatagtctgatcccaggtacaaggccttgtgagctgaggctgaaaggcctgttttggagarkctggggtagtgcccaccccagcagcctttcagcaaattgactttggatgtggacccttctcagcctgtaccaagtactgcagttggctagggatgcasstcagtttcctgagcatcctttggagcaggtcaacctgaggctccttttgcttacccgacatctaagttgtccaggtgctcggctcctgtgtgcctggatgacgggaksgykccggggtctttcagtcaaagacttacattgaggtggggtgagagtcagagaaaagttctggtgcttttcatttgttctaagagctgagagccaggaatgcagagtcaattgggaaggagatgggatagctgatgatcttaccatgtccatgactgtgcccctgattcaagaccggatcatgtggtggctttatttctacacttcttgtccacaatggacagtctgaggaagctcttctttcagccacaacaaccacagaaagccctttcttctcccctcttgtttctccataagtcaaagccatgtttagaacggaccagccaccttgcgatgaaatcactgagttctgaagcaactttcaatttccacgagccaagtcctgggtccagggacgcccc

SEQ ID NO: 3513 - DNA, 2311 bp, Rattus norvegicus
gcggccgcagcagcagcagcagcgacagcagcagcaacaacagcctgagcaagccacagcagcgccctggctcctgagccccccgtgggctgaaggcattgcaggtagcccatgkwccswsaakataagtgtgcagatgggattamcgtccacatggagatatggaacaggaccagggattggcaccgtgaccatggtcagcwgkgggcgcttcatctkcctggtcttggtcaccatggcaaccttgtccctggcccggccctccttcagtttagttgaagataccactttagaaccagaaggagcaccgtactggaccaacaccgaaaagatggagaagcggctccatgctgtccctgccgccaacactgtgaagttccgctgtccagccggggggaatccaacacccacaatgaggtggytaaaaaacgggaaggagtttaagcaggagcatcgcatcggaggctataaggtacgaaaccagcactggagccttattatggaaagtgtggtcccmtcwgmcraakkcwattacacctgcctggtggagaatgaatacgggtccatcaaccacacctaccaccttgatgttgttagagcgatcamcacamcggcccatcctccaagstggactgcctgcaaatgsctccacggtggtcggaggggacgtagaatttgtctgcaaggtttatagtgatgcccagccccatatccagtggatcaaacatgtggaaaagaacggcagtaaatatggacctgatgggctgccctacctcaaggtcctgaagcactcggggataaatagctccaatgcagaagtgctggctctgttcaatgtgacggagatggatgctggggaatatatatgtaaggtctccaattatatagggcaggccaaccagtctgcctggctcactgtcctgcccaaacagcaagcacctgtgagagagaaggagmtcryrgcttccccagattacctggagatagctatttactgcataggggtcttcttaatcgcctgcatggtggtgacagtcatcttttgccgaatgaagaccacgaccaagaagccagacttcagcagccagccrgctgtgcacaagctgaccaagcgcatccccctgcggagacaggtttcggccgagtccagctcgtccatgaactccaacaccccactggtgaggataacgacacgtctttcctcaacgggagacatcccgatgctagcaggggtctctgagtacgagttgccagaggatccaaagtgggaattccccagagataagctgacgctggccaaacccctgggggaaggctgcttcggccaagtagtcatggctgaagcggtgggaatcgataaggacagacccaaggagcagtccaccgtggcggtgaagatgttgaaagatgacgccacagagaaggacctgtctgacctggtgtcagagatggagatgatgaagatgattggtaaacataagaacatcatcaacctcctgggggcctgcacccaggatggacccctctatgtcatagtcgaatacgcatcgaaaggcaacctccgggaatacctccgggcccggagaccacctggcatggagtactcctatgacattaaccgtgttcccgaggagcagatgaccttcaaggacttggtgtcctgcacctaccagctggcgagaggcatggagtacttggcttcccaaaaatgtatccatcgagacttggcagccagaaatgtgctggtaacagaaaacaacgtgatgaagatagcagactttggcctggccagggatatcaacaacatagactattacaaaaagaccacgaatgggcgacttccagtcaagtggatggctcctgaagccctttttgatagagtttacactcatcagagtgatgtctggtccttcggggtgttaatgtgggagatcttcactttagggggttcaccctacccagggattcccgtggaggaactttttaagctgctcaaagagggacacaggatggacaagcccaccaactgcaccaatgaactgtacatgatgatgagggactgctggcatgctgtaccctcacagaggcccacgtttaagcagttggtggaagacttggatcgaattctgactctcacaaccaatgaggaatacttggacctcacccagcctctcgaacagtattctcctagttaccccgacacaaggagctcttgttcttcaggggacgattctgtgttttctccagaccccatgccttatgacccctgcctgcctcagtatccacacataaacgggagtgttaaaacaaa

SEQ ID NO: 3514 - DNA, 2672 bp, Rattus norvegicus
gcggccgcaacagcagcatcatcgacagcatcagcaacaacagcctgagcacgccacagcagcgccctggctcctgagccccccgtgggctgaaagcattgcaggtagcccatgktmccwsaakataagtgtgcagatgggattamcgtccacatggagatatggaacaggaccagggattggcaccgtgaccatggtcagctgggggcgcttcatctgcctggtcttggtcaccatggcaaccttgtccctggmccggccctccttcagtttagttgaagataccactttagaaccagaagagccaccaaccaaataccaaatctcccaaccagaarcgtgcgtggttgcccccggggagtcgctagagttgcgctgcatgttgaaagatgccgccgtgatcagttggactaasgatggggtgcacttggggcccaacaataggacagtgcttattggggagtacctccagataaaaggtgccacacctagagactccggsctctatgcttgtgctgcagctasgacggtagacagtgaaactttgtacttcatggtgaatgtcacagatgccatctcatctggagatgacgaggacgacacagatagctccgaagactttgtcagtgagaacaggagcaaccagrgagcaccgtactggaccaacaccgaaaagatggagaagcggctccatgctgtccctgccgccaacactgtgaagttccgctgtccagccggggggaatccaacacccacaatgaggtggctaaaaaacgggaaggagtttaagcaggagcatcgcatcggaggctataaggtacgaaaccagcactggagccttattatggaaagtgtggtcccatcagacaaaggcaattacacctgcctggtggagaatgaatacgggtccatcaaccacacctaccaccttgatgttgttagaggatcamcacamcggcccatcctccaagstggactgcctgcaaatgsctccacggtggtcggaggggacgtagaatttgtctgcaaggtttatagtgatgcccagccccatayccagtggatcaaacatgtggaaaagaacggmagtaaatatggacctgatgggctgccctacctcaaggtcctgaagcactcggggataaatagctccaatgcagaagtgctggctctgttcaatgtgacggagatggatgctggggaatatatatgtaaggtctccaattatatagggcaggccaaccagtctgcctggctcactgtcctgcccaaacagcaagcacctgtgagagagaaggagatcacagcttccccagattacctggagatagctatttactgcataggggtcttcttaatcgcctgcatggtggtgacagtcatcttttgccgaatgaagaccacgaccaagaakscakacttcagcagccagccrgctgtgcacaagctgaccaagcgcatccccctgcggagacaggtaacagtttcggccgagtccagctcgtccatgaactccaacaccccactggtgaggataacgacacgtctgtcctcaacggsrgacaccccgatgctagcaggggtctctgagtacgagttgccagaggatccaaagtgggaattccccagagataagctgacgctggscaaacccctgggggaaggctgcttcggscaagtagtcatggctgaagcggtgggaatcgataaggacagacccaaggaggcagtccaccgtggcggtgaagatgttgaaagatgacgccacagagaaggacctgtctgacctggtgtcagagatggagatgatgaagatgattggtaaacataagaacatcatcaacctcctgggggcctgcacccaggatggacccctctatgtcatagtcgaatacgcatcgaaaggcaacctccgggaatacctccgggcccggaggccacctggcatggagtactcctatgacattaaccgwgytcccgaggagcagatgaccttcaaggacttggtgtcctgcacctaccagctggcgagaggcatggagtacttggcttcccaaaaatgtatccatcgagacttggcagccagaaatgtgctggtaacagaaaacaacgtgatgaagatagcagactttggmctsgccagrgatatcaacaacatagactattacaaaaagaccacgaatgggcgacttccagtcaagtggatggctcctgaagccctttttgatagagtttacactcatcagagtgatgtctggtccttcggggtgttaatgtgggagatcttcactttagggggttcaccctacccagggattcccgtggaggaactttttaagctgctcaaagagggmcacaggatggacaagcccaccaactgcaccaatgaactgtacatgatgatgagggactgctggcatgctgtaccctcacagaggcccacgtttaagcagttggtggaagacttggatcgaattctgactctcacaaccaatgaggaatacttggacctcacccagcctctcgaacagtattctcctagttaccccgacacaaggagctcttgttcttcaggggacgattctgtgttttctccagaccccatgccttatgacccctgcctgcctcagtatccacacataaacggsagtgttaaaacawraattccatcg

SEQ ID NO: 3515 - DNA, 4354 bp, Rattus norvegicus
caggcttctgcgccaggctgagctgacagactgagggcatgctaccagctacacgatgccgccctgccttcaccacagatgttactgctgcggagggcgaaagctcccgcctcacaccccacacaccccagggagccttcacatgccttggagattttcacccaaaattgtgatgtcatcaggagccattttttaatgtggatgaacacgggacctcagatgcttggactaacgtgacgtgggggtcctgaggctcgctctgaaggttcgatcagctgcccgtgcaccaaaagaagaggctgggccttgcagtgcagtagaatgtcagcgtgttccaggaggaggggcttctgctgatctgtggatcgatggcaaggaacaaacaacacagttttgcaagatgctggcatcgggttcatcttggtcatagaccgaagacaggacaaatggacttctgtgaaggcgtcagtcctgcgaatagccgcatcattcccagccaacctgcagctcgtcctcgttctccgacccacgggcttcttccagaggactctctcggacatagccttcaagttcaacagagatgagtttaagatgaaagtaccggtcatgatgctaagctcagtgccagaactacatggctacattgacaagtcacagctgaccgaggaccttggggggaccctggactactgccactccaggtggctgtgccaccgcacagcgattgaaagcttcgccctgatggtgaagcagacagcccagatgctgcaggcctttgggaccgagctggccgagactgagctgcccaacgacgtccagtcaaccagcctggtgctcagcgcacacacagagaagaaggctaaagtgaaggaggatctgcagctggcgctgacggaggggaacagcatccttgagagcctcagggagccgctggctgagagcatagtccacagtgtgaaccaggaccagctggacaatcaggccactgtgaagaggctcctgacccagctgaatgagaccgaggctgcctttgacgagttctgggcaaagcatcagcagaagctggaacagtgcctacagctgcgacattttgaacaaggtttccgggaggtcaaaaccgccttggattccatgtcccagaagatagccgcgttcacagatgttggcaacagcctggcccatgtgcagcacctcctgaaggacttgaccacctttgaggagaagtccagcgtggccgtgacaagccagagccctgtcctggaggggcagcagctgattgagaaccggcactatgctgtagactctatccatccgaagtgtgaggaactccagcacctctgtgaccacttcgcctctgaggtcaccaggaggcgggaccttctcagcaagtccttggagctgcatagcctcctggagacgtccatgaagtggagcgacgagggcatcttcctgctggcctctcagcctgtggacaaatgccaatctcaggatggtgcggaggcagccctgcaggagatcgagaagtttctggagaccggtgcagaaaacaagattcaggagctcaataagatttacaaggaatatgaatgcatcctcaaccaggaccttctggaacacgtgcaaaaagtctttcagaagcaagagagcaccgaggagatgttccaccgcaggcaggctagcctgaagaaactggcagccaagcagacacggcctgtgcagcccgtggccccccgaccagaggcgctaaccaagtccccctccccctcgccaggctcctggcgaagctctgagaactccagctctgagggcaacgccctccgcagagggccctacaggagagccaagagcgaaatgagtgagccccggcagggccgcaccagctccacaggagaagaggaggagagcctggccatcctgcgcagacacgtgatgaatgaacttctggacacggagcgggcctacgtggaggagctgctctgtgtcttagagggctatgctgcagagatggacaaccccttgatggcacacctcatctcaacaggcctgcaaaacaagaagaacattctgtttggaaacatggaggaaatctatcacttccacaacagaatattcctgcgggagctggagagctgcatcgactgcccagagctggtggggagatgctttctggagaggatggaggagttccagatctatgagaagtactgtcagaacaagccacgctccgagagcctgtggagacagtgctctgactgtcccttcttccaggagtgccagaagaagctggaccacaagctgagcctcgactcctacctgctgaagcctgtgcagaggataaccaagtaccagctgctgctcaaggaaatgctgaagtacagcaagcactgtgaaggggccgaggacctgcaagaggcactgagctccatcctgggcatcctcaaggcagtgaacgactccatgcacctcatagccatcactggctatgatggaaaccttggggacctggggaagctgctgatgcaaggctccttcagcgtgtggacggaccacaagaagggccacaccaaggtgaaggagctagccaggttcaagcccatgcagcggcacctcttccttcacgagaaggccgtcctcttctgcaagaagagggaggagaatggggaggggtacgagaaggctccttcctacagctacaagcagtccttgaatatgactgctgttggcatcacagagaatgtgaagggtgacaccaagaagttcgagatctggtacaacgcaagggaggaggtttacatcattcaggcaccaactcccgagattaaagcagcgtgggtgaatgagattcggaaggtgctgaccagccaactgcaggcctgccgggaagccagccagcaccgagccctggagcagtcccacagccttcccttgcccacgccagccagcaccagtcccacaaaagggagcacaagaaatgtcaagaagctcgaagatcggaagacggacccgctctgcctggaaggctgcgtgagctcatcattaccaaagccccccgagaagggcaaaggctggagcaaaacatcccactcactggaggcccctgaggaggacggaggctggtccagtgctgaggagctcatcaattcatccgatgctgaggaagacggaggagtgggccctaggaagctggttccaggtatgttcgggacctgaccagcagcaaggagggatgggtgccagccagcagcctagccaccctcctgggcaaatccagctcagcccagtgtctgagcagctcaggtaagacccactgtgcgcgccagctgtgccctgagcctgccaagatcctcagcccagagcctgtttaaaagcagaggggtttctaggtatgcagagaaaagggccagagccgaagcctgtctccactggtttcccgcagactccagcccagggtcagccgtgctgagcaactcatccagctgcagcgagggctaccctactcccttctccgagctccaggggtagtggccaggcctctgtggcaggcgctcaaggccaccgtgcagtagaccagcatgcaaatctctaagttttttctttttgcttgggcttgcttagtttgggaggggatggtgctccaagatatctggaaacaggaggacctatcaaccatgggcttcagaggacactggggccttggaaccaggactctgctgcatatgcagaaggcaggagacaacagttcaccaccaaagcttcttcagagactccagggtggacagaggcagggctatgggtcaggagaccttgcagaaagatgggagacggcccttttccacacatgcacagccagcagcccctgctatacagcctctccacggtgtcctggcctctctggtgctttctacgggaacatcatcctgaggaagccacttctaaccgggagtaaagagtttgctaccaacagcctaagaaggggatcaagggactcttgttcttttataagtttttgactttttttttaaaaaaacaaacaaacagggattaatcccatggccatttttctgtggtactctggcctcaaatcctaaaccaagaatcactgtgtttacatgaaatgacaatttgatactgtatttgatataaaactattttttgttactggggtttacatcaaagcacgttgtttatacaactgactgatttctggggcactctcactgagacctggcagcacaggtgctggaaggcctggtaagccaggtcctgtcctcctggtaagcccaggggctgtcctcttagccaggggggctgtctcctgttagccaggaggggcgtgtcctcctggtaagacagg

SEQ ID NO: 3516 - DNA, 651 bp, Rattus norvegicus
cacgagggccggctccaaagtgcctgctyywgskawmyckcactccaragcckgcwgcywkccwmgcsccagcmtstctssrsstwmayacgyaswckmsswgggacatctctacactgttcccatccgggaacagggcaacatctacaagcccaacaacaaggccatggcagacgaggtgaatgagaagcaagtgtacgacgcgcacaccaaggagattgatctggtcaaccgcgaccccaagcatctcaacgacgacgtggtcaagattgactttgaagatgtgattgcggaaccagaagggacacacagtttcgacggcatctggaaggccagcttcaccaccttcactgtgacaaaatattggttttaccgcttgctgtctaccatcttcggcatccctatggcgctcatctggggcatctactttgscatcctctctttcctgcacatctgggcagttgtaccgtgcatcaagagcttcctgattgagattcagtgcatcagccgtgtctattccatctacgtccacamcttctgtgatccactctttgragsggattggsaagatattcagcaatattccgatcagcacgcagraagagatatagtgacatttcagggatggaggcttttctcccccttactatt

SEQ ID NO: 3517 - DNA, 2162 bp, Rattus norvegicus
cacgagggctgtgggagccgtaggtagctgagctcgccaggcagccttggtctctgtctacgaacagcccgtggggcagcctcaagggccgcagccatgaacggcacagagggccccaatttttatgtgcccttctccaacatcacgggcgyggyrcgsrgcccctttgagcagccgcagtactacctggcggagccatggcagttctccatgctggcagcctacatgttcctgctcatcgtgctgggcttccccatcaacttcctcacgctctacgtcaccgtacagcacaagaagctgcgcacaccactcaactacatcctgctcaacttggctgtggctgacctcttcatggtcttcggaggattcaccaccaccctctacacctcactgcatggctactttgtctttgggccsacaggctgcaaccttgagggcttctttgccacccttggaggtgaaatcggcctgtggtccctggtagtcctggccattgagcgctacgtggtggtctgcaagcccatgagcaacttccgctttggggagaatcatgccattatgggtgtggccttcacctgggtcatggcgttggcctgtgctgctcccccactggttggctggtccaggtacatccccgagggcatgcagtgttcatgtgggattgactactatacactcaagccyragstyaacaatgagtccttcgtcatctacatgttcgtggtccacttcaccatccccatgatcgtcatcttcttctgctacgggcagctggtcttcaccgtcaaggaggccgccgcccagcaacaggagtcggctaccactcagaaggcagagaaggaagtcacgcgcatggtcatcatcatggtcatcttcttcctgatctgctggcttccctatgccagtgtggccatgtacatctttacccaccagggctccaacttcggccccatcttcatgacccttcccgctttctttgcyamgascgcctccatctacaacccaatcatctacatcatgatgaacaagcagttccggaactgcatgctcaccassctctgctgcggyaagaatccactgggagatgatgaggcctctgccactgcctccaagacggagaccagccaggtggctccagcctaagcctgsccagagactgtggctgactgtaggagtctcctgtccccactcaccccagccacagccsscacsaggagcagcacccgttggaatgaggtcatgcaggctcccycagtgttcttttctttgtttttaatsamkwsrtgaaagcaaaatgaggctccccactcaacagggacagcctgacaaaggacatccatccmccaagacccccagcctggagtccccaattcccgggggccagcgggatctgtacccctcccctcagcttgtgtctcaggaacatgacaagtgtcccggcttacggctaagtrtyyrgsacagarkggammamawarwarmwrawtaataaatgytacctggatgaarrrarraawrrrwramwraawrarwrrawatatgagtgaagggattaacagacrsgarsatggatgtcmtcaggtgcccaacctggcagacctagtcatgtttgactggaatctgtwcactgtttdacatacctgccbtggttttctmtgcaccccaccsscacsmsrgatgggatctcccaaatccggggccctgacagaatgtggctgcttcaaagacagatgmasgrrrggagaaagaaggaggaaggaagggagacacacagagaaaattgtgtgagtgtgtgagtgtgtgtgtatgtgtgtgtgcaaacactttgtatataaagagcaaaactggtagttgtgttacaggtaacaccaactaatataattaattagccmtcwwwawrrwmwmwrmwwawwagtgactgcttgggagttgggcagggcctaagcactcagataaggtatttcccccagcctcagtaggcttttacaaatgaaccagaccttcaggcctgtgtagaaatggagctggatcacagagatgaatgacagtgacagcagtgtgggctgcagtcattaggactaagaaagcattgagaccaggagtcccaggcaaggcctaggtcctcccttcagtaagaaaaccttggctcttgtctctcaacc

SEQ ID NO: 3518 - DNA, 2407 bp, Rattus norvegicus
ggtcctgagctcctgaggaaaaagcgcacaactctgsctgagagaaatacttgtcagctctatatccagacagatcacctgttctttaaatmctatggaacacgagaagctgtgattgctcagatatccagtcatgttaaagcaattgatrcaatttaccagactacagacttctccggaatccgtaacatcagctttatgktgaaacgcataagaatcaatacaacatctgatgaaaaagatcctacaaatcctttcmgkttcccaaatattggtgtggagaagttcctggagttgaattytgagcagaatcatgatgactactgcttggcctatgtcttcacggaccgggattttgatgatggtgttcttgktctggcatgggttggagcaccttcaggaagctctggaggaatatgtgagaaawscaagttgtattcagatggcaagaagaagtcattgaacacgggcatcattactgttcagaactatggctctcacgtgcctcccaaagtctctcatattacttttgctcatgaagttggacataactttggatctccacatgattctggaacagagtgcactccaggagagtctaagaacttaggmcaaaaaraaaawrrmaattacatcatgtatgcgagagcaacgtctggggacaaacttaacaacaacaaattttcactctgcagcattaggaacataagccaagtgcttgagaagaagaggaacaactgttttgttgaatctggccagcctatctgtggaaatgggatggtggagcaaggggaagagtgtgactgtggctacagtgaccaatgcaaagatgagtgctgcttcgatgcaaaccagccagaggggaagaaatgcaagctgaagcctgggaagcagtgcagtccaagtcaaggaccctgctgtacagcacagtgtgcattcaagtcaaagtctgagaaatgtcgggatgattctgactgtgcaaaggaagggatttgcaatggcttcacagccctttgcccagcatctgatcccaagcccaactttacagactgtaacaggcatacacaagtgtgcattaatgggcaatgtgcaggttctatctgtgagaagtatgacttggaggagtgcacctgtgccagctctgatggcaaagatgataaggaattatgtcatgtttgctgcatgaagaaaatggccccatcaacttgtgccagtacaggctctttgcagtggaacaagcagttcactggtcggactatcactctgcagccaggctctccatgtaatgacttcagaggctactgtgatgttttcatgcggtgcagattagtagatgctgatggccctctagctaggctgaaaaaagcaatttttagtccacaactctatgaaaacattgctgagtggattgtggctcactggtgggcagtactgcttatgggaattgccctgatcatgctaatggctggatttatcaagatttgcagtgttcacactccaagtagtaatccaaagttgcctcctcctaaaccacttccaggcactttaaagaggaggagaccgccacagcccattcagcagccccagcgtcagaggccccgggagagttatcaaatgggacacatgcgacgctgatgcagcttttgccttggttcttcctagtgcctacagtgggaaaacttcactccaaagagaaacctgttaagtcatcatctgcaaatgaaaccctcacagttaatagttgaagaaaaaatggcaagagatcatgtcctcagaccaggtggaattacctaaaatttaaagcctgaaaattccaatttttttgggggggtgggatggaaaaggaacccaattttcttatggacagatatttttaacctaatggcacaaagtcttagaatattattatgtgccctgtgttccctgttcttcgttgctgcattttcttcacttgcrgacagacttggctctcgataaacttttrtcacaaattgaaatatatttttttcaactrccaatcwaggctgggaggctcgaccacctcaacattggatacatcacttgccaatgtacataccttgtwatatgcagacatgtatttcttacgtacactgtacttctctgtgcaatttgtaaacagaaattgcaatatggatgtttctttgtatwataaatttttccgctcttaatgaaaaawwamwrwwwaawwgacatactcaggataacagagaatggtggtgtgcagtggtccaggattctgtaatgcttcatgcaggccattttgaaatgagaattgaaaaccctttttcttatggtggagttggttcttacatgcatccttttcctgttccatggcttctgtgagtaggagaggctgtgttgaagagctcagctggtggcttacccg

SEQ ID NO: 3519 - DNA, 650 bp, Rattus norvegicus
  misc_feature (619)..(620): n is a, c, g, or t
  misc_feature (623)..(623): n is a, c, g, or t
  misc_feature (625)..(625): n is a, c, g, or t
  misc_feature (631)..(631): n is a, c, g, or t
ccccaagcttagcagaaaggagcagagctgtgggccctggagcctcagtgggaagcagcaggtctagcctgtggacccttccaggcaggttcctgttccagatcatcccacggggagcaggtcccaggtgctggccccaaaggcttccatccgagtcccagttatggtacgtctttggtagtgggacccagctcacaatcctagggcagcccaagtctgaccccttggtcactctgttcctgccttccttaaagaatctccaggttaagaaggcgacactagtgtgtctggtgagcgaattctacccaggtactttggtggtggactggaaggtagatgggatccctgtcactcagggtgtggagacaacccaaccctccaaacagaccaacaacaagtacgtggccagcagctacctgacactgatgtctgaccaatgggtgcctcacagtagatacacctgccaggtcactcatgaaggaaacactgtggagaagagtktgtcwcctgctgaatgttcttagaccacgatccttcctgaagcatcagggagcctggatcttaagttccagaaaaagttttttgttttgtttttttgttcttgttttcttttgccatnngantnatcccnctgtttttcctgtgtgtat

SEQ ID NO: 3520 - DNA, 1590 bp, Rattus norvegicus
cagcagcagggcagtcatggagctgctgaatgggactggcctgtggcccatggccatattcacagtcatcttcatattactggtggacctgatgcaccggcaccagcgctggacttctcgctaccctccaggccctgtgccgtggcctgtgctgggcaacctgctgcaggtggaccccagtaacatgccatacagcatgtacaagcttcaacaccgctatggtgacgtgttcagcctgcagatgggttggaagcccatggtcattgtcaacagactgaaagcggtgcaggaagtgctggtgactcatggagaggacactgctgaccgccctccagtgcccatctttaagtgcctgggtgtgaagcccagatcccaaggtgtggtctttgcatcttacgggcctgagtggcgagagcagaggcgattctctgtgtccaccctgcgcaccttcggcatgggcaagaaatccctggaggagtgggtgaccaaggaggccggccacctctgtgatgccttcactgcccagaatgggcggtccatcaatcccaaggccatgctgaacaaagccttgtgtaatgtgatcgcatccctcatttttgcccgtcgctttgaatatgaagacccttacctcatcaggatgctgacactagtggaagaaagtttgatagaagtctctggtttcattcctgaggttcttaacacgttcccagcactgctgcgcatcccagggctggctgacaaggtcttccaaggtcagaagaccttcatggccttcctggataacctgctggctgagaacaggaccacctgggaccctgcccagccaccccgaaatctgactgatgccttcctggctgaggtggagaaggccaaggggaatcctgagagcagctttaatgatgagaacctacgcatggtggtagttgacctgttcactgcagggatggtgaccaccgccaccacactgacctgggccctactgctcatgattctatacccggatgtgcagcgcagagtccaacaagagattgatgaggtcatagggcaggtgcggtgtccagagatgacagaccaggcccacatgccctacaccaatgctgtcatccatgaggtacagcgctttggggacattgctccattgaatttgccacgcatcacgagttgtgacattgaagtgcaggacttcgtcatccccaaggggacgaccctcatcatcaacctgtcgtccgtgctgaaggatgagactgtctgggagaagcccctccgcttccaccctgaacacttcctggatgcccagggcaactttgtgaagcatgaggccttcatgccattctcagcaggccgcagagcatgccttggggagcccctggcccgcatggagctcttcctcttcttcacctgcctcctgcagcacttcagcttctccgtgccggccggacagccccggcccagcacccttggcaactttgctatttcagttgcccccttgccctaccagctctgtgctgcggtacgggagcaaggacactaattccagtccagctctacagggcaagctgagccacgtttaataaaccagtcttgaggctg

SEQ ID NO: 3521 - DNA, 1542 bp, Rattus norvegicus
catcttcatattactggtggacctgatgcaccggcaccagcgctggacttctcgctaccctccaggccctgtgccgtggcctgtgctgggcaacctgctgcaggtggaccccagtaacatgccatacagcatgtacaagcttcaacaccgctatggtgacgtgttcagcctgcagatgggttggaagcccatggtcattgtcaacagactgaaagcggtgcaggaagtgctggtgactcatggagaggacactgctgaccgccctccagtgcccatctttaagtgcctgggtgtgaagcccagatcccaaggtgtggtctttgcatcttacgggcctgagtggcgagagcagaggcgattctctgtgtccaccctgcgcaccttcggcatgggcaagaaatccctggaggagtgggtgaccaaggaggccggccacctctgtgatgccttcactgcccagaatgggcggtccatcaatcccaaggccatgctgaacaaagccttgtgtaatgtgatcgcatccctcatttttgcccgtcgctttgaatatgaagacccttacctcatcaggatgctgacactagtggaagaaagtttgatagaagtctctggtttcattcctgaggttcttaacacgttcccagcactgctgcgcatcccagggctggctgacaaggtcttccaaggtcagaagaccttcatggccttcctggataacctgctggctgagaacaggaccacctgggaccctgcccagccaccccgaaatctgactgatgccttcctggctgaggtggagaaggccaaggggaatcctgagagcagctttaatgatgagaacctacgcatggtggtagttgacctgttcactgcagggatggtgaccaccgccaccacactgacctgggccctactgctcatgattctatacccggatgtgcagcgcagagtccaacaagagattgatgaggtcatagggcaggtgcggtgtccagagatgacagaccaggcccacatgccctacaccaatgctgtcatccatgaggtacagcgctttggggacattgctccattgaatttgccacgcatcacgagttgtgacattgaagtgcaggacttcgtcatccccaaggggacgaccctcatcatcaacctgtcgtccgtgctgaaggatgagactgtctgggagaagcccctccgcttccaccctgaacacttcctggatgcccagggcaactttgtgaagcatgaggccttcatgccattctcagcaggccgcagagcatgccttggggagcccctggcccgcatggagctcttcctcttcttcacctgcctcctgcagcacttcagcttctccgtgccggccggacagccccggcccagcacccttggcaactttgctatttcagttgcccccttgccctaccagctctgtgctgcggtacgggagcaaggacactaattccagtccagctctacagggcaagctgagccacgtttaataaaccagtcttgaggctgctgctgttttctgcttcg

SEQ ID NO: 3522 - DNA, 2337 bp, Rattus norvegicus
gaattcaattaaatatttattgaacaaatgcagaataaatgaaccagggccgttttaacctgaagatacattaaccaactcaaatcttcaagggctgctgccataggagaacaaaaagagatgcactgagcttttctacacggggtctggatgcgcagcaggaggatgcgcagcaggagggctgcaggccggccctcagctcaggagctccctcagcacacactgcactccatgctcctcccttcctctgaaaggaggcatcagaacttcgagtttcccatctgcacctaagttgcgttctcattgcagactgtctgtctcatgcaatggatgcttgcacaatgggaagacaaacatagcattgacaagctcctccccaggagacacctgccaccatcggctctttctgattctacatcactgattccttgttctgggaagggaagaagagcacattctccagagcacgagtgacaatgtgggtagggcaccgcccagggcagtccccaaatccccatcacttcagctagaggccagtgctaggcaggagtgtgttgtatgccagagcgccctctcgctacttgaagcaggacagcttgtgttcggagtccggtccttgacagaaactctgtataatactgatggctccaaccaaagtgatcaatacaaaggaaaactgctccaaggacattcaaaagtgtctgaggtgctgtattgagtgttggtcattggtctttgggagcctgggcagcagcagggcagtcatggagctgctgaatgggactggcctgtggcccatggccatattcacagtcatcttcatattactggtggacctgatgcaccggcaccagcgctggacttctcgctaccctccaggccctgtgccgtggcctgtgctgggcaacctgctgcaggtggaccccagtaacatgccatacagcatgtacaagcttcaacaccgctatggtgacgtgttcagcctgcagatgggttggaagcccatggtcattgtcaacagactgaaagcggtgcaggaagtgctggtgactcatggagaggacactgctgaccgccctccagtgcccatctttaagtgcctgggtgtgaagcccagatcccaaggtgtggtctttgcatcttacgggcctgagtggcgagagcagaggcgattctctgtgtccaccctgcgcaccttcggcatgggcaagaaatccctggaggagtgggtgaccaaggaggccggccacctctgtgatgccttcactgcccagaatgggcggtccatcaatcccaaggccatgctgaacaaagccttgtgtaatgtgatcgcatccctcatttttgcccgtcgctttgaatatgaagacccttacctcatcaggatgctgacactagtggaagaaagtttgatagaagtctctggtttcattcctgaggttcttaacacgttcccagcactgctgcgcatcccagggctggctgacaaggtcttccaaggtcagaagaccttcatggccttcctggataacctgctggctgagaacaggaccacctgggaccctgcccagccaccccgaaatctgactgatgccttcctggctgaggtggagaaggccaaggggaatcctgagagcagctttaatgatgagaacctacgcatggtggtagttgacctgttcactgcagggatggtgaccaccgccaccacactgacctgggccctactgctcatgattctatacccggatgtgcagcgcagagtccaacaagagattgatgaggtcatagggcaggtgcggtgtccagagatgacagaccaggcccacatgccctacaccaatgctgtcatccatgaggtacagcgctttggggacattgctccattgaatttgccacgcatcacgagttgtgacattgaagtgcaggacttcgtcatccccaaggggacgaccctcatcatcaacctgtcgtccgtgctgaaggatgagactgtctgggagaagcccctccgcttccaccctgaacacttcctggatgcccagggcaactttgtgaagcatgaggccttcatgccattctcagcaggccgcagagcatgccttggggagcccctggcccgcatggagctcttcctcttcttcacctgcctcctgcagcacttcagcttctccgtgccggccggacagccccggcccagcacccttggcaactttgctatttcagttgcccccttgccctaccagctctgtgctgcggtacgggagcaaggacactaattccagtccagctctacagggcaagctgagccacgtttaataaaccagtcttgaggct

SEQ ID NO: 3523 - DNA, 2696 bp, Rattus norvegicus
atggctctcagggtgacagcagatgtgtggctggcaagaccctggcagtgcctgcacaggacgagggcactgggcactacggcaaaagtggcccccaagacactgaagccctttgaagccataccacaatactccaggaacaagtggctgaagatgatacagatcctgagagagcagggccaagagaacctacacctggagatgcaccaggccttccaagagctggggcccattttcaggcacagtgcagggggagcacagattgtgtctgtgatgctgcctgaggacgctgagaagctgcaccaggtggagagtatcctcccgcatcggatgcccctggagccgtgggtggcccacagagaactccgtggcctgagacgtggtgtgttcttgctaaatggggcagactggcgcttcaaccgactgcagctgaatccaaatatgctgtcaccaaaagccattcaatcttttgtcccctttgtggatgtggtagcaagggactttgtggaaaacctgaagaagagaatgctggagaatgttcatggaagcatgtctataaacattcagtccaatatgttcaactataccatggaagccagccattttgttatttccggagagcgtctgggcctcacaggccatgacctgaaacctgagagcgtgacattcactcatgctctgcactcaatgttcaagtccaccacacagctcatgttcttacccaagagcttgactcgttggacaagcacccgggtgtggaaagaacactttgattcctgggatatcatctctgagtatgtcacaaaatgtatcaagaatgtgtatcgcgaactggcagagggtcgccaacagtcctggagtgtcatatccgagatggtagcacagagtactctgtcaatggatgccatccatgccaactcaatggaacttattgctggaagtgttgacacgacagcaatctccttggtaatgaccctttttgagctggctcggaacccagatgttcagcaggccctgcggcaggagagcctagcagctgaggccagcatcgttgctaatccccagaaggccatgtcagacctgcccttgctgcgggctgcccttaaagagaccttgaggctctaccctgttggtagctttgtagagagaatcgtacactcagacctggtgcttcagaactatcatgtccctgctgggacattcgtcataatttatctgtactccatgggccgaaaccctgcagtgttcccaaggcctgagcgctacatgcctcagcgctggctggagaggaaaaggagtttccagcatctggccttcggctttggggtgcgccagtgcctggggcggcgcctggcagaggtggagatgctgctcctgcttcaccatatgctgaaaaccttccaagtggagacactgagacaagaggatatgcagatggtttttcgctttcttttgatgcccagctctagtcctttccttactttccggcctgtgagctagtcaccttacatctggggccctagtcagtccaccagcctacctctgtcctgacacccaaggtcacacttctctgccagcagaattttttgtgggaggaggtcacactgtcatcattcaacacaactgtacacagtttacagctgaagacctccagcatcaggtacaagcaaggccagggaagagattaggactatcttcagggcaataggtagtctctcctgagcggtcttccccattctttccaacggtcactccaggtggccacggcctttaaagggtctcagagtaaagccagaagtcaactcctccttatgtcctcattattatgacatgacccacaaaaacattttcacacacagatgggaatttttgggcaaaagatacatagatgatagatagatatatgatatattacatatatgatagatgatagatagatagatgatagatagatagatagatagatagatagatagatagatagatagatagatagatgatggatgaccagtcatttatgtctgtgttttgtttgaagcctttcacagtggagctggcacatacgagctggtgagtctacagtgttttaagagtagacacagctgcacttgctaaggactgggtggttgtggtatcagagatgcaggcaggaggacctgctggaacccagatactgtgtgaagtccccacagggacagtggtcttccatgaggtcaaggtgtttcctgacttctgccagtgcatgctgcttgggcaaaggtaattctcttgacttgtgaaagtggcccagatcataagattttttcaggtctcctttcagctgcaagtcggtagggcgaaaagttttggccaagaacaaccacttcacagggtctcctgtgctcagcactaaagcacaaatctactggagatgtgtgtgccaagttccaaggtcttagacctttgagtgtgaggcagtatagagtcggggcctttaatgatataattcgtgtgaaatgagattactgggttgtgcctactccagtgcccagagagcctcccaagaagagagtgaggtgccaggtcacagagacagacccaagtggaagacaggaagtcagacttctgtaagtggaggaaagcagttggaactcctacagtcttggctccatcactcaatcacttccctggctgtgaaaaataaacttgagttgttg

SEQ ID NO: 3524 - DNA, 1857 bp, Rattus norvegicus
ctcaagctcacactggctggacttcctcgccatgacagtctgtacctctaactgatcccagggatgataccacctacatttggggtggttcttctcgcctcagttaaacctctctgggagcaccatcacagacacccacagaagtttgttccctagatgattctaggtcctgtggagttgacaagattgaccatcacgctctcagcaatcgggtgaagtaaacaccaccgttgtctccatggaaatgcttaactacggcttgctagtaaggactccagactccaaagaggccacaccatgaagattctcctgctgtgtgtggcactgctgctgacctgggacaatggcatggtcctgggagagcaggagttctctgacaatgagctccaagaactgtccactcaaggaagtaggtatgttaataaggagattcagaacgccgtccagggggtgaagcacataaagaccctcatagaaaaaaccaacgcagagcgcaagtccctgctcaacagtttagaggaagccaaaaagaagaaagagggtgctctagatgacaccagggattctgaaatgaagctgaaggctttcccggaagtgtgtaacgagaccatgatggccctctgggaagagtgtaagccctgcctgaagcacacctgcatgaagttctacgcacgcgtctgcaggagcggctcggggctggttggtcgccagctagaggagtttctgaaccagagctcacccttctacttctggatgaacggggaccgcatcgactccctgctggagagtgaccggcagcagagccaagtcctagatgctatgcaggacagcttcactcgggcgtctggcatcatacatacgcttttccaggaccggttcttcacccatgagccccaggacatccaccatttctcccccatgggcttcccacacaagcggcctcatttcttgtaccccaagtcccgcttggtccgcagcctcatgcctctctcccactacgggcctctgagcttccacaacatgttccagcctttctttgatatgatacaccaggctcaacaggccatggacgtccagctccatagcccagctttacagttcccggatgtggatttcttaaaagaaggtgaagatgacccgacagtgtgcaaggagatccgccataactccacaggatgcctgaagatgaagggccagtgtgagaagtgccaagagatcttgtctgtggactgttcgaccaacaatcctgcccaggctaacctgcgccaggagctaaacgactcgctccaggtggctgagaggctgacccagcagtacaacgagctgcttcattccctccagtccaagatgctcaacacctcatccctgctggaacagctgaacgaccagttcacgtgggtgtcccagctggctaacctcacacagggcgatgaccagtaccttcgggtctccacagtgacaacccattcttctgactcagaagtcccctctcgtgtcactgaggtggtggtgaagctgtttgactctgaccccatcacagtggtgttaccagaagaagtctccaaggataaccctaagtttatggacacagtggcagagaaagcgctacaggaataccgcaggaaaagccgcatggaatgagacagaagcatcagttttctatatgtaggagtctcaaggagggaatctcccagctttccgaggttgctgcagacccctagagaactcacatgtctccagcgcctaggcctccaccccagcagcctctccttcctctgggttctgtactctaatgcctgcacttgatgctctgggaagaactgcttcccccacgcaactaatccaataaagcacctt

SEQ ID NO: 3525 - DNA, 2580 bp, Rattus norvegicus
gatccagtgccctcttctggtgtgtctgaagacaactacagtgtactcatacataaaataaacctttaaaataataataataataataagcagtttcattctgatgcagcctgaaaaccatggaaggaatgttatccccaaagcattgagcctccttactacccctcttaaatcttatcccacagtgactgcttaagagacaatgctaatgatctctataccaagcaaaggctgagagaaaaaataaattggttgaaaataagatatgtatacatcacacttttaaggttaaagatatattaattagctctgcttataagtcatccagaatagctaatttaactttgagatatttttcaagacttacagatggtattgttattaatcaacttggaagctagtgtttgccaacctacacagattcataacattttcccccaaagactaaagttgaattactagaattgtgattaagaatcaaaattgcttatttgtaactgataattacacttttaaaagaatctttgttttctccaggtgcattttaaatagtgtcagagagcaattcacgtcgccaagggagacatgacccttaactctactgaagatggaattaaaagaatccaagatgactgccccaaggctggcaggcacaattacatatttgtcatgatccctactctctacagcatcatctttgtggtgggaatatttggaaacagcttggtggtgattgtcatttacttttacatgaagctaaagactgtggccagtgtttttcttctgaatcttgccctggctgatttatgctttttgttgactttgccactgtgggcagtctataccgctatggaataccgatggcccttcggcaaccacctatgtaagatcgcttctgccagcgtcagtttcaatctctatgccagtgtgtttctgctcacgtgtctcagcatcgatcgctacctggccattgtccacccaatgaagtctcgcctccgccgcacgatgctggtagccaaagtcacctgcatcatcatctggctaatggctggcttggccagtttgccagccgtcatctaccgaaacgtatatttcatcgagaacaccaatatcacagtttgcgcttttcattatgaatctcagaactcaacactccccattggactgggtctaacaaagaacattctgggcttcgtgttccctttccttatcattctcaccagctatactcttatttggaaagccctaaagaaggcttataaaattcagaagaacacgccaagaaatgatgacatctttaggataattatggcgattgtgcttttcttcttcttttcctgggttccccaccaaatattcacttttctggatgtgctcattcagctgggcattatccgtgactgtgaaattgctgacattgtggacaccgctatgcccatcaccatctgcatagcttattttaacaattgcctgaatcctctgttttatggctttctggggaaaaaatttaaaaaatatttcctccagcttctgaaatacattcccccaacggccaagtcacacgcaggcttgtcaacaaaaatgagcactctttcctaccgcccttcagataacatgagttcatctgccaaaaagtctgcatcttttttgaagtggaggtagagggttcaaagcctgcaagtgaagtgatttcctgacagcagaagccagaggaccatttgggctaagcagctcactcactaccgaaggagtgttcaacctccagcaatcctttcagggttgaagcagagaaagcactcagtgtacacattttcaaaagtgggaaacaaaagcttttttcccctttaaaacaaattggagcaaagccactgttaaccgcctttttttgttgactgaataactgctttaaggacaatgtcagaaattgagtggctgtatggatttgggggttagggaggaggtgtactagcagaaacgtaatgtctccagtcccctctcaattctgttacttttgatttccacttgaaggtatttagaagctattaaatctgtagacaatcaaaaggagatgggaggtcaagagtttctaagggtccaggaagctacccatctgtttagttactagtgactatgacaccattgttcctgacacaacacagttaagacttgctagacagtagtcatcaagtttcaaaatgctttgtgaagttcagccagtgcttaagaattcagagccatgtgccaaaacagtaccacagaacagcttgcctgaataatgtcttactgtagttgcaaagccaaactgcttgtcaagctgtgattctgtcccagatagttgtgtcttcctagttggatcagtttaatttcatatctaagaaatgtataatttcatatctaagaaatgtatatgaaatgtataatttcatatctaagaaatgttaagcagatttatcataaagtatgttttatggttctaaaaatgtatattttatatatgttatgtatatctatatctctaagctgttgtttgattgaagttgtagcaaagttgtatttatcttgaaataaaaatttatcata

SEQ ID NO: 3526 - DNA, 2321 bp, Rattus norvegicus
cgaattcggcacgagctcacttgctgcccaaggctcctgctcctgccccaggactctgaggtgggccctaaaacccagcgctctctaaagaaaagccttgccagcccctactcccggcccccaaccccagcaggtcgctgcgccgccagggggcgctgtgtgagcgccctattctggccacccggcgccccctcccacggcccaggcgggagcggggcgccgggggccatgcggggccaaggcagaaaggagagtttgtccgaatcccgagatctggacggctcctatgaccagcttacgggccaccctccagggcccagtaaaaaagccctgaagcagcgtttcctcaagctgctgccgtgctgcgggccccaagccctgccctcagtcagtgaaaacagcgtagaggatgagtttgaattatccacggtgtgtcaccgacctgagggcctggaacaactccaggaacagaccaagttcacacgcagagagctgcaggtcctgtaccgaggcttcaagaacgaatgccccagtgggattgtcaacgaggagaacttcaagcagatttattctcagttctttccccaaggagactccagcaactatgctacttttctcttcaatgcctttgacaccaaccacgatggctctgtcagttttgaggactttgtggctggtttgtcggtgattcttcgggggaccatagatgatagactgagctgggctttcaacttatatgacctcaacaaggacggctgtatcacaaaggaggaaatgcttgacattatgaagtccatctatgacatgatgggcaagtacacataccctgccctccgggaggaggccccaagagaacacgtggagagcttcttccagaagatggacaggaacaaggacggcgtggtgaccatcgaggaattcatcgagtcttgtcaacaggacgagaacatcatgaggtccatgcagctctttgataatgtcatctagctccccagggagaggggttagtgtgtcctagggtgaccaggctgtagtcctagtccagacgaacctaaccctctctctccaggcctgtcctcatcttacctgtaccctgggggctgtagggattcaatatcctggggcttcagtagtccagatccctgagctaagtcacaaaagtaggcaagagtaggcaagctaaatctgggggcttcccaacccccgacagctctcaccccttctcaactgatacctagtgctgaggacacccctggtgtagggaccaagtggttctccaccttctagtcccactctagaaaccacattagacagaaggtctcctgctatggtgctttccccatccctaatctcttagattttcctcaagactcccttctcagagaacacgctctgtccatgtccccagctggcttctcagcctagcctttgagggccctgtggggaggcggggacaagaaagcagaaaagtcttggccccgagccagtggttaggtcctaggaattggctggagtggaggccagaaagcctgggcagatgatgagagcccagctgggctgtcactgcaggttccggggcctacagccctgggtcagcagagtatgagttcccagactttccagaaggtccttagcaatgtcccagaaattcaccgtacacttctcagtgtcttaggagggcccgggatccagatgtctggttcatccctgaatcctctccctccttcttgctcgtatggtgggagtggtggccaggggaagatgagtggtgtcccggatgatgcctgtcaaggtcccacctcccctccggctgttctcatgacagctgtttggttctccatgacccctatctagatgtagaggcatggagtgagtcagggatttcccgaacttgagttttaccactcctcctagtggctgccttaggggaatgggaagaacccagtgtgggggcacccattagaatctttgcccggctcctcacaatgccctagggtcccctagggtacccgctccctctgtttagtctacccagagatgctcctgagctcacctagagggtagggacggtaggctccaggtccaacctctccaggtcagcaccctgccatgctgctgctcctcattaacaaacctgcttgtctcctcctgcgccccttctcagtcagccagggtctgaggggaagggcctcccgtttccccatccgtcagacatggttgactgctttgcattttgggctcttctatctattttgtaaaataagacatcagatccaataaaacacacggctatgcacaaaaaaaaaaaaaaaaaactcgag

SEQ ID NO: 3527 - DNA, 2684 bp, Rattus norvegicus
cttttttttaaaatttatttatttaatgtatatgaatatactgtcgctgtttcagacacaccagaagagggcattggatctcattacagatggtgtaagcaccatgtggttgctgagaattgaactcaggacctctggaagagcagtcggtgctcttaaccactgagccatctctccagccccaccatgagtcatcaaaatacccaaactatccgtggtttaattttctcatcagtaaagtaagaacagttatagagcctacttgatagagaacctgtggtaccatcaacaggtataaagtccttagaacagtgcctagcatagaataaagtctagataaacatttgctataatgaaatacagacagagttaagatgattatcagtagtttacattttcaaaagtccttcagtgtgttgacttgctgttgtcctatgaaaaattcatttcccatgtttctacacccataaacttatatgatcttcctgtaatttaattatcttcagtggcctgcctctttatctgtaaacctgaatgtctccttgtgtacacaatcattgtgaagctgttaaacagtaatctcactaggtcctagtttcccaatctgtgtgctgagtgggttggaccagataaccctccaagggtttttctagctctggtaatcttagggatgggacaggaggaaaaataggccccaccccaagtcccacccccaacaagatgccctctggctgccaagaggaagggtgacagagtcagctgggctcagcttcaagggcacccggtagagtcttgccaaggttcctaggcaagggtggtggtggtggtgctcctgggctggaagcaggcgtgaagtggggctgcatcagggggaaataagagtacaaagaactagaacaaaggtgagaggagagggaggacagagctgtggtggtgagttagatgacaatttgagcctgggtgtcttccttttagatggtgctggtaagcctccaccctcttcagctagccaggttctgcaggacagaggaagttgcagaacatcattgactgcctacctgagcccaagctctgtctgatgccatcagtccctgggctggactaaggaagctaggtaggagctgagctaaggaagctgggtaggagttgggctaagggtgttgggtaggggctgggctaagggtgttgggtagaggctgggctaagggacctgggtaggggctgggtaggcctgggttgcacatggagctccttcttgctctcctgggtgcttttccttttttgttgtaggttcatcaggactggaaaactaaagaaatcagatactgacttctgtcctttctacttgtagggggccatgaccagtgcagaatccttgctattcacatcactaggtcccagcccaagttctggagatggtgattgtaggtttaatgaggagttcaagttcatcctgttgcctatgagctatgcagttgtgtttgtgctgggcctggccctcaatgctccaaccctctggctgttcctcttccgccttcgaccctgggatgcaacagccacctacatgttccacctggcattgtcagacaccttgtatgtgctgtcactgcccaccctcgtctactactatgctgccagaaaccactggccctttggcactggcctttgcaagtttgtccgctttctcttctattggaacctctactgtagtgtccttttcctcacctgcatcagtgtgcaccgatacctgggtatctgccacccactgcgggcaatccgctggggccgccctcgatttgcaagccttctctgcctgggtgtttggttggtagtagctggctgcctcgtgcccaatcttttctttgtgacaaccaatgccaatggaactaccatcctgtgccatgacactactctgccagaggagtttgaccactacgtctacttcagttcggcagtcatggtgctgctctttggtttgcccttcttgatcaccctggtctgctatggactcatggcccggcgactgtatcgacctttgccaggagctggacagtcatcttctcggctccgttccctccgtaccattgctgtggtgctgactgtctttgctgtctgcttcgtgcctttccacatcacccgcacaatttattaccaggcaagactgttgcaagctgactgtcatgtgctgaacattgtcaatgtggtttacaaggtgactcgacccctggccagtgctaatagctgtcttgatccagtgctctatctcttcacgggggacaagtatcgaaaccagctccagcagctatgccgaggcagcaaacccaagccccgaacagctgcctcctccctggccttggtgactctacatgaggaaagcatcagcaggtgggcggacacccaccaagacagcaccttctctgcttatgagggagatcgattgtaaccctgctgctggatatgaagggaactaactgcagggcagaggggagggagcttgttagtatcacttgacaggggcatcagctgtcctcttttatagccgaagtttgaaggagctactcctctgcctctactttctcttcttctatccctacctggggccactgttcctgtttctagaacctcagtatcatttgcccaggtccttccatggcatggatttctctgaccagagtagagaattc

SEQ ID NO: 3528 - DNA, 1721 bp, Rattus norvegicus
ccggagaccagcagcgagtggacagtggcaggcggtgactgaatctccaagtctggaaacaatagccagagatagtggctgggaagcaccatggccagagtcctgcagctctccctgactgctctcctgctgcctgtggctattgctatgcactctgactgcatcttcaagaaggagcaagccatgtgcctggagaggatccagagggccaacgacctgatgggactaaacgagtcttccccaggttgccctggcatgtgggacaatatcacatgttggaagccagctcaagtaggtgagatggtccttgtaagctgccctgaggtcttccggatcttcaacccggaccaagtctggatgacagaaaccataggagattctggttttgccgatagtaattccttggagatcacagacatgggggtcgtgggccggaactgcacagaggacggctggtcggagcccttcccccactacttcgatgcttgtgggtttgatgattatgagcctgagtctggagatcaggattattactacctgtcggtgaaggctctctacacagtcggctacagcacttccctcgccaccctcactactgccatggtcatcttgtgccgcttccggaagctgcattgcactcgcaacttcatccacatgaacctgtttgtatccttcatgctgagggctatctccgtcttcatcaaggactggatcttgtacgccgagcaggacagcagtcactgcttcgtttccaccgtggagtgcaaagctgtcatggttttcttccactactgcgtggtgtccaactacttctggctgttcattgaaggcctgtacctctttacactgctggtggagaccttcttccctgagaggagatatttctactggtacaccatcatcggctgggggacacctactgtgtgtgtaacagtgtgggctgtgctgaggctctattttgatgatgcaggatgctgggatatgaatgacagcacagctctgtggtgggtgatcaaaggccccgtggttggctctataatggttaactttgtgcttttcatcggcatcatcatcatccttgtacagaagctgcagtccccagacatgggaggcaacgagtccagcatctacttctgcgtgcagaaatgctactgcaagccacagcgggctcagcagcactcttgcaagatgtcagaactatccaccattactctacggctggcccgctccaccctactgctcatcccactcttcggaatccactacacagtattcgccttctctccagagaacgtcagcaagagggaaagacttgtgtttgagcttgggctgggctccttccagggctttgtggtggctgtactctactgcttcctgaatggggaggtacaggcagagattaagaggaaatggaggagctggaaggtgaaccgttacttcactatggacttcaagcaccggcacccgtccctggccagcagtggagtaaatgggggaacccagctgtccatcctgagcaagagcagctcccagctccgcatgtccagcctcccggccgacaacttggccacctgaggcctgtctcctcctccttctgcacaggctggggctgcgggccagtgcctgagcatgtttgtgcctctcccctctccttgggcaggccctgggtaggaagctgggctcctcccaaaggaagagagagatagggataggctgatatt

SEQ ID NO: 3529 - DNA, 633 bp, Rattus norvegicus
  misc_feature (511)..(511): n is a, c, g, or t
  misc_feature (531)..(531): n is a, c, g, or t
  misc_feature (589)..(589): n is a, c, g, or t
  misc_feature (633)..(633): n is a, c, g, or t
caaatgacttagatttaatcactggaagcaaactgaatggaagcttacaacagaagagatacacgtcagtgctttttgcaaaccgagatgggacagactgggggctgcccctcaacctgatcctttgcaaacaaagatgtccacagtgttcctggaactctggctcaggaaaggggagactgctggttctgtggttcagtcaccttgcttagcactcactcctggccagcatctggagcaccggtttgccggttctggtcatcacccttcttcttgtggccagagacaatgtcatcaatccgcagaagcagaactgcagtctccactgctgttttgtatgtttgtagcttcacagccaatggctcccaaatacccagctctttcatgtccactaaggtaccagtctcaccattcacaccccaggtctcacaattctcctgtgtgtgcttggcccgaagggaggtaagcagacgaatggtactggccccacagttctggatcaaggtccganggatgacctctaaagcctgngccacagccctatatggccattgttccacaccagtcatgggcttagatttgtctgtcnaagcatgggccacagccatctcagaggctcccacacaagcacan

SEQ ID NO: 3530 - DNA, 626 bp, Rattus norvegicus
acaaactatctgaacataactttattcacattaaaaaaatcatctgtcatttgatttgacctacacatacccctctcatctcacccacttctcaagcctctcagcacgtcacccacaccttcaccactagaatctacaagtaattagatctaacacctacacagagcgtagaaagtcctctcccaaggggttcttcacttccctgaaaattcctcaaaaaagaaaaaaaaaaaaacaaacaaaacctcttcactcatcccttccacttcactttcacggtcaccatcatcagcaagacggactcccctcagtccaagcagagtcagaagaaaatcggccctcggcaggcagccgtcttgatgctacacccaggagtccggggacccagggtactgttcggctctataagaaggtcgtttagtggagtaaaagtctacgtaatttgtggttgatttcagtccatactgcgttgagtaatcagtagaagctgggaagtgaactcggtcatcaccgtaagggtcttcatagctgcgaggagactgcaggtacagtctgtaagcatccaaggtcttcctggtggagtcatcttgatagtacagctgttggtgctgtaaccgtctgttttg

SEQ ID NO: 3531 - DNA, 556 bp, Rattus norvegicus
  misc_feature (375)..(376): n is a, c, g, or t
  misc_feature (380)..(381): n is a, c, g, or t
tttttttttttttttttgatgtttgcccaaaatttattttataagaaaaacttttttggtttaaaaaaaaaaaaaagaaaggaataaaggcatgaaagggattgaggcccgggaccagactgggaagcccaggagggagaggcctgatggtaggcattcctatactgctctaagcctgggtacctgcttgaggagtgaagcaggaaaccccagagcaggggtaggggctttcctcagtgaagacagagacccataacctggcctggggttcccagagtaccgagtaagtggcccaaagcctctgaactcagctgtgggaatgcctttgctgggcctcattgaggcctccaggacctcagtgccagggaagatgannacannacagaaatagacaaagtggcaggaggaggatgacagaatcagtggttaggggttctgggcagcccatggctcagtccctgcaagctgacggtactgaggatgggcctgtgaggtatgggccccatcacatggtgctgacataatatgcaaaggcctgggttgagtcccatgagtc

SEQ ID NO: 3532 - DNA, 504 bp, Rattus norvegicus
tttttttttttttttttcatattgcacagtgtttctttaattgagagacaactgacctcataagcagcactccctcctgctgggtacaactgaccaccacctcctgccacagcagggacccaggggtgagggttaaatctcaaaggctgaggggaatgggagaggccaggccatgtgcatatgtgcatgcttaggagccagaggaagctgtggtgggcagtgagttaatattggggaacaaaggtgttgcttctttgcttccccttcccctgtggaacaactggctatgttcctcagagactctcaccaaggccaccatggtggctaccactgcttctacttcttataatttccaaattggatggccaggcggtcagtgacgcagcggaaggtggcaggctgcacttcccagtagggcacagggttgttgaagaggctgatgccattatagtaggccctcttgactccaaagcccatggggcagaaatcgttgatgcccacctt

SEQ ID NO: 3533 - DNA, 644 bp, Rattus norvegicus
aaagagagaaatggtttatttggtaacaaggaataaaaagaaattctttaattcttctctcttgtggtggttggactgcagtgtccagtgggcgggcaccacacaggaacccctccctccctcagaccagatctgctgctcaagcgcaaaggccatagttgcatagtcttctagacagaggggctggcctctgtgctttctggggtctcggtggctgttgcagtttccttcttgtcttcaggcttcatggcaggaaagagaagtacttccttgatattgttggagtctgtgagaaacatggtgactcggtcgatacccatgccccagccagctgttgggggcagcccgtactccagggcagtacagaagttctcatctatgaacatggcctcatcgtcaccagcagccttggccttggcctgttcttcaaacagttgtctctgccgcacggggtcgttcagctcagtgtacgcattgcatatttccttcttcatgacaaacagctcgaagcgctcagttagaccctctttgcaacggtgccatttggccagaggactcatgatctgtgggtgatcacagatgaatgtaaggctgatgcatgtcacttcgaggaactctcccacaagcttatcaaggagcctggc

SEQ ID NO: 3534 - DNA, 562 bp, Rattus norvegicus
cgagagcaggagaggatttattaggggctcagtcatcatgtggaagcccaagagcattgagcagaggaagctgtggcgggaacagggcttgtcatggtagggccttgccagagcctgacactgattccgtgacctggtgcacccagtgcagatacgggggattcccctgctccacgggcagtgcgatcacctcggcaacttcataagggtgcacagatcggacaaactctgtcagagcagggaccagggagctttgtgttttaatcatcatcagcacctcactatcttcctcgatctttcctttccattcatagatggatgtgatctgcgggatgaggttgacgcaggctgccaggcgcttctctaccactgccctggcaatctccttggcgactttttcgttcggacaagtgacaaaggctgcagagactgatcctggaacgtagccggagcccgaggccggcgacggctgggacggagggcttccagaagccatggacagcagagctcggggtagcaataaaaggcgggaagccaccggcagtaaggcaggcatgcaaag

SEQ ID NO: 3535 - DNA, 654 bp, Rattus norvegicus
ccaataagtacaatatttattaaacatatcttcagttttgttacatagtgtgcaacaaattacaatattctgcagccacaaattatatgcagagtatgaagaaactattaatcagatagtgtaatctttccatttataactctaccaggaagaactagcaaatcagatcttacatataacgtctcactaaactttatgcatggaaactgacagacactggttgtgctgtttgatacaaaatggctgaacttcatcttcagaagactaaacccaacatctaaacatgccaatataaacatcaaaacaaaatatattctaaccaaccacgggaaacgatctggtatcaggaaagcaacaaggattacacacattattttataaaccagcacacaaaggtttaaaacagttctgaaaatgaagttagctgtcttgagtcaagggaataaaaaaaaaagtcagtattgaccatttacaatctctgaccttgtggaaacggtaagaatctgttgtagtgcagctacatacagtacaattcaggcaatttgttttttcacttgggttcagattgcgaattcattgctgtgagaaaaggacggaggcggattttagcagcagcctccacctgactgcttgactggagtgctctggatttta

SEQ ID NO: 3536 - DNA, 603 bp, Rattus norvegicus
gcagatttagaaatttgagatttttaataaccacaaaagaaatcctttcacacctaatgattattaacagaatgtagtggtgtattatctaaacagaaatcgtgctgatgtgccataataaactattagtaaaaaaatacactttagggcacagcattgtatcacaaattttacagaagggatactttgcaagaatttaatcaaactagagtaactgtatcttttaaatgcagcacttaaaaatgtaacaactctgtgcattctttttcttaaaaaaatgaccttatatgtgtagaaatgctgctttattgctgcagaggtcaaagttcaaggctcaagaggtacaggagagaatacaaaggtagccttagaaactcggttctgtttatgtataaaaaggtaaagtttataaaagttaatttacaaaccaagaacaaaagtggtatgcacgcattatgtacatgcgtcctgaacacatcaaacatctcagatgcatagcccaaagaacagaagaccaccaaccactctcccttgtcaaaaaaaaatattttaagtcacaccattaatttcttccaggtgatttacacatttccgaaaccatca

SEQ ID NO: 3537 - DNA, 590 bp, Rattus norvegicus
  misc_feature (485)..(485): n is a, c, g, or t
agtataaaaaaatccacaagttaagtgcaccacagtgtagagagacatacaacgctgaacttccataacagtcgatggtacagtcaaacatcacatgtacagaacacaagatttagatgaactgaaatatcaggtaaaataaaataaaatccaatctcagaaaacaaatcaaaatattaaggatccctgaagtattaatcctactgagatctcactggactcaagtcatagtatagtgaggcattcgcgtgaccctactgattcacctcaggaaactcctgggacccaagtggctgcatgcaacactcaggaagtgataactagtttatctaaaactcccttaattaggctttcaagccaagcttttgatatgcatcttcctccctgcctgtcatttttaagttttcctaggacagtttgcactgagagctgttgttaagttgggtttctggcaccacagctagtctgggttcatggggatgcanagatggcttatgaggtgggtccaaagggtgccttcaccttgcctggagatatacaaaaccccagaaatggagtctctgctcgggacacacagggggcttcagagg

SEQ ID NO: 3538 - DNA, 597 bp, Rattus norvegicus
aataagaagctataaataaataaagttttaaagctcctgggttcaagtgagacagttccagttcagacgcgtcagctgggcaggttccctgcttcccattctaggagggggtgtctgcagggttgcagggtgcctggggactgagttctcggcttgccggggaacagccctgtaggcagagtcctcggagctggagaagcaccctgttctgagatgccgcgagtaccaggaagctgtgtcccaaagctggtagcctgagcctcaggcaggggtggacaattgagggactgaggacgcttcaacctggcgctggcctgagatgggagggaatattttttcaaatgcagcaaagattgaggagagacccgtgcttctgtgtgagtcaggaagacggggcatacgttaaaacctattccagtatgtataggacagagcctatgttcaggtcgggtacacagaaggttgtgaaggggggaggggtaacgtggagctggggcgcttcctgacagaagtggcagcaaccagcatgacctgtaagagatccatgggttccccaaaatgccccaggctccccaaagataatatattcactccaaa

SEQ ID NO: 3539 - DNA, 649 bp, Rattus norvegicus
cggacgcttccatttttttttatttttttttttttttttttttttttttttacgattgtaaaaattttattctctttggtaacaataattccactaaaattatacaaagtacattcaatacttagagtggcaggagggcggggtgagggagttgctttgtcctggaagcatcatcattgactctgacaaagggagcccctatgggctggggaagttggggtggaggtccagttgtaaaaaataaaaatgtggactggtttaaaaaaaaaaaaaaggccacccacgaggaagcagggtgaacgtgcatgttcctggggaggctgggggctcagctggcatgctgtggctggtcccgcgctcaggcaggctccgagttggtggggggcaggtttttatgcttgaaatactgcactacctgctgaggaagctctgcaagcaccgctttagccagcgtttctttggctgcattgcggaactctcggaagggcacgaactgcacaatgtcccgggctgcctcctcgcctgtatgtgagcgcagtctacggttgtccccatctagaaactccatggctgcaaagtcagcattgcccacacccacaatgataatggacatgggcagcttggaggcctgcactacggcgtgccgtgt

SEQ ID NO: 3540 - DNA, 404 bp, Rattus norvegicus
tttttttttttttttttacagacaaacattctctttattgagctacacatgaatccgttagagaagtaggctggcagtgtcaggtgtcacagaaacctcaccgttgggaatagaaaggcttacaaagacccgtgggctttttattttatttttttttttaacgtttttcctttttttcaagttttttttcctgtatttttaatttttttgtgttttgtctttttgcctccattattgaaatggctgtgactggtcttcagccaatattgtcttaaaagtgaaaccgtgaacaggtctggggttagatactaggcaagtagaaatgacgtaggactgatcatgaaaactggctttaatgtaaacactacattccatcttttaattttttttcctcgtgccgaatt

SEQ ID NO: 3541 - DNA, 387 bp, Rattus norvegicus
cggccgcaaaggtttttttgattttacacacaagaaaaaaaaattcatggaacatctagaccctgatgaagaagaggaggaaggagaggtgtcggctagcacaaatgctcggaacaaagcaattacctcgctgcttggaggaggcagccctaaaaataacccagcagcagacacagaagatgaggagagtgatggggaggatagaggaggaggcacttcagggtcattgagaaggtcaaaacgaaattcagactctacggagttggcagcacagatgaatgaaagtgttgacgtcatggatgtcatcgctatttgctgtccaaagtacaaagaccgaccacagattgcaagagtagtgcagagaaccagcagtggcgtcagtgttca

SEQ ID NO: 3542 - DNA, 1630 bp, Rattus norvegicus
gttaagtgttggtcatttgtctttgggagcctgggcagcagcaaggcagccatggagctgctgaatgggactggcctgtggtccatggccatattcacagtcatcttcatattactggtggacctgatgcaccggcgccatcgctggacttctcgctaccctccaggccctgtgccgtggcctgtgctgggcaacctgctgcaggtggacctcagtaacatgccatacagcctctacaagcttcaacaccgctatggtgacgtgttcagcctgcagaagggttggaagcccatggtcattgtcaacagactgaaagcggtgcaggaagtgctggtgactcatggagaggacactgctgaccgccctccagtgcccatctttaagtgcctgggtgtgaagcccagatcccaaggtgtgatccttgcatcttacgggcctgagtggcgagagcagaggcgattctctgtgtccaccctgcgcaccttcggcatgggcaagaaatccctggaggagtgggtgaccaaggaggccggccacctctgtgatgccttcactgcccaggctgggcagtccatcaatcccaaggccatgctgaacaaagccttgtgtaatgtgatcgcatccctcatttttgcccgtcgctttgaatatgaagacccttacctcatcaggatggtgaaactagtggaagagagtttgacagaagtctctggtttcattcctgaggttcttaacacgttcccagcactgctgcgcatcccagggctggctgacaaggtcttccaaggtcagaagaccttcatggccttactggataacctgctggctgagaacaggaccacctgggaccctgcccagccaccccgaaatctgactgatgccttcctggctgaggtggagaaggccaaggggaatcctgagagcagctttaatgatgagaacctacgcatggtggtagttgacctgttcactgcagggatggtgaccaccgccaccacactgacctgggccctactgctcatgattctatacccggatgtgcagcgcagagtccaacaagagattgatgaggtcatagggcaggtgcggtgtccagagatgacagaccaggcccacatgccctacaccaatgctgtcatccatgaggtacagcgctttggggacattgctccattgaatttgccacgcatcacgagttgtgacattgaagtgcaggacttcgtcatccccaaggggacgaccctcatcatcaacctgtcgtccgtgctgaaggatgagaccgtctgggagaagccccaccgcttccatccagaacacttcctggatgcccagggcaactttgtgaagcatgaggccttcatgccattctcagcaggccgcagagcatgccttggggagcccctggcccgcatggagctcttcctcttcttcacctgcctcctgcagcgcttcagcttctccgtgcccgtcggacagccccggcccagcacccatggcttctttgcttttccagttgcccccttgccctaccagctctgtgctgtggtacgggagcaaggactctaattccagtccagctctacagggcaagctgagccacgtttaataaaccagtcttttggcgcgccta

SEQ ID NO: 3543 - DNA, 1628 bp, Rattus norvegicus
ctgtattgagtgttggccagtggtctttggtagcctgggcagcagcggggcagacatggagctgctggctgggactggcctgtggcccatggccatattcacagtcatcttcatattactggtggacctgatgcaccggcgccagcgctggacttctcgctaccctccaggccctgtgccgtggcctgtgctgggcaacctgctgcaggtggacctctgtaacatgccatacagcatgtacaagcttcaaaaccgctatggtgacgtgttcagcctacagatgggttggaagccagtggtggtgatcaatggactgaaggcagtgcaggaactgctggtgacctgtggagaggacactgctgaccgccctgaaatgcccatctttcaacatataggctatgggcacaaagctaaaggtgtggtgcttgcaccttacgggcctgagtggcgagagcagaggcgattctctgtgtccaccctgcgcaacttcggtgtgggcaagaaatccctggagcagtgggtgacagacgaggccagccacctctgtgatgccctcaccgctgaggcagggcggcccctcgatccttacaccctcctgaacaaggctgtgtgcaatgtaattgcatctctcatttatgcccgccgcttcgactatggagaccctgatttcatcaaggtgctaaaaatattgaaagaaagcatgggagagcaaactggcttgtttcctgaggttttgaacatgttcccagttctcctgcgcatcccagggttagctgacaaagtcttccctgggcaaaagacatttctcaccatggtggataacctggtgactgagcacaagaagacttgggaccctgaccagccacctcgagacctgactgatgcctttctggctgagatagagaaggccaaggggaaccctgagagtagtttcaatgatgcaaatctacgtctggtggtcaatgacctgtttggtgctgggatggtgactacttctatcactctaacctgggccctgctgctcatgatcctgcatccggatgtgcagtgccgagtacaacaggaaatcgatgaggtcatagggcaggtgcggcatccagagatggcagaccaggcccacatgccgttcaccaatgctgtcatccatgaggtgcagcgctttgcagacattgtcccaatgaatttgccacacaagacttctcgtgacattgaagtgcagggcttccttatccctaaggggacaaccctcatccccaacctgtcctcagtgctgaaggatgagactgtctgggagaagcccctccgattccaccctgaacacttcctggatgcccagggcaactttgtgaagcatgaggccttcatgccattctcagcaggccgcagagcatgcctgggggagcccctggcccgcatggagctcttcctcttcttcacctgcctcctgcaacgcttcagcttctccgtgcccactggacagccccggcccagcgactatggtgtctttgcctttctccttagcccttccccctaccagctctgtgcattcaaacgttagaaggaaagaaattctagtccagcctctaccttagtgtcatacacagattaaaacagttctgtggctgcca

SEQ ID NO: 3544 - DNA, 444 bp, Rattus norvegicus
aacataagatcaggctttggatgagtgttcttttctggttggcatatccacaggaaccccaacagcgagggtctaccctactggcctgtgttggaccacgacgagcagtacctgcagttggacacccagcctgctgtggaccgagccctgaaggccagaaggctgcagttctggaccaagactctgccccagaagatccaggagctaaatggagctcagaaaaaccatgcagagctgtagtgtctggtgaaaggaacagagtgtgggagtgagggcaggtgggatcattctgagtttcaaagtctaattttctgttccaacacgcagaatcctttccaaccccaatattttccctttctgacatgaatgagaagccctccgtgtgttactctttattcttctgggcaaaatttaattggactcaataaaagttcccataatagt

SEQ ID NO: 3545 - DNA, 2207 bp, Rattus norvegicus
cattttagaggcactatttctagtacaatgggtatgaagctgtgatttgagccgcaaatttcagagcattggccatagaacagacctggtcggtttgatgtcactgtagcttggtttaggcggccggggattgcgtcggtttttaaccctagtgaagggacggctcatgagtgcaggacgtcttcggatgagattagtatacgaattggaagttctattggtaagactacccgattatcaacttctaatagacgaagctcacctggttttaggtcgggacagatggaggcatcaaggagcagagggcaggaagacaggacgctttgagcacacggggctttgtgtctattccactgacaacctcctcactgccacccaccggttccatggagataatatttggccggaataagaaagaacagctggagccattacgggccacagtgacaggcagcattccagcatggctgcaggggaccctgctccgaaacgggcctgggatgcacacagtgggagacagcaagtacaaccattggtttgatggcctggcccttctccacagtttctccatcagagatggggaggtcttctacaggagcaaatacctgcagagcgacacctacaacgccaacatcgaggccaatagaatcgtggtgtctgagttcggaacaatggcctacccagacccctgcaaaaacatcttttccaaagctttctcctacttgtcccacaccatccccgacttcacagacaactgcctgattaacatcatgaaatgtggagaagacttctatgccaccacagagaccaactacatcaggaaaatcgacccccagactctagagaccttggagaaggttgattaccggaagtatgtggctgtaaacctggctacctcacaccctcattacgacgaggctggaaatgtccttaacatgggtacctccatcgcggacaaaggagggacaaaatacgtgatgtttaagatccccgccacagcaccaggcagcaagaagaaagggaagaaccccttgaagcactcagaagttttctgctccatcccgtcccgctcgctgctctcccccagttactaccacagctttggagtcacggagaactatgtggtgtttctggagcagccttttaagctggatatcctcaagatggccaccgcatacatgaggggtgtgagctgggcttcctgtatgacattctgcaaggaggacaagacttacattcatatcatcgaccagaagaccagaaagcctgtgccaaccaaattctacacagaccccatggtggtcttccaccatgttaatgcctatgaggaggacggctgtgtgctgtttgatgtcatcgcctatgaggacaacagtctctatcagctcttctacctggccaacctgaacaaggacttcgaggagaagtccaggctgacctcagtgcctaccctcaggaggtttgctgtgcccctccacgtggacaaggatgcagaagtgggctcgaatttagtcaaggtgtcatctacaacagcaactgccctgaaggagaaggacgaccatgtctactgccagcctgaggtcctctacgaaggcctagagctccctcggataaattatgctcacaacgggaagccatatcgctacatctttgctgctgaagtacaatggagtccagtcccaaccaagatactaaaatatgacgttctcaccaagtcctccttaaagtggtccgaggagagctgctggcctgcagagcctctgtttgtccccacaccgggtgcgaaggatgaggatgatggagtcatcttatcagccatcatctctacagatccccaaaagctgccctttttacttattctggatgcgaaaagttttacggaattggctcgcgcctctgttgatgtggacatgcacctggacctgcatggtttatttattccggatgcaggctggaatgcagtgaagcagactccagccaaaacgcaagaggatgaaaattcagatcatcccacaggtctgacagcaccaggattgggccatggtgaaaatgacttcacggcaggtcatggcggcaagagcctttaatcctagcactcgaggcagaggcaagcagatctctgagttcaaggccagcctggtctacaacacaagttccaggacagccagggatacacagagaaatcctatcttgaaaacaaagcaaag

SEQ ID NO: 3546 - DNA, 2444 bp, Rattus norvegicus
gatggaagcatttcttaccctcccttacaggcacaagggcttgtatttcaaggattctgaatctagcccccctagcttttctcattcgagtattggcattccccatgcattcgtcctcctcatgagttgcatttcagtgtgggtggttaggactctgctctcagaagcatcttagcaggttccaggtgctgagcagtgaggggcattgaccttcatgtgaactctctgggatttacttctccctttcagtcttcctgtgggtatgcaaagctgaccatattctacatgcagatgatactacttaagaacgctgatgttttctttgtaatgctctgtagtcttcccatatgtcccatgtaattttttgtaattaacagcttgctggtgaaaaggacctctcgaagtgttggatacaggccagactgtaagtagataccctttggccaatcatttatccatcttgtaactgaaacagttaactatgaagtggcttagagttaaccgtagagaacatttgtaaggtacatttgcaactattaatttgaaagtattattattttctctaaagacgaaattgtgattatttacttacagttgttggatttgaaattccagacaagtttgttgttggatatgcccttgactataatgagcacttcagggatttgaatgtaagtaatgcttctcttttttctcgctctcatttttcaaaaacccacataaaaatttaggaaagggaagaattgttttctccttccagcacctcgtaatttgaccagactgatggttcccattagtcacataaagctgtagtcaagtacagatgtccttagaactggaacttggccaggctagggtgacactccttgctggctgaaatagttgaacagctttaatatataataactgtctcattgttatttcacatgataaatatagtcataagtaagaaataaatgattcagtttgaattttgtaattgactttgcttcagatatcagtgttcctgctcagagggaaggggcccctcgggcgagttttccgagcatggcccaggagcagttagaaagactatgtggacagtattatctaaagtatgctttttattttacttacctgggcccctattttgattccagctttatgtttcttaaagttaacatagtaagacaaagaaaaggcaaagtaatggactacaattttctgctttgttttcaaagtatgttctcttcaattgctggtccaaaataccttgcttggtaggaacccaggcggtgtaggggattctctaatgctggtgttgtctcttcagaatccatttttctaatgtgaatgtcttattctatagcatgtttgtgtcatcagcgaaagtggaaaagccaagtacaaagcctaaaagacagcggcaagttgaatctacaagagtcctgttgatgtggccagtaaagaactagcagacgttctagtcctgtggccatctacttagtaaagcttttgcatgaaccttctatgaattttatggtttttatttttagaaatgtctgttgctgcgtcccttttgatttgcactatgagcctgtaggcagcctaccgtcaggtagattgtcacttcccttgtgagacagacagatctcttaaattaccactgttaaataataatactgagattgtatctgtaagaaggatttaaaaagaagctgtattagttttttaattggtattttaatttttatatattcaggagagaaagatgtgatattgttaatttagaatagtctaaagcgctcagtttcatatcagtaacagcatctaagaggtttccccagtggaataaacatgtttcagcagtgtgaatcgttgtcaaccgttccttttaaatgcaaataaatacattcgtaaaaatttacaaattttgagttttttttccttaaaactaaggactatctctttaaaggaattctccatgcctatcatttctctacaaattaatttagtatacttttccatgggtcccctttgcatgttttagtagctaatttagttttaatactgggttagcattgcaagtagtggtatgtggtaaaatggtaaagcgggaaagcccttacctacctgaaacaatcaattacatacactcagcatgatttactatgctttataagagaacatggctttctcttagctttctgaggttgttcagactgcagcagtctgacctacagtttgttttcagacatgttcctggtaccttttttttttctttttttcagagctggggaccaaacccagggccttgctcttgctaggcaagcgctctaccactgagctaaatcccgtcctgttacctttttggtgtggataaagctttattgagcaaagaacaataacagtaaaacagttgttttgtcttttcagagtaagagaaataccagcccggccgtcgg

SEQ ID NO: 3547 - DNA, 2622 bp, Rattus norvegicus
ctggcaggcaccatggtcctgacccagactagctcacactcgctgcggtatttctacaccgccctgtcccggcccggcctcggggagcccaggttcattgtcgttggctacgtggacgacacgcagttcgtgcgctatgacagcgatgtggagaatccgaggatggagccacgggcgcggtggatggagcaggaggagccggcatattgggagcgggagactcggaaagccagggacaccgggaggaacttcaaagtgaatctgaggaccctgctccgctactacaatcagagtgacgacgaatctcacacgctgcagtggatgtacggctgcgacgtggggcccgatgggcacctgctccgcggttattgtcaggaggcttatgacggccgggattatatctccttgaacgaggacctgcgctcctggaccgcgactgacatggcctcacaggcctctaagatcaagtcagaggaagttggtgaggcccatcaccagagggcctacctgcaaggtccttgcgtggagtggctccacacatacctacatctgggaaaggagacgctgctgcgctcagaccccccaaaggcacatgtgacccttcaccccagacctgaaggtgatgtcaccctgaggtgctgggccctgggcttctaccctgctgacatcaccttgacctggcaattgaatggggaggacctgacccaggacatggagcttgtggagaccaggcctgcaggggatggaaccttccagaagtgggcagctgtggtggtgccttctggggaggagctaaagtacacatgccatgtggagcatgagggactgcctgaacctctcgccctgagatgggagccttctccattcaccgactccagcatgccagtgattgttgtccttggagctgtggccatcattggagctgtggccatcattggagctgtggccatcattggagctgttgtgaggaggaggaagagaaacacaggtgaaaaaggcagctatgctcatgttctaggcagcaaggctttccagatctctgactggcctcagaaggcatgaaaagacagttgcctcgtggggctgagcgacaagttctgactaaacatctgagggagctgcttcccctgaggacaatgtgaagaactggcaatcccagaccttcttgcctccctggacacctgacttcacaacagaaaataatctgactctgggctgggtgtttcctattgcttttatctgcactgagtggaaatgcgatttccaacagtgtaacgcagcaccgttgtgtggtggtagtgacattgcacacaggtttgtgagctgggggtgtgatgtgcttttcttactgtaggcagaacaagctagaagtccaccattcctcttatggtcattgttttaaaacaaaacaaatgctggagagatggctcagtgttaagagcactgacttctcttacagaggtcctggttcaaatcccagcaaccacatggtggctcacaaccatatgtaatgagatctgatgctctcttctgatgtgtctgaacacagctatatatgataaataaatctaaaaaatattttttaaatggccagacagatggcatgagtagggcacaccatggtcaactctgctgtctgtgtatctctagacatccagtgctctttagagtccacacaaggtcattaaaaggactggggtggatggtgactggagagatagctcagtggttaagagtgtttgctgcttcatgggtggtggtggtggcacaagcctttaatccaaacactcaggaggcagaggcaggtggatctctgagttcaaggccagcctggcctataaggcaagttccaagatagccaaggatacacagagaaaccctgtttgaaaaaacccaagcctagacctggagagttggctcaatggttaagagcactgactgcttttccagaggtcctgagttcaaggcccagcaaaggcacatggtggctcacaaccatctgtaatgggatctgatgcacttttctggtgtgtctaaagcgacatggtaactcgctgtctgtaactagtaggcaaacagttcatatctcacacagacatgaatgcagatagagcaccaacacatataaaattaaatctttaaaaaatgaaaggtctgggggctggatgaatggtgtttgtctttgaaatgtctgacagtgctgtgactcacagcctgcatagcagctcctattgcctggtgttcaccatctgtcttggttataaaaaggtttcgtaatgtgaaacccttcaaatgagctggtgcccttctcaccagtttgcatcttgacaggattcctgaagggcttatattctgggccttcccattgtggaggattaggttttacacaacgtatcctctctagcattgcaatttccctgagccttaaaatcccttcatcgacgctgagccaagggatatctggcatctgcaactccttttccgtaggccgtcatttgatgaacgcttcagccaaccattcaaacaaactttctgacactttttttaactgtgtggccttccatattaaacccagaatctccactcaaagggcccatgtcaataaactcagcctgatctatt

SEQ ID NO: 3548 - DNA, 2225 bp, Rattus norvegicus
tttcagggatttttgcgattcctctctgtagacttctacttgttctctaagggagttcttcatgtctttcttgaagtcatccagcatcatgatcaaatatgattttgaaactagatcttgcttttctggtgtgtttggatattccatgtttgttttggtgggagaattgggctccgatgatggcatgtagtcttggtttctgttgcttggtttcctgcgcttgcctctcgccatcagattatctctagtgttactttgttctgctatttctgacagtggctagactgtcctataagcctgtgtgtcaggagtgctgtagaccttttttcctctctttcagtcagttatgggacagagtgttctgcttttgggcgtgtagtttttcctctctacaggtcttcagctgttcctgtgggcctgtgtcttgagttcaccaggcagctttcttgcagcagaaaatttggtcatacctgtgatcctgaggctcaagttcgctcgtggggtgctgtccaggggctctctgcagcgggcacaaccaggaagacctgtgcggccccttccggagcttcagtgcaccagggttccagatggcctttggcgttttcctctggcgtccgagatgtatgtacagagagcagtctcttctggtttcccaggcttgtctgcctctctgaaggttcagctctccctcccacgggatttgggtgcagagaactgtttatccggtctgtttctttcaggttccggtggtgtctcaggcaggtgtcgttcctgcgccctcccccatgggaccagaggccttatacagtttcctcttgggccagggatgtgggcaggggtgagcagtgttggtggtctcttccgtctgcagcctcaggagtgccacctgaccaggcggttgggtctctctctgagaatttcatttttaaatcattcattaaaatgtcatgacttgatgtcctgctgtccgtctcacgccctcagctgtaacagtgccgagggagtcactgaagaagagactgaatgaccagagtatgggcagcacagacaactcaacaaaaatgtcttcagaggtggagactgcggaggccgtagatgagtcagagaagaactctatggcatcagagaaggaaaaccattccaaaatagcagacttttctgatcttctgaaggaagggacaaaggaagcagatgaccgggcagaaaatacccagtttgtcaaagacttcttgaaaggaaacattaagaaggagctatttaagctggccaccactgcactttcatactcagcccctgaggaggaaatggattcactgaccaaggacatggagtacttctttggtgaaaactgggaggaaaaagtgaagtgctctgaagctgcccagacgtatgtggatcagattcactatgtagggcaaaatgagccagagcatctggtggcccatacttactctacttacatggggggaaacctttcaggggaccaggtactgaagaaggagacccagccggtccccttcactagggaagggactcagttctacctgtttgagcatgtagacaatgctaagcaattcaagctattctactgcgctagattgaatgccttggacctgaatttgaagaccaaagagaggattgtggaggaagccaccaaagcctttgaatataatatgcagatattcagtgaactggaccaggcaggctccataccagtaagagaaaccctaaagaatgggctctcaatacttgatgggaagggaggtgtatgcaaatgtccctttaatgctgctcagccagacaaaggtaccctgggaggcagcaactgccctttccagatgtccatggccttgctgaggaagcctaacttgcagctcattctagttgccagtatggccttggtagctggacttttagcctggtactacatgtgaagggcctgtcaagttgtttgcatcctatctcaacatcctaccacttgttccttccccacctccacctctgcctagaactaccacctcaggtgacatttttaatgttgggtttgagaaaatgagcaaccaataaaagacagaccctagaaaaaagtcatgacttaagtggcacggggacacctaaagtcacactttgtgcttcagacatactttctttctctatttcaacactgaattcgggaagtaacctactactattaataataaatgctacacaatgcataataaaaa

SEQ ID NO: 3549 - DNA, 619 bp, Rattus norvegicus
cactgacgccgccatgatggcggaggagctgaagaaggagcaggacaccagcgcccatctggagcggatgaagaagaacctggagcagacagtgaaggacctgcagcaccgtctggacgaggctgagcagctggcgctgaagggtggcaagaagcagatccagaaactggaggccagggtgcgggagttggaaagcgagctggatgcagagcagaagagaggagctgaagctctgaagggggcccacaaatatgagcgcaaagtcaaagagatgacttaccaggccgaggaggaccgcaagaacatcctccgactccaggacctggtagacaagctgcaggccaaagtgaagtcctacaagaggcaggcagaagaggctgaggagcaagccaacacacagctatccaggtgccggagggtccagcatgaactagaggaggctgaggagagggcagatatcgctgagtctcaagtcaacaagctaagggccaagagccgtgatgtgggaggccagaagatggaagaatgaggctctcccgaggctcgttgccatgggccacctccaggagagcagagggagactgggaaaaataaaccctcctgcatactcataaaaaaa

SEQ ID NO: 3550 - DNA, 3339 bp, Rattus norvegicus
ctagtggatcccccgggctgcaggaattctgcggccgcaacaccgcactgtggtggacagtgagggccggagagagaccacagtgacccatcaagaagcccatgacagttccagaagtgatccagatcctccaagatcttcagctttggatgatcccttttccatcctggacctgcttctaggacgttggtttcggtcccgatagctttcttgaacttcagaggccttcaggtccttcccaccccctccctccctgttgcccattgccaataagcatagcttttgctgtcatcctggggtcttaaatgtgtggaacccccccagggacctggtgtggtgaaatttgaacccaccgccttagcccaaaggccgagtaacctggctgcttgagtgtcgtggaagacgtgagcgaaatgatcagcgaactcattttttatcagactcgctgaagctggcttttgcgtttttctacacgtacactaattttatggaatagttaaagtgctatattctccgcgcaaccttttcaaattccaaatgtttgaacgttttggtgtcagcgcgagtgaaatcattttaccgacaagaactaactgaattgtctgcctcgttgagttgcctccggaaaagatctcgggggtggaaaagcaactgcaaaataacagacggagaaaattccttggaagttatttctgtagcataagagcagaaacttaagagcaagttttcattgggcaaaatgggggaacaacctatcttcagcactcgagctcatgtcttccagatcgacccaaacacaaagaagaactgggtacccaccagcaagcatgcagttactgtgtcttatttctatgacagcacaaggaatgtgtataggataatcagtctagacggctcaaaggcaataataaatagcaccatcactccaaacatgacatttactaaaacatctcaaaagtttggccaatgggctgatagccgggcaaacactgtttatggactgggattctcctctgagcatcatctctcaaaatttgcagaaaagtttcaggaatttaaagaagctgctcggctggcaaaggagaagtcgcaggagaagatggaactgaccagtaccccttcacaggaatcagcaggaggagatcttcagtctcctttaacaccagaaagtatcaatgggacagatgatgagagaacacccgatgtgacacagaactcagagccaagggctgagccagctcagaatgcattgccattttcacatagttcagccatcagcaaacactgggaggctgaactagccacgctcaaggggaacaatgccaagctcaccgcagcgctgctggagtccactgccaacgtgaagcagtggaagcaacagctggctgcctaccaggaggaggcagagcggctgcacaagcgggtcacggagctggaatgtgttagtagtcaagcaaacgcggtgcacagccacaagacagagctgagtcagacagtgcaggagctggaagagaccctaaaagtaaaggaagaggaaatagaaagattaaaacaagaaattgataacgccagagaacttcaagaacagagggactctttgactcagaaactacaggaagttgagattcgaaataaagacctggaggggcagctgtcggagctggagcagcgcctggagaagagccagagcgagcaggacgctttccgcagtaacctgaagactctcctagagattctggacgggaaaatatttgaactaacagaattgcgggataatttggccaagctactagaatgcagctaaagaaagtgaaatttcagtgccaatagatgaagagatactgtctgtcttcgtaggactgtttgggctctgtaccaagattgcacaaaattttttgaatatcattcctccagaaggagggtgttttgaaaattggaattgtatatttcagtataaattttagaatttagcttatagctagttgggggaaaaaaagacatgaaaaacttgaaccacaaattacctccatgtacattggccatagttacaatgggagaattaacaatgtctgggtcccttctcctttttctgttcaacacagtgaagattatctgctttttaaatttatttacgatatctacagctgtgttttgtgtaaaaacttagtaatggaagccctgtctttgttgttatctgaataatttctcaggatatttttttgctgctgagaaagggccattaccaattaatccttgccaggagttggggagctatgtctctaattggaatcactataactgggtgtctggagttcttcccttttcgtactgagagtgttctcactctagtgactcctctggtacactccgtgttctccaatcttgtctgttgtactttacttttccatattgactccatgtatttatgagaagatattatctcccattttattatacattttgaagccaactaaacaaaggcagctgagtccttcagatatttttctttttaaatttatagtaaatttgacacagaactgaaattcagcagtccgtctttgacggtttagtctagcaatgttaaggatatttagagaaaatatgcagttacgtttatttatatatttggcaagaaattttttctggatgatcaatgcttttcaatttatgataaataatggttagggggcgctgtttattatagataattttaaggtatatagctgttttcaaggaggtccacttccgtctagcagccaagcagaggactgtatctaaatcgtgatcgtggcagatgggtcttcatagaaaccatgtctttattcaaacttcatagggcaatattttgaactgttacctaggcatttcaaaacaggaaataccgtcaacagactcttctccaagagcaggttttactgttgttttgatgtaattttaagacatttagcaaacatgcatttctttatatgatacatttctttcacaaaacaatttaaaagtaagccacgtgctgtctgctctgcccgggtaggaattgcatcagaatacatatatcttgctgtacaatgcctgtgatattgaagagggttcttttcatgtatgcttgagtatctaactctggagtcaatgaatgcactgactttttttttgttcgtaccccaaatgattgaattgttaagtacaaattaagcagattaactcattttttcactcataaacagattcttagtactagttttgttttatatttatgtgtatgtatgtaaatacatacatattaatttatattagagtgaaaaataaattgtttgtttctaacattaaaaaaaaaaaaaaaaa

SEQ ID NO: 3551 - DNA, 1894 bp, Rattus norvegicus
ggcacgagtccaggaccatggatcccagtgtcctgctcctttttgctcttctcacaggcttcttgctactcttgatcaggggccagggaaacggatatggccatcttccaccaggaccctgtcccctgcccctcttggggaacgttttgcaaatggacagaagaggtctcctcaagtcttttattcagcttcgtgacaaatatggagatgtggttacagtgcacttgggaccaaggcccatagtcatgctgtatgggaccgagaccataagggaagctctggtggaccatgctgaggctttctctggccggggaacagttgctgtggttcagccaattatacaggactatggtatgatctttgccaatggggaacgttggaagatccttcggcgattctctctagccaccatgagagactttgggatgggaaagcgaagtgtggaggagaggataaaggaggaggcccaatgtttggtggaggaactgaagaaatacaagggagccccactggaccccaccttccacctacagtgcattacagccaacatcatctgctccattgtctttggagaacgttttgactacacagaccaccagtttctgcacctgctcgacctgttctatgagatcttgtcacttgttagctcattctccagccaggtgtttgagcttttcactggcttcctgaagtactttcctggcacccacagacacatctccaaaaacatagaggaaatcctcaacttcattggccattgtgtggagaagcacagggccacattagaccccagcactccacgagacttcatagatacctaccttctcagaatggagaaggagaaattaaaccaccacacagaattccatcaccagaacctcatgatgtctgtgctctctctcttctttgctggcactgagaccagcagcaccacacttcgctatggtttcctgctcatgctcaagtacccccatgttgcagagaaagttcaaaaggagattgatcaggtgattggctcacaccgggtcccaacccttgatgaccgcatcaaaatgccatacactgatgcagtcatccatgagattcagagattttcagatcttgtcccgattggtctgccacacagagtcaccaaagacacattgttccgagggtacctgctccccaagaacattgaggtgtaccccatcctgagttcagcactccatgatccacagtactttgaacacccggacaccttcaatcctgagcacttcctggatgccaatggggcactgaagaagaatgaagcttttctgcccttctccacaggaaagcgtgtttgtcttggtgaaggcattgcccgcaatgagttgttccttttcttcacaaccatcctccagaacttctcagtgtccagccctgtgtctcctaaggacattgatctcactcccaaggagagtggctttgccaaaatacctccaacataccagatctgcttcttatctcgccaattgggctgaggcaaacaagtatctcatctgttgagaatagctttatctttgtgcctcagagagagcagctggaatccaggcccagggtcactgctcacacccttactcctactgcagttctctaatccccagtgtgtgttcatctcctgtgaatggaatggagaaatcaatcaactgtctttcttggtgtatgaacagagacttctgaaggtcacttctcatcctgaatcacttccatcttcctcccaacagcccaagacctcacttatcatctctccacagttcatggtttatgctaattcactctgtataaggtttggattctatgtctacaatcttgcctagtatgtacggttcaaataaacagaatcaccgagtgtgtgaaaaaaaaaaaaaaaaaa

SEQ ID NO: 3552 - DNA, 2000 bp, Rattus norvegicus
acctgggtccttcatggtagccttgtcacccttacttaaacccatgggggtttaaaaataggaggcggggagtatgaagggaggatgtcctcagattccaagccttgatgggaacgtatgaggccccaagtgggaacagctggtagatacgttagttattggtagcagttacaccttagctgttccagatcctttactactcgtgtggtaacccatcaggagtggacgggaagccaagatatgagtgaccagcaagtcactcatggtggaaggctacagaagagtatggaactgaaccagctccatggttggtctcttttctccattcacccgatcagaaaggccaaactcaaaaaccaaggctgttatctcagcaagtaaccatgtgatctccagcttcctgatactcgtgaccaaggatgcaatctctgttgtttgttcttccttgtttgtttatttgtttgaggtgactcacatagtgtaggctgctctcttttctgtagctgataatggctttgaactcttgatcttcctctatctgcctccaaagtgctgagattacagatctgaaccaccacgctcagccacagaatggttttgaaacattcgctggggaggaaggaggcagatagatgctctgtggagacagtttcctggaactcactctgtcttctgccttcagaaggcatttccacagagggaaaggtggctagagataaggctttcaactccctgggttgctctttgctgagtgtgtagccacagaaagtagggtcctgcggttgttacaacccgatgcctcaagttcaatggcttaaaacagcaaactctggttatcggaagcctggaatccaactgtaagcagaaccacgcccccgaccccagccccagcccccaagagtatggggccagatcctttcttgcctcccttccttctgagctttctggcaatccttgaggctgtttggcttgtacttgtgtctcactgacctcagcttccaactccacatatctgtcttctctgtgcaactgctcaaacggccatcttgtaagaccactaattactgcatttagggcccaccctaatccagtatgatctcatcttaactaattaccttgccaagactctgtttctaaataaggtcacactctcggctccctagtgggcatgaacttggtggaagggaaaacaggacagcacagaagcctctggaagcctcagtttccttgtatgtaaaatgtattataggattagagtcctgagtaaagaggctggatagagcaggattgcataaatgtgcttttatatttttttatgtaattaatcttctgtgacattattttcttctcctattggtgctgatatttgagcccagggtctttggcatgcttgtcgatcattctacctttgggctgcacgtagcccctctttatgactttatgagtctacccatccactccctcagcatcagtctattcaagaatgatgactgggcattgtggatgctgcccagagtttggcagaggaagtaagaagtgacagttttgccctcagagttgggagcaaagaaaggtttaggaaggtgtcataaggtagcagagtttgaaggaagactacttaagaccaaggtagtagcctgtaaaatgtcctggcaggagcactgagggcagagagagggcagggcaggtaccagcaaggcaaagaatttctctgcagggcaaagggggcctttgaagggttttccagtgggagaggaaaaaaacaaaagttccaatttacatgtggaacattgaagttccattaaggaaacggcagccttgcaaactgtggacatcaccaggtgacaggagtggtgggggagggagttaggtgtggcttggaggaggtcacagataacaccaattggaagggaccagtcggaggtgggggtggctcctgaggggctggactctggttcctgaggctggtaaggatcagaggagggtagctacttgactca

SEQ ID NO: 3553 - DNA, 7408 bp, Rattus norvegicus
ggaattcttacttaatttaggaattttgcatctgtttgtttatcgtaattgtgttacatatatgttggggtgtggtctgtgcatgctacagtggacaacttgtggtagttagctctcttctcccaccacgagggttccaaggatcaaattcggttcccccagtttggcagcaagccagtttacctgtggagccatcttgccagcccacaaaacagtacttttaaatttttaattactaagtgtgggaaagatggcttcgcggttaagagcactggatagggctggagagatggctccgtggttaagagcgctgactgctgttcttccagaggtcctgagttcaaatcccagcaaaatcacatatctaaaaaattttattattagctgggtgtggcggtacatgcctttaatttcagtacttgggaggcagaggctagcctgatctacattgcaagttccagaacacccagggctacatagagagagaccctgttaaaataaaattgttatcatgtgaatgtgtatgcgagtgtgcacatgcctgtgtcagtgtgtatagtcagaggtatgtgtggtcagaggtgtcttcctctatcacttcctcctttgagacaaggtctctcagtgacacccagcaagccccagtgatcttgtctctgcaaccttcagcaccaaggttccagtgcatatggctgggcccagctttttgttgtgtgtgtagggatccaaacttaggtccctatactgacatggaaggcactcttagtcactgagactttccccagccccaacaccggatctgatatggcagagtacccaagagatcaccaacaggtctaggagtgaggtctaggtcaggcagaaacttcagggaggtaaacagagagcccaccagaggctagccgagttcaagccagccccgtgttactctcccatgctctcaaagctgcctctttctgctgctctctcctgagtctgtccacaagaaaacaaggtcagagggtgtcttagtcagggtttctattcctgcacaaacatcgtgaccaagaagcaagtcagggaggaaaaggtttattcagcttacacttccacatcgctgttcatcaccaaaggaagtcagaactggaactcacgcaggtcaggaagcaggagctgatgcagaggtcatgcagggatgttacttatgggtttgcttcccctggcttgctcagcttgctctcttatagaacctaagaccaccagcccagggatggcaccacccacaatggactgggtcttcctcccttgaccactagttgagaaaatgtcttacagctggatctcatggaggcatttcctcaacggaggctcctttctctctgactccagcttgtgtcaagttgacacacagaaccagccagtatagagggtaaggtcctttttaaggaaagaccttcatccttcagtgagtcctctccttaaggtgcaggaagcccagctgaacgacagaacctagacagaggcaactgcagaccagtgcctgctcccactctgtccctggccactgtagacctagcacctccagcccagtgctatactggcacagagttcctgccaccctctcgtccctaagtctcattaccaggtcatggaggggcagacacaggctgtggtgttcagtccttcagcctgtgccccagggaggtggaacgggagttgaatgaaggaagggctgtatctgtccctcaggcttgcacaagtggcccccacagggcggaaacaaacaggtctttgccttctaacctttgccttctggccattgcctggatcaaaacagaaagggcggctccctgtcaggatctctggtggactcttctgaaaatagaagcacagaagacgcggcctctgagagcatcccgtgccccgaatcctggcagggtcttctggcggaccttatagacaagtacaaaacaggatctgcctcctgggcactggaaggtggaccagctcaccagtgaggggactcataggtggggcacaggacccaacattccctaagataggaataaagttctggagaaggacagcgtctgtctgaacaagggactgacctgaggaccatgaggagttctgtggaaggggcagggggtgacagagaagagaccaaatgtgttccagatgtgaaagagatgcttggcaatggacaggcttcccaagaggggccttggcttctttactggatgatttggaaatgggaagggaggtgtctctatgaaagggggagaatgtgagtgcccattctgaaagccacagctacacggagaacgttctagaaagcaacacgaccctgcgcattacaggatgtgaagaagccagagaagtggaagcccaaaaacacccaagggagtttctgaccccgaggtcactgggcaggaggggagatgaggcaacaaaaaggtggctcgagggctcacaggggtggggcagtggagtgagagagaatgtcctttctaggatttagtctaggggcgaaaaataggcatgtggctcagaacttttgactccccagaaaaggaggtatctaggcaagggctgtgcagactgagaaggtcgggcaggttagtggattgttacttgaggggttatcggacaggagtccctgaagcccacagggcatgtagcctggaaagggtttaagaggcgttcttagcggatcaccttgtctgaaaccctcagagcggtccattataccctgacctcccccacctctgctcccacacacggtgcacgtgtgacagctgcaatctttcacccaggagccagatgtgattaagtaagagacttaacccttttggaaaatcaaaattgcaaacctgaacgcaaagatgcgaccccaggacagtggacattgcaagagaaaggggctctttgcgtcacatgttattcccttggcgaactcggacccgcacccggacctgcacctgccgggtcaggaatcacccgtggaggctctctgaagtccagggtgcgcaagattggatcctcggggttatggtacacttggtgagggttctcggaagggacccgtggggtcggatcccggtcagggcctgctcctgtgtgccagaagggaggagaaagtgagtgcccgggatatagagctacaaggcaagctcggcacacaagagaggtactcggaattacaccgagaggttctgagagctcgctgcaggtcggctgcactaaggcgcgggcgccgaccctcatctctccccctcccccgcgggccgctcccgcccccaccccctcccccttcgccgccgccgcccagcgtcgcctctggaaagtttgcaggcggctggcgcggagctggcgccgaccccgatcgcagcgcggcggagaccagtagccgccggcgcccagatcccagtgcgctcgaggaccgcgaggagcccagtcctagacccagcaagtgagcacagtgagcactagggtcgggccccgaggggacggtcccaggtggtctatggggtgctgaagcacgggcatgacctgggcgtgcagaatgggggagcggggagctgggcgtgcagaatagaggagcgggaagctgggcgtgcagaatgggggagcggggagctggccctcgaacctggacgtaagccagctgtccctgaggtctttggtggttctcacctccgtctaacaccttagttttcaaaccgggaaatgtgtccttctgtcatggttagagtcacctgattccctaacggtctcccgcaggttaaggttctcaacttctcctttctgttctctgggagcacaatctgggaggtgggagagggtaggtgcaggcgtggctatctcatcaaacgccccaacgcccaacgcaatccagcttccagcccctcataccccaatggctcgcccatcccctatgtgtccccaatctccaggacttccttgcagtgtcccagtcttgccggtgagatgtgtaagcaccgtgcacgaagggctcttcttccactgctcacaattttttactttgacccctgcgagcagcaggtcactcactgcccttgttatgctccaggctccccagaggcccccttcccacttcagaccctcgaagttttctgtcgcgaaccgaccgatccctcacctcttggttctcgcatcctccgaggatcggccagggatattttgctgttcttctgtcttggagacatagaagggggactctgagctcaccggagtcggtgggtatctccgcccttttccggggaggactcaggaattaggctttgtcacagcctgtggccccagatcctgtcccttgccataggactatgacccggtctagtttctctgttttgaccaaaacacccttccagttgataactctggggattcctaagatcaaaaaaaaatgttgctaccactccaactttggctcctaaggaaccaagaggatccccccaggatgctcccccctttggccgctgggtcatccagctcacaccctcggccacctgcagagaaaaccggtggccacactgcaaacacccaagtgtcctttgtcctgttggagcttgctgggaggggtggtggcatgggaaaatgacagtccaggtggctggagtgccagatatgtgctgtgaagaagggggcttgatctaaaggcaagacaggctgacttatcacttacagactgattcagacttgcatcttccagatttcacccacagttgggtctctcaaagcctgagacctgagtgagatttcagcagcctagtctaagaaggggagagggtagggtctccagtctaccatcccttacgcccatctgttccctgccagggagggtaataaggtggaaaaagggccagaatcgcagctccagccacaggcgctctagcgcagcgtccacacctggctgcgtcacccagggtatttatcagagctgatgggctctgtcttggtgtcagtatttacccccactgtggggacaggaggcagactgcacagggcacaaagattgcagtcctagcctactgatgacacagcccactccctttcggggaaagggaaagggtgccttgttggtctccatatgttgattggctgacttcacaggatttgtctggccagacattctctgcagagagacctcagtgtctcaacttcatggggctgaaagtcagcctcatgtccgtgatgttctctatctgactggctagaaactgccccaccattgttattccatcacaggactagagaactcacccacttttgccacttttgtatgagggaccccatcagaggttacagaaccctgaggaatctagccctgagcagtttttgagcccatccactgtggtctgagcatagctggaaggaaatcctcaagggatctcatctcacatttgttattctttgttattctttgttgctctgctattctttgttatttcttacttttggattttttcttttcttctttctttctttttgtttctttgttgtttgtttgtttgtttgagacagggtttctctgcatagccctggctatcccacacctcactctgtagaccaggctagtctcaaacactcagagatccttctgcctctgtctccccagtctaggattaaaggtgtgtgccaccatctcacagctattgaacatttacattttcagccctgggctgctgatgcaaagctgggttctaaggaccgtcctcccccactgtctggattttcacccttgcaggatcttgaaccacatctttccccgccatgccccttcccagcatttccattctccatctacccaagcaggtcattccttatcactgtcacactgccctggagctttcccacctctgcccttcctctttgaggcctctttgggtctctatgagaccccagcagctctggggtagaggccaggcatagtgtgtgaaagccagttcctggcttctgtattctccatacccagcccactagtaatctgggacggtttgatgcaaatcaggagagccatgctactgtgaccccagacgtagggcacacttgaactgccttcacctcttcaatctgtctgctgctttgtcccctgtaggaaccctctactctgagggtattgtgtcctgaggttcaggtatcagagacctgaaaccctgtgtcttgactctggctagaccctgttgaccaagggctaggctcaggagctccgtagtaggtcatgagccagatgtgtcagaagaggacataagtacaggagggtagaagtgaagggggcctctcaagctgctgtttctagaacttgactgggctcatcacagcaggctgaaatccaggggtccgctcttgtgacagttgagttcttctctcacatccccaccctctctccctccaccccgggggtcattgtatgtagtcatggctggtactgaactttggatagtactccacctcctgaatgctaggactacaggtatgtgccaccatacctggctctatcttgtatattttgtttgtgggcacacaggacagaggcccatctcagtcctaggagctcatagtttgacttcttacaggccccaagaagctcttcgcaattccgccatgagaatccaccagagctgtcttagttagggttttactgctgtgaacaaacaccatgaccaaggcaactcttatatggatgacatttcactggggctggcttacaggttcagtccattatcatcaaggtgggggagtggcagtgtccaggcagatgtgggggctggaggaactgagagttccacctcttgttccaaaggtagctaggagaaggtagctgatgttcatggtttctgctgcccaggatttgtcactggcgatcccacatcttacaggaaacatcaggcagaggtgtccctcatctgggccctggctagaaactgccctggaatgaggacgagtggccatggacctgggcactggaccctcgctctctttatctgaggtcagattgcctggccagtcagctttcccaggctaaaaataggcggaggtgtccaggacaacataactgaggagagaggtagtggctgagttttcggtgccactctgagagatttgggtgaccagataaggaggtgattgctttcagccagccaaccccatgtagcaggaaaacagttgcccatactcacctgtctctgaattggcattgcaagctactcatgtctcctccctaaacctcagctatagggaggccttgggctcagaggcttggttctggggagcaggatgctctgtagatcttctccagactccactattctggttctccgcagcctgaggagaggtgcacacacccccaaggacccaggcacccaacctctgccagatgtgggggggtggctacccagaggcatgc

SEQ ID NO: 3554 - DNA, 1214 bp, Rattus norvegicus
cctccatgccctcattgcttcctttggccttccccctccattcccagtctccaggcctgatgcattcacaaggtgaaccccattgccctgccctggggagcctctgccctcctcctgcagcccggatggctctcctctgtttttggtttgcttccttttgtttgcccttcttttgggtgaccggggtggccaccattcctgtccctgcccagtggggaggggagcaaggccttctgccaagaggaggagcatgtcccctgccactgttgcatgcaccccggccctgtgactctgtgtgcaagcccagcagcctgtggggcagggtgccaagaggggacgggacggacgttccaggacagagggagtcgaggatgtgatccaggacgggtggggggtggaagggtgggaaagggcaggaaggccttggaagctaacatgctttcactactggagggggacggatagagcggatggcactcgggtctcactgacgctgttctgaaaccatctggctggctttctgaggtcaggctgggtagggggctgtcatcggccatactgctgatcacacttgccctcatccgtccagcgatctcacgctgttctgtaaatacctggtgctaacatcccatgccgctcccccatggcacccccagcctcctgcccagttcaggctggtccaggaatggatgtgggggatggtcgctgtgtaacgtgctggtgatctttttcccctaccccttttatgacccttaaaactttgattttgtcctaaacatgccgggccaactaaagggtggggagaggagagacgagccccaccatgctcacaagaaccaacctgcaataaacacttctgtgggccgccgcgcagagcacgcagcgggcacctcctgcccctccatggcgacttggcatcgctttctgcccgcctctgccctcgccctgcctgccccaccccccagcggagagcatgatccgcgcccttgcttctgactctagcctctgggacacatcagtcaacgtgggcagttcagtctgggttcgttcctttctctgttctcatctggccccccagggcgatcttgttgctttttgctgggacctgcccagctttgagactctcttctctcaccccttggcgccagccttgagggagggagggacagagcttatcaggagacccagcctagagttgagggcaagggcaggta

SEQ ID NO: 3555 - DNA, 2243 bp, Rattus norvegicus
atgcggcggggcgcgctcctggctagcgccctggtcgcctacgccgggtacctggcgctcggcgcgctgcttgtggcgcggctggagcggccgcacgaagcccggctgcgggcagagctggggacgctgcgggagcagctgctgcggcacagcccgtgcgtggcggctcacgccctggacgccttcgtggagcgggtgctggcggcaggacggctggggcgcgcagtgctggccaacgcatcgggacccgccaacgcttcggaccccgcgtgggactttgcctcggcgctcttcttcgccagcacgctagtcaccaccatgggctatggctacacgaccccactgacggatgcaggcaaagccttctccatcgtttttgcactcctgggcgtgcctatcaccatgctacttctgactgcctcagcccagcgcctgtcactgctgctcacccacgcacccctgtcctggctgagcctgcgctggggctggcacccgcagcgggcagcccgctggcacctggtggccctactgatggtcatagtggctatatttttcctgatcccggctgcggtcttcgcctaccttgaggaggcctggagctttctggatgctttctatttctgcttcatctctctgtccaccattggcctgggggactatgtgcctggggaagccccgggccagccttaccgatccctctacaaggtgcttgtcacagcatacctcttcctcggccttgttgccatggtgctggtgttgcagactttccgccgtgtttctgacctccatggcctcactgaactcatcttgctgccggatcccgaccctgccaggctccaccaggatgaggatgaccaggtggacattctggatgcccggacagatctgcatcagcatctctctgctgcctcccacgctaattacgcctccatccccaggtagctgtcgacctggacacacctggcctgggctttgggccccatgtgattagatcaactagaaagcccactcacactctccactgggaggtgaggagtagccgctttgctcctgtgtcctccgctcctcagggccctgacacagtcattttctcctcctatcttttctcccatttcttctcagactctgaccgtttgggctttctgactttgtgagagtggtggtttctatgcctttttgtttygttttgttcttgttcttctgtatctcactctcttgcatagtacatctggcacatccagttcttctgggctccaaccctgggctccatttcagccagtgaggtaaactgaccgactggtcccttgacagtgacaagctccagtgggcaccagaagaggcaagagtagccaggactgaggagtgaacctgatatgttcagggttatctttcctggggacaggaactaacccaagacctgctagtcaagagaaaaaatagtcccttctcctcaggtgtctatgggccatagtacctgtgggaagaggcctgcaatgggccagcatctccctcagtgacttaacaggcaaggaactgacccaggatatgagccgagatccaagtggcatgagacaagcagcttagcgtagttcctgtggtgataccatgtcttttactgggcattgatagccgtgggctctggagccagtcttcctgggcgtgccctgtgactgggccatgtttcaccaatgcatttggacggtcactctacctttcagactctgtctcctaaatggtgaccataataacgcttactctaaaaggcgaactcaaccagtagcacatgcctgtaacctgagctgaagcaggaggcttgagagttcaaaggcaggagccaggcaataaaacaatgtaagcaataaaataataataatgatgahgawrawggtggtggtgatgatgatgatgatatgttcaatggaatatagtgccaggcttaaagggacatgagagtaggctatagaaggatgtataaccctcagggctgggacttattttatttatacaatatatcacttaaagattttggcaggggaaaaaaaaaagattttggcgggctggagagatggctcagcggttaagagcacccgaacgctcttccagaggtcctgagttcaattcccagcaaccacatggtggctcacaaccatctgtaaagagatctgatgccctcttctggtgtatctgaagacagctacagtgtacttatatataataaataaataaatcttcaaaaaaaaaaa

SEQ ID NO: 3556 - DNA, 2926 bp, Rattus norvegicus
tcctacgtggtggtcctgtccaggtctccagatctaaatacaaaatagccaggacaaggcttcacaagaccctggaggccagcggctgacaaatgactcccagtcctccggaacagctccggtagaagcagccaaagcctgtctgtccatggcgggatgccgggagctggagttgaccaacggctccaatggcggcttggagttcaaccctatgaaggagtacatgatcttgagtgatgcgcagcagatcgctgtggcggtgctgtgtaccctgatggggctgctgagtgccctggagaacgtggctgtgctctatctcatcctgtcctcgcagcggctccgcaggaagccctcgtacctgttcatcggtagcttggccggagctgacttcctggccagcgtgatctttgcctgcaacttcgtcatcttccatgtctttcacggtgtggactccaggaatatcttcctgttgaagatcggcagcgtgaccatgaccttcacggcctctgtgggcagcctgctgctgactgctgttgaccgatacctatgtctgtgctacccacctacctacaaagctctcgtcacccgtgggagggcactggtggcccttggtgtcatgtgggtcctctcggcgttgatctcctacctaccgctcatggggtggacttgttgtcctagtccctgttctgaacttttccccctgatccccaacgactacctcctgggctggcttcttttcattgccatcctcttttctggcatcatctatacctatgggtatgtcctctggaaagcacaccaacatgtagccagcttgactgagcaccaggacaggcaggtgcctgggatagctcggatgcggctagacgtgaggttggccaagactctgggcctggtcatggctgttctgctcatatgctggttccctgcactggctctcatgggccatagcctggtcaccacactgagtgacaaggtcaaggaggccttcgccttctgctccatgctgtgccttgttaactccatgatcaatcctatcatttatgccctgcggagtggagagatccgctctgctgcccagcactgcctgacaggctggaagaaatatctccagggcctcggatctgaggggaaagaagaagccccaaagtcctcagttacagagacagaggctgaggtgaaaaccaccacagggccgggatccagaacaccaggctgctccaattgctgatacggcctgtctttctttctttctttttttttttttttttaaagatttatttatttattatatataagtacactgtagctgtcttcagatacaccagaagagggcatcagatctctttacagatggttgtgagccaccatgtggttgctgggatttgaactcaggacctctggaaaagcagtcgggtgctcttaaccactgagccatctctccagcccacggcctgtctttctatggaagcagtccgagtcagaagtcaggtcactccctccagaagagaggggtcctggaccctgaatatttctgaagccagctctagggtaatggaaacagaacttcccaccccctttttttgctaatgagtgctggggttcatggctggaagacggcctggtcttgcctaccttacgcagtctgtggagaggggcctgtaaaaatggcgggctctgttcacatcaaatcgggaaaccctcctgactccagaaacctagaggccagaggggcctccagggacgataatgaaggactcaggggatctgtgaagacaagggacctgttctcctggaatctaggctaccccggctgtgaggcctctgcccacgacttcacagatgtccatatcttccacagtgtgggttctaggccgccctgctgaagatggatagcaagaccagctatttctggttcctgcttcactgattggaactctgtggctgtagggcgatgtgaccttcaggccacccttgcctcttgaggatcaagaattatgatgtgctgaggaccaaggaggttcactctctcccttcagacagagccatgtgctgtcagctcagggtatcttgttgttggaacaggaccctcctgatagcccgataagccttgaaaatcattatgactttaggtccttggggacccacgggaagccaggttcacttgaggtacagagtcctcagagaactgtatggaccttgtgaccttctgctgtgtctcccatagcagtatcccagtccagcctagcttcagtaaaaatcaaggtattcacaaagagtctttgggttctagattgttcctagtgatgctcaactcagcttcccttgcctcttccagactctggtcctgaaggataagcaggagttgggaggagactgcctgctgcggacatcctcgatccacagccccatgctgtctctgggtacctgcattttaccttcagcaaaggttgcattcccaacagacggaggttcaaggcgctgctggtggtaggggtaggtagcactggggaccgcagacacggtgaaaggaaaaccctctaacactttctacttttgcttttagcagattcagccaacagacaagacgtccgtccccattgcccagaggaactaacatggtggtgttcagtgagaagaccaatcagcctccctaataaagcagggcagtccactctgctataaaccctctcacatgcttctgcaggaggacattttgttttctctgttaaggtcaagtgaaggtcacagtgtctcattttattcttcccaagacaagttctgtgcatcaaaagctgctgcaaattctactctaatcgctatgtgggaggactcggggaagaagttgattcgtctgggctttgtgttttagaccgtatttcaacatacacttgggaaggaagaaccaaaaaaaaaaaaaaaaaaa

SEQ ID NO: 3557 - DNA, 599 bp, Rattus norvegicus
aagacatttattacatacagagcagatatgtgagttcacttgcaaggccaaagcctgaggagagctgcactggccccttccctccagtcgcacccacccagctaaccccggtcacttcacacgcctgtgggaacagacaagggacatacatcacagtggagaggtggcagggtggtggggggaagcttgcagctgcacattgctgcagcttgttgtggccagataggctcaggggcagtgcccctggatctgtgcttctctggtgggaagagtgcagtagaggccactgactctaatcagtgcccctgaagagtaaggccagggccagggcagcacctgcttccacacacttgcttagaattgtgcccatcctggctggtcctcagctcttctggcctctgcctgaaagcctcttgtcagttgctctccaagggagcaggccacagccggcaaccctaggcacttagtacgtgtccgggagctgggctccttggagccctgtacaggaggcaggcccttggagcacaccatcctccattaacctgaggctaagcctgcatcctaggacttgggctcccctgggttaatgggtattgtca

SEQ ID NO: 3558 - DNA, 192 bp, Rattus norvegicus
ttttttttttttgtagtcctctctgtccacctcatgagacagccatcgtgagactgatgcacacattgtcacttgttaatttaaacacatctggtttagtgcagttttcttctttgtgcctttacttcctgtctctgtcttgtgatactgattggcacaaggcccccaagatgacaaaacagcctcgtgccg

SEQ ID NO: 3559 - DNA, 587 bp, Rattus norvegicus
ccaagtaaccttaatttttatttaaataacctccagtgagagcacagttaagactaaccatttttctcaccccccaatacacctcacaaggaggtatgcggactgcctctcaatggaagcggccctggcctctgccccggccagctgctggagctggagcatccacagtggagcgggggttcttgatagtctcatccacagacacaatcaggcacgcagcctcagaagctgctgtcagagcgttgatgcgcaccatggctggctcccacacaaatgcctggaagttgtcagcaatgtcctcgttgttgatgtccaccccataccacatgcccccctgtgcatgtcgagcccgcagtttgttgaggatgtttgtggcatcaaagccagcgttgtcacacagctgtcgtggaataatctccagggccttggcatatgccccgatcaacatttaagagggcaatcttggggttcttatacttcttgggctgcatttcaaacccagcataagagaacgtcttcttgaacgcaacaccagccactagtcgagactcctccagggctccaccctgcaccttcttcctcgtgcc

SEQ ID NO: 3560 - DNA, 597 bp, Rattus norvegicus
gggttatcttttttttattgggatttaggttccaaacaaggtacaaagcagtggtgagaggatcttgaggttgctgggtgataagggaagtccaggcttggctagatggaccactgcctgaggccaaatggaaaccaggactggaaaggatctggggggtagggggactagggcttaggggaattcatggagatcagcgaattgtatatcgtacataggggacctcgacgtcctcgccactttcatcgttgcagcacagctcaagcaccagtgcacgcacatggcggcccagctttctctttgacactcggctcacaatctctgtcatcggctgatccaaccgttccttgagcttagcagctggcatgaagaaagaatagagcatggacacaccctgggacagcatggtgatctctaatttgtgctccgtcttaaagtaatcaaggaactgcttgagagtcatctcctcaccattaggctgtagcccttgtacttcaaagcgatcccacaatgtccactcttgattatagtactggtgacgaggcgcagcaagaggttccgaaaacccaaagaagggcagggccaaatcctcgtgcc

SEQ ID NO: 3561 - DNA, 702 bp, Rattus norvegicus
aaagtgaatatacaatttttatttaacattcaaacttcattaagacatgtgcaatatggcaattttactggggggttgttaaccctacctaggatgattgcttgctgaggcttagcaacagggtccagttcacacttagcactaattaaatactttattgaataaatacaataaacaaaatgcattcaaattttctctaaaaaaagatcactttaaagtcctttctagtcaggctaatgacaaacacaataaaggcagatatgctagtttaacataattggctgattttatacagcacttatatcttttagtccacaagtatattattaaatgatagagaacatctaatacaaccatttctacataactagtaaatgaatttctaagaaaaaaagattttacagaccccatcttttatacccacccccaacagtctaactctaaagaggataaagccaatgcctttcctcacaagagctcaggactaaagtcgctttgctatcagaatctgtatttgtgatccgttatgagcattgagacaagattcaaatattctcaaagaagcacaatgcacgttgtgatcgcctattcagcaacagcgagcactgcattccaaactatctcatcccaggaattaaattaggtcagccacattcatgggcatttcctccactgtagtattgtagaaagtctcaatgtcac

SEQ ID NO: 3562 - DNA, 683 bp, Rattus norvegicus
accaacacagcaaaagttacattttatttcctcttaaacacaatctaaaaagaacttttcttgtcaattcttcaacaagttactgatatgaatttaccagaaaaaaataactatatatttgtccaacatcaaattatcagcaaaaagttttaagatatcccttattcagtttccaaaaataaaggttttctaactgaaaaccctgacattcctactctctaaacaaaccttaggacacaggctggtctcccagctttccacagctccgttatataaatatttccgtcccaacactttctcagtttcaaaagctgtttacttcccaagaacataacagtcttcatttcaaaccattcattctgtttccatagcgacactgcgggattccttggccaccataagtcgcattaactgactgtggaatttctcaatcttctttacatcttgagcttggtctgttctgtacaccaaacagactagatcgtccgtcactttgatacacaaattcccatcaacatgcctgtacttgagaaccacacgtaccttcatggggtccgccaagtagagcttctcagccgcgcggctgaactcctcccaggtctggaactgaggcatcgcggcttcgggcagcgcgaaacgaggccgcgaagcaagaaacgcgctgtcgcactgacagcccaccg

SEQ ID NO: 3563 - DNA, 758 bp, Rattus norvegicus
  misc_feature (744)..(744): n is a, c, g, or t
attagaaaacaggttcggtttattgatccgtcataggcactgtacataaattatgtggtttgtgattacataatatttggcatctgttgcagaactataaaatcaagttcttcaataataaaaaaaacacccttcattattgaccagtataaatatatattatttttaaaaagtcactaaaaatggctcaatactttctctatcataaagtaaaattcaaaaggcaggagagagaaaaatataaattctgctaaaccagttttaaacactggcaattaatacacggttgcatgtgcaaacttctgcaacacttggcctttttaaaaaaaacaccaccagaaagtacggtgaaatctaagtattgggcaaagcgtgatcctcagctgacaccagacacttctggggtggacggggagaagtctcagaaagtttcctctgcccttacgtgatgtctcatcctcttagatggcccctgggaaccagcaatgaccctactttcttgttgaggggctttctcgggacagattctatttccccctcagtgtcacaagatctgtggctctctgttcttcctctcccccttatactttctggccaagtttccattaacactcattcacacataatagacatgcacgccaatacattttctgggtgacagacaaaaacattatcagcaagcttaaacctttaaaacatcatgagtcaagatatcacctcggtccatcagacttctggctgcantgtggggcaacctt

SEQ ID NO: 3564 - DNA, 414 bp, Rattus norvegicus
agacataacaaaaacgaaatatttattgtataattacccccccactggacttgactgggatagcctcccagaaggcatctctgccttcccattttatttcagagcttcattgtagatcaaagccaaggcccccaggaaggcaacatactcctggaagtttacttcctgatccttgttacggtccagatcatccatcagccttgcaatttcagcatcctgcagcttagcaccaatggtgagctccttctggatcagctccttcagctccttcttgctcagggtgtgcttgtcaccctccttgccagagtacttgtggaagatagccacgagaaggccgatggcctgatccagggggcatgccatgactgaccactgggctagaagcacacgtcgacaatgaagcgccaaaagagc

SEQ ID NO: 3565 - DNA, 562 bp, Rattus norvegicus
gcaacaatatcttttattaggcacagaattttaaatgatctcttcaatctctccatacacaggcaaaactatgtgtgccattgaaattactggagcttgccaactacctagagaaggatacttatccccaacctgcttaaccaggaggccagttcatctgccgacctccaaggacgtggaggtgaatatgatagacagactgccccccgtctgcaccttcattcaccaccatccgatacccgcgcttcaggcccagatccgcagcacatttcttgccaacaatcattaaatgtcctagaagactttcatcatcatcatctgccacagaaatctgggatatgtgcttcttgggtatcaccagaaagtgtgttggtgcttgaggggaaatgtcatgaaaagcaagacaccgatcgtcctcgaaaatgatcttggccgggatttctttgcggatgatcttgccgaagatcgtgtcgccaccgggctgggccacttgagccttggcaatctcgtcagccatcgcggccggtcgctgtccttcccgcgccgcggccacggtggggcc

SEQ ID NO: 3566 - DNA, 185 bp, Rattus norvegicus
aggacccccatcaatagatagaaacgtataggaatagtcaaactacatttaccaagtgtcagtatcatgctgggggttcaaatcccaaatgatgttttgatgtgaaggggaattttagttggcgtactaaacaaacaatttggaaagttgagcccataattccctgggggccatgaaatcccgtt

SEQ ID NO: 3567 - DNA, 606 bp, Rattus norvegicus
gaagtaactacagtcaccgcacaggtaaataaaacaaataggggcccctaggtttctgcaggctaatgtggaagaattatatatgggtacacgtttctctgcaaaaactttatcttaggagacaagtagtccaaggaagtgccaggctggtctgtctctacaaggtgctctgtgtgccgtgtgcacacatctgcatacctacaaggagtcgcagtaagtgcctgattctgtgtatgcaacacacacccacacatacacacactcacaccgacatacatatatatgtaaagggatatatatgtatgcatgtacatataaatatattgaactcatgtccttattcaccaatttaagatatgtagggcagttcactgcagtaacacaaagaacagacatgaaccaggaagccttaggtcacccatgtgtccatcctcatgcgttttacagaggggctttctctgtcctcagcatttggaggtcggccaagcacaattggagaatggaagtcgccccgtggatcctcccggtcactgccatcgtaggagctgctagagctgctcagactgtccacaggggagcgccccatttcctgcccgggttggggct

SEQ ID NO: 3568 - DNA, 629 bp, Rattus norvegicus
tttaaaatcatatatcataaatcatttattgaaatataaagatctccatttacacttctttttttttttaaacaaaacatgaacacgggtatctggaagccatcttggattggaagaccctctctatggagttgctctcacacatttaccacaccaccatgttgggaacatgtaagtatttttctctttattccttctaaaatataaattttggacattcaaaagtgcaacagttaacgtgcctgtggggaatatcacagttaaaaaaatataaacaaaggcagtgatacagcttgtcatacacgttttggcagtattctccaagtctacatagcaacagatatatacatatcgatgtataacatcattttatctcacgtccctcttcaaaaatataggaccattttgtacaggttggcagaccacattttaaggacatcactgattatttaaaaaaaaaaagtcacaaattgggttcttcgggccagctttgattgtcatcataaaaataagaatagaaagcagagaaaattggtaaatttccttccagggactctgcaggaggccaaaaggaaaccaggatccagtcaaaacactgtttgaaaataaaaatgtatccctgctgaatg

SEQ ID NO: 3569 - DNA, 676 bp, Rattus norvegicus
aaatgatttcatctttttattctgggacctaccatggaacagtgtgtaacaaaagaacagcgattagattagcacagagtgtatcagactagtgtccaggaaacagcaactgtccctttggccagctccactttctcagcagatctcctaaattcacccacccatccagggacaccggtgcctagagtccacaaggacacagtatgccaaccatgacttctgactgatttaaattgcacaaagatagagctttaaacgtggtaatttttaaatttagacttatcttgaaaactctaagtaaaactacaaaagggagtgcatagcgagctagcattgcgtgggacacttagaaagcggggcgtgtatctccctccgtacagaccaaggggatccacacacatgaaatgcattttacggcgtgctacatcattcacttaagtacattgttttggcatttaaacaaatatcaaattaagctttaagctagtaacataatttttatttttttaaatataaaaaagatagccaaccacaaaggaagtacagaaaccctcatttaatatagattatggaagttttagatatggcaacaaggcagctttttaccccacactaaaacctaaatgaaactttttcccaagttagtaacaatctaacagctttttaaagctccaag

SEQ ID NO: 3570 - DNA, 699 bp, Rattus norvegicus
cgtctgcaggctttggatttatttgatcttctagacatttttatttatataaaagacaaacgctgcatagattgaaaataagtgctttaggtcttgatataaaaagagtattgtgcattcacattcctatttgaatacatgagtatggctgaagtgttcaataaaagaataaaaccttccctttacgcagagtagtgaacaagagtcaacactttcaggaatgacaggaatgatattccttggtcttttatctcgaataaagaaaagaaaaatgacacaaacaaaacaagccacagtaacatgacaccatattccagtttctgatgatgacccggaagtgaagtcatttttgaaccctagaaaccccacaagtggaccagcattctgtcaattcaccactagagggcgcagaacaacagctactgggttagcactggcgagcccaaaggagcaagtgggttggggttttttccacggcgttcccagcccactttcatgggaaagagagcatagatttttgccctacccccgacctgactgtgtaccctacctacagaacaaaagacccctcgatggttttccaatcacggtcctatctggctgaaaataagtcgcttcaaaaacacatttgctagaagagactgtgttctgcaacatccacacttgttggtggattgacaaacttcctattaaagctct

SEQ ID NO: 3571 - DNA, 381 bp, Rattus norvegicus
ctcagagagaccctttattaagcagggaagaaaagttaagtggctgctttctgactcaggcagaaaaacagcatccgatgaccttgcaggtgtaatttttatgaagagaaaaaggcggtctggtaggctgggctatgttgtattttgattgggtatgttaattaggtgaaactgaaaggggcttttgattgctggactttaatacttggatagctgggcctttgtatgcggcctcaggaggatgaagtggccaaataaggggatagaccttggggtctagcctcaggaatgtgatctaacacttttagcaaagcagagaatctgaggccgcgcgcttctcattcaagccctgggaattgacgttgactagatcctcctgga

SEQ ID NO: 3572 - DNA, 663 bp, Rattus norvegicus
actttaaaatgattttattgaatattaatccgttacaagtactgtagacatcaagccaaagcacaattacaggttaaatataatcacagagatgttttaaacagaaacccaccatgtaggccggttaagttccttgatgccctcttttagaaataagtagaaggcgaggggaaaaaaatgtctttcattcctggtgaaagctataaagaccagagaatttacatgctgtgagcctccttttgtgatcaaactgttaggactaccaggtttagaaaaactacatagaaaacaaaaatctaggagattcagtcaaaatctgaatttcagataagttaatgaacatttaaaaaattgcacagatatgtcaaatatgaaatatacttgagctagaaaattgcctgaaattcaaatctaactgggcatcttgtattttgtctgacaagcctactgatggacaaatgcaaaattaaaaaaaaaaaaggtggacctggaaccccgtcctggtgggtcacacagagaccagaaacaaaaccactaacaaaccaaagggccactgtactggttatttacacagactgacgctacagtaagaaagtacaattacaactccaaacactgtcatcaggaacagtctaaatttcctcaaagctggttttgtaagtt

SEQ ID NO: 3573 - DNA, 629 bp, Rattus norvegicus
gacatataagtattattaaatgccgttttaaaatcatctagttgaaattttaagctaatatgcattaaaacaagatgctgcctaaatatgctgtcttagggggagacttcgctggcagtcggctcgggcttcacttgtatattgagcacatagtcatggcggaaggatgaacggacagtgcgattcatcagaggttgaagtgggcggaagttgtccaccattcttttctctttctctccctcagatgtgaaaagcagggtccgaaactgttcaagctgatcatggtcgacctcaactggctgcttcttaatgatccaggtaacagactctgagaggggaggcgtagtgagagatccagaataggtccagtaatctgggcaagtaggcatcagacaggaagggtcaaatgatccaaatttcaccagggtatccttgtgcttaattgatggcaaagtgtccaccaatttctgcagttctttatgatgtttacctagctttaaaaatacacctatcacagccaagccattttcttccagtgctgcatcctcaaaactttcaaatttgactgcattccaatgtaccaagtgcagctctgctgggtagcatttgctgtccacagtgtgctcgga

SEQ ID NO: 3574 - DNA, 682 bp, Rattus norvegicus
ctcttaagtaatggctgccccaaaaatgaattttaatcattttaagttgtgtaaaaaacagattgtgccttggcctgacaaaagtttcgttatatatccagaaccatccatttcagtccttttccagcttgtcccacattatttctctactgtataaagtactgtattttgaggtggatgttcaaaatctcatgtctgccatgcactcttagacttcaaacgtgaacatgatcacttctacactttataaacatcaaagaaaataaataaatcatgtggtattcaacaattttcagatactttacaggacagggcagaactcagggcccatattgacagtctgttttagtcctggtgtccgtttgctcaggtcaagctcttgccacaccgatgacagagtcaggaaggctcgtttcttgggtaacttgctacagacagcctgcagcatgtgttagtgtgcactggtatctagatcctcggttttttccatcaatgagtaacagtggcattttcctgaagtagtcaataatatctgatacagacaggaagtcctcttttccccgaagcccagttcccaacaaatagacttgactttcctcctggtaacggatctggatgttgtaaactttgtctttgtacaacaccatgaggacatatggattgttcactgtcttcttagagc

SEQ ID NO: 3575 - DNA, 3050 bp, Rattus norvegicus
gcggccgcggctgctgctgcggcggcggcggtggtggcggcggtggggtggcgggagcggagcggcatggccacggcggcttctaacccctacctgccggggaacagcctgctcgcggccggatccattgtgcactcggacgcggccggggcgggcggcggcggagggggcggcggcggtggcggcggcggggcggggggcggcggcggcggcatgcagccgggaagcgccgccgtgacctcgggcgcctaccggggggatccgtcctccgtcaagatggtccagagtgacttcatgcagggggccatggccgccagcaacggcggccatatgctgagccacgcgcaccagtgggtcaccgccctgccccacgctgccgccgctgccgccgctgctgccgccgccgccgtggaagccagctcaccgtggtcgggcagcgcggtgggcatggccggcagcccccagcagccaccacggccgccgccgccgccgccgcagggcccggacgtgaagggaggcgttggacgcgaagacttgcacgccggcacagcgttgcaccaccgcggaccgccgcacttggggcccccgccaccgccccctcaccagggacaccctggaggctggggggccgcagccgccgctgccgctgccgccgctgccgccgctgccgccgctcacctcccgtccatggcgggcggccagcagccgccgccgcagagtctgctgtactcgcagcccggaggcttcacggtgaacggcatgctgagcgcgcccccggggccaggcggtggcggcggcggagcgggcggtggagcccaaagcctggttcacccggggttagtgcgcggggacacgcccgagctggcggagcatcatcaccaccatcaccaccacgcgcacccgcacccgccgcacccgcaccacgcgcagggacccccacatcacggtggcggcggagcggggccaggactcaacagccacgacccgcactcggacgaggacacgccgacgtctgacgacctggagcagttcgctaagcagttcaagcagcggcgcatcaagctgggtttcacccaggcggacgtggggctggctctgggcactctgtatggcaatgtgttctcgcagaccaccatctgccgcttcgaggccctgcagctcagtttcaagaacatgtgcaagctcaagccgttgctgaacaagtggctggaggaggcagactcgagcaccggcagccccaccagcattgacaagatcgcagcgcagggccgcaagcgcaagaagcggacctccatcgaggttagcgtcaaaggcgcgctggagagccacttcctcaagtgccctaaaccctcggcgcaggagatcaccaacttggccgacagcctgcagctggaaaaggaggtcgtgcgggtctggttctgcaaccgacgccaaaaggaaaaacgcatgacgccccctggcatccagcagcagacgccggacgatgtctactcgcaggtggggaccgtgagcgctgacacaccgccaccgcaccacgggctgcagaccagcgtgcagtgaatgccggggcgcagcgcgaagtgggccgccgccaccaccgccacctccgcagccgctgtcagcaccgccacggtcaccgccgctgccgtctttgagcggccgccgagaaccaccgccgccgctgctgccgctgctgccgccgccgccgccgccgccgccgccgctgccgccgcgcagacccaacacctggccagtgccagggtgaccaggcctcctcccctccgcccaaagacaggcgagccatggccctaggaggggggagaacagctggagaccgatgagactctttctgaagtccaaggaaggagggaccaaaaacaaatttttaagcataataaataccaagactgttttatatgcatatataacaaacaaaaccggaagaggaaaagggaggaacaaggacatctcgtttatactgtggtggtgttttgttcctgttttgaaagaagggtgaagatgcctaacgcaccaaaactacacacgaggtactgtccacaccgagatgtcctgctcggcgacagtggagaacacctgcctctgagataagagagaccccctccccgttcttccacttcttccaaaagggctgcctaaaagatccatggaaactttctttactgggagcgacctgaaaagaaagacgcaccaggtttcctgcaggtctgactctgctcctcgacagtgtttttcttggccatattcaagtctttggggaacaaataaatcaactaagaaatgggaaggaaggagaaacagagtctggggggggagggaagattcacagcttctgaagttaacagactgaacaggaaagccaaaagaaagcatccttgccgtaaacttgggaataaaagcatcgcgaaagagcctttgagaccgcccagaagggccaggtctcccccacgccactgaacccgggctttgccgactgccgctcggggtggaccatgcctaaagattccgccgctaatattttttttattaacattttttattttttatttctggactgactccgataaaagggtgtggaaaagacagcaccaaccgcgcacttcccttgacttctgccctcgatccgttgccaactttgattgaatgggtgctgcggatgtgattatgtaatactgccatttccaagcagtgtttttggtaggttttaataaacagacttttcaaatgacggcaatatagaatcgttagatccgttgttgatctaaaaatatttgctttatattttcattaaatgacttcttttaatattttattcaaaatacttatgaactgctgcaaaacggtaatttatttttccccagatcttgtattacgtgtttttttcagacgagcacaaatcaaaatgaaatgaaaatatggacagttgttaggtaataagggtatcttttgatgtgatcatttgattgtaatttaatttgagtagtgattccgtaagagctgattgagaaaataaattttgtcgaggcggccgc

SEQ ID NO: 3576 - DNA, 1525 bp, Rattus norvegicus
ggaattcggcacgagccgacacacgtgtggtccttccgtggtgccctcttcagtgtcccctgaactgaaggatcgcaaagaggatgcgaaagggatggaggacgaaggccagaccaaaatcaagcagcggcgaagtcggaccaattttaccctggaacaactcaacgagctggagaggcttttcgatgagacccactatccagacgcttttatgcgcgaggaactgagccagcgactggggctatctgaggcccgagtacaggtttggtttcaaaatcgaagagctaagtgtagaaaacaggaaaatcaacttcataaaggtgtccttataggggctgctagccagtttgaagcttgtagagttgcaccctatgtcaacgtaggtgctttaaggatgccatttcagcaggttcaggcgcacgtgcagctggacagcgccgtgcgagccgcgcaccaccacctgcatgggcacctggccgcgcacggcccttacatgatgttcccggcaccgcccttcggactgccgctggccacgctggcggcggactcggcctccgccgcctcggtggtggctgccgccgccgccgccaagaccaccagcaagaactccagcatcgcggatctcagactgaaagctaaaaagcacgcggccgccctgggtctgtgacgccggcgccacggccacggtcggtggagccttctatgcggcgcgaccccgcacgctctccgcgaccggctgcttctcccgcacccgcttcggaccgactaagcctgtcccttccccgctgactgccgccttttctttctgcaccctggatccctagggcgggactctgcgctggacccgggatcccacgaggaccaccagcccgggctcctgccacccgcccttgggactaaaattcggctttgtaggagcgggtttggggaagtctggatagagactggacaaaggagtgtggcaacagtgaccacagctgcggcgacggactcgttcataggaataaaatcttgctaacaacaaatgagcaaaaacaaaaaaggatagagaacaaactaaaaaaagaaaatgagaaagggggcttgtttcttattgctatttggctggaattagagagagaacgatgaagcaaaacaattcttaaaattattttgtacataaaaatacggaaaaataacctggatgaatcttgagagaaaggggggagggatttaccaactaaaatgtatgtttttttttaaatggtccaaggaaacaaaacagaaggaagaggtatactatttaagaattaagatgaaaaaaaaaagcgcagctgggaagttcacaggttttgaagctgacctttttctgcgaagttcactttaatacgagacatttgataagagaggcgggcctccttttacgttgaatctgatgctttgagttttaaaacaccatgtttggaagagcaagaagagggaagacagtgtggaaacgaggagggaaaaaaggacgttcatacaaaaaaaaaaaaaaaaactcgag

SEQ ID NO: 3577 - DNA, 1512 bp, Rattus norvegicus
atgacattctacagtcctgctgtgatgaactacagtgttcccggcagcaccagtaacctggacggtgggcctgtccgacagagcacaagcccaaatgtgctatggccaacttctgggcacctgtctcctttagcgacccattgccaatcatcgctcctctatgcagaacctcaaaagagtccttggtgtgaagcaagatcactagagcacaccttacctgtaaacagagagacactgaagaggaagcttagtgggagcagttgtgccagccctgttactagtccaaacgcaaagagggatgctcacttctgcgccgtctgcagcgattatgcatctgggtatcattacggcgtttggtcatgtgaaggatgtaaggccttttttaaaagaagcattcaaggacataatgattatatctgtccagccacgaatcagtgtaccatagacaagaaccggcgtaaaagctgccaggcctgccgacttcgcaagtgttatgaagtaggaatggtcaagtgtggatccaggagagaacggtgtgggtaccgtatagtgcggaggcagagaagttctagcgagcaggtacactgcctgagcaaagccaagagaaacggtgggcatgcaccccgggtgaaggagctactgctgagcaccttgagtccagagcaactggtgctcaccctcctggaagctgaaccacccaatgtgctggtgagccgtcccagcatgcccttcaccgaggcctccatgatgatgtccctcactaagctggcggacaaggaactggtgcacatgattggctgggccaagaaaatccctggctttgtggagctcagcctgttggaccaagtccggctcttagaaagctgctggatggaggtgctaatggtgggactgatgtggcgctccatcgaccaccccggcaagctcattttcgctcccgacctcgttctggacaggtcctcagaagaccctcactggcacgttgcgcagatgaagagtgctgccccaagggatgaggggaagtgcgtagaagggattctggaaatctttgacatgctcctggcgacgacgtcaaggttccgtgagttaaaactccagcacaaggagtatctctgtgtgaaggccatgatcctcctcaactccagtatgtaccccttggcttctgcaaaccaggaggcagaaagtagccggaagctgacacacctactgaacgcggtgacagatgccctggtctgggtgattgcgaagagtggtatctcctcccagcagcagtcagtccgactggccaacctcctgatgcttctttctcacgtcaggcacatcagtaacaagggcatggaacatctgctcagcatgaagtgcaaaaatgtggtcccggtgtatgacctgctgctggagatgctgaatgctcacacgcttcgagggtacaagtcctcaatctcggggtctgagtgcagctcaacagaggacagtaagaacaaagagagctcccagaacctacagtctcagtga

SEQ ID NO: 3578 - DNA, 5614 bp, Rattus norvegicus
ctggagagaggcgcgcggagactcggccccctcggcgctcgctcgctcgctggctccccgcctcccgcactccgctggctcccaccccttcccggcgtgattgatccgtcacgggcgccgccaccgccgcggccgttctgagcgagcagaagccggagccgagccggggcccgtgccggcgccattgcgcgggagccgcgggcaaagctcggcgccgggcggcgggccgggccaggccatgcgggccgagtgagctggcgcccgcagcccgcggcgcggcatggcttccccgccgagctccgggcagccccggccgccgccgccgccgccgccgccgcccgcgcgcctgctgctgcccctgctgctgtcgctgctgctgtggttggcgcccggggcctggggctggacgcggggcgccccccggccgccgcccagcagcccgccgctctccatcatgggcctcatgccgctcaccaaggaggtggccaagggcagcatcgggcgcggcgtgctccccgccgtggagctagccatcgagcagatccgcaacgagtcactcctgcgcccctacttcctggacctgcgactctatgacaccgagtgtgacaatgcaaagggactgaaagccttctatgacgcaataaagtatgggccgaaccatttgatggtgtttggaggcgtctgtccgtctgtcacatctattatcgcggagtccctccaaggctggaatctggtgcagctttccttcgccgccaccacgcctgttcttgcggataagaagaagtacccgtatttcttccggacggtgccgtcagacaacgcggtgaaccccgccatcctgaagctcctgaagcacttccgctggcggcgtgtgggcacactcacgcaggacgtgcagcgcttctccgaggtgaggaatgacctgactggggttctgtatggggaagatattgagatctcagacacagagagcttctccaatgatccctgcaccagcgtcaaaaagctcaaggggaatgacgtgcggatcatccttggccagtttgaccagaatatggcagcaaaagtcttctgttgtgccttcgaggagagcatgtttggcagcaagtaccagtggatcatcccgggatggtacgagcctgcgtggtgggagcaggtgcatgtggaggccaattcctcacgctgcctgcgcagaagcctcctggctgccatggaaggttacatcggagtggactttgagcccctgagctccaaacaaatcaagaccatctcagggaagactccacagcagtatgaaagagagtacaacaccaaacgttcaggcgtggggcccagcaagttccatgggtacgcctacgatgggatctgggtcatcgccaagaccctacagagggccatggagacactgcatgccagtagcaggcaccagcggatccaggacttcaactacacagaccacacgctgggcaaaatcatcctcaatgccatgaacgagaccaacttcttcggggtcacgggtcaagttgtgttccggaacggggagagaatgggaaccattaaatttactcaatttcaagacagcagagaggtgaaggtcggcgaatacaacgcggtggctgacacactggagatcatcaatgacaccataaggttccaggggtccgagccacccaaggacaagaccatcattctggagcagcttcggaagatctcgcttccactgtatagcatcctgtccgctctcaccatcctcggcatgatcatggccagcgccttcctcttcttcaacatcaagaaccggaaccaaaagctgattaagatgtcaagcccctacatgaacaacctcatcatcctgggaggaatgctgtcctatgcatccatcttcctctttggcctcgatgggtccttcgtctcagaaaagacctttgaaacactctgcacggtccggacctggattctcaccgtgggctacacaactgcctttggggccatgtttgcaaagacctggagggtccatgccatcttcaaaaatgtgaagatgaagaagaagatcatcaaagaccagaagctgcttgtgattgtggggggcatgctgctcatcgacctgtgcatcctgatctgttggcaggctgtggaccccctgcggaggacagtagagaggtacagcatggagccggacccagcaggccgggacatctccatccgcccattgctggaacactgcgaaaacacccacatgaccatctggcttggcattgtctacgcctacaaggggctcctcatgctattcggttgtttcttggcatgggaaacccgcaatgtgagcatccctgccctcaacgacagcaagtacatcggcatgagtgtgtacaatgtggggatcatgtgcatcatcggggctgctgtctccttcctgacgcgtgaccagcccaacgtgcagttctgcatcgtggccctggtcatcatcttctgcagcaccatcactctctgcctggtgtttgtgccaaagctcatcactctgaggacaaaccctgacgcagccactcagaacaggcggttccagttcacacagaaccagaagaaagaagattcgaagacctccacttcagtcaccagcgtgaaccaggcgagcacgtcacgcctggagggactgcagtcagaaaaccaccgccttcgaatgaagatcacagagctggacaaagacttggaagaagtcaccatgcagctacaagacacaccagagaagaccacatacatcaaacagaatcactaccaagagctcaacgacatcctcagcttgggcaacttcacagagagcacagatggaggaaaggccattctaaaaaatcacctcgatcaaaacccccagctccagtggaacacgacagagccctcaagaacatgcaaagaccccatagaagacatcaactccccggagcacatccagcgccggctgtcgctccagctccccatccttcaccacgcctacctcccatccatcggaggcgtggatgccagctgcgtcagcccctgtgtcagccctaccgccagccctcgccacagacacgtaccaccctccttccgagtcatggtctcgggcctgtaggggtgggaggcctggggccggggcctccccgggacagcaccatgctgggccaaggcgcctgccacaggcacactgacggcggcgagaagctgggcaccatgctgcctctccagactgctggaatggcgctcaggcagagcgggactcggcaccgacctcgagccttatctgtgaaggtcttactctcacagaggagaggaatgacaatgacttctccttcttggcgtctgcaaacaaagaggagttgggatgtctgaaacttgcaaaaacaaatcaaactctagacaaaggagagaggcctcggactcctgctgtcctcgccaagtggccagagcaagggctctgcagaaatggccctcggcactctgcacacacgtcatcggtggtgcccgcccccacacaccagcccttctccactctgggggagaaggtgagcagggccaccaggtccccagcagctggcccagtccacttcagacttcctggaacaagggagtcagcaggaagggtagccgggctctgccctggggctgggggaaccagagcaagcagctgcgcatgctcccaggggacatccatcagaagagagatgtttgttactctctgataaatgccacacattaacacaataacacccgttccggggactgtggggattcagggcaccgcactgcagacatgctctgcaggatgcaacagacagtctgtcatgcacctaccgtgtcggccatgttcttgtgttcaaatttagggttcccggtaataaggggaaccatctgagctaatcatggaatgtctgctcccagaaaacacgataaagaaagattgtgcactttaacctctcccatgggggcccaagggctgctgggattccccctctcccaacacactgactttgtttttgaccaaagtgaatcaggggcattctgctaaaagtcatctctgtgttcctgagctagagctgctggcccagggccccctggcttccagaaggtagccctccagtgcccctccagccctaacccgtgagtgcccacctagggtgtcactgaggcggtcagtcagcaggctggttcccatccatcacgacatactttccttgtaattgaaccccaaagagcactggcctgggagtcagacctggatttgagtcctcagtcccttcagactctctccgtgaccttgggcaagtcaccagtgtctctctgagcctcggtttcccctctgtaacagactggggttgaaataacacccatcctgcctacctcacagggtcactctgaggatggacacttgatctcattcatccaggagagctttgcactgggaagcagctctgacctgtgaggtattagtacgaccatgaccttcagccctcccaccagctggggagggtgcggtgcggcccagagaaacttcctgcaaggccctctacctagggacaggaacagcccagtcagaggcaggctcaggactcttctgacattccttaataggttcattctttgctaaaggcctgaatggcaccgtccaggggcgtctgcacaaacgagtggtttgctcactccctaaagaatcctaaaggcagcttcaacaggcaggcaataatctcttcccagaccactgcagtcaggaacacactgctgtcaaccaccaggctgtgacgaaagggcccacgggaatcaccatcgccaacatttcaaaacaccctagttcacgtagcatagctcttcctccccatccctcaaagagaggttacagaggttctgtagcttttaaggggggaaaaatgtcaacacatcacaggtcaagttgatgtccttctctgtttaggcaccaaaactccgtgttgtcactcactgtgtgtgttaaccagtatttccttgctttttcgacttcaccaaaaccaaatttcatttaaaagaccgcattagtttttttcaaagggaaagagataattaactgtacataatgtatacagacaaaacaaaacctgtagaaatattactccagcatagcaggaaaaaaaaaaaaaacaaaaaacaaaaaacaaaagtattggattgtcggaggtgagcgtgcgtctgtaatcccttgtgactccgaactgtgctccgtcttctaggttaacccacaagatacatctctgtctactgatcctgtaggttcacccatttttttttaatttctctgcaattaacaagccccacaaagtgattctggctatctactggttctgttcttttatatgcagcaaacacacggtccatttcctagaggcttccgcccaagggcatcttccagtgacgctagtgcgcacacacacacacacacacacacacacacacacacacacacgactgctttcaattagaccggaactggcagaatcaaatgtaaatgaggagtttctctcgccccactgcatggtatcgatttttaataaattgttgcaaatttgtttttatgaataaaaggggaaaatataaaaaaaaaaaaaaaaaaaaa

SEQ ID NO: 3579 - DNA, 1566 bp, Rattus norvegicus
ggggatctctgagttcgaggctagcctggcttacatcgagagttacatttatttaactacactgagaaccagggctaccctgagagaccttgggctacatatgtttaacatctgtgcaaaggccctgtggtgggtgggagtggcacatttgcacacggacacacctgtgcctggcacatactgagcacatgagtaacgggcgttctggtttcttctgcagtgcgattggggtcccacggccggctgctgctccgcgtcaaccgggcgtcgctgactcagggtctccccgaagcctaccgcgtgcaccgagcgctgctcctgctgacgccttcgtccaggccctgggacatcaccaggcccctgcaacgtgcgatcagcctccagggaccccacgctcgcgcactgcgcttgcgcctggcgccgcctcccgacctagccgtgctgccctctggcggcgcgcgcctggaactgcacttacgatcggccgccggcagggggcgccgaagcgcgcatttgcacccaagagactcgtgcccgctgggtcccgggcgctgctgtcacctggagactgtgcaggcaactctcgaggacctaggttggagcgactgggtactgtccccgcgtcagctgcaactgagcatgtgcgtgggcgagtgcccccacctctaccggtcggccaacacgcatgcgctgatcaaagcacgcctgcatggcctgcagcccgacagagtgccggccccgtgctgtgtcccctccagctacaccccggtggttcttatgcacaggacagacagcggcgtgtcactgcagacttatgatgatctggtagcccagggctgccactgcgcttgagcactgggccctgctccttacctacactccccttccatgatgctatttatatttttatttaataatattattaatttattggggttgggctgggtgggtggattgtgtatttatttaaaactctgctaataaaggtgagcttggtttctatgcggcgtctcagtgatctcggcatgattcccataaccctagcctcagtttcccttgtcacctgagaagtggagcagagacgggcctccattaggctggcctgggtgattttattgactgacagctgatgtgagtgaccagccagggcctggtggtcctgccatgtttgagccgcaaggaggagcaggacagtcagcagttcattgctgcagcctctgcttcagcgcccttctaggttccctctggacattcctccaatccccatttcaagccaggcctaacatcccagaatcagggggcctctgcaatccagatagtccgacaacggctggctgggaatgaaaagtgtaagaagccagtggctgctcagtcaacaagactgggtgtctcggctgctcttcagtatgtgctggagtcttgaagggagctccagtgccagtgaaggaatggatgtgccagcaagcaaagcgcaaaagctcttcttccattgtccttatgtaggttcccagccgagggtgaggcccagattaaaggcgagtctgcccactttaacaattcaggatc

SEQ ID NO: 3580 - DNA, 1278 bp, Rattus norvegicus
atgggcggggagctggtgactggcctgggggccctgagacggagaaagcgcctgctggagcaggagaagagggtggccggctgggcactggtactggcgggaactggcatcggactcatggtgctgcacgctgagatgttgtggttcctgggttgcaagtgggtgctgtacctgctcttggttaagtgtttaatcacgctgtccactgccttcctcctttgtcttattgtggtcttccatgccaaggaggtccagctgttcatgactgacaacgggctccgggactggcgcgtggcgctgacccggcggcaggtggcgcaaatcctgctggagctgctggtatgcggggtgcacccggtgcccctacggagcccgcactgcaccctggcgggggaggccacagactcacaggcctggccgggcttcctgggcgaaggcgaagcgttgctgtccctggccatgctgctacgtctctacctggtgcctcgcgcggtacttctgcgtagcggggtcctgctcaacgcgtcttaccgcagcatcggggcgctcaaccaagtccgattccgccactggttcgtggccaaactatacatgaacacgcacccgggtcgcctgcttctgggcctcacgctgggcttctggctcaccacagcttgggtgctgtctgtggctgagaggcaggctgtcaatgccacgggacacctcacagacacactgtggctgatacccatcacgttcctgaccattggctatggggacgtcgtacctggcaccctatggggcaagattgtctgcttgtgcaccggagtcatgggggtctgctgcacggctctactagtggctgtggtggcccggaagctggagttcaacaaggcggagaaacacgtgcacaacttcatgatggacatccattatgccaaagagatgaaggagtcggccgctcggctgctgcaggaagcctggatgtactacaaacacactcgaaggaaggactcccgagcggctcgcaggcatcagcgcaagatgctggctgccatccacacgttccgccaggtacggctgaaacatcggaagctccgggaacaagtgaattccatggtggacatctccaagatgcacatgatcctgtgcgacctgcagctcgggctcagcgcctcgcaccttgccctggagaagagaatcgatgggctggcagggaagctggatgccctgactgaactgctcagtactgccctgcagcagcagcagccgccagaacccatccaggaagccacatag

SEQ ID NO: 3581 - DNA, 2043 bp, Rattus norvegicus
gaattcggcacgagtctaggggaggaagggaggcaagaaaagggtctttgcccattcttgtttcgctttggatcgtggaagtcggctccctaaagacgcttgcagcggttcccttctgcccacgtccccaagtctccgttggccctgactttggctgccgaacctctgtttggctggagtctgcagttagaagagacaggggcagtttggctggaggaccctgcagtttgcgtcccctggctctacaagtctcggctaacacagggacacttggcgcctagagcgtacccagaaccggcggcaccggggctcgacaggcgggagcctggactcgtaggcgccgcactccctcgtccatgaactgcatgaaaggcccgctgcccttggagcaccgagcagccgggactaagctgtcggccgcttcctcacccttctgtcaccatacccaggcgttagccatggcttcggtcctagctcctggtcagccccgctccctggacgcctccaaacatagactggaggtgcatacaatctccgatacgtccagccctgaagtcgcagagaaagataagggccagcagggaaagaatgaggatgtgggcgcagaggacccgtccaagaagaagcggcaacgccggcagaggactcactttactagtcagcagctccaggagctggaagccactttccagagaaaccgctacccagacatgtccactcgcgaagaaatcgccgtgtggaccaaccttacggaagcccgagtccgggtttggttcaagaatcgccgggccaaatggagaaagcgggagcgcaaccagcaggccgagctgtgtaagaatggcttcgggccgcagttcaatgggctcatgcagccgtacgatgacatgtaccccggctactcgtacaacaattgggctgccaagggcctcacgtcagcgtctctgtccaccaagagcttccccttcttcaactctatgaacgtcaatcccctatcctcccagagcatgttttccccgcccaactccatctcatccatgagtatgtcgtccagcatggtgccgtccgcggtgaccggcgtcccgggctccagcctcaatagcctgaataacttgaacaacctgagcagcccgtcgctgaattccgcggtgcccacgcccgcctgtccttacgcgccgccgactcctccgtacgtttatagggacacatgtaactcgagcctggccagtctgagactaaaagcaaagcaacactccagcttcggctacgccagcgtgcagaacccggcctccaacctgagcgcttgccagtatgcggtcgaccggccggtgtgaagcccagggcgcgggattccgaggactgtcggagtgggcaactctgcccgagaaagactgagaattgtgctagaaggtcgtgcgcactacggggagaaagagggggggacaaaagagatcagaggaaaagaaaccactgaattcaaagagagagagcgcctttgatttcaaaggaatgcccccaagtgtctgccatcttccgctgaaagtattcccaacagttggaggacgcgtgcaccaacaaatgtttgactggatatgacattttaacattactataagcttgttattttttaagtttagcattgttaacattaaaatgactgaaaggatgtatatatatcgaaatgtcaaattaattttataaaagcagttgttagtactctcacgacagtgtttttaaaggctaggctttaaaataaagcatgttatccagaatcagttaggatttttcgcttgcagcaaaggaatgtatatactaaatgccacactgtatgtttctaacatattattattataaaaaatgtgtgaatataagttttagagtagtttctctggtggatgccttgtttctgaaactgctacgtacaacctatcctgtgtataacatttcgtacgatattgttttacttttcagcaaatatgaaaaaatgtgttttatttcttgggagtaaaatataccgcatacaaaaaaaaaaaaaaaaaactcgag

SEQ ID NO: 3582 - DNA, 1254 bp, Rattus norvegicus
  misc_feature (15)..(15): n is a, c, g, or t
caagagcccggaggnctggtggtacccccaacagatgccccagtcagctccaccaccccatatgttgaggacacccccgagccccccctgcacaacttctactgcagcaagctgctggatctcgtcttcctcctggatggctcctacaggctgtctgaggcwgagtttgaagtgctcaaagcttttgtggtgggtacgatggagaggctacacatctctcagaagcgcatccgcgtggcagtggtagagtaccatgatggctcccatgcctaccttgagctcagggcccggaagcgaccctcagagcttcggcgcatcgccagccagattaagtacgtgggcagtcagttggcctctaccagtgaggttttgaagtacacactgttccagatctttggcaaaattgaccgtcctgaagcctcccgtgtcattctgctcctgacggctagccaggagccccaacggatggctaggtatttcacccgctatctccaaggtttcaagaagaagaaggtcattctgatccctgtgggcattgggccgcacgccaacctcaaacagatccgcctcattgagaagcaggcccctgagaacaaggcctttctgctcagtggggtggatgagctggagcagagaagagatgagataattaactacctctgygaccttgcccccgaggccccagccccatcgaagcctccacaggtagcacacatcactgtgagccctggtatctctggggtttcatcaccaggacccaaaaggaagtctctggttctggatgtggtgtttgtcctggaggcgtcagacgaagttggtgaagccaacttcaataagagcaaggagttcctggaggaggttatccagcgcatggatgtgagcccggctggaacgcacatcgcagttctgcagtactcatacacagtaaaygttgagtacaccttcaaggaggcccagtccaaggaggatgtgctgcgacatgtgcgagagatccgctaccaggggggcaacaggacaaacactgggcaggccttgcagtacctttctgagcacagcttctctcccagccagggagaccgggagcaggcacctaacctggtctacatggtcacggggaaccctgcctctgatgagatcaggaggttgcctggagacatccaggtggtacccattggggtgggttccagggccaacctgcaggaactggagaggatcagcagacccatcactcccatcttcatccaagactttgag

SEQ ID NO: 3583 - DNA, 1048 bp, Rattus norvegicus
ctagctcacactcgctgcggtatttctacaccgccctgtcccggcccggcctcggggagcccaggttcattgtcgttggctacgtggacgacacgcagttcgtgcgctatgacagcgatgtggagaatccgaggatggagccacgggcgcggtggatggagcaggaggagccggcatattgggagcgggagactcggaaagccagggacaccgggaggaacttcaaagtgaatctgaggaccctgctccgctactacaatcagagtgacgacgaatctcacacgctgcagtggatgtacggctgcgacgtggggcccgatgggcacctgctccgcggttattgtcaggaggcttatgacggccgggattatatctccttgaacgaggacctgcgctcctggaccgcgactgacatggcctcacaggcctctaagatcaagtcagaggaagttggtgaggcccatcaccagagggcctacctgcaaggtccttgcgtggagtggctccacacatacctacatctgggaaaggagacgctgctgcgctcagaccccccaaaggcacatgtgacccttcaccccagacctgaaggtgatgtcaccctgaggtgctgggccctgggcttctaccctgctgacatcaccttgacctggcaattgaatggggaggacctgacccaggacatggagcttgtggagaccaggcctgcaggggatggaaccttccagaagtgggcagctgtggtagtgccttctggggaggagctgaagtacacatgccatgtggagcatgagggactgcctgaacctctcgccctgagatgggagccttctccattcaccgactccagcatgccagtgattgttgtccttggagctgtggccatcattggagctgtggccatcattggagctgtggccatcattggagctgttgtgaggaggaggaagagaaacacaggtgaaaaaggcagctatgctcatgttctaggcagcaaggctttccagatctctgactggcctcagaaggcatgaaaagacagttgcct

SEQ ID NO: 3584 - DNA, 2792 bp, Rattus norvegicus
ggtacctggcattcattcccaggtttgaccctggcctaggaggtgaagctcctctcttctggattccccactcctgttcttgaataaggagcaccataatcaatccctctccctctccctctccctctccctctccctctcctctagccgcggcctggcaaactgcaaagctctgctcgcctacgaaactccagggcgccctctagtggactccggagtgagcatggggtcacggtttctttcctcaagctcccccaccacgtcgagagcacctgggcggacccacagttcaccacgaaggttgggaggcccagatgagtgataaggtagtaattagctgctcctcccaccccatcccccaaaaggacatcagcacccaggtctgtcaccaaagaaccaggcaatgatcggataagccgaagcctagcagttgcctcgaagtcaatggtctcctctacttctggatctcccagcttcatcttttggaccagtccacaggtaaatgtctcgcatcccccaccgcacctcctaggtccccagtgagctggtgctgaatggtcatacgtcccttttggctggcactggatgcttggaactgtacacgcggacctcggagtggcctgggtgggagctaggggagcgtccccgcggggtccaagaaaaagggaaggggtgccaggagcctctcccggccggcctcctagaactgcccgcgcgctcccatcgcggcgcccccgcctctgccagaaaccagccttcttagaagggagggggtgggggggaaagtgtgaatgagaagttgggggccggagcgcgcgggggaggggccgctgccaggaactctggcacagctggcgccgccccgccggtcgggcagcctgcgccgcgctttgtctcccctctcggtgagtctcggcgggtccaggaggccccagctccaggcccgccctggccccgcggcccctccctcgccctccgcgcacagcctttcagtgcagagtagtgactaaacattacaagaagaccggccgcgcagttccaggaatcgggggggcggggcgtgctggccgggtaaatacccgcgcgcgcggcctccgcggcggcttaactccgactctactctcgcctgctcttgccaccgctgtctctccgggctcccggacgccccctgcccggtccagttctccgctgaggtccctcgcccaggtcctttgcatgatccacccaggagcgctcctggtcggtcctggaagcagcgaacgcagagggggcgcacgcacggggagcccctttgtagacttcacggctgccaacatctgggcgcacggcgagccactgctggccgccgcctcgtctcggggaccataggaggcagccacgcccaaggccggagactttgcttcgggactaggtaggaaggaggggcgcggtgtggggaagggtgggggcctcggtccagctcgggagcttttcccggtttctcctcccttcccgggttcccgtaatactcagactggggccctcggcgttctcctgtcccctctcccgcatatctcgggtttggcaccccccttttttttttttcgcctcgccactgagggcaccgactgagcggcgccctgagcgtccctagggctcttgtatctctccctatcctggccgcgtcctggagatccaactccacagcgcgagtttctctggcgtcctcctagggagagctggggaagggactgtctggggttggtcggcaaagaccgaggccaggagagcccagcgaggtggccgggtctgagacacagtcttcagcgggtcaaaggggtgccccaggcgctaggcggtggctggagggccgggcacgctggagggttccgggtactcacgcctcgcgctttgctttctgcagccccccgggatgcggtagcggcgctgtcgggaggccgcgaagcagctgcagccaccgccgcgcagatccacgctggctccgtgcgccatggtcacccacagcaagtttcccgccgccgggatgagccgccccctggacaccagcctgcgcctcaagaccttcagctccaagagcgagtaccagctggtggtgaacgccgtgcgcaagctgcaggagagcggattctactggagtgccgtaaccggcggcgaggcgaacctgctgctcagcgccgagcccgcgggcacctttcttatccgcgacagctcgggccagcgccacttcttcacactgagcgtcaagacccagtcggggaccaagaacctacgcatccagtgcgaggggggcagcttttcgctgcagagtgacccccggagcacgcagccagtgccccgctttgactgtgtactcaagttggtgcaccactacatgccgcccccaggggccccctccttctctttaccaccgacggaaccctcctctgaggttcaggagcagccacctgcccaggcactccccgggggtacccccaagagaggttactacatctattctgggggcgagaagatcccgctggtactgagccgacctctctcctccaacgtggctaccctccagcatctttgtcggaagactgtcaacggtcacctggactcctatgagaaagtgacccagctgcctggacccattcgggagttcctggaccagtatgatgctccactttaaagagcaaagaaagggcagagggggcctggacggcgcctctcctccgaggcacatggcacaagcacaaaaatccagccccaatggtcggtagctcccagttagcccagcagaagataggcttctt

SEQ ID NO: 3585 - DNA, 13187 bp, Rattus norvegicus
tgattcagaccccggggcccgaagctcccatgggctctgcagtcacacagtgtctgtcacctgggacccctttcctgttcctgatgtctctaaggctttcacacacctcactcagcctccattgccaggactctgcctcaacagagtgtgccctcggccactccctgggcttctgaggtgaccttcatagcccagcccagccccctcctctgctgttcactcacagcctgtgagctctcaccgccccagtccctgactgacactcggctctcatggcagagcggtgcaggccacactgcccacgctgcagctgatcttcaggctccactgggacagtggcatcagctcccggcgggtgcactctgcctgtggcaatacagtacttactgtgctgggacgtgtcctcccctgtgtccctgggtccagcatttctttattgtagacctagtcagttcctggtgggctgcagcaagggtggggtagtagcccgaggactgttggtgcttctggcccaggggtggcatagtggctcaggtgaggactgtttttacctctccaggagggtggcacacgccacaggcctgggaaggtgagagctctgtgcactgtcttgagggctgccatgggagaatccacacagactctgagattgtctgtgttgtcctctaagtggctgtcacagctcctttgagagtggagggcctgtaatacctgcacccatgtgtcgaggcaggggtggacctagtcccaaaacagaccttgtcatgtccatgtgacccagacccttcccactgccctctgccccacctctgtatggagtttccagagcagtggttctcaaccttcctgagactctttaatacagttcttcatggtaatcccgaccataaagttattttcattgttacttcataactatagttttgctactgttaagaatagtaatagaaacatctgtgttttctgatggtcttaagcaacccctgtgaaagggtgctttggcccccaaaggggtcatgacccacaggttctagagtgaaggagcatccttgaccaagttctttgattttgaggacagggtttctctgtgtagccccaggtgtcctggaactcactctgtagtccaggctggcctcaaactcagagatcctcctgcctctgcctcccaagggctgggactaaaggtgtgaaccaccatcacctggaaccttgaccaagtcttaaacaaaagccaggctggtttgtagacctgcagtcctggtaaattcggagcccgacgcactggtgggaaaggctgcttcagttacagaacaagcccaaggccagcctggaccccatcctgaaagtaaagatctgggacataggtgagtggcaggaagcagtccccacgtcccatctacagcacggggggaaatttcaggtgaaagaagctgtcagggaaagagggtaatttgaggttctttcctttaccctatacgccccagggccttggctatactgggctgggggaccctaagctcagagtgaaagaccaccggggtggggaagacccccactcaaatctcgggacaacacaacccccaagaactcacgagaaaccagtcttgatgtaataaacaagaggtgtatttgaggaaccagagctctggggacgacatgtatctcacacaagagacagaggagttgaccccgagcccaattaggggaagggatttatagggaaaattacataggtagttggcaacagtcacacaaagcaatttcattggtttgtaacttgggctcagttcaactctaggccaccctccttctggggcaagctgaccctaattctcgtttttctcaggactgttgagtcaggccttatcgaggccagatggtttgtggtggctatagccaggctacatccccaaaatatgttatgttattctttgctgtgaggtgcacttgtcctcacagcagggtcagtgggggatactttaaaatctttattctttaattccccacttctgcttgtgactagttctaatcttagaactcagggccttctttttcaatttgtcctaaggtcttttgaggcatgatattgttggtaaagcattaaaatctatactgtattaactctctaataaaggctgttaacttattaaaaatacagggtccaaatgtcaaaagtaagaagagaataactaaggatcctaggagcgtggaaattagtctcacatccccaagcagaacagtgtaaactttctaagcccccacaacgctggatggtagcctggtctcagacatctcgggggcaaatgtaaaacctcagtctccacaattggctccttgcttctgaacttctgcatccaaacttgcccccaggtgaaaatctcgttgggacttctaggggcatactctgaagatctgtcaggaatgtcctaggtgtctagcccagctaccaacttataaaagtcaggggtgagagtgggccaccatgtgtatggtggggtcaccttggagatggaccatattacctccccagcctgggaggaaacttaccaaatcagtttctgggggatatggggattataagtgcttacaacagagatgaagcttaagaggattcgcagtcttttctaacttccattcatttttgagaacatctggtgctgtcttcaaatgggaggcgtggacccatgcagcaatcccatctaccttaacagcagtgggagtggttaacagtactagatagggtcctttccagtggggttctaaattctcagtcttgtgtcaccggaccaggactgcatcttctgctgggaactggtaaggcaccctggacttcccatcttgtaggtgtccttcacttggcttcaaattccactttggactgtttctaaagcctttaaatgagcaaacagggttttaggaaaaacctcagggtagggggccccacccgattcaaggtgggggctcccatacataatcttataaggtgttaggccaaaagggtcaggagtgttccgtacacagaacagagcaaaaggaaggaggacagtccagtcttcccccactagtctctaaggccaattttgtcaaggtctcctttagagttttatttatctttttcacctgccctgaactctgtagtctcttcggggacgtgggtaaggctgaatctggaaggggcattttcgagggaaggagtgtcacccagtctgtgccagtctccacagtcaatttagtcagggtctcttttaaaattttatttattctctctacctgtcctgaactttgaggtctgtagatgtaatataatttttaattgacctctaaatacctggccacactctggcttaccttgacaacgaaggcagggccagtgtctgacccaattaacttgggcactccaaacagggagaagatttcttctagtatcttcttgatgactattgaggccgtctcttgcttggtggggaaaacttttacctattcctgaaaagatatctataaacactaggagacatttgaaatcatattttcctggttttatctctgtgaagtccacttctcagtaggatccaggctgttccccacggagcctcctaccacagtcaactttcctgaaaacagttaccttttggcatagtatacatcagtgtactatctgttccacgagatatttgagacctgtaacataatatttagtttttgaaaacatctggatgagtttgcttacccctaagtgagtccatttgttttatcatggcctctgcctgtttttgtagcaggatcttctttcccgttgaggtgtaccagagtctcttcctcggcctggctgggtcatggagggcccttcacatagccagaatctctcttttcttgccctcagatgtcagcaggcccctctgctgatgggctgtagcaaaggcatacctgctgtccacagagatgttaagtctctttctcagctcaagggctttggtgaggggagcgagctttaccctctgagtagtggtgccttctggtagggcctgagcccaaatgactctgtttccatctaccactgctgccccagcccatctttttccttctctaagaagctgttcccatctctgaaccagatggcatctaccccctctgatgactggtcagtcagatctttatgccacccctgtgctttagtgagcacctgctgacagtcatgaagggagatctaggtaggggtccgggagcagggttgcagggttcagactcgtaggagcagtctgggatcacaaagaacaagtgggatacccggcccatgccaaggtccaccattcttcgggtagtccatgagtatcatttgttgccggtagtcccctgtactcaaggtcttttgctggacactagcccatttgggcgtaggagcacagagtgttgggcccccgtatttacaaaacaactgggcaggtttcccttctatctttgtgcatagccagcactctaggaccaagaggcttgccttccgggctgctggagaggcccctcttgttcttcctggggcagtccctgacccaatgtcctttttccttgcgataggcacattgatctttagctaggaattctcttctgttgccaggtactgtcttcctagtttccctaactactgtggccagtatatattcctctcctgtcttttatccctcttagctctctagcttcttcttctttatgtctcttttcttccttagcttcttgctctttttacttctttcctctttctcttcctcagttgctctcatctgcatctttctctacagctattagatgctgtccacttatgtaactacacttcaaccttactttctctgtaacttacactaactctcaacaacttagcttaacccttcaaatttctgtaactttctctttatatcttttccttatcttagccagattggtggggtgttttccagcccttcggagacctatccttggagcctggcggcagacccggagcactccctaccttcaggggtattcaagtcaacagtcaggagtgagggtcttccaatcatgtctggaacattctttctggcctctagtaggattctgtctttcctcggtggtaaagaagacctgtaacagttactaacaagcatctcaaatgggatggtgagaaaacaagagaatcttgagaatagaggtccactgaagagggcaaatagcatttagtcacacagctaaaccaggaggactttttgggacaaaaaagctgttgtaaaaataagcacaagctttgttcctgtgaaacagaaaggcgagcggagagggagctgatctgttatcgactagctctctggacttaagaactaataacaaaaggatggagagatggttaggacctgggtgctagatgccaagtggctgacatagaattgtaaccagttcacctgggactttcaggacctcagtcgcaggggttggggatttagctcagtggtagagcgcttgcctaggaagcgcaaggccctgggttcggtccccagctccccaaaaaaaaaaaaaaaaaaggacctcagtagcagccctttaccaaactgactcactgggttaaatgcccatggaaaagaaaacattaatactgaccttggccacagccaaagcctgaattctaaattgtgactggaaaaacaaagttcttcacagtttgttgcagatcttttttaaactattttaggggcttctctgccccccaacctggggcattttgaccacaggggtaggaactggctgctgtggggataggatcaaaggcactctccatgtcaatgatgactaacagggaaggttacttaatgttggagatcaactcctctcttggaatagggccagcagataaggcaggctcccttaaagaacttctcttaatgaacgctctccttctgtgagcaagtgttgaagatctggccactgaaggcagcaactggaattattattttttcagggccaagagtctcttaaaacaaccactaactctatattatctttttgttgtcaaagcgtcaaccccggccggcctcatcaccttgaaactcctcttacgctgacttggcctgagctgcgccactgcccacgcgcagcctgcagcttgctagcaggcctgtatgcttgccacccttagcccctatattttcctactctgtgctgtcccttccttagaagctgtgaatgtttaagcaacagggagaatttttcttcaggatctaaggtaaagctttcaggctcttgttaatgcctgcttcagacagggttactcgctaacctggagttcttcatacacaactgttaacagcagctagactggacaaggggagcaaagggaggggcatctctccttggggaggaggctcaagagagaaagataaaactccccagcagaaaacaatttttctcaagcaaattatttttaacttttaagttaagcaccaagaggaccaagtaaaactctttgacaaacaaagcaaacagtttcatgatttcaaacacagttgtcagtccaaattcaaaaacgaaacaaaagccaaaaagacactcgacaataccacagaaaacaaaccagacaaacaagaccaagacaaagcatcctataaccaatttccacagatgcctggtaccttcagtaccttgcccaaactgcagcttaaccttagctgcttctgggatgagatggaccatctgattccacctcccaacaggattccagagtgtcctcttgccctaacgtccatccaatggtccaccatcaaggacaaaggggttgtcacagcctgccccatggcaaagaaaaagaacaccaaacgcagaaacagaacacagacaacagacactaacacgtccaagcacacttgtctgtgcctatacttaaataggcagccgaacgtgacctctgacggagtgggattccttgtccactcccgcctaggtaaaaggagcactccgtctctttgttccagaaaaccacagtcaggtcctcctgactgcccacagtcgggctctcccgactgctctccacccatggaacgtcttccagggctgcagcttgcgggctcggggcgtccccccttccgcagccagaggatccttacggaccacagaggcggctgcacagagtgggattccacatccactctcctagcacagaccggtaccaagacacacatatacacacagtggaaccaaaacagagacagacgcagacagcggccgcacactcagacacaattggggattccccttacctccaaggtcttcggagttgtgggtggttgcgagatcccggatgagcccccaaaatgaaagaccgccggggtggggaagacccccactcaaacctcgagacaacgcaacccccaagaactcacgagaaaccagtcttgatgtaacaaacaagaggtgtatttgaggaaccagagctctggggacgacacgtatctcacacaagagacagaggagtcgaccccgagcccaattaggggaagggatttatagggaaaattacataggtagttggcaacagtcacacaaagcaatttcattggtttgtaacttgggctcagttcaactctaggccaccctccttctggggcaagctgaccctaattctcgtttttctcaggactgttgagtcaggccttatcgaggccagatggtttgtggtggctatagccaggctacattcccaaaatatgttatgttattctttgctgtgaggtgcacttgtcctcacagcagggtcagtgggggatagtttaaatctttattctttcaagagacctggccctgggaatccatgctgctttctcacttgtcacaactttcccacctaccccaccaccccctccaggtgccagtcctggggctcccaggctcctgggttcacctcatagccctgggtgttctgaaacttgctatgcggtggaacaatgcagagatccaccctcctaagggctgggattaaaggcatttaatcctaaagaaacccggaaccctttcttggggcggatcccatcaaactcagcgggtgtgaagctcagtgaggaccgggtcacgaggtggggagctcatatcccaggcaacagcggcaacaaaagaaagagaaatttatgctccgatgcagggggtggggtggggggggaggctgtgcattggatgcccggttccttagtgtggcccttgttcagtgtgacccgaacagcttctggggcacgtgaagctgctggccagcaagcagttcctgcagtctggagggacttttcacacagcccagtccatccccaggacccttgggagctgcgatgccgctcgaagccaccagggggcagcaggacacacgagtaggagcctgtccaggttctgatcacctaagaggctgtgagctttgaaagctggagaaggctcttcatagtgaagcagccaggaatttcccctttgccccaaatcctctgttttgcggctttcacggatccttatggtcttccggctgaaacacagattgcacctctggctcctcccctgattgttactcacaccacactctccagtcacagtgacatcacacacacacacacacacacacacacacacacacacacacacaccccttggcatgctgaggtgagggcaggagaattgagaattcaaggtcaggacaggagagatgactcagagggtgagagcactaactgctcttctcaggtccagagctgaattctcagaaatcacgtgatagctcacaatcctctagaatgagatctggcgccctctgctggcgggcaggcatgtgtgcagacaaaacgtgtacataataaataaatcttaaaatgagaattcaaggtcaccctgagctacaagacataacaacacaaacagcataattgggcgaacacacaggctgcatagaccagtaacatcacgggccactctgtagggggagttgtgtcgatttttcccttccattgctgaaattccaggaccagtgtataaatctagtgcaggggaaccctagagccctgcagtagggttggtaggtgttcctccatgcggtagtgtccccaatattgttcaaggatctctttctttttattttttttcttttctttttttcggagctggggaccgaacccaggaccttgcgcttgctaggcaagcgaaggatctctttctttcttttttttttttaaagatttatttatttattatatgtaagtacactgtagctatcttcagacacaccagaagagggcatcagatctcattacagatggttgtgagccaccatgtggttgctgggatttgaactcacgacctccggaagagcagtcagtgctcttaaccactgagccatctctccagcccccaggatctctttctttaacgaaatcttatttctatccatttctttttcgttcttttaaaaatatcttttttttcggagctggggaccgaacccagggccttgctctaccgctgagctaaatccccaaccccttaaaaatatttttatgtaaaagggtattttgctccatgtatctctgtgtgccacctgcatggagcaccccaggcggccagaagagggcgctctatcccctctgaggctggagttacaagtcggtgagagctgggaactgaacccaggtcctgtggaacagcagtaagcattcttacttattggggatacagtgagccccaatagatattcggggctcctcatcaccaaaactgtcctgcatgactcagtgcactggtctgagctggttcaaagaagaaggccctactgtgattacctcggatcggctcctgtctggttttgggggatctctaacatttccctggcaccacacccggaagaccccatatttgcactgagagcttgggtgtcactgtctgtattagttactgtggtccttcggataagacgacccccatggtcttggtcatttgaatacttagttcccggttggtgctgtttggggaagcttagtaggaggggccgtgctggaggaaggctgtcactggggcagcggtggagatgtgagctctcacacagtcctgctgccacgcctggtgcttgccctcatgatggtgatggactcttaactctgtgggaccctaaaccccagatgaaccttctataagttcccttggacatggtgtttttatctcagcaacaggaaaggaaccaatacagttccactttccatcactgtggcttaatatgtgacaagacacagttcagggaggaagggtttgtcctggcttattgtagtccctaacgctaaatccgtcaaagtggcagcaggcccttctttcctgttccagcctgctggcctcctcagcaaaatgtcccgcaggagctgtccaaaatggaggaaaatcattttaaaatggtgtctcaatttcctctccttagcctgcagccatcacaggagctgtccacggtggcgacaccttctttcttggcctcagcctggagccttacatcgtgagagctgtccacggtggtgactcctctcctgtaacccagcagcccccacagaaatggcacctcagcaaaagtcagctaatctgggaaggacgtcccactctaacccatgggcctgatgccagggaaaaggagtggaaacaaagctagcagcccctgagcagaaaaatctcataccagtgacatggctcagcctgccaagggtgtatgggaggagctggacttcttttataagaaatcacaccgttgacagacttctctctctctctctctctctctctctctctctctctctctctctctctctctctctctctctctctctctctctctctctctctctctctctctctctctctctctctctctctctctctctctctctctctctctctctctctctctctctctctctctctctctctctctctctctctctccctctctctctctccctctctgtctgtctctctctccctctctctctctctccccgtctctcagcttggaagagcctttatgggagggccaggaaagtgatggagatttcggctttgggtttgcaggaacaacagagaagcgtcaggtaggacactggtaaaatctaggaaatctaagaaagagagctcatgagcccacttgcattttgaggagcccaagataagggtagagcagctcagaagaatgacagacagaaagagatttctgaagagctggagtttagttgtagcatcaggctggtaaatagatatctcgtatatagttaagaaaataaagtttccttgctgagctgtcaggtttttacctcagcttctgcctcccgtgtcttcggtgctctgaatatgagatgatttaaacggtcccgggcctctgagggggactcctgcaatatggagccatccaaaggcagagcaacaagaggcctgtgaacaagactttaagacagactatggggaatactgaatcctgcaggtccaagttggagctgcaagacccaggtccactgagctaggaacggatattaagagacttcagggagttaactccagaacacaagttgctgaaagataagagagtgcaggagtacaaaagtttcagggggtggtgctggtcctgctcagtcctgccgactcatgctgatttggtggaggcctggcagtttctgctgacttttaccaccgctgatgattgctgtttgcaatcctgacgctactgatctggactgtcaattagagattgaagttgcccccaggaacttctacacagcaaacagctcagcctctttgtttcttctgaactgaccagccattgctgattcttgtgaactgagctgcagattaatttgccccagagaaccatttccgaacaggcccacctctccagtatcctcataacatttcttttccacaactttccatgggtggtggactggaagggagattatgcatttaagaattccattattaaaaataggttttgaaaaatctaagccaattatctcagctggggatgtgctcctgagagttcaacaaaaaggcacatcctgcacctcagttccctgacactggagaggagaagcagaaatcaccacagcagcatggctacagggagagcccagggcagcttcccgaccccatcattagcagctaaatcaagtgggtgggaggaaatgtagtgacttatcttgtgcaccctgcactttagaggaccccacttgagtctctgatcttcagccctgggggctcataatcctggggacaggacaaggctctggccttccctgtgtccttgtgatcacagactctccccatgtcttcacagtgatggagagggcacagcctggaggtgacagagctgaggcctgagcccatcaaagacaagaactgactgagcacacctgggcacagccctgtccacactcagctcccacagccttactctgtcccaccagacacacacagcttagtgacacagattctggaagcttctccatctgccttttatttttttcaaaaacaaaaccaaacaaagcaaaaccccaaaacaaaaaacctctaagtattccatccagcaatttaaaaagccatccacacttgtgtcaaggatgtgaacaatcaagttcacactcagattcttattctcaatgtggaaatgaggggcagaagctcagggtagcagggagtgacaggatgcagatgtccccacccccactcctaggctggaccagcaaggttggctgtggaagggaacacagacagtgcagggacagggtcctgaagtgcagggcaggctgggcttcacagttcttcacactgaagccatagatcacagggaacatcagacactggtgtctaaagagaactgaggactctggatgtcacaggagagacctgaacacatcgtctgtcactcagtccactccaggcagctgtcttcatgctagagaccgagagtcacaaaccatcactgtgaggacagcagcccaacaaccctccactcacataggattctgggagtccctgaaacccaatcatgtccacattgtccctccccagttggaccccatagtgtcacctttacaatctgggagagacacatcagagctctgggagctgtccgtgcctagggtaaaacaaaacgtatgtatatgtatatgtgtatacataatatgtgt

SEQ ID NO: 3586 - DNA, 15698 bp, Rattus norvegicus
  misc_feature (5928)..(5928): n is a, c, g, or t
  misc_feature (6377)..(6377): n is a, c, g, or t
  misc_feature (6431)..(6431): n is a, c, g, or t
  misc_feature (6446)..(6446): n is a, c, g, or t
  misc_feature (11778)..(11778): n is a, c, g, or t
  misc_feature (15191)..(15191): n is a, c, g, or t
ccacgtgtggaggtcaaaggacaacttggtgaagcccttctttccttccttgtcactgacttctggggattcagtttgggtcatcaggcttgcgcagcgagcaccattgcccaactgagctctactgccagccctgatcttcatgtgaatggagtattatttatgtctgaaaaatagctttttcttttgtactgatatacaagatctcactctataagtagttagttgtgatgtattgcttttaaactgttgacatttaggttgttttttgttttttgctattatgaactgtacatttatgagcattcttacacacaaatttcagtgagcaagtaaatatttctttaggggtgcataatattcagcttttgtgattactatcatatattttcccctcaaaaaatgctatttctttgtcacctgtcttattcaaaccttgggtaaaaaagaacatgaagcctcttccataaacaaacgtaattaggcagacaggattccaaagacgcgcttgaacacagcacctgccctcgaggccgcagaccagagatacacatgggaaataaaggacctgatacattatcgttgatacaatgtactgatatacttcacctgatcgtcttaataaccacaggagattaggttaaacctcacatcactattgttcctgtgtggaaagggatacctgtggggtggcttcccaagatcacatagctgagtcatgaatcagaaatagagcctcggcctgcagcctcctaacccatctctactgcatttctcacaactaagcccattggaagcagccagaaattctagtaaaactgaaactggaagaggaagatctaggatttaaacgcctgccagctccagaaggactacaaacggtccacttaggggcagcttatcagcatctgcaggcagaactaagcttatttcagtatttcctgagaaataatttttaaatgtatattaataaaaaaaatttggttagaactcttttaatagaaaggttttgttctagaaattaatttaagatgaaaaatatggcttcaaacaaatatcaaaattatatttacaattgctataaaactaaaaaactgacactaaatgaagaactgcactaatagtttggaatctgctgtaatctaattacagtaggtacctggttgtatcaattcgggtaggtggtggaaataccagaggttcacttgtacaacttagttttaaaagaattatagacttgtgttttatttttgtttgttttgtttcattttcaggacagggtttctctttgtatcccaggctgacctggaactcaaaaagattcaccctgcctctgtcttcagaatgctgggattgaaggcatgagccaccatgcctggtagatttgtgtattcttgatgaaacttaaatgacaaacatcaaagttattcacaggcagtttaaaagatgctatcttatgttttttctgtgcctaacaattgtagtgttctatgatggccagggccacagtgagggccacccacatgggtccttctcagcactcagactcctctctgtaatgtagaagcactataacagttgagtaaagaagcactctggttaacttctttttaaaacttaatttatatacaaagtgatttaaaagtgaatctaaatcatgggtgaaaacagtatacaggttcctagccagagagactgggaagactacgcaggtcagaatttcttgaaatatctcaagcattaggaatatgcccccagccctaagccctcatgcttgctgtctgctggtacacacctagaatacttggggaaggcagtcaccaaggagggttaacacaccagtctggaaagagtgactaggaaagccagctattcccaagctacagtcaaggaagggtgagctcagggctgagagtccctagactggaagcacgctgtgaccaaggacgctttgcttttcagggcaagcagtttaatgcttacagaatcttaatgggttctatgatcttcaaaagagaaagaaagaaagagagagagagagagagagagagagagagagagagagagagagagagagagagagagagaggggggaaaggaaaccaattaaattttttttctgttcaataaagcaaataggatatttttattcagaaaactgtattagctacagaatattttacacttcttatgtcttagttgcctaaggcatataaagctgttaaaatacatttgtagcatattgtgtacaagtagtatccccaatgacagtatatacttgtttctcccttaatgtattaagacagaataggagtcttctacaaatgagattaaaactgagtgctagcttctgcctagtctgactgggtggacttcctaaggagaaggagcggtaagagggcacctgtgtgcatgtttgacttgcagccaaaaatggtgtttatggaaaacttcagatggagcccagaggcactcagccaacaaaatctacagctgtgaaacttggagcttacaaggacccaatctccaaaagcaaaagcggaatttatggggacagactttgaagctggttaatgtgcaaatttttgtagcaagtaacttttaaatttctctattaaatagtgagagggaaccccatccaagtgtggccacttacttacccttgctctcaatagttactttgtaaatacaattccagagtggtggaaagaggagttgaaagtctacccttaggagtctctaaacttctgcagcctaacctctgctcagctggtgagcagtcctgaaaacacagccgcttctggctggacaacaactagagaagctgcagcatgtaagaatgtctctgaaaaagtacctcaagcaatgggcacatgtccttgtccccacagcccttatactcacaatgtactgacagcacacccagaagctgcctgttgtcctaccacacaaactagaaagagtctaggtgtctttaacacagttaagaatactgggcggccagtcaggcagacttgatgggagaataggcaagcaactacgctataaggtcaacaaatccctttgtcattttaaagaaaactgtagtgtatttctagattgtatactgaaatacttcagctaaaataggaattaatacctttagggacagagatttggatctaataaagactaatttacttgtatatggcacctggtataatcattatgtttttttttttttttttggttcttttttttttttttcggagctggggaccgaacccagggcctaggcaagcgctctaccactgagctaaatccccaaccccaaatcattatgatttttaataaaaagcaaatcatcaatgggactagtagcatttatgtcatacacagaagagatgcttcagatccaactccaactcctcactatgacatacctactgtgtgtttcaggatgacggtgctgtatcctctgtgccattatcaatgtcacctcagccaagttgatagcaccaacttaaatgactgccgtaggatgctgtgctccagagtcaaagtataacatccacagccagccatcagtgatcatcactgtccatgacaggccttcaagttggaagcattccagaatcaggaataccacacaaagccactgtgtgggtgcatggctgggtatgtgtaggtaaacttaacagtatccttaacttactgtatcatttttgtgtccaaacagcctaaaatagagcacattattgaaaaagtctagtctacaggctcagtattagggaggctgatgcaggggaatttacactcaaggccacagtaaactatacagtagaaattcctatttgtaaggtggcaatggggatgtggcagtgtcctaagttgaatgacaagcttttgtttgacatacttatgcataacagtggaaaaagatacacttaacatgcttgtgcttttggggaagaaatattcctctacttgctctagtgcctttgctatttcacttaggtgttttcctccatcagccagctagaaaatgacacaaattcctacttgcacacacagaataagtcttacacaccaatctcaccttgattaccctccatccctggttctaaaggtcaaagttactagtgctgtgtctcaacttgtattgaaatgtctggcattaataaaacaaagaaggaattaatgtattttttaacttgtgaagggaaggagaggaatccacaaagtcggatttcccttcctaagtagcattagattggtctacattcataactttcccagcaggcctttccaagcttttacttcaaacaaacagtgtctttgttttccagatcctcttatgtgtaacatttgatcaaagttttaaaactggcagctaacagaggagaaggaaatactgctcactaggcattacacaaggccatacttttcagctcatgtggaggctgctacaagctggactgctgacattttctaggtaaatacaatttagtactagagttccagatcatgtaccctgaatactgttttattctacttcatcacacataccaagacgagacccctaaggatcactaaagcaagccttaggaaaaatcctttccttttttcaccaggattcaccttaaagagaattacaaagcatcaagcaatcatattcctagtcaagcctactacacaactttaataccgaacaaagaccaaagttcttcctttgcaattaagaaggggggaggtactgtttcaggtaactaaatgacctatacctactatcgaagtcatactgatgaggtgggaatctgataagaaaaccagaaaaatcaactcatcaattatgcctaaacatccttatccaactaaatccccccttcaagaaatggtggaaaaaagattagtgaaagagatatctcacactttaacacgcaatttaaggagagagggctgaaaggaaatcttgcagggaattttatccctttgaactttcaaataaactcttaaataagattatgcaaacttactaaaaaccggtcctgattagagggaaaaaatgcaccccttctccacgtcagttctagaggctttctccagagttgttaaggtttgtgttgggtaaagaaagacctcctaacaaaccagcattcttttccacatgatcagagctaattggcccccctgcagactaagtgaccaatcacatcagcttcagctgaaaccagccctcacggacattataaacacaggaatgtaagctgcaaagccagtccaagacgagaacctacaaacgacactgcaggttaaaactacctggccaaaaagacaagagtctgctagcttccttaagaccttccttggtaggctgatcccacaaaagaactggtgagtacttaagtaactttcactcttactctttcctttaggggaacaagcaaggaagctgacagctgataggaccagagcctagattgtttccaagagagctttagaacagacattacctagaaagtcagagctaaggtttgttcttttccttaaattttagaattggccaacagccatgctgaaaacattagtgaaaggttggctctcatttgttttagtaaatacatacaattctttgttataatgtgtaaatgtaggagaagacctaaaaaattcagtggctttaaaaaagaatgtgtggggtttgttgttgtttgtatggaactagaaaaacctcgaaataagcatatggaaataaatgccaaaagaaaattattacgttttaattttcttaatcttcaagagatgtgtatcctaatttaaattttctttttaagcagggggttattactagcatagattctgtatataagaaaatacaatatgaactactctctgagcttacataatggggttaatactcacattgtttgccctaattataaggccagntaggtgctatgagacttcaacacagcctttaaatgttgcataggcatgacaaccactgtattcattagcatttctaagtgcagcctctatcttaactgtggaacacgaattacagcactcctctagaagcacagcaacagaaaactaactttaagggctaccatctaatgaacagagcaacattgttattttgatgattaatgaagctatcaaactaccatttttaaaataagtaacttttcccatcaaacaatctataaattaataaatattttacagcccccacatagatacacacataaattttccacttgtctattctacttcctgctgtgaccagttcatgaaaatcacacaaaaatctaaatctagacaaatccattccaaatgcacttcatagttaaatatagcgcatacctgtaaccctaggacttgggagatataaacangcaacatttgttcaaagacaactggctataaatgctgactttgagaccaacctngactgtatgagtccnagactcagaaagagaagggtgaggaaagggaggagggaaggaagtggttatgcattcatgtgcttgtgataatgtaaagttacttgaaaatatgtgtacccattagacacatctgaagaggaaggggaaaaaaatcctataaacattaggcaacaacaataaaaaaaaaattaaggccagataagcagacataaaatcatactgaaaccatcctatagaacacagttgagaaattaggcataaactttacaaagtggcaggtagtgtttctggaaccgtattatttgaccttcccttttaaccacattctttgttttaaatacctggccaaggggacatgggagcttgtccaaaatgagagagctatgtacagagtcagcgtcctcaggccaggccaggctcctatccttatgcactacacaacagggactgactacatgaatgtacagggcaatccactaagaagcaacattttacttctctcaacctcttgccaaaatgatcccatcgaaagtcaacaatgtttcatgggggaaaaacaaaaccaaaaatgtttcactgttttgatactggccttttgacttccctgccaatggctttttccatgttatttagttgctggagggaggaaaaaaatgaaattgtagagagcctggacaaacactgctacaaaacccatagataaccaacagcagtcataaaaagatccaagtgaaaatccagtgtgtgtgtagaaaggctctgcttccagtgtggggttatacagcaatgagactgaagcaagggggagtttgctttgcttctgtgagtggggaacacttactgcattcccacttaggacattggctccaaagtctgcacctaataagtattcctgaagaaccaatactccctaggcagtcctgcttctctccctaggcagtcctgcttctctggctgttttgcttttgctttctgagacctgctctcaccatgtagccttgcctggcctagagtttactgtgcagatgagactgggagatcctcctgcctctgcctccggagttcaggaattaaaggcaggtgctgccacccctagcctctgttgtagttcttgaacacaccattgctcacaaaggctaaccagaatcaaatgctttgggttttagcactaattctagacttgggtatgcttgggaataatactcagaaactgctaattttatctcagaaaatttgtactcactttcattttgaaatgggaatggcataagtaggtattactgtaagttaagcattatcagcaaaacaaagcaagtaatactgtttaccctattcaaggtattgccttttagcctcccttgaatttggaatgatgcctagcacaagataaataacatctatcagctactatacaaacattcccaccgcacaaccatgcataaactggcacggtttaagttaattacctgagtgacaggagtaaaaagagcatctcttaaaagtgctagaactagcaaagactagctttagagtacagtaccagtgtgaatgctgaatatacagcttcttgtagaaaaaattaaaagtatacttaacttgattttgctgtggttagccagaccataataatccacagctcccaagccctcatgtcatgtgcacagcaccttgccttctatacacttcagtggttccatatgagaaatggaatctctgtgcacagggaaagatgggtgaacagtatcaaagtatcttgtaccggcgtctacaaaggttctgtgattgtttctaagaggaaagagatcttttaaaatattttaagaatctaacaaaataaggagcattaaatatggcgctgaggtgtggctcacttgtcagcactcgccaaacaaaaaaatacacccaatgactatgacaactcagtagggcagtaagtaatacaacatgaacagttttgttttttaaagtctatcacatgaaactgaaatgcccatctgatctaaattggagaactatccagtattcaatcagctctagctcaaatctgaggaaaatatgaaagaatgtcccgggtaccatcaccaaggattgcaacagtctcgggacaaaagggaaagccatacataccaaatcccgtacacagaaaaaccagtctacaaatcccagagtctcagacgggacttaacccatcaaaccgagcaatctcacacgaccttcttaggtatcatgcaacatgaagaaagcagcaagatatgatagcacttagttgtaattgtctttagagaggactgaggcaggagaatccagagttcaccagcctaaacatgaaaggaaacaaaaataggggagtggggttgcaagagtggagcacaagtgggtatgcggcattctcaaggtaatctactttggaagaagcacccttaataaaaacaaggccatggtttttattacctttttttattacctttatcacaggtaataagtaacttgttcctgagagtcatgacacaaaagtcttgatatatatatttatcatgtccaaggttggtcatacagtagatattgataacatagagaaatgcctaacccttcatgaaaactgttcacaagaaagaaactgattaaactaatatcttttcaaatttgtcatctgatctcttaatgtttatttttgccttttaagttcttaaaactacttcttttggtttacttattctcaaagctactgtctttcaaagctggaaggagggctcagtacaatagcattcacctagcatgcacaaggacccagggtccattcctagcaccaggggcaagtggtattatctagatacacgtagctggaatgtcttttattggtgtgcagggttgaagcaaaggccttatatatgttagggaagaactttaccaggaattccttgcattgccaagatttgatatggacaaaggtgtgtgctccacagctgtccattcatcagccaggatagaaataatataggaatatatccatgatggcaaaataatacaacattttcacaaggttttaaataggctaattctaaggaatacattattcttgggccactgagatgtggcttagtgggtagaggtgattgttattaactctgagactggagtttccactataaagtctaacttgaaaacacacgcagatctgggggcgtggatcatgtaggtgcttgcctagcatgctcaggcccagagctctgggttcaaacaccaccaactgcaggaaaccaaagtatttgtagatagttaatgctaccttccaaatgatttttacttatttacaaagtaaaatactaacgtttttaaaactagtctttttaattgtcattattcatgaagattagcaaattttttaaatttgttatttagaaataatatagttaactcaataaatacttaaggcctaaatttgtacaaagacaacatgtaggttttttttaaaagcacaaattataaacttcaccctctggaattctaaaatatatttagaaaacaaagtattaaatggtgtttttacagtcaatcaatgaaagtgtaaaaaatatcctaaagtaatacataactagtaaacagatgacttgaccagtaattgccctctcatgtaaacactgtaagaaagcttcataactcatgaatgctagctaactctcaattagttaaggattaactatttcactcttgtttcagagaaacacagcctgagatggacagcaggaattgtaaagttaatgctcctctcctaagtcaaagataccggaggatggtcacaaaagatggccacagcacacttcaaatggatggtgctcaaagaggtcttgtgtatcttcgggatgcatggggaatcctaatggacatgcgctggcgctggatgatgctggtcttttctgcttctttcgttgtccactggcttgtttttgcagtcctctggtatgctgtagctgagatgaatggtgatctggaaatagaccacgacgtcccgcctgaaaaccacactatctgtgtgaagcacatcaccagtttcacagctgcgttctccttctctctggagacacaacttacaatcggctatggcaccatgttccccagtggggactgtccaagtgcaatcgccttacttgccatacaaatgctcctaggcctcatgctagaggcctttatcacaggtaattattttttttttaaatactacaaaccttttataaagtatttagttggctaagacaaaactgtttatattgttataagtaatttatttgtattattataagcaggtgatgccaaagaaagaaatgaaacaatctagggacaaacaatagaaatataaagaattttggaactacataagaaaaaagatcatatgccattaacttacaggaatatgctttcgaaaatagtaacaaaaaccataaaagtcagttcacacagaagttattttgctgaatatgtaaggaaattaaatgcaaattttaagccacgttacctgatatacatctggctttttgtttataatttattttatgtgaattggtgttttgcctacacatatgtctgggtgagggtgtcagatctggcagttacagacagttgtgagctggcatgtgggtagtgggaatgaactcaggtcctctggaaaatcagtcagtgctcccaactgctgagccatttcactagctcactttttatctttcttcttatggtaaaaccttctacttggagatcacctattcaacatgtactcaatacaaggaaacccatagcaacacattcagcgccatcttttaaagttacaaacacacacacaaaatgcaatgtgaatatggacataaatatttatttatatttctggtaatatatagtactccataggattggttctttttatgtaacacacacaattaaaaaaatacatactaatcgactaattgaagataagcactgagcatcataaaagatgacccaaggcgctaccaaatggctctgcatcctgtaacaaatcacttaacttcataagaatgtccacattggctcagttcttaaatttaagataacctatatatttagatgggaacatgtttaaatttgtgtgctaacacctaactaaatttgcctttatttcaattatgaagttattacataaatatatatgatatgcatattaaattttatagattagataaatggatttactgatgaacaaatgacaaataaactgagaggacagattgatatcctcacactgcctgtaccataagcacttacaatgtaagtattggatttgtacaaacgattcagtgattaagagcacttgctgctcttatanaggacctggccctatatgtattgagatttaaagtattctgttcaaaaaaaaaaaaaaaaacaaaaacaaaaacaaatttcaatggtttttaatttaggtgcctttgtggcaaagattgcacagtcaaaaaatagttttcttaatccgattcacagacttagcagttgtagctcacaaagatggcaaacctaatcttatctcccaaaacacatgtggcagcttacaataacacctttttctggccttcctcaggcactggacacacatacacacacacatacattcaagcaaaacatcatacactataaagtaattttaaaagactatgattgttataacgattgccatatgcctcaccagcctgccaacaggctctgtgccacaagaatggctaggaacggctcatctacatcttggggtgggacaccagtgtatacttaaaagatccactgaatcaacttacagccaatttccccaaaaactagccttctagaagtttcagaattaacaattctttcctgcctcactccttcttgcagcctctgctcttgaaccaccctcctctcaatgtactcttcattccaacctgagttacacagcaggcgtcacgctcagttcttgaactttgtaacttacaagacaatgttttacatttcttcataacaaatcaaatttttcttacccattttgaaatcatggggttttttttttgtttgtttgtttgttggttcttaacagaatgaacacacacacttttaaagtacaattaccctaaattacaataggataaatttcttactcagtggatgtgagaaatatttaactacttgacagactcttctcattcagaaaatgtattgagatttaaagttttctgttcaaaaaaaaaaaagaacaaaaacatttcaatggtttttaatttaggtgcctttgtggcgaagattgcacggccaaaaaatagagctttctcaatccgattcacagacttagcagttgtagctcacaaagatggcaaacctaatcttatcttccaagtggccaacacccggcccagccctctgaccagcgttcgggtctctgctgtactctatcaggaaagagaaaatggtgaactctaccagaccagtgtggacttccaccttgatggcatcagttctgaggaatgtccattcttcatcttcccgctaacctattatcatactatcacaccatcaagtcctctagctaccctgctccagcatgagactccttcacactttgaattagttgtgttcctctcagcaatgcaagaaggcactggggaaatctgccaaaggaggacatcctacctaccttctgagatcatgttacatcaccgatttgcagctctaatgactcgaggttccaaaggtgagtatcaagtcaagatggagaattttgacaagactgttcctgaacatccaactcctgtggtctctaagagtccacataggactgacctagatattcatatcaatggacaaagcattgacaattttcagattgctgaaacagggctgacagaataagactcatctacatcatcctacttcttaatgtattaaatatatgcagccagctatgcagctattttccttcactgtatttcatgtttccttgttctcaatgctgattatatcatagtaatcatgtcgatgcccacaaaagaaaaagaaaaagaaaaagaaaggcaaagctaactatacacatccccaaaaaacaaaacagttctagttacctaatttatatcagaggtaatctgttcttgtcaatctgataagtatccatgctagcaaatctgcaaagatgtaggcatggtaacagaagggaagataaaatggacagtgatggcatacagttggactctaagaaaaatcacctttcattttcatctgtaaactcaaatagtctactttcaaacctagctccctgggtggaaagctgatttcacaatatttagtgaacatccttgtacaacttttattttttcaagacaacaaacatcattcctttaattctttaaactacaaaactagggtaagtattatctcctcaatttctaacagctagaaataaaagtacaaaagaaaagtaacaatatcaatgtttaagataatccccaaagcattttgaatacaacacccaaacacacatgtatgtgcaagtatgtatttggtggtaaatattcagaacaaataagaaaagctctggcccagatagaacttgtagggtggtatttctgttaaggagatgcaaaactgtatgtttctaatatgttaaagtctgacttgcagaacactcaagtaatccaaaagctcatcccttcgtcatttgaactgcttccgccctgagtaaaagattgtcttcatactcgtgacccattcaatggcatagaagtcctacaaactttctaaatacaaatatgtatttacgtttttataaatcaagggcttaattaaatatataactcaactgggaaaaatccccaatagataaagcaaaaaattaggtaacaaagtattttcaaacccaaattcctgtttccaacatcaaatagctctttctataaacacaaatgcgtgtttattcaccagtgggaggctggactggcggatctctattatttcattccaagtctaatattccatgaaaactatgctttctctgcctgcttttattttatatatactaagatgaacccctttttatatccagcttaaaatacttctttaagtaattttcattttgaattaaaaaactgagctgagttgtcctttagcaaaacaaaaacaaaaaaaaaattatactatcaagtttcaaagagatctgcatggtttctcttccatttcccttatttggaattaaatgggaaaagtaacagattaactttcactgcagtagatgagccggtcacaatcatcttgaaatatagactacataacagtaaatgttacagacagcagggagtcacatttttctactcaaaaaaagcaaacaaatctagacagaaagaaaacgacgacgatgacgacaacaacaacattggagtgccctacgaatggtaatagcagaagactattaagaacagagaacctatttactataaagtatgactgcatagaaatgaagcatacactcttccatgacaggcagaccaacttaagactgctgataaagaacagagattcctatgaacaagattaacccgaactgtgaaaataaactgtatgtgagactcctctgaatgctccttcctaaagaacacttacacagctttcaaatttataaagctgtcttgaggagacagtggaacaaatacattaagagtcttgaaatacaattaagtcagataaatatgcttcaatcgttactagttagacaaaatgtgacatctngaaaattaagtacaacttcctcaccacacaccagaaacaactttgtagttggtaggggctggagagatggtgctgtggttaagagctgctctttcagagggccctaatttgattcccagtatccaaatggcagttcacaactggttctttaattacagtttcaggagatctgatgtcctctctggcctctgcaggcactaggcacatatatggtgcatagaaattcatgcaggcaaaacattcatatacacgaaataaaaatttttacaagaaacataatcgaagatcattgttcagaaaccagaaagattctgggaagtattgtctgtaattctttcatttatttcaaagaatcatagttcctaggattaaagtttactgcagagagaccattaaccccttcaggaatttaaaatattaaatgggaagaaaggaagaaatcacttaagagctaattatactcaacacggaagaccacttaaccaacccaaagttactttttggaaa

SEQ ID NO: 3587 - DNA, 3676 bp, Rattus norvegicus
  misc_feature (1498)..(1498): n is a, c, g, or t
  misc_feature (2010)..(2010): n is a, c, g, or t
  misc_feature (2013)..(2014): n is a, c, g, or t
  misc_feature (2028)..(2028): n is a, c, g, or t
  misc_feature (2035)..(2035): n is a, c, g, or t
  misc_feature (2056)..(2056): n is a, c, g, or t
  misc_feature (2065)..(2065): n is a, c, g, or t
  misc_feature (2093)..(2093): n is a, c, g, or t
  misc_feature (2748)..(2748): n is a, c, g, or t
  misc_feature (3486)..(3486): n is a, c, g, or t
  misc_feature (3647)..(3647): n is a, c, g, or t
gcgcgcacgggcgatggcgaaagcgaggtccggcgccgcagggctggggctgaagctgtttttgctgctgccgctactgggagaagccccgctgggtctctgcttctcaagggatgcttactgggagaggctgtatgtggaccagccagctggcacacctctgctctatgtccatgccctacgggatgcccctggagaagtgcccagcttccgcctgggccagtatctctatggcgtctaccgcacgcgtctgcatgagaatgactggatccacatcgatgcgggcactggcctcctctacctcaatcagagcctggaccatagttcctgggagcagctcagcatccgaaatggcggcttccccttgctcaccgtcttcctccaggtcttcctggggtccacagcccagagagagggagagtgtcattggccaggctgtgcccgtgtctacttctccttcatcaacgacaccttcccaaattgtagctccttcaaagcccgggatctctgcaccccagagacgggtgtgtccttccgcatcagggagaacaggccccctggcaccttctaccagttccgcatgctacctgtgcagttcctttgtcctaacatcagtgtgaagtacaaactcttagaaggggacggtctgcccttccgttgtgaccccgactgtctggaggtgagcactcggtgggcactggatcgtgagcttcaggagaagtatgtgctggaggctgagtgcgcagtggcaggccctggagccaacaaggagaaggtggccgtgtccttcccggtgacggtgtatgatgatgaagacgactccccgcccaccttctccggaggtgtgggcaccgccagtgctgtggtggagtttaagcggaaggagggcactgtggtagccactctgcaggtgtttgatgcagatgtggtgccagcatctggggagctggtgaggcggtacacaagcacactactctcaggggattcctgggcccagcagaccttccgggtggagcacacacccaacgagaccttggtccagtccaacaacaactccgtgcgggcaaccatgcacaattacaggctggttctcaacaggagcctgtcgatctcagagagccgagtcctgcagctagtagtcctggtcaatgactcagacttccaggggcctgggtcaggttttctcttcctccatttcaacgtgtctgtgctgcctgtcaccctgaacctacccatggcctactccttcccagtgaataggagagcccgccgttatgcccagattgggaaagtttgcgtggagaactgccaggagttcagcggtgtctccatccagtacaagctgcagccctccagcaccaactgcagtgccctaggtgtggtcacctcaacagaagacacctcagggaccctatatgtaaatgacacggaggcgctgcggcgacctgagtgtaccgagcttcagtacacagtggtagccactgaccggcagacccgnaggcagacccaagcttcgttagtcgtcacagtggaggggacatacattgcagaagaagtgggctgccccaagtcctgtgcagtaaacaagaggcgccctgagtgtgaggagtgtggtggcctgggttctccaactggcagatgtgagtggcgtcagggagatggtaaagggaccaccaggaacttctccacctgttctcctagcaccaggacctgtcctgatggccactgtgatgctctggagagccgggatatcaacatttgcccccaggactgtctccgtggccccattgttggcgggcatgagcgaggggagcgccagggaattaaagccggctatggcatctgcaactgtttccctgatgagaagaagtgcttctgcgagccagaggacagccaggccccattgtgcgatgagctgtgccgtacggtcatcacagccgctgtcctcttctccttcataatctctgtcctgctgtccaccttctgcatccaccgctaccacaagcatgngcnnaagccacccatcgngtcagcngaaatgaccttctgccggccngcccagggnttcccaatcagctattcttcctcgggcncccgccggccctcactggactccatggagaaccaggtctctgtggactctttcaagatcccggaggatccgaagtgggaatttcctcggaagaacttagttcttgggaaaaccctgggagaaggcgagtttggaaaagtagtcaaggccacagccttccgtctgaaagaccgggcaggatacaccacagtggctgtgaaaatgctgaaagaaaacgcctcccagagtgaactacgagacctgctctctgagttcaaccttctgaaacaagtcaaccatccacatgtcatcaagttgtacggggcttgcagccaggatgggccacttcttctcattgtggagtatgcaaagtatggatccctgcgggggttcctgcgggacagccgcaagatcgggcctgcctatgtgagcagtggaggcagccgcaattccagctccctggaccacccagacgaaagggtgctgaccatgggcgacctcatctccttcgcctggcagatctcgaggggtatgcagtacttggctgaaatgaagctcgtacatcgagacttagctgccagaaacatcttggtggcagagggacggaagatgaagatctctgactttgggctgtcccgagatgtttatgaagaagattcctatgtgaagaaaagcangggccggattcccgtcaattggatggcaatcaattctctctccgatcacttctataccactcaaagtgatgtgtggtcctttggagtgctgctatgggaaattgtgaccctgggaggcaacccctaccctggaattcctcctgaacgactcttcaaccttctgaagacaggccacaggatggagaggccaaacaactgcagcgaggaaatgtaccgcctgatgctgcagtgctggaagcaggagccggacaagaggccagtatttgctgacatcagcaaggatctggagaagatgatggtcaaaagcagagactacttggacctggctgcatccaccccttcggactcactgctctatgacgatgggctctcggaagaggagacgcccctggtggactgtaacagtgctcccctcccgcgctccctcccttccacatggattgaaaacaaactctatggtagaatttcacatgcatttactagattctagcaacgcagtcccctctgcaccatcccaactgtctgtaacgctttttaagagtgtttccgatcccaccgaaaccaaagcctcctctgaacccttttctttgtaaatatccgactttgcacctagtttacacacattcaggcattttgcagctatgtctttctaaaaggatgtgaaaataaagtgtcactaccacacagcccggcaacttaagatgacactggagaagcagattagagcagaattctcangggctgttgggaagcaaatcataatacttctgacttcgttacttaaatttacctgatcttggggaaggaaggaattttgccaagggaatgctggcaccccccacttgttttgacagcataactagggtatccccaggctgcccccaggtggtgtgtgctcntggaaccccccatattacacttccactct

SEQ ID NO: 3588 - DNA, 518 bp, Rattus norvegicus
ctagaaaaggggaaaaaatgaaaaaaaaaaaaaagcaatgggaaatgttgaaatccattcagtttccatgttagctaagttactgtaagattcctataatagcttttcctggtaaggcagacccagtatgaaatagtaaccatttgggctatatttacatgctactaaatttttgtaataactcaaactgtaacatatataaacagttctcataagaattaagtacaattcccctttgtcagattgttctatcctaactttcaagtcttatttgaattgtgttgttgaaagtagtcttaatggttgtgaagctgaagatgatttgagacagttgtagcttactggatgttaaggagaccagagttgcagggttgggccttacatgaacatgtaatgaaaatgtaatgtgtatctgttacatgtgatgaatgctactggttttgtagcgctgctgcattcagtgttggccatgcattgtttggtacctgggggatgagggaagagagtttgatggctta

SEQ ID NO: 3589 - DNA, 442 bp, Rattus norvegicus
aacacgacttccaaatgctgttcgctccatgctgcggattctgtggtgagtttgtcatcggccgcgtgatcaaggccatgaacgccaactggcatccgggctgcttccgctgtgagctgtgcgacgtggagctggctgacctgggctttgagaagaacgcaggcaggcacctatgccggccttgccacaaccgtgagaaggccaagggcctgggcaaatgcatctgccaaaggtgtcacctcgacattgatgagcagcccctgatgttcaagaatgatccctaccacccggaccacttcagctgctcccactgtgggaaggagctgacctctgatgcccgagagctgaagggtgagctctactgcctgccttgccacgacaagatgggcattcccatctgtggggcttgccgccggcccattgagggccgagtggtcaatgc

SEQ ID NO: 3590 - DNA, 669 bp, Rattus norvegicus
atgtgtgaagtcgtttattgttcactgagaattataagacatgaggctcaaaacatgacagctatatgtacgttttaggaaatgttggggtcactgtactgggatgtaagaagaggggctaacacaggtcatctgaaggggctcatccacttcctgctctgtattataacaatgtaactatccttagttttcctccgtgacctcgtgttggaacctcatgtcacctatgtatgaaatggtcaaaagttagaggaataccaagagtggagatttagctgatcagtgacttcaaatcccagaaagcataaataaaaccacaagatgctctgtaacacagaaccatctaaaaaaccacaactctatctttatagctcagaataactcatgtcaaacccgttacattttatttgttaaaaatgaacagcttcagaacaaatctaatgtaacttttccaaaaaaacaccaaaaagtacagtgtaaagcgcctcctcgttaaatacaaacgtcactgtgatgcactgcatcaatgttctgcatacaccttgatgcaaaggaaatcttaagttgcaccctgtttaaataaaaaaaaaaataaaataaaaggctccaagaaccaaacaaggattactacagtcacattccgagaaaggaaatttccctccaacaaaa

SEQ ID NO: 3591 - DNA, 574 bp, Rattus norvegicus
tttttttttttttttttggggaagaggactttattgggatgttagtgaagaaacgtgggacggtgaattccagggggtgacatacactgggacccagatggtggtcaccttaaggagcaataaattaacgtaaaataaattaaggtgaggaggtccctggtggggcaggaactgggaatttctaagggggtggaatttggaatgaatttgtcaagatctccctcccccaccggaagctgggagttgggattaggggaccggaagaagggcagtagggttcagctgaaggcagctagagttggggtcaaggtcgttcttccaggaagcggtaggtggggttctcatagccatgcctctgaagttcccggagctgctgctcctccagggtcagcatggggtccacctccaccactccatggctgatagtgccatagggtttcttcttgcgcagaagcagcaaggataggacaatgagggagcctcctccagctcccatgatcagcagacctgacaaggcctctcgggacactccagtcccagctggtgccagttcatcccgctgaatatctgatga

SEQ ID NO: 3592 - DNA, 475 bp, Rattus norvegicus
tttttttttttttttttctatcgagaatattttttattacacaggtatcatacacacaattatttaaggagcacggacaggcatagaggttcaatcccaatccacacttcacccacacaaactgttctctactcttctggttcagcctgcgggaatgagatgtgtgttgcttcctgaaaagctccagttaaataacacttgaccagccaagagaaaaaagcccagcttcatcttcagcctctgtaccctgtgtgcattcgcgtgaaatctaaaggggctacgttacccatcacccattaaaagttaatattaaaatcgaatcccatttctcaaaatgtcttaagaagtatttacagatcccattaaattatgcataaataaaatctgtacactcaacagtttctcaacgcggagcctcctcggggacttggggatgacaggcgctgctgtgtggctgaacgccaccctcgtgccg

SEQ ID NO: 3593 - DNA, 343 bp, Rattus norvegicus
tttttttttttttttttggttttagaaaaatatattatatgaaaccacaagcaggcattctgatcttagcacattcttactccaaacagtatatacagtcatattagagtcagaacatactacagatccatgagagctatatgatgagggtcccaaacacatagcacaatatatacacttctatatcacatctcttggcagtgggttgcttgcttagaacaggtgtcaaggcgctctcgtgccagtgaagagaaatggcaatcatgcaggaaggattctgccctaggctgcttcttcagcagaacagtcaattcctgcgtaggtaaacttctccctcgtgccg

SEQ ID NO: 3594 - DNA, 641 bp, Rattus norvegicus
caaaagctggagctccaccgcggtggcggccgctctagaactagtggatcccccgggctgcaggaattcggcacgaggagacacagtgtggtcgtcattcctattccctcacattgatttgttcttgaacttccaagctgtttcctctgaatctgattgtgggattgtggtgccaggcaggagaacaattcacttgctaagacagttctcactctgcctgtcaggcctcatcttagaagtgtcacctcagcagggcagcacgatgagcttctgctggacccttgttcacttctccggcacctactgccccagcagtaacagacgcgggagaaagcctggcctgctgggttttcaagatgtgactctgcataatctatggagccctagaccttgagggtgtgaaagaatcctcctcctcactgcacagtcctcacctgccgatgccagtgttagtgttgaaatgagcacagtatgaagtattgtgtaggagggtggtttggcaactgtagctggtaagaataagccaccaacttcatggtgtgcctgacagattttaaatattctttgtcgcttggaaatcctgtcagagggccctggagtgtctctgttctagagagagttggtaggatccttctgtgtag

SEQ ID NO: 3595 - DNA, 663 bp, Rattus norvegicus
gcttacctcactgcttttcctagcggtagcacctcctccgccagcttcctcctcagaccgcttttcccgcgagccgaccggttctgtcatgtcgaccctcagtcccagcgtcgtgattagtgatgatgaaccaggttatgacctagatttattttgcatacctaatcattatgctgaagatttggaaaaggtgtttattcctcatggactgattatggacaggactgaaagacttgctcgagatgtcatgaaggagatgggaggccatcacattgtggccctctgtgtgctgaaggggggctataagttctttgctgacctgctggattacattaaagcgctgaatagaaatagtgataggtccattcctatgactgtagattttatcagactgaagagctactgtaatgaccagtcaacgggggacataaaagttattggtggagatgatctctcaactttaactggaaagaacgtcttgattgttgaagatataattgacactggtaaaacaatgcagactttgctttccttggtcaagcagtacagccccaaaatggttaaggttgcaagcttgctggtgaaaaggacctctcgaagtgttggatacaggccagactttgttggatttgaaattctcgacaagtttgttggtggatatgc

SEQ ID NO: 3596 - DNA, 593 bp, Rattus norvegicus
ggcggctctgtatccaattgcttcttgatgactttttaaagttagtattttgcaatgaagtaaaaagttgtgtctataatttaaaaccaacttcattatgtctatgaaactcacactggagactaagtcttaggtgaaaacattgttgtacattccagaatgaaagcacttgtatactacttcatctcagcatatatgtctcagatttcttaaaaatgtgactacatgtctagctgacttgcccaggacagaatcatactttctggcttacttttgccagcctggaattctaatgtcaccaaacacacacacacacacaaacacacacacacacacacacacacacacacacacacacagacacacacacacacacacacacacacacacagagtcatcttgaaggaaatgtttcatatcaggactttttacttcgtgactacacatggcctcactgcccaatgtatgagatgaagatgaatgaaactggaaggaaaatatgtgtgaagatgcgaactaaatcttaaagatgtctgtaacgtacgtctgccatgaaaatagaaagagacctgctagtggccgtctatgaatag

SEQ ID NO: 3597 - DNA, 584 bp, Rattus norvegicus
  misc_feature (396)..(396): n is a, c, g, or t
  misc_feature (440)..(440): n is a, c, g, or t
  misc_feature (548)..(548): n is a, c, g, or t
gccacagccaggacaggatggagcacaggcaggtgtggatgggacagtgagtggctgggaagagaccaaaatcaacagctccagccctctgcgctatgaccgccagattggggaatttacggtcatcagggctgggctctactacctgtactgtcaggtgcactttgatgaggggaaggcagtctacctgaagctggacttgctggtgaatggtgtgctggccctgcgctgcctggaagaattctcagccacagcagcgagctctcctgggccccagctccgtctgtgccaggtgtctgggctgttgcctctgcggccagggtcttcccttcggatccgtaccctcccctgggctcatcttaaggctgcccccttccttacctactttggactctntcaagttcactgaggggtcctgctctcccaggttctttaaactntaacctaacagctcccagagcaccacagcacctccccaccccacgcccactcctccaccctctagctgttccttgctccagtcctgtcctctcttccaggcagccagngcttgatgacatgttttccattccacagacatattc

SEQ ID NO: 3598 - DNA, 589 bp, Rattus norvegicus
  misc_feature (566)..(566): n is a, c, g, or t
gaacgaacacagagtgctcagacagactctgaggcaaaagcatctggaagcccagcagtcctgccggccccacaacttgccagtgctccaggcagcccagcagcgtgagctagaggccttggaacaccggatccgggaggagcagcaggcaatggaccgaaagattgtcctggagctggaccggaaggttgctgaccagcagagcacactggagaaggcaggggtagctggtttctatgtgaccactaatcctcaggagctgacgctgcagatgaacttactggaactcatcaggaagctgcaacagaggggctgccaaatgggaaaagccggctctgtgaccaagtgggcggtcctcgctgtcctctgttgcctaggatggctggcaccacagccttgtctgtgtgggggctactgactgtccggctgccaacaggcctgatctctctgaggagctgactagaccctggctatgcccgctgccacccactgatcagatttggaggggaaggtccaagcaataggaatggtgtcatgagaaggccccatgactgaatgctgagtgngaatgtgggtccctctgggcata

SEQ ID NO: 3599 - DNA, 615 bp, Rattus norvegicus
gcttaaaggcccaccacaggactcttacaggtgagattccttacaagtgctcatgggaaggatgtgagtggcgttttgcccggagcgatgagctcacaaggcactaccggaaacacacaggtgcaaagccctttaagtgtaaccactgcgacaggtgtttctccaggtctgatcatcttgctctccatatgaagagacatatctaaacaaaacagaacaaaatttaaaaaaaacaaacaaacaaaagtaaacaacaacaagagcaaaacaaccgcaaaggccagagttgccatggcagcagccaatgtccgaaggaaatgccgtgaccagaggactggacttcaggcgggagcactgcctcgcagaagaaagttctcacttacaaacctctgtgtacatacatgtacacgcacacgtacacacaccctctcacacacagacccacacacatacccactgtcatgcactcaactatatttaaagtatatacatctatttcttatgccttgccctagccagatgatagaagacaaggaaggaggaagccaggtgaactgggcgagcactggctgctgactccagcactactggatctcttcctgctgttgccaaagg

SEQ ID NO: 3600 - DNA, 550 bp, Rattus norvegicus
  misc_feature (507)..(507): n is a, c, g, or t
ggatcagagtctagaagcttgatccagactgactaagtctggctataccaagttttcattcttatctaccctggatccacttctcttgccagtggcaatacctgcaggagcccctcagcagatgctggcattcttaaaagagcgtcgcccattagcattgctcttccacatttgagaactgctgacgtgctgtggaggtagtggatataaaacttgaaaacacagacattgaaggaataataggtatctgtgctttgtgctctctggtaggattgttcagtaagcaggcgaataaacagctatgtccctcgcaatgctggaatgaaccaaagtgaaaaggagggctcccaggcagtatctgtctgtcataacctggtatttcagagaatgctagtgctttcttctaaacaggatgtaaaataaaattcattccaagttactctttctccatcatcctacctgcctagaactcatataactgtgacagagctaccttcccaggtatanttggcaggtgtgtgtgtgtgtgtgtgtgtgtgtgtgtgtgtgt

SEQ ID NO: 3601 - DNA, 470 bp, Rattus norvegicus
tttttttttttttttttggggatttatgttttgttttatttctgttttttccctttttcttaaaaaattaaataaagttctcattatttcccaatatacatcaaatgagttttcatgcaaagcagcagtcacagaggcagaaccatttggctcaagcctctcagcttaaagggccaccttctccttgcccgtagtgtactgagctcacactgtgatgggtggtgttcactgtccttctggaaggaaccggctatgaagaaacatggctgccattgacagaggagcctttccttctttcctcggtgagatttttagaggacagccagctctggggcctgatacccttcactcatcccatcttccttttgagacaccagtgtgatagcttgtatgagtctttcttccaggaacagaatgtcttcctttcagctctctatggacatggcattgatgagatgttccaccttgta

SEQ ID NO: 3602 - DNA, 662 bp, Rattus norvegicus
tttttttttttttttttaaaccacactgctcttttattaattggaacattccccgcttagtgcagtgttgaatcaaacacagaaaaaaggcccagagaaatttctgtagataaaccagtgaaaagaacgcgcattacacattattgtcaacataatcactccatgtagaggaaaggggcaaagaagcagaacgaacaacaaggggcacaagccccagacactgcaaaacatctggacatctggggtcaaaataaaacataaagggaagctttccaggaaggagagaagcaaatgagttctgaggcagcttaggtgatcagagcatggaaaagactccaggctggcctagggtggcttgggctgtgccatgtactgctggcaggagtgcaggaagatatgaatgaatcccactgccggattacccctatttagcaatgtcaggattatcaagactctttaagatgtcgaagataaaccacccttctttgagtgtggttgaggcccttcaacaaattagaacaataggaccccgccgccaccaccacgcctgacattactagccaaagcctgtgcctaaaccatttgcccctctcccctatgggaggaaaggaatggagacaaggggaaggatcctatctgcagcagaagatcggggagagcat

SEQ ID NO: 3603 - DNA, 625 bp, Rattus norvegicus
tttttttttttttttttgataaaaatcgagtatccagtttcaaaccttccgtctggggccccgtccacacatcacagcgatgagatacataggtcctactatgatacagtacatacagtcttaaactaagaacagctctgaggtctaggtcaccattttcaataaatctttacctacaaatattgaacaaatctctactatagctgtacaaaaaaagtttgcttttttttttaaaccacaaggcctttagatgcaaggattacttttaaatttttaatccttttaaaccaggacataacgtaccaacatatttgcatgctaaaaaaaacaaacaaaaagaaagaaaaacaaaaacaagaaaagaaaaaagaaaaagaaatcaaaagggaagaagtgcctgaaagtcttactgaaaaaacacagcaagattgttcccttttcactgtacaaaaatacgcctgaaaatatattaatttttaaaaaagattgaggtctgttatgtatcaaaaatgtttcaatacctttttgtactgaggtctaggctgtaaggtattcaatcaaggaggtataagggaacgagttaccaaaaaaaggttgccaagtagaaatcaccctcgtgccgaat

SEQ ID NO: 3604 - DNA, 622 bp, Rattus norvegicus
ggattttagacataatttttatttaagcatgggctttcagcatggttcagcctagagtgcagtctcagtatagtcggaggctgcacgaccattacactttgctggtgttggctcaacttcatcagaaggtatgactatgacccacagggaaacaacccattaaaggaagaacacaggggggaaaacatccaccatcttacaagtcactttgttaccacggacacgaaatggcagttactgttagtaaaccagccacggaacactttaaaaaactgttatagacaaggtaatggggacttcattgtgggagggagatagggtgttcatccacaacttttttttttttttaagtagaaaatatctgaaggtcaaacaattttttcctatccacaaaatgatgctacatcaacgtacatgttaaggagtaacatataagtaagcatatttaaggagataacagtgtctttacagttaccatctcgataggtatctgaattaactttctgcataatacaagtaggtcaaagtccagcagcaaaatattgcaacccagcaagtagattcagtttcagggtgttatactgtgggggagagtacacaaaggacaaacaatgataactta

SEQ ID NO: 3605 - DNA, 586 bp, Rattus norvegicus
gcagccctgaatggaagctttattatttttacacacatgattctgatatatgtgggatatagttttacactcacatataatacaacggacaggatgttaacaatataatagtagttttatacgctaacaagtttaaatataaataagctggggccacctttactgagacccccgtcttccctttatgcaagaaaatgtgtgtggaacctcttgggactccggaacaatctgcaggctctgtggcaagattgtataggtcggaagatgagtccgtggaaaccctggcagccttgatataatggcggaaagaaacaaagtaggcttttggatccttggcagcactggggcgagctgtaagctacattgtatttgcagaggggaggaggcatggtctggaggggtctcctctgactccttctctagctctcagcaaacttagggttcatgaccgttgtcgtggcgctcttgaagagggggttgtcgttgttccactgggacttgagtttctccttctcaaagcgtctgtattcattgaggtcagtcaggtgggtaagagccttccagatgaccaggaggaggacaccaa

SEQ ID NO: 3606 - DNA, 588 bp, Rattus norvegicus
aaaccacactgctcttttattaattggaacattccccgcttagtgcagtgttgaatcaaacacagaaaaaaggcccagagaaatttctgtagataaaccagtgaaaagaacgcgcattacacattattgtcaacataatcactccatgtagaggaaaggaatggagacaaggggaaggatcctatctgcagcagaagatcggggagagcatctccttggacggagtctgaagaaaggaaaagataaggaaataacaaaggaaaaagataaaaattaataaaaatttcacgatatggagccagcgtgttccgattccgtccacaaaaataactcaggctgctttgccgaaccatcctgtccaccaggggcgctgttgaggctgtctgcctggaagggtcaccaatgggcgcggaaagtcctcactctcatggctcgggccatcgctgctgcggggagggatctttgctgccatggcaagggggtgctggaagccatactgctgctgggcggagggggtggtggaggctgctgctgctgctgctgccatggaggaagaggaccacaaggaggaggcgggggctgcccact

SEQ ID NO: 3607 - DNA, 542 bp, Rattus norvegicus
gcgttttaccagctttattgtactgtagctttcatttactcaaatgaaaactacttaagaaaacctgtaagttagctctgtgctggttccttttctgaaacctactttttttccttttaatcagaaggtttatttttttttttttttttttttttttttatttatatcattagtttatttacatttttttctagtataagagttcaagagtttaatccaatttccagatcatatctcttaaactttcttcattctgttaatgggatgaattaaatatccttattttttaagtagctggggccttactataaagaaaggagcagcaaatccagatccaaagtacacggtcatcataagcagtaaccgccacttgttttccactgaaaacggcaaatttttccccggaccctcctcataggggctgcgacgcaccacggaggtggtgaacctccggatactctggcccaacatgctgctgctggaagttctccgagagtcgcaaagacggaaggcagaagaaatgaccgtaccaccttaccctg

SEQ ID NO: 3608 - DNA, 445 bp, Rattus norvegicus
tttttttttttttttttcaataaattctctctttaatgtcaaggactgccttgtggggtgggtgcaggggctgggccggctgggtctcagcaagttccattcgctttattgactgtgtatagtgttcataacttctagggaggtggggggacacatttgacactcatgacgtaagaacagtttggggggtattacaaagtagttgactatatccccctttacccaatctatcccaaagtatagggcagaaggcccaggcaagcaggaagccagtctgtcaaccaagtggtccacgtggcacatcccccagcctgagggctggcaggcccgccatctcccatcagcctgctgcagagtgacatctggtcccctcttcacaactgacaactgtggatgggacggtttacaaaaacaaaaatgggaaggggggggggtgtttctaaaa

SEQ ID NO: 3609 - DNA, 551 bp, Rattus norvegicus
ttttttttttattttttagaaaagaaatctagaggaaaaataaagcgcttcttgtagacgccaggaaaaacacccttcttgattcttctctgagtttgagtttagtttttgtgctttgtgggccgagttctctcacgggataagcatgccggcatcatattttctgttcagcttcgggcaactgcttttctcacatcacagatgtagaagagtcccttgggtacatgaaaaattcgggagaggaagggttgtcgctgctcgagccgttttctcggaacccgctgctcaccaacttctcgtatttctccttgtaggcgtccctttcgcgcaccagcctggagatctcctgcttgaggtggtcgacctgctgcagcagctggttcttctccgactccaggacgtgtctctgctgcaccctcttgaagcggcaggactgggcatagccgcggtttttcagggtcctgcctcttctgcttcagtcggatcacctcctccttgctgaccccgcgcagctgccggttcagctcacgcacccctcgtgccgaattctt

SEQ ID NO: 3610 - DNA, 489 bp, Rattus norvegicus
ttttttttttttttttttgagttccccacactttatgtgaattcagttctcctgaaagtcgccagggcccctttgcaggtcggggcgtgaggtagcatcacacgcacgcgcactcccgcgccgacagctcttgcagcgtgtggtagcggctgtgtacgtccaggaaggacacctcgtcctcgtaggccgtcgggcggcagcacgggtgcgctcgcacccgctctttgcgcacgcgtcgtcgctggcgcaggcgccgcaggcccaggtcgtagatgcgtatggccgcctcgcacgcgcctgcgcagtagcggaacaggacggtttcgtccgacgtgtagcccagacccagctcgctcacacgcacctcgagctcgcgcagcccgcacggtcgcgagcctggccgcgcacgccgacgccggggacccgctcgacggcgcggccccgagggacgggcaacccagggagaaagttctcgaagctccaccgcgt

SEQ ID NO: 3611 - DNA, 509 bp, Rattus norvegicus
cacgagggggcaggccatggactgagcaaccgaaactctggtcacaggactgcctgtgtgatcctgggtgggtcacttgtgatttccactctctggcttgtaaccagtccgggttgactaaactggatgtgaagatgcttggggatagctgaacgtaatggatatagtggcaattctactgggctgttcctttgttgatattctagagttctggagctgagcaaatgcctgtcatagctcagctttcccgtcattccaaacaaataaaggaggcctcgaaatggacattcgcatggtcttctgtgtgaactcccgagaaacgtcgagactggcgcagtgttttgctcttgaaggactaatcacaagttcttgaagatatggacctatgggagctattgtgccatgacaagaggaacttctcagatgctgcactgatatgacattgttgcatttctttaatgtactggccctatgacagactcctgaggacagctgtcctcttctacatc

SEQ ID NO: 3612 - DNA, 581 bp, Rattus norvegicus
  misc_feature (400)..(400): n is a, c, g, or t
ttttttttttttttttttaagaaaagaaattcattgtttattaatgtgtctgtgtaaaacttaaaacatctgattttttgtcaaaagaaacaccaccaaaacgggaggagctctgtccatcatttgctccgtcatcttctaacagccattagaaacccttctggatgcagggactgctaatcagagtctgagagcacgatgatctcctcgggatcgcactgggtggccacactcgtcttataaatacaaggccggggagactgagactggggagtctggagtatcagggatggagaagggttgcacagggagctggttaccagctcatggctgggagagtccaccctcgtggaggaatcagcaacaggacccacagaggccaagggggaggacggagtanacaggacacttatcttccacccactgtcctgctgtgccatcgtctgcttttttacatagctgttttctaacggcccaggtcccagttgcttcttttccttccgaaatctcttgcttgggggactggcatctcgacaagggtgagaagagacacacccattgaaggacgtagaggtaaccat

SEQ ID NO: 3613 - DNA, 704 bp, Rattus norvegicus
ttttttttttttttttttaacataaataaaggctttattgttcagttcggatgaatgacagactggcataagctcgattaattgttccacacatttaagaccccaggatgacagcaaaagctatgcttattggcaatgggcaacagggagggagggggtgggaaggacctgaaggcctctgaagttcaagaaagctatcgggaccgaaaccaacgtcctagaagcaggtccaggatggaaaagggatcatccaaagctgaagatcttggaggatctggatcacttctggaactgtcatgggcttcttgatgggtcactgtggtctctctccggccctcactgtccaccacagtgcggtgttcctccactgtcccatctggcttagtgatcttggtcacagagatgcttttgaaataggatttaggctggggttgaagaagtggacccagaccttcctgggaaacctgggagtcaagatccttgtcctctctggctctagaatggggactcacaggccatgtatcatccaacctatgaaaaggtccctgggacccccaatctggagctggtttggaggattcaggttttgcatgactctccaagaccccctcaaagatcctgggttggtgactatctgggtacttaagcattgagtcacgaagtgtctgcccctctcgcaatctcacaccaggtgtttctgactc

SEQ ID NO: 3614 - DNA, 596 bp, Rattus norvegicus
ttttttttttttttttttgacatggtactcttttattgtgacgctcagtggaaacatctgtaaaccagcttactgtagtggtgacagctgcaacacatgctaaggcacttgtattatataaaaaaggggtgcgggtcccactcactcctgtgacagcaactgggacctgaattcagagcttttctagcatatgtagcttcatgatttgactgtttctcctttaaaaggagaaaaaaaaagccttcttgccatagggactctaatcacagcatttataacacagtgaggaggagcacagggaaactcagcgaccagtgtagaccattgtagggcaggctactctcttctaagcgtggctccaggggcaaggctgtgaggacccacaactagagcgcttactacaagaagggaaaataaagccttggttttctctcaaagcatccgtaaaaggcagacttgaagctatagagagtgggtggtgcagctcagccacccttggccccagtcctaggagaggcacaagagcgcacggcgggcccagcccttggatattctggctgccgggccctgcaagtcccttaaccattaaatatatt

SEQ ID NO: 3615 - DNA, 810 bp, Rattus norvegicus
ctcgtgccgccgtgttatgctagggacagtggcacaggtgttggataatgttgccttgtaaactttctgatgtattaaaaatggaatgagttgtaaggtgtttcgcttttattgtcatatatgtagggaacgttttcatttaaatctaacagagagggcagtacctaaaatttttaaatatgagtctgaagacacgtcactatattccaggaaattcaaaccgagattggaaatctcatgtccgtaggccctgtgctctgcggagctcacctgcatgcgtcttcctgtgcttacagtttgtaaaccttagtgatgagcttcactcggtgtatgattttatatagctctgcgtcttaactgaatctgtgaatatacctatatatgggaaaaagttatagtttgggctacgaccaatccgtattggcttgttcaaaataggtccactgtatggttttgtaaacaaccaacctattgaaccttctaaagtcaggattcctcctcttccctccctaaaggtctttggaaagcttgacctctcaataatcgctctcttccaaaatatcccaatttctgaaaattttctatccagatagtcgaatctgaatatatttacctctatactttcatcatactgttttagccttaataactgtcccaatgggtccctagataatttcgatactcccatgctatttttaataactaaagcttctcaagcatatcaatagtagtcatacaactctctgcgcgcttgtggcctctctgaatctccaaattattgcctctactcgtctcagtcatcatatcact

SEQ ID NO: 3616 - DNA, 779 bp, Rattus norvegicus
cttccagaagatgaagaggaaaagaagaaacaggaagagaaaaagacaaaatttgagaacctctgcaaaattatgaaggatattttagagaaaaaggttgaaaaggtggttgtgtcaaaccgattggtgacatccccatgctgtattgtcacaagcacatatggctggacagcaaacatggagagaatcatgaaagctcaagccctcagagacaactcaacaatgggttacatggcagcaaagaaacacctggagataaaccctgatcactccattattgaaaccttaaggcaaaaggcagaggctgacaagaatgacaagtctgtgaaagatctggtcatcttgctgtacgaaacagcactcctgtcttccggcttcagtctggaagatccccagacccatgctaacaggatctacaggatgatcaagcttggtctaggtattgatgaggatgatcctactgtggatgataccagtgctgctgtaactgaagaaatgccacccctggaaggagatgatgacacatcacgcatggaagaagtagactaggcttcaccagaactatgtgtttgatgcttaccttcattccttctgataatatattttccatgatttccggtggatttctgtccacatttaaaacatctgtgtggcatgaaaactacgggcaggtaaaatttctactgtgatactgtgatctataggttgacccaaaggtgataaacgttgttgtagagtaagtacctatgtactgtaatatgtggcgagtgtactgtaca

SEQ ID NO: 3617 - DNA, 737 bp, Rattus norvegicus
cagaaataacatttattaatcaacaataaaacacacgatagaaaaggccttataagtaaaactatatatttataatgctttattgatttggctccagaactccacaaaacactacagacagtaacaaaataattcaataaatgttaaaaacttccaagataattataggatactcttcatcatatgtgagcattgtcaataccatgaccattggatacattagtcaacactatcatagatatctttcttgaataaaggacatattttttaaatctgagagtcataacatttatacacatccatacacaacataacagctcagaataagtaaagcagatccccaaaactatctggagtcatctgcttgtacatcacttaaagatattacagtgttaacaggatagagattaacacacttaagagaaagggaggggattcacttggggaaaagaagggaaattgggcattaaagctgtttacatgttttccatggcccgtttggcaagatgttcccttccctgctctgcctgttcttgattgagatactctagcactttcaggagcatatcttcatccaggtactgtctatttggggtatcctcattcttcatggattggttcgtatatttctgtgttctcttagctgtctctcacctcttcctgggtttgagtctctattttctcctccataggactccagtcttctcccccgaccacatcttcataggcaatgtagt

SEQ ID NO: 3618 - DNA, 833 bp, Rattus norvegicus
ccgagctccggataccggtgcctcgccatggctgaccagctgaccgaagaacagattgcagagttcaaggaagccttctccctctttgacaaggatggagatggcaccattaccaccaaggagctggggactgtgatgagatcgctggggcaaaaccccactgaggcggaactgcaggacatgatcaatgaggtggatgctgatggcaatgggaccattgacttcccagagttcctgaccatgatggccagaaagatgaaggatacagacagcgaggaggagatacgagaggccttccgtgtctttgacaaggatgggaatggctacatcagtgctgctgagctgcgtcacgtcatgacgaacctgggggagaagctgactgatgaggaagtggatgagatgatccgagaggcggacattgatggagacggccaggtcaattatgaagagtttgtacagatgatgactgcgaagtgaaggcccgggcagctggccatgcccgttctcctgatctcttcttgcgctctcctctcttcaacactcccctgcgtacccggttctagcaaacgccaattgattgactgagaatctgataaagcaacagaagattagtcccaaaaacaaagaagcacaaacacaacaaagagaagaaacaaaagaaaaactcgaggggggccgggcccattcgccaatagtgagcgattcaatccggccgcgttacaagcgggaggaaaccgcggtccagtatcctgagaatcccttgcggggtaaggaagcggcatgctcaaagcggcgaggaggaaggagcatgggacgcatagagagcataccgg

SEQ ID NO: 3619 - DNA, 753 bp, Rattus norvegicus
  misc_feature (671)..(671): n is a, c, g, or t
aaacattcatcttctggtgacaacttaccttttcttccactgacattcatatcctcattaatgagactggtacccaaaagatacctagttcctttctttcatctgcctttgctgaatctctcctccacaaccatcatcttcattctctcccctttgtcttgacccttaaaggaaaattcagtttacgtccccaaatctctacgcaggtgtctctggattctttttcagtatttacttttcttttttttttttttcacttttgggattggaaaggcaaatcccaaaatttgtagtctgtctctccaacaaggcaaaggttaaggagcagtaccagccgcctctgggtctccactgtgggttgtcacagatgagacacagactgtggatcatttgtgctgtacttatttctgtatttaggtttaccactgcttgttcaaagaacaattgcaagcccaattgcttttaatcttcttgtctctgtacagccctgtttatattggaaacctcagttttccctccaggagggaaacattcgaataggccacttctgctttttctccttaactcttttgtaccacaataatatattactcttcttcatcaaaaaaaaaaaaaaaaaactcgaggaggggccccgtacccatttcgccttatagtgagtcgaatacaantcactgggcgccgttttacaacggcgggactggggaaaccctgcggttacccaacttattcgccttggagcacattcccctt

SEQ ID NO: 3620 - DNA, 621 bp, Rattus norvegicus
  misc_feature (569)..(569): n is a, c, g, or t
cttacctcccaatgagatgtaaagtttcattccaatgttccttcccaagtcttgtatttctccttcactttttcccctcggctttccgggagcctagggactaactctactcctcacctgccccaagggctgtgtgtttggtgcctctccctcaggcaccgagaagaaaggaaccttgatagcctctgcccaactccaggccactgggccttcccatctcctcctccggttcccctggctccttcctgctgtctcctttcctaccttgtggtggcccagctccacactctgtcctcgggctcaaatccacatcatgcagatcagactctccatcagggtttatctaggttgctgagtattttttatttgttcatccatcctttgtttacctgagcccacggccccatgaccgaggaccaatgacgtcatgtggcttttgcagttccccactcctattaagtctttactggagagccagccaggcaagcagagcataattgaggccctctgactgaccactctggagcacagttctgagactccgagatttggggaaggagagagagaanaaatggatcttcacaggtcaggggtgcagtagggagcttcaagaaacgtctt

SEQ ID NO: 3621 - DNA, 665 bp, Rattus norvegicus
  misc_feature (48)..(48): n is a, c, g, or t
ttttttttttttttttttaagaaacaaagaccagttgacttttattgngggggtcagggtgagagttggtgcggctacaagcctatctgggtcttctgagacctcgggtcccctattcctggtccttagcgtcaccgtgtgtgatgacatagcagatgttcttgtagtccacgttgccgcccacatctggagggaaggctgcccacatattcttgatctcctcctgggaaaatcggtcgcactgcgtggtaagcagctcctccaagaattgctttttgatggtgcccttcccttctgggtccaggaccttgaaggctccagtgatcacatcctcggggtccgcacccttcagcttctccccaaacatggtcaggaagacagtgaagttgataggcccactggcttccttcatcatggcgtcgagttcctcattcttcacattgagacggcccatggccgcaaaggtgtcccgaagatcctccttgtcaataatgccatccctgttctgatcaattacagtgaaagcctccttgaactcctggatctgagtctggtcaaacatggagaaaacattggagctcccttctgctgctgcccttctcttgggcttcttggggtgcatgtcttagatcctctgaaggcaagggagtcttcgtggccgattc

SEQ ID NO: 3622 - DNA, 666 bp, Rattus norvegicus
ttttttttttttttttttccattctgtattttattactgaaatacgttgtcttacccaacccacccaaaaataaaaatcttacccttgtcctctaatctttcccttatccccagtcccatccccggccctgcacaagtgccccggatttcctgcccattggctatatcggagtgtgtccattatgtagcaacgtggaagcctctgtggagagcacagagtgggtgaaggacccttaaaaaggtgctcatttgagagccctggccacttgctcataggccagctctatctcttcatcgtcaggacaggtggaggcgaattcttcccgagcgtaagcgttgctcaagtaccgatgcactccacggaacgcctccgggatggtgaatcctctgtactttttgcacaccacctggactatgtgaagctttggcagcaggttgcagtcagccagggtgagctcattgccatccagaaacttcctctgagagatgccctcatcctcggcgctggtttcatccacttcttccgggaggggggatgtcaagtaattgtctagaaccttcagggctttcaggagtcccttctctaggttgtcattgagggccgggtttgagttcttgatgtaggcagaaacttggcaaatatgtccagccccgaggtgttggatt

SEQ ID NO: 3623 - DNA, 662 bp, Rattus norvegicus
  misc_feature (653)..(653): n is a, c, g, or t
ttttttttttttttttttagtattgcacatggtcctttattttctgcagtggaaggcttccttcccacttgcagacctagaagcctcaggttggcagagtgacctcatctagacgtgatcaggatgttaggtagcattcctgggtagtgactttagacagatggcgctgacattatggctcagagcagaatggaaaggggcaatgaatcacaggacagctccaggcgcgttccagttactgctggatcaggacggagggctgctgaaaggtcccaagactcaaatgtcttcgtggcaggaggagagctcctggctagactcctgcacctgaacatgactggttgtcggggagatgctttcctgagagggcttccctcccatcagttctttacatctccgagacggagctgggcaaaggaagtagccagctgcagtgcttcctgaaggcagcccacgttcttgcctgtggcctgggcagacatgtccttcccaccacctttaccatccatcaggcctgaaacctgctggacccactcgctggcttttagcccccggttggctgcattctgaggaacctgacacaagcatgtgatcttggcagcctcattgtctactgtgaagagcattgcagatgtctgaggagaatgtgtctntgaaagctt

SEQ ID NO: 3624 - DNA, 622 bp, Rattus norvegicus
ttttttttttttttttttcatagagtcacctttattggagcttgacctgttgggtttgtaaccctcaggctccacaggtagctggggcagggatagagtatcaaaaagggatgagttgagctgctgtggctgtggggattggctggaagctgctggcaggttggagcagctggagccctggcagggtaaaactgaggtatggcagcgttaataatactcttggagcgttaatactctggaggggacaggcacttggggccctagggtgcgaaggcacttggagtcagggagaggacacggcttgcagtgggactgggcaggaccaggcccggggtttggcaggcactttggggagtgctggggttggcagcttgggccctgagcagcccagaaggctttggtagtggcaggcacagtctctgggctgggtctgcattaaatacaggggtttcctcagtgctcgtctcgaagctctgaaggcaagaacttgtactgctgctgccggatctgggcaagctttttccgagcctcttccagctctcgttccttccgaagcatctcttcctgtgctgcgataatctgggcaatgcccccaaccattttctccctcgtgccgaattct

SEQ ID NO: 3625 - DNA, 635 bp, Rattus norvegicus
ttttttttttttttttttgagtttgatatgtttatattatagatataatacataggacatctagcatgaaactttgtgtcccctccccccaaaaaaagaagagaaggaagcagtccacccctgcttccagtggcagggttgtgtacaaattggctggaggtggccttctttccagacccagagccagggcctttggggatgggggtgggtgggtggggaagccagtataagtctcagccggaggaaggaagctaagacccacaactacatacacccttggaaaactaggggagagggagaagcccacttcatttcattggtcctctgggaggcgaaagaaaacaaaacaaaacaaaacaaaacaaaaaaaccaaacatccctaaaccaaaaagaatgagagcctcactcagccccttcccctggccgttcgtgaagagtctcattttggcaagaatcagagcaaaaccaaaacaaaacaaaagaccaaataaaatggtggtttagcatagacgcgcacactgacattgcacaaggcaccgctgggacacagagaccagatacaagtgttgatatcagatgataaagcaaaatatttgggaagcttgtcataactccagtccctctgggatggatc

SEQ ID NO: 3626 - DNA, 625 bp, Rattus norvegicus
ttttttttttttttttttcaatctttaaatgactttattattcctcaggcgaaatttaaatatcatcaaggtcttggatcaagttctttctcctggtttgtcaacagctgtgctctgtcttcttttggtttatttagtagaaagtgaactatttgcaggagaacatcatcatcaaagcctttcacttcattatcttctactgtctcataaagaggcttactctgtgtcccccaacatatatttttacgtgggttattttgatcagcttgtacagtcagtgccaaagtatttaactggtagcagaaaaaagaaaagtattttccatctgtgatcacaccctgggagacaaaaggtcgagtaacatctgcttcgctccagaacccttggtacatagcttgtgctccagtccaagcaaaaagacttgcaatggcattagctctaaagaccacttctacctggtcagcttggttttgttttatcagccgttccctattcagtatgtcaggtaacagatgaaactgggtgtggccataacaccgtgggtctgcaagtttggagcctaatgggaagaataaaagcctttcagatgaaacaagagcatgcagagcctagtgacccatgctct

SEQ ID NO: 3627 - DNA, 534 bp, Rattus norvegicus
tttttttttttttttgttgtgtaaattagcccatttattgcagaccaggcaagtctcaggaggtgcttctactggtccttcagttccttcagtcttctgatggcagacttcactgtgactgcagaagtggtattgtaggtccaggccccaccggccactgttttcatgcaggaaccacaatgccagatgccaacggctcgtctcttcatcttggtcttgccacagaaggagcaagtgtacttagcgtgctggctgatttcaattttcttcaccattttccggagggaggcaccatagcgggtcccgtattttccgacgatcccgaccttcttggtgcgtttagcctgaggacagagaaacaaatggaccagtgacatttagcgacaggaagccagtttgtgcacgccaacacgccgcttaacacaaactcagctggaacctagttcccctcaagctcagccaccaagaacagcatgcaccgggagcgcaaggctccggagcggcgctgggccaagtcccatcgagccgcctccg

SEQ ID NO: 3628 - DNA, 517 bp, Rattus norvegicus
ttttttttttttttttttagaacaaaacaggtatatttctattggactacctggtacagacagtgtggcatggatggataatatgaatgacaaataatacaaatatattttatttgaaataaacaaaaatgcttacacagctttcatttgcaaacaaactcctgcttgactgtattactgagcaaaaaaagagaacagagccgaagccaacaccttctgttgtaacttgtccttggggacaggcaggaagacactacttgggtgttttaaaatctgaccttcccctaaggcctggtcatagaagtgtaaacaatgtaaatgaatccactgttaccagttgtcataggtcatatcacattacctgtgtgttctaagatcacacacacacacacacacacacacacacacacacacacacacacacacacaaaagaatcaagacagtgctctaggttcaacagtattccatgaggctagaagatctgttaactttgttaactagcaaaatatcactctt

SEQ ID NO: 3629 - DNA, 688 bp, Rattus norvegicus
  misc_feature (660)..(660): n is a, c, g, or t
ttttttttttatatttatttttttttcattttttgatacttggcacagtctggctccaccgatgggcatgagcagatctgcactgggaggagagagcaactggactccagtcccatcttgcctcccctcccccactcagtgggattcctcaaagtcgttcaatgtctctgtatttcttcctcaggattgagacttggtctttaaagaggaccgggtcgagcctcatctgagagtggatcagcggcatgtagccaaaccagctggcaaacgtattcatgcagctctgtcgctgggcaaagtggtcagggtcagcccagcgagatgctcgggaagtctgtcccatcattgtctccttatactgtttcttctgggtcactttgattggaggcaatttcgtcacagcagacaccaggaaattcatgagaatgtcctcacagttggccagttggtctaccatgttcttcaggctggctggcaggtaatgggaatacaggtagtgataatatttgtggtagatagcagctcctgtcaacaccatggagtagtcattcgtccacttggatgtatatccccatcgctcctttgagttatcccagaaatggctgcgtgcaggatatcccacaatcctctccgggaagctctgccatacagtgaaggcanaatccacttccgcctcgtgccgaattct

SEQ ID NO: 3630 - DNA, 1893 bp, Rattus norvegicus
gggtgtagaacggtgccaccactgtcttcttcgccaccatgggggcccagctgagcacgttgagccgagtggtactctccccggtctggttcgtctacagcctcttcatgaagctgtttcagcgctcctcaccggccatcaccctcgagaaccccgacatcaagtaccctctgcggctcatcgacaaggagattatcagccacgacactcggcgcttccgatttgcactcccttcgccccagcacatcctgggccttcctatcggccagcacatctacctctccaccaggatcgatggcaacttggtcattcgtccctacacccctgtgtctagtgatgatgacaagggctttgtggacttggtggtcaaggtttacttcaaggacacgcatcccaagtttccagctggagggaaaatgtctcagtacctggaaaacatgaatattggagacaccattgaattccggggccccaatgggctactggtctaccagggcaaagggaagttcgccatccgtgcagacaagaagtccaaccctgttgtcaggacggtgaagtctgtaggcatgattgcaggagggacaggcatcaccccaatgctgcaggtgatccgagccgtcttgaaggacccgaacgaccacactgtgtgctatctgctcttcgccaaccagtccgagaaagacatcctgctgcggcctgagctggaggaactgaggaacgaacattcttctcgcttcaagctctggtacacagtggacaaagcccccgatgcctgggactatagccaaggcttcgtgaatgaggagatgatcagggaccatcttccacctcctggggaggagacactgatactgatgtgtggacccccaccgatgatccagtttgcctgtttgccaaacctggagcgtgtgggccatcccaaggagcgatgcttcaccttctgatggctggatgctggccactcccatgcctgctgctcacgcactcaccacaaccaccttccaccccttccttccccactactgtcctttaccctgacatatgcccacatccatgctggggcctgggttcagcctggcctgcccagccctggtcatccagctgtactggcccctgaggggcccctttgggagcaggcctgtgtatcaggtggcttctgttgaccactttctgaataggcttctgtctggtactaactggccattaccagagatggtccatgaccacccctttatacacacacacatacacatacagagacagagagacagagagacagagatagacagagatagacagagagacagatacagacatagagacagacagagacagagagagaggagtcagagagctgttagtaccatgtctacccgttaccatggaccgcaatgtgtagtaaggaaatgaaaggtaaacagttatctacagtcctaggaaccatgcctgtcacctaaccacctactgccttaggctatggcctggtctgtgcccctaaacactacattagacagtgacacccagaggttctcttaggagggtgtctggcagtgacaggccagcccccacttgctggccaggagttccttgggtcagcacgtggacccttccaaaaccccacacactgcccctcccctccatgatgccttgagcaccctaagttgtcagcccaacagagtttggtagaccttggggtacctggcttgtttctccatcccatacctccctcccatctggttcccagcctggggggttctgagcagagcctcttttctcggagacagacccggtgcctggcgctgccttcagcagacagcagacagcctcctgcacactggctttttttagtcatttatgggcaaaatgagttaaaataaaactttgcaaatcctg

SEQ ID NO: 3631 - DNA, 1130 bp, Rattus norvegicus
cctccttctggagaagcaagcagccgggataggaatctatggtgggacaaaaggacactttctagtaaaaacatccccactcgtatttatcgataaaggccagttcctctatggacacagagaagaacaggaagaggcccctgaagaaagcatccttgtgcaaactaagcaccatgtatatagccaggatgctgacgctgacacggcagaggctcacggatcacaaaagcagacaggtttgaaggaagacatagtgtgtgatgaagaagatgagcttgcccaacaaaagtcccagctgaaatcccagtcacaaataaaatcccaaacccaagtaaaatcccatgaagcccaagtgaagtcccaaacagggcagctaaagaccgcggggcaggtgaaatcacaaaccaagctgaaatcccacggagcttctctgaagttctacaaagcaccactacatctccagaaagacgtttctcagcatcaaatcaagggcaaaggatatgacctgcatcaagacctgccccaagtgcgccaacaacatgcaaacgttcacagactcaaaagaaagcttggccagtccagtaaaacagtagcattcttacccattagacaccgcttccaaccctatcatgggtactttacgcaattccaagagcatctacatggcagtgttcatcacacaaaatctttccaccatggtccgggaatgtgctactgtccaaatggaggcttaatgctataccaaggcaccttcactgagtaacacattcgttaatctctcaagaattaaaacacgtgtagaggagtcacctgacctgtgtggactgtgcggttcttaagatgctgactgccgtgtggtcctcaacaccttgcatggatgccatgacccactcacacattccttccagagactttctaaagttggagcaacctcacgcaggtgctctccaataaacagagccttcccgacaccactttcctttgactgtcaaaatctccaagttcctattggctttggtgcttggatggcatcttttcaagtaataaactcaaattgaaagaacagaacactcttgtagagttacacagaatagaaaacaagtgtttcccaataaagacattgttttggc

SEQ ID NO: 3632 - DNA, 4035 bp, Rattus norvegicus
ggatccaaactaaaagctgcaaagatactctatagaaacaaaaattcctaggacacaagtgggcaagtggcttaacacccttggctaaggacgaggtggctataagtaatggagatgctgtgcagagcagggaagatggctttcaaacagtgtccaatctcctgaggaaggaagatccaagccttcttcagagggatgctacactagtctcaaatcgttgcctggacttgagtgtgaaatgtctcactttccttcctgtctggctgtgcttgggtaactagctctgtgaacaacttctcttactgtggctggtgtgtggaggctatgcgcatctatgaagtctgaaactgttgtgtgcattgctctcctgaggggaagagcctcaagataattgtgatgccactgtagcattgaggagggctttacggtccctcttcagtgagaattctgtagcttgtgtgcataagctgtctatgtggcctgttcggacgccacataggatcattgctgtcttctcgttgattggctacccctaccgtccaagcagttctgagtatgtttaccatttatgcaaactgaaggtgtatacatgaggaaatttccattggtggtagactaccttgtctctttcaaaagtggatgatagaaactttgatttttcaatactaaagctttcggccatttctgcactattgactggaggtaggttatttttgtgttcagcaactcatcgtggacagaaacataattcttttctggtggacttaccctgcataatgagtgctgtgcgtgtatgtctttacgagtctatgttccacagctgataagtagaaagaaagttagcacggtagagttaaaggaattctacttgttactactaagaggcacaatgcttccggtaagtaactcagaagtcttccaccacctgacgtaaccttggtttggtccataggtatgtcttaattttgcttcttattcaattttagttgggtttgcagagcgtgcttaaagatgcaagccaaattctaagagtgatttaactttgtggtatgttgttaagaggcatcatagggaacttcaaatgcacagaaaagaaaatccctagctgccagttccaaagtgtgtaaaatactactcagctttgtaaaggtatgacaactcagtgttacacaaccgcgcgcgtgcacacacacacacacacacaggagttctgctaatgagaagttgcgctctctttggtttgccaaaacaagccatccaagtaccatgggagtctggagagatgtccgcacgtgaaaggcattgattgatccggacttgaatgcctttccttgaggactagtccagctttcccctttctcttgttttcatacctcctcaggcacatcattagaacaaacctactgaaaacgaattgtttggaaataagcaaaaccttctcagatgcagtaaaacctagagatgtgctctctagttcctaaagtttcttcatgacaccagacaaatcctgtttggcctttagcttccctatctgaaaaacaccgtggtccgaagtgctgtcacactgcctctagggagaaaggcccgtcccagctctcctgctcagagctgcagccagccgccctctagccactactgtttccaccacacattcctaccaaggactgtgctgctgacttgaaaggaagattactattccacttgcagttgttgcttagtaacatgtgtgattgtgtttctggtgacggcgtgaacagagatcattaaaaattaaacccccagagctgctaaagtgggaggaagtgggagcggggaagccacagtgccgtcacttgcttagaaaccgtttactctcaggcttacatgtaaatcttgaggaaaacactgcatgtctctggtttatattaagctacatacagcacggtaactgacattgatttgtgtcccctgcaggtggagtggatcagtaagacattaaaaaaaaaagaaaaagaaaaaaagaaagaaaaaaggtctgaaattacaagcagatgggccacatggtgtccccaagaaagtaaggtctaacctgttctgtgtctgtctctgcttccttcccacagttccaccaggtgagaagagtgatgaccatccttttccttactatggttatttcatacttcggttgcatgaaggctgcgcccatgaaagaagcaaacgtccacggacaaggcaacttggcctacccagctgtgcggacccatgggactctggagagcgtgaatgggcccagggcaggttcgagaggtctgacgacgacgtccctggctgacacttttgagcacgtgatcgaagagctgctggatgaggaccagaaggttcggcccaacgaagaaaaccataaggacgcggacttgtacacttcccgggtgatgctcagcagtcaagtgcctttggagcctcctctgctctttctgctggaggaatacaaaaattacctggatgccgcaaacatgtctatgagggttcggcgccactccgaccccgcccgccgtggggagctgagcgtgtgtgacagtattagcgagtgggtcacagcggcagataaaaagactgcagtggacatgtccggtgggacggtcacagtcctggagaaagtcccggtatcaaaaggccaactgaagcaatatttctacgagaccaagtgtaatcccatgggttacacgaaggaaggctgcaggggcatagacaaaaggcactggaactcgcaatgccgaactacccaatcgtatgttcgggcccttactatggatagcaaaaagagaattggctggcggttcataaggatagacacttcctgtgtatgtacactgaccattaaaaggggaagatagtggatttatgttgtatagattatattgagacaaaaattatctatttgtatatatacataacagggtaaattattcagttaagaaaaagataattttatgaactgcatgtataaatgaagtttatacagtacagtggttctacaatctatttattggacatatccatgaccagaaagaaacagtcatttgcgcacaactttaaaagtctgcattacattcctcgataatgttgtggtttgttgccgttgccaagaattgaaaacaaaaagttaaaaaaaataataaattgcatgctgctttaattgtgaattgataataaactgtccctctttcagaaaacagacaaaaaaacaaaaaacaaaaaaaagccaaaaacaaaaatttgaaccaaaacattccgtttacattttagacactaagtatcttcgttcttgttagtactctgttctactgctttcaacttctcatagcgttggaattaaaactatgtcaaggtgctgttgtcattgctttactggcttaggggatggggaacgggaggggtagatttctgtttgttttgtgttttatttcgtttgtttgtttgttttgtttttttagttccacccggagtagggatggagaaaatttcttcactctcctattctggttgataaagcgttacatttgtatgttgtaaaaaatgtttgcaaaatccaatcagatgactggaaaacgaataaaaattaaggcaactgaataaaatgctcacacaacactgcccatgatgtatctcccctggtcccccaggtcactcttctggcatgggtcagggaaagctgcttttattggaaagaccagcatttgtttaaagcacattctttccctccctcctcccattttggtccctttcttttttgttttgttttaagaaagaaaattaagttgcgcgctttgaaatattttatcactgctgtgaacagatgaacaatgtgtgtcatttcatgacactcgtggaaaacagtgattttttttttattttttgccctaaggagaaacaagtaagaataaccgaaaatgttctttttttttaaaggcataaacagtggataagttataatatggcctaacaatgtttgcagataaaagatattgcatacagccagatactagagcaggatcc

SEQ ID NO: 3633 - DNA, 2496 bp, Rattus norvegicus
ctgcagtcagacagattctgaaatggtttaaatagggagctacaaacaagtcaataattatctaagcctgctgtgttggtacctgagtctgagaagcacttgggaggtagaaggagaaggcatggaagttcaatagctcgttctaggtcaataataataatgggtagtaataataataatgataataataataaaatactttcaaggactcggttttacaatattcagattgcacgtaaatagttgtgccagcaggctaatagttatagaaaggcatagtcctttgcagttaaactggtgcttgtgacacctgtggcttttatatcgggcgtccttcagccagaaaaacccacagctttccgtggacttccttagtcaaaccaaatatgaccttccgtaggtcaggttaggatgcttcaggaccataccggagttggagttctggaagttcccgaggttcaaaaagcaaagaagagattgctacagcattctaaagtaaacagggcttaaccttggccgtgatctttcttctcaccctcctcgtgcctcccggttaaaaaccaccagctgtgatttaccacaaaaactgtaggcaacaaaagcaaaggacctcacgaggggtaagagacggtagatgtattttttgcaaatacattaatctgagacatgaacggaatctgcaaaactcaaaagacagagaagcctccatcctcgcaaatcactgtaatactaagtggagtcctaggtgcgtggcgcccacgtgcacataacgcgtgtggcccacctgccctgcgcactggtactctgaagtctcaccactgccccctgagccgtcacttgtccagcgaagcgcgtcactcccttcctctggactttgggcaaaaagcaaaaatcccggagtctaatccttgggagtggagcaagggggaggagcgatgtcctttccggttgtggggaaacaccctgtgctccgggaatttccctggcctggagttctggagtttcgagcataaaagggctcgccggagccctagagctgcagatcaggactcagatcctaaaccagctccagcactccagactccagccacactccaacagagcaccatggtctcagccacccgctcgcttctctgtgcagcgctgcctgtgctggccaccagccgccaagccacaggtaggtctcgccactgctgtgcgggggaggagcgacctccggtgggcgcacggcccacagtccgctgacccggtgtcttcccccttaggggcgcccgtcgccaatgagctgcgctgtcagtgcctgcagacagtggcagggattcacttcaagaacatccagagtttgaaggtgatgccgccaggaccccactgcacccaaaccgaagtcatgtgagtatctctctgctcgcgcagcttctgccactcccagagtgacccaaagcctccgcgcccctacactcatcctagcggaacttcctcacgtgggtccatccttctctcttcagagccacactcaagaatggtcgcgaggcttgccttgaccctgaagcccccatggttcagaagattgtccaaaagatgctaaagtgagttgtgactttgtgtttgtacttgggactagagtcgagcttgggaatagtggcatcagacgcctgaacgttaattatatcgaggatagtctgtgcttatctagagcctcaggaccggataagagagaaggctttgatgactctttgtaacaatgactcttttttccgtcttcaggggtgtccccaagtaatggagaaagaagatagattgcaccgatggcgtctgtctggtgaacgctggcttctgacaacactagttttacacattttacgatttctattgagggtcctatttattttatgtatttatttattccaccaagtgtgtggtttttattttacattaatatttaacgatgtggatgcgtttcatcgatggtcgttcaattccaattgtgcagtttaaagatggtaggcgttaaatatctcgttaaattaatatttattgggagaccattaagtgtcaaccactgtgctagaaggtgttgagcgggaagaagggcggcagagatgagagtctgggatcgtgttttgtgttagggtgaggaaatgtgtgagaggctatgtttgtatgttttgaaaagaatgttatttattgaaagttgtctttcatattttatggtcaacattgatgtgttgaagcttcccttggacattttatgtctagtttgtagggcacaatgcccttttatattctttaaccaatgctccttctcgtctcaggacagagaagttccaaggactgttacaaatgaaataaaaataaaagttttattaaaaaaataacatgggtgctttttgttttattcttcttgacatcgttgtttatagctaatcatgtgcctgtgctggctgaaatttcttatgacttgcttacttggggaggaacatttggtattcctgaaaa

SEQ ID NO: 3634 - DNA, 1686 bp, Rattus norvegicus
gggtgtcagccacagaacaaagccaagtgagactccttcagtacctccctttctcctcatcctcccaggcatagctgcctctgcccctgcctctgggcaccctcccagggttgcagaagatgaagtggacggcatcagtcctcgcctgcatccttcaagtgcagttcccaggagcagaggcacagagctttggtctgctggatcccaaactctgctatatgctagatggaatcctcttcatctacggagtcatcatcacggccctgtacctgagagcaaaattcagcaggagtgcagatgctgctgcttaccttcaggaccccaaccagctctataacgagctcaatctagggcgaagagaggaatatgatgttttggacaagaagcggcctcgggatccggagatggggggcaaacagcagaggaggaggaacccccaggaaggcgtgtacaatgcactgcagaaagacaagatggcagaggcctacagtgagattggcatgaaaggcgagaggcggagaggcaaggggcacgacggcctttaccagggtctcagcactgccaccaaggacacctatgacgccctgcatatgcagaccctgccccctcgctaacagccaggggatttctcactcaaaggcttcaccctgctgacgtcacttgtgaaggacgaggacaaagcatttacaactcagtttattaacttcacagacaccgtttcctgaagaggatgcttctcccacttgtcacatttgtcttctccagtcccaaagtattgtacatagactgtcacccctggactctctaaagggagagctcccctcgctcataccccagcccagttcttgggtctcttggcaggcccctctccctgcagagtccagccctaaccaggagctggggggtggggcatgaatacattccctcttgcagctagcgggagttcagtttgctttgtaaagtccccagagccgcctcaggtactgactgtattgttccactgatactgactcactttgctcctgctgtaaatttggcttctgttgtcatacttcccagtgtcaaggtaacatgtaattaggtcacattgtgaaaggcagagaggcaggtacaagggaacccaggcaagtgtcagccagaggtggctcaaacaagggaagcaacatgcaaggatgttcctagcagaggaacagtaacaaggggcctctttctatcaaggataccttccatatctcccagtccgtgccagatactccaggaatgttaagatgtcttaccttcacggagaccacgcttttagagtgcaaataacttgtgtatcaactggcgcagaagatagggtatgtcataactgccaatgacaaggggtgagagaaaaggaagcaagtcctgctttcttccaggaactctgttcttccccatccagtggcaggaagacccagaccacccagttctgtagtgctcccacagtaatggcacaatgacagtcagtggacagctacatcattgtgtaattaaagtgcctgctgggatttagctcagtggtagagcgcttacctaggaagcacaaggccctgggttcggtccccagctccgggggaaaaaaaaaaaaaaaaagtgcctgtgaccatggatgggaaacgctctgatctccagggttttaatttatactggcttgctattttg

SEQ ID NO: 3635 - DNA, 932 bp, Rattus norvegicus
gaattccatcatgcatgagattatgtacaactggaggtgctctatgtcctctgtgtgctgctcatggggcgtccagaaccaggtgggtgctgctccagcctcagagtgggagagccagaagctgagcagagccctcgggggccaggaggatctccgcggcctcagacggcacacactcctgcccagctatgtgcgctgtttccttcttgtgaggaaaccagcctgattctagattcttttctacttatagaagcaaatagtgatacaagaactggggaggcggcttcgacgcggaccctacagagcctgtcgtccgccggatagccagcttcactccccgcggacgctccaggctccgagccatctagcgactcggcgagcggcctcaggtggacaatcatctggagagcccgccttgggccagggactttcacttcaagccgagtccccagttcaagaaggaggtacggccgcctccttacccccagctcaggcccaccatggggaagaacaatagcaagctggcccctgaggagctggaagatctggtccagaacacggagttcagcgagcaggagctaaagcagtggtataagggtttcctgaaggactgccccagcggcatcctcaacctggaggagtttcagcaactctacatcaagttctttccttacggagacgcctccaagtttgcacagcatgctttccgcaccttcgacaagaacggcgatggcaccatcgacttccgggagttcatctgcgccctttctgtcacctcccgtggcagctttgagcagaagctcaactgggcctttgagatgtacgacctggacggtgatggacgcatcacacggctggagatgctggagatcattgaggctatctataagatggtgggcaccgtgatcatgatgcgcatgaaccaggaattc

SEQ ID NO: 3636 - DNA, 1120 bp, Rattus norvegicus
cagcccttgaggctcttgctcgcccaccttccactcttctctccctctctcttttgccatttctttcctctcccaaatctcgcattcagccaaaggaaggaggtaagggaagcacctcccacctccaaaaaaaaataataataaattttacagtcgggaccgagtggtgaccggctagctatggagctgctgtgctgtgaggtggacccggtccgcagggccgtgccggaccgcaacctgctggaagaccgcgtcctgcagaacctgttgactatcgaggagcgctacctcccgcagtgttcctatttcaagtgcgtgcagaaggacatccagccgtacatgcgcaggatggtggctacctggatgctagaggtctgtgagggacagaagtgtgaagaagaggtctttcctctggccatgaattacctggaccgtttcttggctggagtcccgactcctaagacccatctccagctcctgggcgctgtggtcatgttcctagcttccaagctgaaagagaccatcccgctgactgccgaaaagctgtgtatttacaccgacaattctgtgaaaccccaggagctgctggagtgggaactggtggtgctgggtaagctgaagtggaacctggctgcagtaacccctcacgacttcattgagcacatcctacgcaagctgccccagcagaaggagaagctgtccctgatccgcaagcatgcgcagaccttcatcgctctgtgtgctaccgacttcaagtttgccatgtacccgccatcgatgatcgcaactggaagcgtgggagcagccatctgcgggcttcagcaggacgaggaagtgaatgcactcacgtgcgatgccctgacggagctgctggccaagatcacccacaccgatgtggattgtctcaaagcctgccaggagcaaatcgaggctgtgctgcttaacagccttcagcagttccgtcaagagcagcacaacggctccaagtctgtggaagatccggaccaagccaccacccctacagacgtgcgggatgttgacctgtgaggaagccattcgggcggcaagagagaggcgtgttcgtcatctgctagccccttctctctctctctctagttat

SEQ ID NO: 3637 - DNA, 1500 bp, Rattus norvegicus
taaccgcgccaaccgccaccgaggtgcccggagagaggcggagaggcggcatgagcgaggcgggcgaggccaccaccggcggcaccacgcacccgcaggccgcggccgacgcgcccgccgcggcgcccccggaccccgcgcctaagagcccggcggccagcggcgcgccccaggccccggcgcccgccgcgctgctcgcgggagccccggcgagagccagcccccgggcccgccccggcctcatcagcccccgcgggaagcgaggacgcgagaagaaagttctcgccaccaaagtccttggcactgtcaaatggttcaacgtcagaaatggatatggatttataaaccgaaacgacaccaaagaagatgtgtttgtacaccagactgccatcaagaagaataaccacgtcaagtatctgcgcagtgtgggggatggagaaactgtagagtttgatgtggttgaaggagaaaagggtgctgaagcagcaaatgtgactggcccagatggagttcctgtagaagggagtcgctatgctgctgatcggcgccggtacagacgcggctactatggcaggcgccgaggacctccccgtaatgctggtgagattggagagatgaaggatggagtccccgagggagcgcagctccaggttcatcggaatcccacttaccgcccaaggttccgcaggggacctgctcgcccacgacctgcccctgctattggagaggctgaagataaagaaaatcagcaagcggccaatggtccaaaccagccgtctgcccgccgtggattccgacgcccctacaactacaggcgccgcccccgtcccctcaacgctgtttcacaagatggcaaagagaccaaggcaggtgaagcaccaactgagaaccccgctccagccaccgaacagagcagtgccgagtgaccctggctcccaggcaccttcaccaccagcagggtgaccttaagaattaatgaccattcaaaaacaaggcaaaaagcacacccacgaccttaccaacaccaaagaaacatctaagcaataaaacggaagactaacaagatttggacattagaatgtttactgctattctctacgaaactaacaactgcaaagggaaggagcccgcactgtccatcaagctgcgtcccgggaacctgcacaggcagagagcagcctccccatttcagcaacctagtgctttatatttttttcctggtttttactgttttggtaatatgaattaaaagaagaaatattaataccacatggggattgccccaaccaaagaaatctgaaatatatagtaaatgctctttttcctttgttgttcattttggatgctggtgctaaacttccaagtgtcatgatttaagaagaaattttatgcccttatttattcctaggatgaggggagaacatttttgctttcttacatagctctctctgaaatgtgcagtaacaagttcctcaaaaataaaatttttaccttcaaaga

SEQ ID NO: 3638 - DNA, 1328 bp, Rattus norvegicus
gttgtaaagtttgaacagtttccacacaaccgaactcctggaaattaaaaacaaaggaattcttagaatattttatctaattacttggaaaaaacagtttgtaaacccaacaaacttaatagtttgttggcccaactcagttctttccaactgaactctctttattttctgttggtgcttttcaattattactacctccaagaagaacactgtatgagcttatttgtgacgaaggttccaaagtatcagataccacacaatttctatgcaatggctttttaaggaacacagaagatcagtttatcaggacaaattttagcttgtttgtcatggcacaaatgtctggaaaagcttcagatttttgtagaagctgtgaacactgtgatagctcgggctggagcaaagtatttgcagaaggaactaaactcatagtagttcctgctgacaaaagctttaatgcagacatttcccccaagcccaccatttttcttccttcttctgctgaaacaaatctccacaagactgggacatacctttgcctccttgaaaagttcttccccgatgtcataagggtgtattggaaagaaaaggacagcaatacgatcctggactcccaggaaggggagacgctgaagactaacgatacatacatgaagtttagctggcttactgtgcctgaagggtcaatgggtaaagagcacagatgtattgtcaaacacgagaacaacaaaggaggagcagaccaagagattttctttccttcaataaagaaagttgctctgagtacccagcctacaacttgctggcaagataaaaacgatgtgctgcagctccagttcacgggcacctctgcctactatacttacctgctcctgctcctcaagagcgtgcgctacttggccatcatcagcttctttctgcttagaagaacagctttctgtggcaataagaagagatcctaaggaaataaacggtggaccagcaagtccattgattttcatccttactgtcataaaggtgacttatgggggtccagctgccttctcttgctggctttgacttctgtaaagtcacatgcacagcattctgttattgtgcaaacatttttctcacatttgtaagcaatttcagcaacttctctctaactgagctcaccttcctgattccatcctctccagcagtcccctcccccagaagcccaaagtatcaaagctctggtacgcataggctgcaggatttacccacggcatttgttgctcttgaaccagtcaactctctgaaagcctccgctctagacaacctgaagagccttctttattgttgaattc

SEQ ID NO: 3639 - DNA, 3387 bp, Rattus norvegicus
atgtcgcgctccgtgctgcagcccagtcagcagaagctggcggagaagctcaccatcctcaacgaccggggcgtcggcatgctcacgcgcctctacaacatcaagaaggcatgtggagatcccaaggctaaaccatcctaccttattgacaaaaacctggaatctgctgtgaaattcatagtcagaaaatttcctgctgtagaaacacgcaacaacaatcaacagcttgcacaactacagaaagaaaaatcagagattctgaaaaatctggcattatattactttacatttgtagatgttatggaatttaaggaccatgtctgtgacttgctgaatactatcgacgtctgccaagtcttctttgatattactgtgaactttgatttaacaaagaactacttagacttgactgtgacctacacaacattaatgatactgctgtcccggattgaagaaaggaaggccatcattggactgtacaattatgcacatgaaatgacccacggagcaagtgaccgagaatacccacgccttggtcagatgattgtggactatgaacaccctttaaagaagatgatggaagaattcgtaccccacagcaagtctctttcagatgcgctaatttctcttcagatggtgtatcctagacggaatctttcagcagatcagtggaggaatgcccagttgttgagtctcatcagtgcacccagtacaatgcttaatcctgcacagtctgacaccatgccttgtgaatatctctctttggatgcaatggagaaatggattatctttggctttattctgtgccatgggatgctaaataccgaggctacagcactgaacctttggaagctagctcttcagagtagctcctgcctctctctctttcgggatgaagttttccacattcacaaagctgcagaagatttatttgtaaacattcggggctataataaacggattaacgacataagagaatgtaaggaggcggctgtatcccacgctggctcaatgcacagagagagacgcaagtttttacggtctgcactgaaagaactggcaactgtcctctcggatcagcctggcctgcttggtcccaaggcactttttgttttcatggcattatcttttgcccgtgatgaaattatctggctactccgtcatgcagacaacatgccaaagaagagtgcagatgactttatagataagcacattgctgagctgatcttttacatggaggagctcagagcacatgtcaggaagtacgggcctgtcatgcagaggtactacgtgcagtacctctccggcttcgatgctgttgtccttaacgagcttgtgcagaatctctctgtttgccctgaagatgaatcaatcatcatgtcctcctttgttaacaccatgacttccctaagtgtgaaacaagttgaagatggggaagtgtttgatttcagaggaatgagattagattggtttaggttacaggcatacactagtgtctccaaagcttcacttagccttgcagatcaccgagaactcggaaagatgatgaacacaataatattccatacaaagatggtcgattccttggtggaaatgttggtggaaacatccgatctctccatattttgtttttatagccgtgcttttgagaagatgtttcagcagtgcttggagttgccttctcagtcgcgatactccatcgcctttcctctgctctgcactcacttcatgagctgcacacatgagctgtgtcccgaagagcgccatcatataggggatcgtagcctttccctgtgtaatatgttccttgatgagatggccaaacaagctcggaacctcatcactgatatttgcacagaacagtgtactcttagtgaccagttactgccgaagcattgtgccaaaaccatcagtcaagcagtgaataagaagtcaaaaaaacagactggcaagaaaggggaacctgaaagggaaaagccgggtgtcgagagcatgaggaaaaacaggctggtagtgaccaaccttgataagttgcacactgcactttcggagttatgcttctccataaattatgttccaaacatggcagtgtgggaacacaccttcacaccgcgggagtacttgacttctcatctggaaatccgattcactaaatcaattgttggaatgaccatgtataatcaggctacacaggagattgcaaagccatcagaacttctgacaagcgtaagagaatatatgactgtactccagtccatagagaactatgtgcagattgatatcaccagagtatttaataatgtccttcttcagcaaacacaacacttagacagccatggagaaccaaccatcacgagtctgtatacaaactggtacttggaaacgttattaagacaagtcagcaatggccatatagcttattttcctgcaatgaaagcatttgtgaatttacccacagaaaatgaattaacattcaatgcagaggaatactctgatatatcagaaatgaggtcgttgtcagagctcttaggcccatatgggatgaagttcctaagcgagagtcttatgtggcatatttcatcacaagttgctgaacttaagaaacttgtggtggagaatgttgatgttctaacacaaatgaggaccagctttgacaaaccagaccagatggctgcactctttaaaagattatcatctgttgacagtgtcttgaaaaggatgacgataattggtgttattttatccttccggtcactggcacaagaagcactgagagatgttttgtcctaccacattccttttctcgtgagctccattgaggatttcaaggaccacattccacgggaaaccgatatgaaggttgcaatgaatgtgtatgagctgtcatctgctgctggattaccatgcgagattgatcctgccttagtagtagctctttcctcacaaaaatcagagaacattagtccagaagaagaatataagatcgcttgcctcctgatggtctttgtagcagtttccctgcctacactggccagcaatgtgatgtcccagtacagccctgcaatagaaggacactgcaacaatattcattgtctggccaaagcaatcaaccaaattgctgctgctttgtttacaattcacaaaggaagcattgaagacagacttaaagaattcctggcgcttgcgtcctccagtctactgaaaatcggccaagagacagataaaactacaacgagaaatagagaatctgtttatttgctactggatatgattgtacaagaatcaccgttcctgacaatggatctcttggaatcttgttttccttatgtgttgctgagaaatgcataccacgctgtctacaaacaaagtgtcacatcctctgcatag

SEQ ID NO: 3640 - DNA, 3397 bp, Rattus norvegicus
gcagacttgagagtggagcggagggacgagagggtggagcggagtgcgtggcgggcgggtcccccgaagctcgaggagtcgccgcgaagcccgcgcgcgcgcttgcctccggcgcgccgatctgggctgaactaacaagctctgctttggagaaggggctggagccccgccaccggcgccttggggcaacggccgtcgagcagctggtgctggccgcccgagccgggaggtcgactctcgccgggcggggatggtggacgagccggcggggactcgcccgcgcgcggccgccacagggcccggcgctgcccgccagggggcgacgccacgcggggtccgcagccggcgacccgcagcgaagaggcggcgggggccataagggagccggtcgggcacccacggaactccgcgggcccccagagtctccccagtccaccatccgaggagttcggaaacgagcgccccacctctgctatgttgccctttggagacaaaacgagagacatggtcaatgcatggttttcagagagagttcacaacattcctgtgtgcaaggaaggcatccgggcccacaccgagtcctgctcttgctctctgcctcaaagtcctcatgcagataataccacccctggagcaccagccagaaaaatctctgcctctgaatttgaccgacctcttagacccattgttgtcaaggattctgagggaaccgtgagctttctctctgactcaggaaaaaaggaacagatgccactaacctctccaagatttgatagtgatgaaggggaccagtgctcaagactcttggaactagtaaaagatatttccagtcatttggatgtcacagccttgtgtcacaaaattttcttgcatatccatggacttatctctgctgatcgctattccctgttccttgtctgtgaggacagctctaaagacaaatttctcgtcagtcgcctctttgatgttgctgaaggttcaacactggaggaagcttcaaataactgtatccgtttagaatggaacaaaggcattgtgggacatgtggcagcttttggagagcccttgaacatcaaagatgcctatgaggatccccggttcaatgcagaagttgaccaaattacaggctacaagacacaaagtatcctttgtatgccaattaagaaccacagggaagaggtcgttggtgtagctcaggccatcaacaagaaatcaggaaacggtgggacattcactgaaaaagatgaaaaggactttgctgcctatctggcattttgtggcattgttcttcacaacgcccagctctatgaaacgtcactgctggagaacaaaagaaatcaggtattacttgaccttgctagcttaattttcgaggagcagcagtcattggaagtaattctgaagaaaatagccgccactattatctccttcatgcaggtgcagaagtgcaccatcttcatcgtggatgaagactgccctgactcgttctctcgtgtgtttcaaatggagtgggaggaagtagggaaatcctccgagcctttgacaagggagcacgatgcaaacaaaatcaattacatgtatgctcagtatgtcaaaaacacgatggagccacttaatatcccagatgtcaccaaggacaacagatttccctggacaaatgaaaacatgggccatataaacacgcactgcatcagaagtttgctttgcacgcctataaaaaatgggaagaagaacaaagtcataggggtttgccaacttgttaataagatggaggagaagactggcaagattaaggctttcaaccaaaacgatgaacaattcctggaggcttttgtcatcttctgtggcttggggatccagaacacacagatgtacgaagcggtggagagagccatggccaagcagatggtgacgttagaggtcctgtcttatcacgcatcagcggcggaggaagaaacaagggagctccaggctctagcggctgctgtggtaccgtctgcccaaacccttaaaattaccgacttcagcttcagtgacttcgagctgtctgatctggaaacagcgctgtgtacaattcggatgttcactgacctcaaccttgtgcagaacttccagatgaaacacgaggttctttgccgatggattttgagtgtcaagaagaattatcggaagaacgttgcctaccacaattggaggcacgcctttaacacggcacagtgcatgtttgctgctctgaaagcaggcaagattcagaacaagttgacggatctggagacgcttgcattgctgattgccgctttaagccatgatttggaccatcgtggtgtgaacaactcatacatacagcggagcgagcaccccctggcccagctgtactgccactccaccatggagcaccatcacttcgaccagtgcttgatggttctaaacagcccaggcaaccagatcctcagtggcctctccattgaagaatataagaccacattgaaaataatcaagcaagcaattttagccactgacctagcactgtacattaagagacgaggagaattttttgaacttataagaaaaaatgaattcagttttgaagatcctcttcaaaaggagttgtttctggcaatgctgatgactgcctgtgatctctccgccattactaagccctggcctattcaacaacggatagcagaactcgtggcagccgaattctttgatcaaggagacagagagagaaaagaacttaacatggagcccgctgatctaatgaacagggagaagaaaaataaaatcccaagtatgcaagttgggttcatagacgccatctgcttgcagctgtatgaggccctgacccacgtctcagaagactgtttgcccctgctggatggctgcaggaagaacaggcagaaatggcaagccctcgcagaccagcaggagaagacgctccttaatggggagagcggccaggccaagcgggactgaccttctccccctcctcccctcccccacccccaccgggtgttcgaactgccctaggcctggtttcgccatacactatgcagactcgagtgcactttgccactgctgtattttatttttgcacaacttctgagagcatgaggtgtttcagagattgctacctactttccgtgcttttgttttatgccactgaagtggagccgtcagtcatgcccactctaacactttgataagagtggtgtaaactgcattcccacacgcagcttggttatgcttggggagtatgaataaccggcctttgtgtttctgagtcaccagtctttcaaacacgttaggaatcgttctcggaagtgggttaggggcgaactgaatgtgtcctgggacatttaaagccatcctgaaattaacgctgagtggatgttag

SEQ ID NO: 3641 - DNA, 702 bp, Rattus norvegicus
atatcttacatggcttacccattccaacttggcttacaagacgctacatcacctattatagaagaacttataaactttcatgatcacaccctaataattgtgttcctcatcagctcattagtactttatattatctcactaatactaacaacaaaactaacacatacaagcacaatagacgcccaagaagtggaaacaatttggacaatccttccagctgttattcttattcttatcgccctcccttccctacgaattttatacataatagacgaaatcaataacccagttctaacagtaaaaactataggtcaccaatgatactgaagctacgaatacaccgactatgaagacctatgttttgactcctacataatcccaaccaatgacttaaaaccaggtgagcttcgtctattagaagtggataatcgagtagttttaccaatagaacttccaattcgtatactaatctcatccgaagacgtcttacactcatgagccgtcccttcactaggattaaaaactgacgcaatcccaggccgtctaaatcaagctacagtgacatcaaatcgaccaggcctattctacgggcaatgctctgaaatctgcggctcaaatcacagtttcatgcctattgtactagaaatagtacccctaaaacacttcgaaaactgatcagcttccataatctaaattcattgc

SEQ ID NO: 3642 - DNA, 6849 bp, Rattus norvegicus
  misc_feature (2293)..(2293): n is a, c, g, or t
ccctcacagtattaagtacccttaccctaccgctttcctcccaactaatcacatagaagtttaggatatacagttcaagagccttcaaagcccttagaaaacaaacaagtttaacttctgataaggactgtaagactatatcttacatctgttaaatgcaaatcaactgctttaattaagctaaatcctcaactagattggaaggattcaaacctacgaaaatttagttaacaactaaataccctacttactggcttcaatctacttctcccgcctatcagaaaagaggcgggagaagccttagtagaggagattctctacaccttccaatttgcaattcgacatgataatcaccttaaggctttttggtaaaaagggggctcaacccctgtctttagatttacagtctaatgcttactcagccattttacctatgttcgtaaacggttgactcttttcaactaaccctaaagatatcggaaccctctacctattatttggagcctgagcaggaatagtagggacagctttaagtattctaattcgagctgaactaggacagctaggcgcactcctaggagatgaccaaatctataatgtcctcgtcacagcccatgcattcgtaataattttctttatagtaatacctataataattggaggcttcggaaactgacttgtaccactaataattggagcccctgatatagcattcccacgaataaataacataagcttttgactgcttcctccatcatttctactccttttagcatcctccatagtagaagctggagctggaacaggatgaacagtatatccccccttagccggaaacctagcccatgctggggtatccgtagatttaactattttttccctccacctagccggggtgtcttctatcttaggagctatcaactttatcaccactatcattaatataaaaccccctgctataacccaatatcagacacctctctttgtatgatccgtactaattacagccgtcctactacttctctcactgccagtattagcagcaggtatcactatactccttacagaccgaaatctaaatactactttcttcgaccccgctggaggcggaggcccaattctttatcaacacctattctgattcttcggccacccagaagtgtacatcttaattcttctagggtttgaaattatttcacatgtagttacctattactctggaaaaaaagaacccttcggatatataggtatggtatgaaccataatatctattggcttcctaggatttattgtatgagcacatcacatattcactgtaggcctggatgtagacacccgagcctactttacatctgccactataattatcgcaattcctacaggcgtaaaagtattcagctgactcgctacactacatggaggaaatatcaaatgatcccccgccatattatgagccttagggtttatcttcttattcacagtagggggcctaacagggatcgtactatctaactcatcccttgacattgtacttcatgatacatactacgtagtagctcacttccactatgtcttatctataggagcagtattcgccatcatagcttgcttcgtccactgattcccactattctcaggctataccctaaatgacacatgagcaaaagccctctttgccattatatttgtaggtgtaaacataacattttttcctcaacacttcctaggattagcagggatacctcgtcgttactctgattatccagatgcttataccacatgaaatacagtctcctctataggctcattcatctcacttacggccgtccttgtaatgatcttcatgatttgagaagccttcgcatcaaaacgagaagtgctctcaatttcctactcttcaactaacctagaatgactgcatggatgccccccaccttaccacacattcgaagaaccttcctatgtaaaagttaaataagaaaggaaggattcgaaccccctacaactggtttcaagccaatttcataaccattatgtctttctcaatgagatattagtaaaataattacataaccttgtcaaggttaagttatagacttaaatctatatatcttacatggcttacccatttcaacttggcttacaagacgccacatcaccaatcatagaagaacttacaaactttcatgaccacaccctaataattgtattcctcatcagctccctagtactttatattatttcactaatactaacaacaaaactaacacacacaagcacaatagacgcccangaagtagaaacaatttgaacaattctcccagctgtcattcttattctaatcgcccttccctccctacgaattctatacataatagacgagattaataacccagttctaacagtaaaaactataggacaccaatgatactgaagctatgaatatactgactatgaagacctatgctttgactcctacataatcccaaccaatgacctaaaactaggtgaacttcgcttattagaagttgataatcgggtagtcttaccaatagaacttccaattcgtatactaatctcatccgaagacgtcctgcactcatgacccatcccttcactagggttaaaaaccgacgcaatccccggccgcctaaaccaagctacagtcacatcaaaccgactaggtctattctatggccaatgctctgaaatttgcggctcaaatcacagcttcatactcattgtactagaaatagtgcctctaaaatatttcgaaaactgatcagcttctataatttaaactcattgcgaagcttagagcgttaaccttttaagttaaagttagagacaacaaatctccacattgacatgccacaactagacacatccacatgatttattacaatcatctcctcaatagccacactatttaatttatttcaattaaaaatttcttcccaaacctttcctgcacctccctcacccaaaactatagccacagaaaaaacgaataacccttgagaatcaaaatgaacgaaaatctatttccctctttcattacccccacaataataggtctaccaattgttgtgaccattattatgttcccatcaattctattcccatcatcagaacgcctaatcagcaaccgactacactcatttcaacactgactaatcaaacttatcatcaaacaaataatgttaattcacacaccaaaaggacgaacctgagccctaataattgtatccctaattatatttatcggctcaaccaaccttctagggcttcttccccatacatttacccctaccactcagctatctataaacctaagcatagccatccccctatgagcaggagccgtaattctaggcttccgacacaaactaaaaaattctttagcccacttcttaccgcaaggaacccccatctcactaattcccatactaatcatcatcgaaactatcagcctatttattcaaccgatagcactagcagtacgactaacagcaaacattacagcaggccatctattaatgcatctaatcggaggagctaccctagtacttatagacatcagcccaccaaccgctacaattacatttattattctacttctacttacagtacttgaatttgtcgtagccttaattcaagcctatgtattcacccttctagtaagcctgtacctacatgataacacataatgacccaccaaacccatgcataccatatagtaaacccaagcccatgaccactaacaggagccctatcagctcttctactcacatccggcttagtaatatgattccattacaactccacaattctcctatcattaggcctcctgacaaacatcctaactatatatcaatgatgacgagatatcatccgtgaaggaacataccaaggccaccacacccctattgtacaaaaaggcctccgatacggaataatcctgtttattgtctccgaagtattcttctttgccggatttttctgagcattttatcattccagcctagttcctacccacgacctaggcggttgctgacccccaacaggaatcacccctttaaatcccctagaagtaccccttctaaatacatcagtcctcttagcatcaggagtctcaattacatgagcccatcacagcctaatagaaggcaaccgaaaccatataaaccaagccctactaatcaccattctcttaggattatatttcactatcttacaagcctcagagtatttcgaaacatcattttctatctcagacggaatttacggctcaacattcttcatagcaacgggatttcatggccttcacgtaattattggctcaactttcctaattgtctgtctactacgacaactaaaattccacttcacatcaaaacatcatttcggatttgaagccgcagcatgatactgacacttcgtagatgtagtttgactattcctatacgtttctatctattgatgaggatcctactcccttagtataaacaatacaactgacttccaatcagttaattctgaaaaaactcagaagagagtaattaacctacccattatcatcacaattaacatcaccttatcttttatcctcatttcaattgcattctgattgcctcaaataaacttatactccgaaaaagcaaacccatatgaatgtggcttcgacccaacaagttctgcacgccttcctttttcaataaaatttttcttagtagccattacatttctactattcgacctagaaatcgccttactacttcccctcccatgagcgattcaaacaaccaataccgctacaataatagcaactgcctttattttagtcactattttagctcttggcctaagctacgaatgaacacaaaaaggactagaatgaacagaataattggtaattagtttaaataaaattaatgatttcgactcattagattatgataataatcataattaccaacaatgacatctgctttcctaaatttaactatagcctttacattatctctactaggtacttttatatttcgctcccacttaatatctactctcctctgcctagaaggaataatactatcactatttgtcataacttcaacatccacattaaactccaactccataatctccataaccatcccaattaccattctagtttttgcagcctgcgaagtagcagtaggtttagccttactagtaaaaatttcaaatacccacggaacagactacgtacaaaacctcaaccttctacaatgttaaaaatcattttcccatctatcatactcctcccactaacatgactctcagccaacaaaaaaatctgaaccaatgtcacctcctacagctttctagtgagcctattaagcttatcactcctatgacaaaatgacgaaaattacctaaatttctcagttatattctcctccgatccattatccaccccactaatcattctaacaacttgactcctcccactaataatgctcgctagccaaaatcacataaaaaaagaaaatataatgcatcaaaaactttacatctcaatacttattagcctccaaattttactcatcataacattctccgcaacagaactaattttattttatatcctgttcgaagccactctaatcccaacactaattatcattacacgatgaggcaaccaaacagaacgcttaaatgcaggaatttatttcctgttttatacactaattggctccatcccactcttaattgccctcatttcaatccaaaactcaataggaacactcaacttcctaatcctctccctcacaacacaccccctaccctcaacatgatccaacaccattctatgactagcatgtataatagcatttataatcaaaataccattatacggagtccatctatgattaccaaaagcccacgtagaagctccaattgcaggctctataattttagcagcaattctcctaaagctagggggttatgggataatacgagtttccatcattctagaccccctaacaaaatctttagcctacccattcatcatcctctcattatgaggcataattataactagctcggtctgcctacgccaaacagatctaaaatcattaattgcttactcatcagtaagccatatagccctagtcatcacagccattataatccagacaccatgaagcttcatgggagctacaatactaataatcgcccacggcttaacctcatcactcttattctgcctagcaaacaccaactacgaacgaattcacagccgaactataattatagctcgaggattacaaataatcttttcattgatagcaacatgatgattattagcaagcttagccaacctagcactaccacccctaattaacctcataggcgagttattcattgttatagcaacattttcctgatcgaacccctctatcatccttatagcaactaacattgtcactacaggaatatactcaatatatatgattatcacaacccaacgaggaaaactaaccagccacataaacaacctccaaccttcccacacacgagaattaacactcatagctctacacattattcccctcatactattaacaatcaaccctaaactcatcacaggcctaacaatatgtagatatagtttacaaaaaacattagactgtgaatctaacaacaggaaatcaaattccttatttaccaagaaagtatgcaagaactgctaattcatgcacccatacctaaaacatatggctttcttacttttataggatagaagtaatccattggtcttaggaaccaaaaaccttggtgcaactccaaataaaagtaata

SEQ ID NO: 3643 - DNA, 3717 bp, Rattus norvegicus
ttaggaacattgagaaccattgacttaattaaggtattcgtcatgccttctactctgtgtattcaatacactctctaaacaccttcatttctcacagtcacattccatcatctcccaattattttaataaagatgagaaatccttgcactggtcaacacaaacaggagtctttaggctaaaccagcccaccaccagttcttgtaaataaaatgtcctcctctccccaatgtgttcatacactacagatacaggtgcttgtgtgacagtgacagaggtgagattttactcatgtgcatcctgggcctctctgtattgttaaaagttttagtttatgtgctgctgaagcgagcatagcagcaatggtctcaaaactgacaacaatacctggatgcttacaagaagagttcatgatgccagttgaggtcccctccctttgtgttgctgtcctgtctcctggccagcttctttgaagggttcagttgctaccttgtcacgggatcatggcgtctcaagatttagccacagattcaacaccaccaaattcatgagaatttctgataaggaaaatagagcttgtctaagacagacctgtggtttctagcccttcctttctcccacttgtgaagctataaaagcaggaaccagggcaggaccacagcagaagctcaccccaggctgcaccactggcacaatgcaggccctactattcctgatggctcttctcttgccttctggagctggagctggtgagtttgctcttcatgtccctaacctctgagctttcagcaactgaccttaattccttagcttttgtatcagagaccctaacatgagggcaagattctaaactgacatagtctaggggaaatctctaggtcaacaaagaatgaaaaactacttccccatcacgccatttcatcaaagtactctgtttggatgggcagctcctccctggccttcccttaatgttgaggaagacagaatgagtgaagaatgaaatgactaaagaaatagagaatcagaaacattaatggtcactgtgttctgaaatgaaggatgatggtggacaaggaggtgtggggaggaaagataaacaggagagaaaagaccaaaggacctgtggcagggctgaaccccatgcgaggtggggtgggcttggagcagtcgctcagctttagccccatatttctctggcagtactgtgttgggggccctgcaggcttgtgactggggactgtgttctttgttccagaggaaattatcggtggtgtggagtctattcctcactcccgcccttacatggcccatctggacatcgtcactgagaaaggtttaagggtcatctgtggtgggtttctcataagccgtcaatttgtgctgactgctgcacattgtaaaggaaggtaagaggctcctcttcctgtgaagacatgcatgagccagagtcacagagcaacagagcctcaggaaaggctccgagccctgttcatctctagatgggctctttttacacagagaggtaaagagagctcagggccactcactggaccattcatgtgtcatctccatttcagaggtcagaactttaagcagggctctggtcaggactaaaatcacagtcttgttttgtcctagtggtagcagagatcagacatgagctggggtataaattaatgtagagtgcctatcagccatgtgcaaagccatgggttcgctgcacattgtgtgtactgagtgtggggtttgcaaagagttctcagtcctgtgtttccctgagccctaggtagtggtcctgggagctccatctcaagtctatgtatgggttctgcccagggatagagaaaaaagagcccggtgcccctctccttggaaggagttctcctcatacgacttttcattgcttatttctctatcgacagagaaatcacagtcatccttggagcccatgatgtgagaaagcgagaatccacacagcagaagataaaagtcgaaaaacaaatcattcacgaaagttacaactccgttcccaatcttcatgacatcatgttactgaaggtgctctcatttatctggtcttaccttatttaagtctcccctcttaactcttcccctggcttagtccattgaaatctctcttgtccaatccttttcctcagaacccactcttgaattctatgtgatatggacctgctgtgataggactcatgtctaagcatccttctctggtttgccatcccttctctcccttccccaacagcttgaaaaaaaagttgagttgactcctgctgtgaatgtagttcctctgcccagtccctctgactttatccaccctggggcaatgtgttgggcagctggatgggggaaaactggagttagagatcctacctcgtatacactgagagaggttgaactgagaatcatggatgaaaaggcctgtgtggactacaggtattatgaatacaaattccaggtctgcgtgggcagtcccacaactttaagagcagcattcatggtgagtacacactttctttttcttccccatctgagacagtttcagtgaagggaatgtgccaaccagctctccatggcagtgatctaatgcctgtcttcttagttcctatctatgatgctctagaaactctccgtgtcatcaccctatgcccaagcccttcctacaaccttcccatgatgctagatactagacatggagtgaagggagacatgttggcattggtgcaaggagagagaggctggagggacagagaattattaagtccctaacttatgacccataggcagtcaggacctcttacttcactctgggtttaactatcttttagcttatattttctcatactttgttttttcttacttgtagggagactctggcggaccgctactgtgtgctggtgtggctcatggtattgtatcttatgggcatccagatgcaaagccccctgcaatcttcacccgagtctccacatatgtgccctggattaatgcagtcattaatacaagtagctgaaaagcctgacctgcttgagacaccctccaagcctgagttcatctggtaacttttggtttcaacacagcctgtttccagcatgtctctcagcctgtccctagcctgtctccagctgtctctaagaggccctcaaagatatacaagtctgtgatgatggattgttccctgtaaagcacttcaataaagacataacttccaacagctgtgtgactccactctgctctcattactctgcccctctctgtgctcaacagagaactgatttgagctactatcttgctatgttaaccatcttgactactgacttccaggcacacgtgtaccactgtggattactaaatattatctaacatgcatggctgcatacagtaagatttcacacccaggataatgtgccctgttctgttcttctccactgtcctgtcttttcatcttctctcttcttgtctctcagctcttctgcccacaaaccccatgccctaagcactgcatctttccacacatcattgcagtttccatgtctaagtacagacatgggtgttgatccttgtgtcctacaccacctaccctgccatcatcatcctctcaattttgcacctgcaaactggaggacagcctgccctcaaaagtccttggaccatgaccgtgacttcagcagtcacaacaggagagcattagcactttttggatc

SEQ ID NO: 3644 - DNA, 1723 bp, Rattus norvegicus
tggaagggtctccatggatccagttgtggtcttgttgctcagtctgttctttctgcttttcctgtctctatggagaccgagctctgggagagggaaactccctcctggcccaactcctctcccaattattggaaatttctttcaggttgatatgaaggacattcggcaatccttaaccaatttttctaaaacctatggacctgtgtatactctgtatgttggctcacagcctactgtggtattgcatggctatgaggcattgaaagaagctcttgttgatcatggggaagaattctctggaagaggaaggttgccaatttgtgaaaaggttgctaaaggacagggcattgcttttagccatggaaatgtatggaaagccacaaggcatttcacagtcaaaaccctgaggaatttgggcatgggaaaagggaccattgaagacaaagtgcaagaggaagcaaagtggctagtgaaagaactgaagaaaaccaatggctcaccctgtgatccccaattcatcatgggatgtgctcctggcaatgtcatctgctccattatcttgcagaatcgttttgattatgaagataaggattttcttaacttgatagaaaaagtgaatgaggccgttaaaattataagctctcctgggattcaggttttcaatatatttcctatacttcttgattattgtccgggaaatcataacatatatttcaaaaatcatacatggcttaagagttaccttttggagaaaataaaagaacatgaagaatcgttggatgtttcaaatcctcgggacttcattgattatttcctaattgaaagaaatcaggaaaatgccaatcagtggatgaactatacacttgaacacctggcaatcatggtgactgatttgttttttgctggaatagagacagtaagctcaacaatgagatttgctctcctgctcttgatgaagtacccacacgtcacagctaaagtccaggaagagattgaccatgtgattgggagacaccgcagcccctgtatgcaggacaggagccacatgccctacacaaatgccatggtccacgaggttcagagatacattgacattggtccaaatggtctgcttcatgaagtgacctgtgacactaaattcagaaactacttcataccgaagggaacagcagtactaacatcacttacatcagtgctgcatgacagcaaggagtttcccaacccagagatgtttgacccaggtcactttctagatgagaatggaaactttaagaaaagtgactacttcattcctttctcagcaggaaaacggatgtgtttgggagagagcctggcccgcatggagctgtttctattcctgacaaccattttacagaatttcaaactaaaatctctggttgacccaaaggacatcaatacaaccccaatatgttcttcactttcttcagttcctcccactttccagatgcgcttcatccctctctaatgaaaaccagaaaacagaaatgaagatgaggaaagatcctgctgttttgttttctgaaggtacccacagaagccttcatttactactgtcatagaaatgccactgtatccttccttcttctcacagcttcggttctctatttgtccaaggataatagttctgcattatatagttcctaaactcaatgtaaaagatcctgataaagaagccacttcaaataaaagagttctactgtga

SEQ ID NO: 3645 - DNA, 2678 bp, Rattus norvegicus
cttctacttcagacactgtgcgctctcccggaccgtcgtgcgccgctccccgtcgccttccaggactgggaaaggggagaggaggacggtgccacgtccgacggcctcctgggctgggggcagggtctgccgctcgcccttggcaccagtccctgcgacccatccccgagcctcgccctcctcctccctgctcgaagaggtctccctccttcgcgggatctgagtccctgtcttcatttttctcctagccacgtccctccccgagaagggacgagccgggagcatcatgcgtttcgcctggaccgtgctctttctgggacagctgcagttctgtccccttctccgctgcgccccgcaggccccgcgcgagcctcccgccgcccccggtgcctggcgccagacaatccaatgggagaacaacgggcaggtgttcagtctgttgagcctgggggcgcagtaccagcctcagcgacgccgcgactccagcgccactgccccgagagccgacggcaacgctgcagcacagccacgcacgcccattctgctgctgcgtgacaaccgcactgcctctgcccgtgcgaggactccaagcccatctggggtcgccgcgggtcgtccccggcccgcagcccgccactggttccaagttggtttctcgccgtcgggggccggcgatggagcctcaaggcgcgcagcgaaccggactgcgtcgccacagcctccgcagctcagtaatctgaggccacccagccacgtagatcgcatggtgggcgacgacccctacaatccctacaagtactccgacgacaacccctattataactactatgacacttatgagagaccccggtccgggagcaggcaccgacctggatatggcaccggttacttccagtacggtctcccggacctggtacccgatccctactacatccaggcatccacgtacgtacaaaagatgtctatgtacaacctgagatgcgctgcggaagaaaactgcctggccagttcagcatatagggcggatgtcagagactatgaccacagggtactgctacgatttcctcagagagtgaaaaaccaagggacgtctgacttcttaccaagccgcccccgctactcctgggagtggcacagctgccaccaacattaccacagcatggatgaattcagccactacgacctgctggatgccagcacacagaggagagtggccgagggccacaaagcaagcttctgtctggaggacacttcctgtgattatgggtaccacagacgatttgcctgtactgcacacacacaggggttgagtcccggatgttatgatacttatgcagcagacatagactgccagtggattgatattacagatgtacaacccggaaattacattctaaaggtcagtgtaaaccccagctacctggtgcctgaatcagactacagtaacaatgtcgtacgctgtgaaattcgctacacaggacatcacgcctatgcctcaggctgcaccatttcaccgtattagaaagaagctcaccttcccaaaggatgaagcagtacctggtgtttggacctatgaaaaccgtagattagcttaagtaggaagacttagatattttaaaaggcaaacggaaaaacaacaaagaaggttttgtttggactctttcacaacaaatcacataactggattttgagtgtttaaatcagcattagattggcacattttaaatacttattcatgttgctttatgaagtaatggtgtttcaattctgtgggtgcatagtgggctctttcaaagaattctgaatttcttaccttcttttgaaattatagtgcaaaaagaagaggatattttaatgaatgagccacaatttgaactgattactttctaaattgccagacccatgagacaatgatgatgggtttgtatttgcctcaacatagattcgctttttaaaaagggtgttcctattgtataggcaaaaatggatacacttggtgctgaggaagggtcaaatactaactattgttgtcacgaaatataggtctacagcagagagatggtgagtatatattcagatagttacatccctatataaactatgtttacattttagatgcttttctttctgttaattgcttaatctcactctgacttgaggtacaacttctgttttggaatgaattagataattccagattctggtttgataattgttgacattcccccatgctactttttctgagggcagaaacgtctaatgtgacgactcttcacattaccattacgaggatacacagcacagcgaaatcattccgatgacaggtgtgatagatggagagctaacatgcaactgccgagtgtttcactgttagccagaactaagtcacttgccccacacagcaattacaccatgaatctctaacatcacaaccttctttcaaatacccacggactcatccatccttccatccgtcatccatccatccgtccgtccgtccgtcctgactgcctagtgccactgtctggctaggcacacccactatcaacctggttcacctgtcatggcagcctgtacccacccccgccacacaccccgacgctggcctatagtgcaaaggttgtgcgggctggtccttcccacaatgcagtactgtaatccccgtccctcctggagcc

SEQ ID NO: 3646 - DNA, 759 bp, Rattus norvegicus
cctcaggctcagacacctgctctactccaagcaaatggctgctcttccaatgctgtggaccgggctggtcctcttgggtctcttgggatttccacagaccccagcccagggccatgacacagtgcagcccaactttcaacaagacaagttcctggggcgctggtacagcgcgggcctcgcctccaattcaagctggttccgggagaagaaagagctactgtttatgtgccagacagtggtagctccctccacagaaggcggcctcaacctcacctctaccttcctaaggaaaaaccagtgtgagaccaaggtgatggtactgcagccggcaggggttcccggacagtacacctacaacagcccccactggggcagcttccactccctctcagtggtagaaaccgactacgatgagtacgcgttcctgttcagcaagggcaccaagggcccaggccaggacttccgcatggccaccctctacagcagagcccagcttctgaaggaggaactgaaggagaaattcatcacctttagcaaggaccagggcctcacagaggaggacattgttttcctgccccaaccggataagtgcattcaagagtaaacacaggtgagagaagtcagtcacaggtaacacatggtgatgtggcctcaggactcccgtgctctgtcactcttgagacccaagccctggctccccaaagaccttctccgccctccagctttgccttggtggagaaataaaatccaaagcaagtc

SEQ ID NO: 3647 - DNA, 2153 bp, Rattus norvegicus
cggccgggtgcgccttggggtttagtggcggcttctccatgggtccagccagccgcttccctgtgctgtgaggagacagcattcagagttgaccttgtgagagctggccataatttaattccatctctaggttttctgtaggcacatcgagaaccaaccatgggcagctttactaaggaagagtttgactgccatatcctcgatgaaggtttcactgctaaggacattctggaccaaaaaatcaatgaagtttcttcctctgatgataaggatgctttctatgttgcggacctcggagacgttctaaagaagcatctgaggtggctgaaagctcttccccgtgttactcccttctatgctgtcaagtgtaatgacagcagagccatagtgagcaccctggctgccattgggacaggatttgattgtgcaagcaagactgaaatacagttggtgcaggggcttggggtgcctccagagaggattatctatgcaaatccttgtaagcaagtgtctcagatcaagtatgctgccagtaatggagtccagatgatgacttttgacagtgaaattgagttgatgaaagttgccagagcacatccaaaggcaaagttggttttgcggattgccactgatgattccaaagcagtttgtcggctcagtgttaagtttggtgccacactgaaaaccagcaggcttctcttggaacgggcaaaagagctaaatattgatgtcattggtgtcagcttccatgtgggcagtgggtgtactgaccctgagaccttcgtgcaggcagtgtcagatgcccgctgtgtctttgacatgggaacagaagttggtttcagcatgtatctgcttgacattggtggtggctttcctgggtctgaagacacgaagcttaaatttgaggagatcaccagtgtaatcaacccagctctggacaagtacttcccatcggactctggagtgagaatcatagctgagccaggcagatactacgtcgcatcagctttcacacttgcagtgaatatcattgccaaaaaaaccgtgtggaaggagcagaccggctcggacgatgaagatgagtcaaacgagcaaactttgatgtattacgtgaatgatggagtgtatgggtcatttaactgcattctttatgaccatgcacatgtgaaggccctgctgcagaagagacccaagccagatgagaagtattactcatccagcatctggggaccaacatgtgatggccttgatcggatcgtcgagcgctgtagcctgcctgaaatgcatgtgggtgattggatgctgtttgagaacatgggtgcatacactgttgctgctgcttctactttcaatgggttccagaggccaaacatctactacgtaatgtcacggtcaatgtggcaactcatgaagcaaatccagagccatggcttcccgccagaagtggaggagcaggatgttggcactctgcccatgtcttgtgcccaggagagcgggatggaccgtcaccctgcagcctgtgcttctgctagtatcaatgtatagatgccattcttgtagctcttacctgcaagtttagcttgagttcacggcatttggggggaccatttaacttaattactgctagtttggaatgtctttgtaagagtagggttggcaccaatgcagtatggaaagactaggagatgggggtcacacttactgtgttcctatggaaactttgaatattttatatggatttttattcacttttcagacctgatactaatgagtgcccctcggctgctgagcaagcatttgtagcttgtacattggcagaatgggctaaaagcttatgttgtgacccattttgaaaataaagtatcttgaaatgattggacattggagaatgtgtgcaagtatcccttacagaaggcacaaacttctgcacaggctgtgtgttacagcagtgagtctagcccagcagagatgtggatgatacaaagctgtgccccctctgtacagcatcaatgtgcttagcccatctcaagtgtttactgtgaacttggtgcccaaagtctcttaagagtgtcatctgcctagtggcctcttgacttggccacttcctaaggagagggcatctgaggctctttgaaccttgcctgcagaaaccc

SEQ ID NO: 3648 - DNA, 4487 bp, Rattus norvegicus
agcgggtggggagaagagaggagatacagcagggaaaggagggatgctagaatggtttcgaacactgtgacttggggctctctctcctcatctcagaggaggggtctggctgggggctcagatcaccacaataaattccaggttcaccagtaaaattcacgtggagagtggcagcagactcatgttaggcccagaataggcacggctgtggaactgggaagaggtcccagcccaggggatgtggaaggagtgggtctggcttcctgaggctccctgaaagtagtacggtagggcctgagcagagggccacatcccaggtgatactaattggctcttgggttttcagctcttcccacagagcaaacagccacagactacatccccaccagtacctccacatcgcacccaagctccagtcaggtctatgtagagctgcaggaactgatgatggaccagaggaaccaggaactacagtgggtggaggcggcacactggatagggctggaggaaaaccttcgagaggatggtgtgtggggtcgtccacatctctcttacctcaccttctggagccttctagaactgcagaaggtcttctcaaaaggcaccttccttctggatctggcagagacatccctggctggggtggccaataaacttctagacagtttcatctatgaggatcaaattcggcctcaagaccgagatgagctgctccgggctctgctactcaaacgcagccacgctgaggacctaaaggatctggagggagtgaagcctgccgtcctgacccgctctggggccccttctgaacctcttcttcctcaccagccatcgctggagaccaagctgtactgtgcacaggcagaggggggctcagaagaaccctcgccatctgggattctgaagatcccccccaattcagaaaccacattggtgctagtgggccgggctagtttcctggtgaagcctgtgctgggcttcgtgagactgaaggaagctgtgccgctggaggacctggtgttgccggagcctgtgagcttccttctagttcttctcggacctgaggctccgcacatcgactacacccagctgggcagggctgcagcaactctcatgacagaaagagtgttccgcgttaccgcctccctggcgcagagccgaggggagctgctgagctccctggatagctttctggactgtagcctggtgctgccgcccacagaggccccttcagagaaagctctgctcaacctggtgcccgtgcagaaggagttgcttaggaagcggtacttgcccagacctgccaagccagaccccaacttgtacgaggcattagacgggggaaaggagggccccggtgacgaagacgaccctctaaggcgcaccggccggatctttggaggcctgatccgtgatatccggcgccggtatccttactacctgagtgacatcaccgatgcgctcagtccccaggtgctggctgctgtcatcttcatctactttgctgccttgtcacctgcggtcaccttcggcggtctcctgggagaaaagacccggaacctgatgggggtgtcagagctgctcatctccacagcagtgcaaggaattctctttgctctcctgggggcacagcccctgcttgtgctcggcttctcaggacccctgctggtgtttgaagaagccttctactcgttctgtgaaagcaataacctggagtacatcgtgggccgcgcgtggatcggcttctggcttatcctgctggtggtgttggtggtggcctttgaaggcagcttcctggtccaatacatctcccgctacactcaggagatcttctccttcctcatctccctcatcttcatctatgagactttctctaagctgatcaagattttccaggactacccgctacaagagagctatgcccctgttgtgatgaagcccaaacctcagggccccgtgcccaacacagccctcctctcccttgtgcttatggttggtaccttcctacttgccatgatgctacgaaagttcaagaacagcacctacttccccggcaagctacgcagagtcattggggactttggggtccccatctccatcctgataatggtcctggtggataccttcatcaagaacacctacacgcagaaactctcggtgcctgatggccttaaagtgtccaactcctccgcccggggctgggtcatccatcccctgggtctgtataaccatttccccaagtggatgatgtttgcttctgttctacccgctctgcttgtcttcatccttatattccttgagtctcagatcaccacgctgattgtcagtaaacctgagcggaagatgatcaagggctccggcttccacctggacttgctgctggttgttggcatgggcggggtggccgccctctttgggatgccttggctcagcgccaccactgtgcgttctgttacccatgccaacgccctcacagtcatggggaaggccagtggtccaggggctgcagcccagatccaagaggtcaaggaacagcggatcagtgggctcctggtctctgtgctcgtgggactgtccattctcatggaacccatcctgtcccgcatccccctggctgtactgtttggcatcttcctgtacatggggatcacatccctcagtggcatccagctctttgaccgcatcttgctcctgttcaagccacccaagtaccacccagatgtgccctttgtcaagagggtgaagacctggcgtatgcacctcttcacgggcatccagatcatctgcctggctgtgctgtgggtggtgaagtccacgccagcctcgctggccctgccctttgtcctcatcctcaccgtgcccctgcgtcgtctcctcctgccgctcatcttcagagagctagaactccagtgtctggatggtgatgatgccaaagtgacctttgacgaggcggaagggctggatgagtatgacgaagtgcccatgcctgtgtgaggggcaggcccaggcccccaaccactccactttcccaccctcctgggaagaccattcatgggcatgtcatggctgtgggtggggaaggagaggttgtctaggaaactctctacataaggtatacgggattttctggctggagacgaccagaagttatatcagggaattggggtcacagtctcttgcgactgtacgggtcccatgtggcatagttataaatagcaaaggggagacacttttcaagttcctgctggctgtgtggccttaagtaagtcccttgacctctctggcctctgccccctactctatagaatgtatgcattggtaataatacccatgttaccggctgctgaggaccaagagcaaatgtctaagaactattacagtcttcattgttctcagagcctgcccagatcacacagccccctcccccccacccggggccacacagcagggacctgagcctcctgacctggaggctacagctctgtcctccgtcttcccagtcatgcccagaaatacccctaatgtcttccattttctgtcccacccccaccccaagtctcccttctctgcatctagagagatattctgatgagagtaagatacaggtgagggactgaggctcgtattcctaagtacttgctctctctcaccaggtgttcattcattcattcattcattcattcattcatacattccatagccatctactaaaggccctagacctagtggacacagaggggctggttcaagcttcttttgcggggtgaggccaatacataagtctgctctggacatggatggggatagcgggaggatgggagggttgtaatttattaactgtgtattttctgagtgcttcttccgtgccttggttttgcccacacactcagccctcatgagagacttgctgtgtccaaccccagctaaactgagtcttgggggagcgaaacccaagttttgacccattggagtaggagacagtagcttgttcaaaatatggataaacaactatttttatttttgacaaagcaatatattttttaaaaaaaaaaaaaagttgaaagaaccagaacttgagagaagaaacagaagatctgagtgatcaggcagcagggggcttccagtggaagatgctgggggggggggatttgagagcccatgtttgcctcccaggactgcctcaccacagactcttgttccctcatcatagaaatagggacaaggatgcacctaccttgtagggagttggaaggattgaccgacaccgtataagaaaagcatttgcagagcacacagccttccttgtggggagttgctgatgtgaccacgccgctgggcacacccctatcctctcctgcctttcctactccttgaacattaccaaagagagtggggatcctgctgcccactctccagcgcccttccccaccgccgtgcttgggaataggttttgccaataaatgtgtctgtgttaaaaaaaaaaaaaa

SEQ ID NO: 3649 - DNA, 14302 bp, Rattus norvegicus
gatccccgggtcccagacccctctgacttccaaggacagaagacaaggcatttggagacatagtactgggaggataagagcagagttgtgtcttcctcagagatggccaagaacatctgcctgtccctcccagccctacagcctccctcagggcttccaagcacagatgagaacagggaaaaacataaacaagcaacagctggtcctacaggccgtggctgggcctatgagcctgagtttccagctgaggtttccctctttcctcaaccttcccacccccacctgactcggttctcggggtcgccagagaaaactcgcgggctggttgccctggtatctgtttactggaaattgaaaacaaacaccaaacacgctgctgtgccgcccacctaagcttcccgtgattcgccagacagctgtctccatggatactgccaagcgaacacccatcgcctatacaaaagatgacagtttgtgaatccggaggctaagagtgcccctcctcaaccccacccccccccccccccccccgccgccgcaggaccaccttggtcttttctagtccaagccctctctctagtcacaaaaatctagagttacaaagggtttttgattctgtccaaccttcaaaggcacacagcctggtcctcttaagtgctgtgcaaatgtttctctaaagaaatcgtggagctggggcggtgtttcagttggtggtttgtcttgtatgttggaagtcctgggttcgagcccccgtacttgcataagccccaggtgtggtgctgtataccggaagtctcaataactgggaggtgaagggaggtggatcagaatctccagggtagcctcagctgtatatatataatgaatttgaggctaacctgggctgcatacccatgagattgtccaaaaaccacaaaaaactcttcagtcattcttcctccacaggtctaagaacagaatcccactatgatatatatatatatatataacatacatactacatacatactacacacatactacacacatacatactacacgcatacatactacatgcgtacatactacatgtgtgtgtgtgtgtgtgtgtgtgtgtgtgtgttctttctatccctggccctgtggctccagtccagaggagaagaaacatcctctggggtctagagagatggctcaacccttgaaagcacacactgttcttgcagaggacctaaattctattcccaacacccacaacgaatgacatgactgcctgtaactccagctccagggaatctgacactttccagctttcacatgcacacacccacaagtggacacacacacacacacacacacacacacacacacacaccgcgcacgtaattaaaacgtaagaagaaagcggggcacggcggtacacacctctgatgccagcactcaggaggcagaagcaggccgacctctgtgagttggaagccagccagagctccagcttgagttccaggctagccaggactacataatgaatactctagctaaacaaacaaaaacgaatgaacaaacgaatgaaggataaaataaaatcgtaagaaaacacctctttctgtctcagtcatcctaggctgctctactggtccttgctccttgacaaagctttctgtggtaacccctgtgctcatttgtggaaaagtctggtccaatccagccaccagcgccccacccagtacacctcaaaacccagccacacaaggttattgacacaaagagcgagccctcagggcaccaggagagtctggccccatgtggggagtcagagggcttcaccgaaggcctggcgggcacatggagggaggaggaaaggacttgaagttctctattgggcttaagtccaagaggaaccagaactcagacaatcacagggcacatttcgtgctctggcactgggcagaaacccaagagaaagccaagccaacttttcctggatataggccgacggtgaacaaggggtagacagtactggcagggtccatagcttctctgtgatggctgtctccaaaggacagagggtcatgttgccacaggctgaggctcaaggaagggagtcctaaacaccaggcactgtaggctctgtggtaccgccaagggtctagacgaccgaccagccaaaggcaaagggacagagatgttccagtcaaggcaatcaggatttgctcaattatcccccatgccctctcacacacgtacacacacgtgtcccagcaagttactgggagggagggaaggagagagggggcagggcgggcgagcagcccagacatttccagagttagaaggtgggtggggctggaacatgagttcatctatttccggcccacatctggtataaagggagcctgcagccagggacagagcacagctggatcaggctgctgcagatccccgagagctttgtgaaggaggaacgctgcacacccgcctcccgcagcacacagccaaccacagctgagcgacacgcaacaagagccaatcacaaggcacttccgaaagctccaggtaggagaaaagctttctctctctctcaccttaggctttaaatgaaagtaggaaacatcccttcccagaggtctccgtctgtcaccctcgttttccctcggttcccttccactcttttctggaactctgcagtccgccctagcccaaccaggaccacaggtggtcgagaaagatggtcaaactgcgtttccaaccctgtatcccagaagcgaacacattgtctttcagtcactctccagcaaacctcccctttatcaatttagcaaaggggctttacttttaaagatttatttatttattatatataagtacactgtagctgccttcagatacaccagaagagggcatcggatctctttacaagatggttgtaagccaccatgtggttgctgggaattgaactcaggacctctggaagagtaatcgggtgctcttaaccgctgagccatctctccagcccggggctttacttttaaaaagaaagttgcatttatatgtgtatgtatgtgtgtgtgcaaattcgtgtatcacacaaatattcgtgttcaagtgtgaaaatcaggaaacaactttcaggggtcagctcccattttaagccaaaagtcgtcactgtccaaaggtctctgagccccacggaagggacgggagacgcacaggaggagtttttctaagattcactcaggttaaaaaaaaatgaggacagcttatgttaaaaatcaaatagcatctatgggcagtaattcatgcctgtaatcacagcatttgggagaagcgaaacaggagtgtcctgagttcaagaccagccctgattatgtagcaaacaagactctcagaaaaaaattaaaagaattgtgtggaggtagaaggagatgagctcattatccaattgcattatggggtcttaatgaatgtgaacttaaccagactggactcttacaggctagaggcaaacacagagagcccagtccacgactgaggaagcaacatatccccttctggacagtcttccagaaggatctccttattggattctcttctatttatcctaggatgcagatgtcttcagccctcacttgcctcaccctgggcctggttctggtctttgggaaagggttcgcttcaccccttccagagtcccatacagcccagcaggccaccaacttcggagtaaaagtgtttcagcatgtggtccaggcctccaaagaccgaaatgtggtcttctctccctacggcgtgtcctcggtgctggctatgctgcagctgaccacagcagggaaaacccggcagcagatccaagatgctatgggattcaatatcagtggtaagagatgggctagagggagacaggtgagagggagacaggcgagaaagtaaagatgtgctcacagaccagggtccagagaaacagagaaggcagggaaagctgctgcaacatcaccaagtctactcacgtccagccacagcccagagaccacccattttctctcccactattgggtcagttgaccttgacttgtaccagccagcgggttcaactcatgtgagcctggtgctgggatatagtttgcctagcatgcacaaaggcctgggctccattcccaaatagagtgaaactggaaatggtgatgtagaaccgtgaccacgttctttgggaagtggaggcagaagggtcaggtgttcaagctcatattggctagtatcgagttcagcgccagcctagattacgtgagacctttaaaaaaaaataagggagggggcaaaacaaaacacatggtctcaactcttataaaccttggttttattacctatgaatagggaacaagaatgtttcccacccaggctgagtaaatatgtaataggattatgaattactcgatatccattgatataagaccaacctagctaggtacggtggtagagcctgtaattgcgcttaagaggctaagagaggttgattatgaagtcaaggccagcctaggctacatagcaagctccactccaggctgagctatagagcaagccctgtcacaaaccaaatagaagaggaagccaggcagagtgtctcgtgccaggattcccagcagttgtgaggcctgttagagggattgttataatatataagggggtgtggggaagaagcaaactaaagtttataatttaagaacaggatattcaaatgcaaagaaaagattgggagctgagacttgaaagaagctactaaacagatacgttgaggctgactgtggatgacacaccctaatcccagtacaggcagaggcataaggcaagagatttcctgttagcttccaagacatctaggactctatagtgactggtgaagcagtctggcttacactgtgagagtctcctcagggaggggtggggagaagagaagaaggaaggaagaggagaggaaagaatgggagacagtcaggcatggcagtgcacatctttagtcccagcactcagagcattggaagagccacatgtgcctggacaggggtagggtgctccttgggaaacctggcccagctggaagcccttggctcaacacgaggctaatggatcctgtcctgatatctctgcagagaggggcacagctcctgccctccgaaagctctccaaggagctcatggggtcatggaacaagaatgagatcagtactgcggacgccatctttgtccagcgggacctagagctggtccagggcttcatgccccacttcttcaagctcttccggaccacggtgaagcaggtggacttctcagaggtggaaagagccagattcatcatcaacgactgggtggagaggcacaccaaaggtaggcctcaaggaaagcaggcccatcccaagggaagggagcagaggaggggaacttggtgtcaaattcacatatctccggctctcccttacagctttgtctttggggataaaagacaaatgcctcagaaaacaaagcaaaatggctaatgtttgtgctatggtgctgaggatgctcagagccagggcctcatgcatgctgggtaatctacactaccactgagccacgcccccagtccctccctggaggattctaggcaggtgccactaccactgagcctcgcccccagtcccctccctggaggattctaggcagggactctaccactgagccacgccccccagcccctccctggggattctaggtccagggactctaccactgagctgtaacccaaaactgtgtttatcttggtaaggctttgttataagcacacagtgctgggtgtaatgggtcatatcttgcaggacagttcatgaagtttggggttagcccgaactacataagcaagatactgctaccctccccccccacacacccctgcaaaagaaaacgtaaaagagcacagggacaaaaccaaccaactaaagacagttgcagtacataagctgccccacaaaccaaacaaacaatacaaaacctagacccaaacccaccaggaccagtcgaggtggctccatgggtacgtgctcttcctgtagagctggtgatctgaatttgattcctgaagccacagaaatgtgaaggagagaatcagttccacataagttgccctctgacctcccgcttgcgtgctcgcccccacccacggactttatacctcccgcccaccccccacaatagtaataacctttaaaataaataagcaaaaccaaaatcaacatgaaaggcatcaaaaaaaatgaaaggcatcactgacaataagaacgtcagtaactgtattggggggttggggttgggggggacaaaaggaaaagaagagacaagggaagtcggagcttctctttttttttttttttttttttttttttttggttctttttttttccggagctggggaccgaactcagggcctaggcaagcactctaccactgagctaaatccccaaccccaagacggagctttctaattctgatactaaaatggatcccagagccaaggaaaacgtgctgaagccagggctgtggctcaggcctatcatcccagctcttagaaagctgaggcaggaggattatcatgaactcaaggccaccctaggctgcaaagtgaacattggactaggctggactataaaaggggggttaggggggtagaagggagggaaggaggggaatagggagtaagagggagaaaaggagggagggctgaaaggcatcccttttgttctacttaagcatcacagttctttgtgtcccttcaccatacatccatttaagagctgggaacggaagggaaaatatctcagatgcttaaaacccattgcgcttcttgatcgccttgcttttccttaggtatgatcagtgacttactggccaagggggctgtaaatgagctgacacgcctggtgctggtgaacgccctctatttcaacggccaatggaagacccccttcttagaggccagcacccaccagcgcctgttccacaagtctgatggtagcaccatctccgtgcccatgatggctcagaacaacaagttcaactacagtgagtccaagatccccagaccccacctctcacaactacagacccagggcacgagggagggaggacggcagcagaggaggtggacacacccaagttattacaaagacgtaccaagcaggagatactgagatagttcaagtaggggagaggggaggacagtttcttcttgaattagatagtctgccagaccacatcggctcaacagacccttgagcctgtctcttctcttaaggtctctctagtgtgattatctagggccaaggagccagctagggtaaggctgtgcaggagttgggtgagcatgagaacgagttagtggctggagtcagacagaaataatgaagatcaagagggagaaagtaggcaggaagggtggggatgtggcttaaggagaacgctcaccagtcttagtgaagccctggggtccatgctcagctcataaaccagttacggtggataagtcctcggtcgtctacattgctagttcagaaaagagaggagaagagagcctttgaacgggatgtagagcctgaccttctagaaggagagaaggggagagaagcagggaaagctgggaagacagccacatgagtcagagccgactccaagcgccgccatcttggtatctccccagctgagttcaccactccggatgggcacgagtacgacatcctggaactgccctaccacggcgaaaccctcagcatgttcattgcagcaccctttgaaaaagatgtgcccctctccgccatcaccaacattttggacgctgagctcatcagacaatggaagagcaacatgaccaggctgccccgcctcctcatcctgcctaagtaagccgtcccattcgccaacgccctaatcccgacacccaccacccctcctaaagccactgtccccttgggagtttcccagatgggtaatgcccacagggaagggacatgcgtgggaggctgatgggaaacctcctagcctggctttgattatggtttctaatttcatcatccttgtgcctgtttctactgttggagaaacacgtcccacatagaccatgcacagaatactcagtaagaatcaaccaaagtagaggggagtggcacaagcctctaaccccagtatcagactgcaagattgctgaagatgtagcttagttagttcatgcatgctgggctagcgttcaaatgcaatactacataggccagtcatggtggtacaaactcgtaatcctagcccaagaggataatgagttcaaggccaacctgggttagatacagcaagaccctatctcataagggatagggggctgtcagggaaagagctggagttgtcggggttcttcctcacgcgcacagagccctaatcccccagcaccacgtgaaccagtaatgatggtacacagctacaatccctaatctcatcactaggggcggacggagttcaaggatcatccttgttctactggatcacgcaagacccatcttaaaagtcagccgaagaggagctagaggaggaagggggcctctgaatcgttctacactcatttgtaaatgtctccaatctcaaccgcccagccccctccttcccccacccacaaacaatgaaaggcatcaattcccagagggcagaggagacttccaaaaacaaatttttcttttcttttttctctttcccctaatccttctgcagaatcaaaaggggtggagagggctgtggtcgggtaattccagaattacagggaagctcccggcccagacttcccccgtaaactccaagatagcaaaaatgccaggcttggagacagaggagaattgagttgctttagagactagaccttctgctactgtctttctctctcatcaagatgaagataatgagtcatgccctggtgggaagcagaggggggccccccaaagtctcattctcgtgcgctcaaaagcagcctgcagaccacagttagctcctacaccctcgagagggagaatgtgaacctgtcccctcctgcagtcaaacggaatacaattatgttaaaactactgtcatatttgaggaaagccattagtcacggattcgagggggcggaaagattgaacaatgttcattaatattagaagtttctggcaaggaggaaaaataggccagacctcctagccaaatgaagtttcaaagacttctaatgccgtactagggggtggaggtaggaggatcagaagttcaaggtcagggctggggtgggtataattgagctgtgtagagtgcttgcctgatttgttcaaagccccgggttcaaccccagggctatataaaccagcacggtggcatacacctgtaaattctagcactcaggacatagaggcaggaggatcaaaatcatctttggatgcattaaggaatttggggctagcctgggctacatgagattcagtgtcaagacaaaacaaaaaggcagacctctttccttcatgctcatgtccatgtcctagagagatccgaaggtcctgggagaagcagcatgtgagagccaaactaacactgtcccctgttcctgcccataggttctctctggagactgaagtggacctcagagggcccctggagaagctgggcatgactgacatcttcagctcaacccaggccgacttcacaagtctttccggtgagaggcgatccccctcattttcttgattccatgagtcaaggtttccctcagaggatagagtggaggctaatctgtcctttgggtcccgctctatttcagaccaagagcagctctctgtagcacaagcactacaaaaggtcaagatcgaggtgaacgagagcggcacagtggcgtcttcctccacaggtgagtgtggctctgcccgtgtccgcccacctcctgggatgacagtcactaccaccacccccaacccccacaggaaagctagtgccagcccagtctgcaccctttcccaaacccatttctcagtggaaaatggatccacttgccctgcaactctgctccctcatctatggctcttgagatcccagtatatgatgaggacccccaaagaaagcccgaggtgttgtcacagtgggagtgaacttaaaggatgtgcttagcggtgagccctaaatatgtttatgactgatggaaaactggggctcagaggaagtctcaaaactttagagccaatgtccaggaacaaagaaagcctgaagccaagcacagtggtacatcctcaggaagctgaggcagaaggatgcaggttcaaaaacgcagggtcctgaaaaccaaggacagggagatatgagaggctgggggcgtggcttagtggtagagcccctacctagaatcccccagtgaggggctggggcatggctcagtggtagagcccctgcctagaatcccccagtgatgggctaggggggggctcagccataatactcttgctctagcatgccggaagctctgggttccattccccactactagtttcttttaagccacctgaaagtcatctcgcaatgctgctgtctgatagactggtgtcactagatctcctgggatcactccagtgataatatcccccaaccataacatattgtctcttttctttcagccattctagtctcagcccgcatggcccccacggagatggttttagaccgatcctttctctttgtggttcggcacaatccaacaggtgagcagaaccctatagcattctcctgtcctcaaggctgtactaggaaaattattatatacctgcccaccatgtagacatcccccaagcccctagggactctgcaaaggttcagaaactcagctccgttccttcctgagcactctgtcacagcccacgcaggtccaggaccccagtcctaacttagtcaccggggaagctgtgacccctggcaactcactcacctccttagagctcagttctcaactgtcatgcttcttctgtcctcagagacaatcctcttcatgggccagctgatggagccttgagagtgggatgagaagctcttcctttgggacaaaactggacgtgttataagcagagactctgaagaaaagaattgttttaaggactctttggggagaaagagaaggcctttctttcttaccccggcactggtaaatctttccaaccagcctcccagacctcagactctcgaagaggaaagagtctaactccctcactagggacctatcttactaaggtctcatccaaccatagaactcacagaatctggatctgcccagcattcagcctttggacccagttcccaccaaggccccagcagggccaacccactacgccttcactcagcaaagtcttttgtgttccagtcacactctgggtacctcttgtatcgtcctccattgctatgaaggatgacccaggccaaaggaagaagcactgtcctatctcaaggtccactgtggaaatgaacaccttgcccatccccaaggggcagcagatagacagatcgaatgatcgcccgatatcaagccttctcccagctcccgtcctgccctcccttccctgaccaggcgcttgtgttatttcagagtgtagatgacttgtttacagcttttttcgacccacaaacttttctcattttgaaagcgtgaaagaaaggtcagatgtgcacgtgccttgctctttatcctgggtctccctgtgaggggagaggggtcctggggagattccaggggtgtgattgaatatttatcttgtttatcttatacgtttgttggggagaagaagcactattaaggagaaagccttttatttaaaccatggcatatggtgtcccatttggggtctgtatccctgtatgtcagggaggcatcactccacaaacccgcccctcgggtggcccggcgtcggggctcacactgccgcctagtggcagccgaacacgcccttgccccatccctcccccgcatcctcccccgtggctcttttccttagggatcttgccaaggtgatgcttggcagcccacggtaaaggaagggggaaaaagattaggtgggagagagagagagagagagagagagagagagagagagagagagagagagagagagagagagagagagaaagagagagagatgtttgagagagggcaaagtggtttcaaatttttccaatacattcagaagccgagtgggaaagggggctgtgtgacctaacaggacagaactttctccaattactgggtgactcagctgcactggtgactcacttcaatgtgtcatttccggctgctgtaagtgagcagtggacacgtgggggggggggggtgaggatgaaagaaacagccagctcctggtcaaccaccttagttagataatcttttttgaaagcttcctagctgggggtatgatcagaaaaccaatttactgaaaaactgcacaggaaggtaacgtgaatctaatttcatagcgggccgctctgcatccgttacatctccactggaaaaaaataatcattttctttttgtgtgtgtgtgtgtgttttagcttttctccctctccctctttctctctcatttcattatgcactggataaccatacaccgtgacccacaggggcccaaatgtggggtcacatggtcttgaattttgtggggtacatatgcctttgtttgtttgttttcacttttgatatataaacaggtaaatgtgtttttaaaaaataataaaaatagagaatatgcagacaaaattgcttgctttttgccttctgtgtctgacccaaggcaagggattcgagcagtattgcgggctggtcagatggctcagtgggcagaacacaggcctcccaagacctgagctcaaacaccctggatcccacaggatgggaggagagaaccggctcctgaaagctgtcctctgacctccacacacaaaacatggcacatgctcccccacacacagacgataataatgaaataaaggtaagaggcaggcaagagggctcagatggtgaaagcacttctgagaagcctaacaatgaccgtggtttgattcccaggacccacacgatagaagacaagaaccgacaggagttgctccctgacttgcacacatgcatgatgggcacacttatgtgtgcacgcccatacatacacacacacacacacacacacacacacacacacacacacaatgtaagtaaaccggatatgctagcacgcttttaatcccagcacttgggaggcagaagcaggcaagatctctgagtttgagggtagtctggtctacagacagcattccaggatagccagggctacacagagagaccccatctcagaaaaaaacaaacgaaactgagcagtgggcgtggtgggacacacctgtgtgctagctagtaagtagcacttgggaggcagaggcaggaggatcaccagttggaggtgagttgggcctcgggtctaaggtgggctccataacaaatgaaagcagcaacagcagatcttgggtggtcacaggacttgcgtgaactgcacacccagaggtccgaacctgtgggggaagccgtgagtcaccgtaacactgtaatgtgtctccaggacaagtggtgcagggcttgattctctcccagaaaccatcctaagagggggacaggatgggttgaggacacggctcagttggatgaagttgcccagcattcgggaagctctacaattaatccttggcacttccagccgtcgggagatagaggcaaaagagttggaaattcaagaccatctggggccaacacgaactacacatgaccttgactccaggaaaacagcaggagggagaagaagagagagagattggggcaggaggtaggctgggtttgagggtactcaaccttaatcccagcacttgagaaacagaggcagatggagatctgtgagttcaaagctagcctggtttatacagcgtgtttcaggccagctagagagacagatagatcctggcaagaaaaaagagagagagagagagagagagagagagagagagagagagagagagagagagatggtgggtcgtggggagagagaaagggaaggaagagagtatggaatatgcctgtgcctagggagttttataccagaataaccttcgcaggagagccaggtttggtgctgtatacctaaaagcccagtgtttgtaggtagaggcaaaaagatcaagagttcaaactcattctgtgctacgtagtgagttcaaggtgagcctgggatatgtaaa

SEQ ID NO: 3650 - DNA, 17517 bp, Rattus norvegicus
ggatcctgtgccttctggctctccacttacatggatatactcacagtgacttaacttttaagaaaaaactactaaaaaaaacccccagaaacacaaatatttataaaccatctgcttgctgttttagtttctgagacagtgtttctttgtgtagcccacactgagctggaactcactctgtagatcaggctagtcttgaactaagagatctatctgcctgcctctgcctcagaagctctgtggttaaaggtatgcaccaccaccacctagccacctggtgttctttaaagcatggataattaaataaaataataaaaataaaaaataaatatggatggtgatagctatatataaaacggagagacttcaagcctgcctccctaaaaaaaatccctaactcttcatgtatagaaaatagatttcaacagtttgctctctccacataataccttttttcttttctttcttaactacaattaatttaagtcatacatatgtgcttgtatgctgtgtgtgtatatgtgtgtgtgtatgtgtgtacacacacgcacgtgcatactcaccctagaggtatagaatcccctggagctggaataaagattgtttgtgaaccactagatgtagtttctgggaatcgaactatggtcgaagggcaataaatgttcttaaccgctgagctatatctccaaccccaaatacccttttcttcctttgacccttggtgatagtagccctcatctccgtctctgggcatatccctgtctcttttgcagtgcttaaagtatattgtgttatggttatttgttctcaaaaacatatattatatatatatatatatataatcgttatgccgtcaacatctaactggcacttgacatagctgtcctcttgaaatgtttgctgatcttagttcctgtttgtgctcaagactggcgaagctgatggcgcaatacggttaatgaatccggatgaccattagagggcacactaatcccatgccgttccgtcccaaaggcccagcagtttggagttccccagactcgctccttcatttattcttcccatgatcatttccacccagaactccacagtcccattttaataatcttccacacaaaacactcaaacgacgttacatctcttccctagccacccaccctctctccccagtttctgttagtatttgggaattaaagagttaactccaccctcccacctggtcatcttgctcagttaatctgcgcgatctgggaggcggcgaagaagaaaggggaggtactcattgatggactgggtaacccggactctggctcgcccctacttgattgccttttctagaaaccctcccaaactcctattagccacacacaccttttccggccaagatccaaacaagctttcctctccctaggaaccaggtagaccagaggggcataggacagagggcggggggcagcttcttcacacctccttcctcagccctagtcccccggcggcctagccgccgcccgcgggtgctgccaggggagggaaacctcgcgcagcggcagcgggccggaaagagggtcagcaataactggcgcacgggagggtggggagccagcggtagtcagggctgggaggaaggagttaaagagtcaggattggttcccccggctctcttgtcaccgaatctgggaggggaggattcgctgccctggctcgggaccttgtggtcccgtcccccccccgcccgcctccggaacggccggagactggggccagccggacgccccttctggcacactcctggggcaagcgcgagcgcacactcccctttccttgctggcgctccctctcccctcgctctctctctctagaccgtcctctccttccctcgctctccaccgactcccttcgggtgctgtgcttgctcccacctgctctgaagcgctctccgctctcggacgctcccaatttagcgctcctgctcgacggccgaaccgtcgcagcctccgcaggcagcgtgccctcggggttgcggcttcaacccaccccagcttcctccctcgctacgactcgggcgccctggacgttcgaccctcgccgctgagcccgaggatggcgagcagaccatggtgacagcgctgcccggtcgctgcactcgctgaggccatgccgggctcccgacgcgtccgtccgcgcctaagggcgctgctgctgctgccgccgcttctgctactccggggcggccacgcgagcgacctgaccgtggctgtggtgctgccgctgaccaacacctcgtacccgtggtcctgggcgcgtgtagggccggccgtggaactggctctcgcgcgggtgaaggctcggccggacttgctgccgggttggacggtccgcatggtgctgggcagcagtgagaacgcggcgggcgtctgctcggacaccgccgcaccgctggccgcggtggacctcaagtgggagcacagccccgcggtgttcctgggccccggctgcgtctactccgctgccccggtggggcgcttcaccgcgcactggcgggtgccgctgctgaccgccggcgccccggctctgggcatcggggtcaaggatgagtatgcgctaaccacccgcacaggacccagccatgtcaagctgggcgatttcgtgacggcgctgcatcgacggctgggctgggagcaccaggcgctggtgctctatgcagatcggctgggcgacgaccggccttgcttcttcatagtggaggggctgtacatgcgggtgcgtgaacgcctcaacatcacagtgaatcaccaggagttcgtcgagggcgacccggaccactaccccaagctactgcgggccgtgcggcgaaagggcagaggtgaggctggcacccgccggacagctggctcgtgcggcctgatctccggcctgtccacgggcctggcattcctcctttgggggccaggcttcctcctcttagcgtcttgctcaacatgactttcctacctcggagtttctagttccctctctccgcgccgggtttgcattcctaccctctcctcctcccgtcctgtctcaagtgaccttcctgctgcgaactttcttgatttaagcgcggaagggcctagttctagcgctactgctccctcagcttcctgactcctctctccagttttcgctctaccctaccacggtctctctcctccggttccttctattgctcccacacaagctctcaggctctcgggtcccttctcccgcagattcttcctgcagtcttggtcccccacccccacccacatccacacaccttgccccaccttctcttccttcctcccacccctatctctcttcctactctgcacaccttctcccttctttcccgttcccttgctaaggcccagactgagccaggagtcgctgtcctttaaaaactacaaactcagaattccctcccttttagtaccctgcgtgttcattcatgtggtctctctctctctctctctctctctctctctctctgtctctctctctctgtgtctctctctctgtgtctctctctctgtctctctctgtgtctctctgtctctctgtctctgtctctctctctgtgtctctctctctgtctctgtctctctctctctctctctgtctctctgtctctctctctcttctcgtctcttctcttcttcctccttttccttcagttatctacatctgcagttctccggatgccttcaggaatctgatgcttctggccctgaacgctggcctgactggggaggactatgttttcttccacctggatgtgtttgggcaaagccttaagagtgctcagggccttgttccccagaaaccctgggaaagaggagatgggcaggacaggagtgcccgccaggcctttcaggtgagtgctgaggtttgaagcccaggactcttaagttgttgacatatcctttctgggcactctgcccctgtgtatctgaaatgattacagaaaacaggtttttgatagtcttgagttgaaccatgaacttcgtgggatttaaggactagaggctaaacagattattttatagccctgagtaaaagaatattaaagacccctggactagataatgtttgaatccttttgctcaaccacaggaccatgtcatgcaggacacatggatcaatttgatctttgtcttatttaatatttattatttattttggtttttgcttggtttttgttgttgttgttttgttttgttttgtttgggtcagagtctctctatgtattactggttgtcctggaacttattacacagatcaggctgggctcaaattcaaagattctcttgcttctgcctcctgcatgctagggttaaagacttgtgctaccacacccagctaatcaacttgatcccgacctaaacaggctggtctgagaggcaggaccccagatgatagggacaggatacaggaaggactggagtcagctcctaccactccccctttcaatgattccttccttaggctgccaaaattattacttacaaagagcctgataatcctgagtacttggaattcctgaagcagctgaaactcttggctgacaagaagttcaacttcaccgtggaggatggcctggtatgagggggtcctaggctcctccagtgtggctctctagaccctaattcatggctttctgtcagtctgtcctactctctcgggcattccagcatcacatctccccttctttcttcctattatttctgaatctctcctgatggtgaagggggacaatggcgagtttaacccttgaacatgaagtcctcatcatggaaaatgcaagtggcatatcctgccctatctttctctctagcatgactcggtgtcagatgaattgtagatgcaaaagcatcttttaggcagtcatatttgtgtggactttgggtgtcttctctatcccctccaagctcccactacccctccccagttccctgcccacaacgctacagtttgtcactctgagccctttatctctgccctatctgagctctgcttgcttctacagaagaatatcatcccagcctccttccacgacgggctcctgctctatgtccaggcagtgacagagactctggcacaggggggaactgtcacagatggagagaacatcactcagcggatgtggaaccgaagcttccaaggtcagggcctagaattaactggaatgggctgctttgggactggaggtgagagtgagccctagatgtcccagcaggagaccacaggaagcctattacccagctgggtaccttaagtttcctaaaattctgcatgctgtctgccattcccatagccagcacggctgcccttttcactgttgtgcatatatccatgttagtgtctgcatctctgtcgaggggggttggagggttgggatgatgtaaggcatctctgaacctccattatttcaaaacacagccttcctcccctacggccctaggtgtgacaggatacctgaaaattgatagaaacggagatcgggacaccgatttctctctctgggatatggatccagagacgggtgccttcagggtaagttcacacataccccaagaagacaatgcctgccaagaatggcctatcatcctcctaaccgcactccaccccacagccctgccaggtatctgcttattctttggacatctatgagatactaatgaggcaggctcaactaactcttcagtctgggagcagccaaaatgatgagatgcgtaaacttcctccctcagagaaccccaagtctgaagagggaacatagagtccttcccttgagttcctaagacaggtgggaccccatcctagcagagacagggactctggccaagaagaatgcatgtgtgcctctgtgtaaatgtagcaaggacaggaagggacaggggtcaaaggcaccaagattcagatctactagtgaaggcctcctggaggagacatattagggctagaagtgtacactgaggaattatttatgccttccaatcaataccaactccctgagtatagggttggggtttccaatgtggttccctatggttgcttctctgcaaacctgtgagtgttcaagtttttgccccttagtgccctggccatgggttggaagactcatggatagtcacagcaggaaccaagtgagtagtccatggtccaaatgcaggtcctggaagtagattggcgagagcaggaggcaggatggtaggggggtcgacaggcactcaccactcctgttctcactcaccactcctgttctccctcaggttgtcctgaactataatggtacttcccaggagctaatggctgtgtcagaacacaaattatactggcctctgggatatccacctcctgacgtccctaaatgtggctttgacaatgaggacccagcctgcaaccaaggtgaccgggcccatgcttccagaatcctgtcgtggagccactgcctcctccccaggggagttaaacagaggtttccttgctccagactttacttcccttcttttatcatatcagacgattctgactgactattagatgatttctccttcctatcgtctaaccctggtctctcttctacaacttggactctcccacagaccacttttccacactggaggttctggctttggtgggcagcctctctctgattagctttctgattgtgtctttcttcatatacaggtaagttaaggcacaggggtgttaggtgaggctggggagacaggagcacagagaagggagcaggaggagagtaggcctgggagggagcctaacgcgggaaaagaatgcgtctttcactccctcagtgaggaggcagaagctccagatggagtcaggaaggtgtggatcagtcatgttggttcaggctaggttaaagccacaacgtagctgggaagtgacttcagagcagagccgatgctggtgtggatctggcatcctttgctgagggcagatagaaagcagtagtttaaaaccttcaggtagctagacaatggtggtacaggcctttaatcccagcactcaagaagcagatgcaggtgaatctgagttcaaggccagcctggtctacagagagcgttccaggacagccagggctacacagagaaaccctgtctccaaaaaacaaactagcaaacaaacaaacttcaagtactaacccaaaggagttggttctggataacaaatcgctgagagctaggtgctgaccctagaccacccacccctcccctaccccacaccccaaattctcacccctgtgcatgtggaaatgaaagtacagaggggggataaggaaacaggaaagaggagggaagagagcagtgctgactgagcatgtgcgccaggcacttccacactcaggatgacactgcatcctgtaataattaagaatgaaatggaaggggctggggatttagctcagtggtagagcgcttacctaggaagcgcaaggccctgggttcggtccccagctccggaaaaaagaaccaaaaaaaaaaaaaaaaaaaaaaaaaagaatgaaatggaagccgggtgtgctacacataagctttattcccagcactggggtggtagaggcaggtggatctctgtgagttcaaggccagcctgctggtctacatagggacaacccaggccacatagtgagatccctgtctcataaacaacaacaacaacaacaaaacaaaaaaacccagaggcctccagtctccaaaggaagaaactaaagtgacttttcccctgggataagatcccctgtgagttagaatttctcaggccccaagctctcagctctgagaacaggactccctcaagcatctcttagcatgtgggatgtgctgggactctgaggggctatggagcacctgccaggggtaggggctcaggtgcaggcttcacattccaggaagatgcagctggaaaaggagctggtctcagagttgtggcgggtgcgctgggaggacttgcagcccagcagcctggagaggcatcttcggagcgctggcagccggctgaccctgagtggggtgaggacaccattgtctctgtaggatgggaatagctgagtcccaagggctgatgagttagtagaagctgcttctagatgaggtgactcacctggacccaggacttgggaggttaatatggaaagattgctgtaggtctgaggcaagcctgtgctacagaatgggaccccgtcttgtaaaaccaaaaccaaacaaaagaataggtctacccccagttctgccttcacttgcttaccctgacattgtcttagatgagggttatagttacagcctctgtaacaaggctctctcaaagctcgaaggaagatagtctaagtaaatacataaaggagggtgggagctagcattggtgactcacacctgcaatcaatcctagcctgggagggtgagtctggggcactgctacaagttccagggcagcctgagctaaagagtaagaccctatctctggagggtgacacagataagggacagtgtgactgaacctagaacttccaggatgcagaatgacctctgggctggccaatagatgactattgtttctctctgtagcgaggctccaattatggctccctgctaaccaccgagggccagttccaagtctttgccaagacagcatactataaggtaggtctggggaaagattgctgatcttgggcccctggtggagtgtggtctgaagaataagagatggtagcctgccagggaacaggggtagtcccagggcaaggatgggcttttagaagcaggtagagaactgctgtcatggatgggtttcagaagcagattggggtctcgggccatctcctgagtaataagtctccatttcctgctcagggcaaccttgtggctgtgaaacgtgtgaaccggaaacgcattgagttgacacgaaaagtcctgtttgaacttaaacatgtaattaaggggagcaaggtggtggcttgggaagggcttggtgggtactccaagagagtaagccaactgattatggagggatctatacagctgggatgggcccatgagtcttgagggtaggaaggagatcggtcataagatgagagatcactgggccctccaggccccagatgggttgtcctcacatgtacaggaaataaatggttagggagcaaattccgagaaagaatggtaacaaacatgtgacttggtgaggtttgaagcctctgccagggccttgatgctgccccaatctgcagatgcgggatgtgcagaatgagcacttgacaagatttgtgggtgcttgtaccgacccccccaacatctgtatcctcacagagtactgtccccgtggaagcctacaggtgagtgggacaagaagaagtgggacagtgaaaaagcctaggttctagccctggctcttaccccattgaccatgagcccagataagccccctctttgtggccatgcttggccctctctgtaaatgggagttgggggctggcatggcactacagtaaatccaagtgtccaagcttacaccagtagctcccttgtaccctcctcctactcccaggggggtctgactcttgctgccccagcaggacattctagagaatgagagtatcaccctggactggatgtttcggtactcgctcaccaatgacattgtcaaggtgagtccagaggagatcactggatgccaggcaagagatgggcatggttggaagtcatactcatgtctaagccctcttgccttcctaaatgttccagggaatgctctttctacacaatggggccatttgttcccatgggaacctcaagtcatccaactgtgtggtagacgggcgcttcgtgttaaagatcacagactacggtcttgagagcttcagagacccggagccagagcaaggacacaccctctttgccagtgagtctgactctttttttttttttttaagatttatttattatatataagtacactgtagctgtcttcagacacaacagaagagggcatcaaatctcattatggatggttgtgagccaccatgtggttgctgggatttgaactcaggacctccggaagagcagtcggtgctcttaaccactgagccatctctccagccctgtgagtctgactcttgaccctaggatctctgctgccagcacagctgagaagggacactgagatctagcctctgcaagacttgagtatatctcccatctccatgctcaaccttcattggttaaaaaggaagtcagactaagtggtcactggttctcagcactgtgctgtgtccacaggagtcctagccaatgtctttcttttattgtagcatttcctattagagtgtaaaatcccttatcccttctatgactcctgacctctgatccacagaaaaattgtggacggcacctgagctcctgcgaatggcttcgccacctgcccgtggctcccaagctggggatgtgtacagctttggtatcatcctgcaggagattgccctaagaagtggggtcttctatgtggaaggtttggacctcagcccaaaaggtgaggatcacatggcctatatcccagctggtcttgacgaatccacctccagagaaggaacctctccaaacacccctactgttccttctggagtggggagtcagccactcgctgtcctttgcgccatggctgccagtgaccagctcacccctgtgctctggtctggactcgccccacctgcctgtcccagccggttgcccaactaggcttgctgctcttcagcgcatcccccttccacacagagatcattgagcgtgtgactcggggtgagcagcccccattccgaccctccatggatctgcagagccacctggaggaactggggcagctgatgcagcggtgctgggcagaggacccacaggagcggccaccctttcagcagattcgcctggcgctgcgcaagttcaacaagttagtggtctctccccactacaggcactataaatcccacacttaaatttttttctacagtggcagcctactgcagctcttcacagcctcatagatgtctgcacagctgtatgatttggttgtcccaacagctcccaccattcactactccttcctctgccaacattgacatcccacaccctttcctgcccacagccctgtactgacccccagacttaagataaataagactatatgggccagatgctccaatcctttcccatttcttcccatagtctcagtcctgctcaaaagctcctaccccagtccttgtgtctcttttttctagtatgcccactggctggttctctcagtcatgtttctctgctgcctgtcatcgtcctcagctctccacctccttcaaactcatttgtgatcaataagaataaatatagtatccagcatggggactggagtgatggcttaacggttaagagcactgactgctcttccagaggtcctgagttcaattcccagcaaccacatggtggctcctaaccatctgaatgccctcttctggtgtgtctgaagaccacgacagtgtgctcacatacatgaaataaataaataaatcttaaaaaaaaaaaaaaaaggtacccagctgggcatagaagcaggtggatatctatgggttcaaggccagctgttcctttcacctaaaatacctgataatgtgaacagatccagctataactacttagagagaccgtgtctctaagggtggggccgggcatggtgagtgcctgagtgtgggcactgccaggcaggaccagtcatctcatttcatctgcccccctgtaccccacggccctcagggagaacagcagcaacatcctggacaacctgctgtcacgcatggagcagtatgctaacaacctggaggaactggtagaggagagaacacaagcttatctggaggagaagcgcaaagctgaggccttgctttaccagattctgcctcagtgagttctaagttctgcacacatgcatgcctatgagcgtgcgcgtgcgcgcacacacacacacacacacacacatacacacacacacacacacacgcatataaacatatagccctatcctcaccccacctcaccttctggtctctacctaccctctcccctcagctccgtggctgagcagctgaagagaggcgagacagtccaggctgaggcctttgatagtgttaccatctacttcagtgatattgtgggctttacagctctttcagcagaaagcacacccatgcaggtaagctggagttcagccacaggcagcaggagtaggtcatcttggtcgtctggtgagtacttccttcccacttgtccctggtgggagccctcagtccccatttctcttggcttcctttgtcttccaggtggtgactctgctcaatgatctgtacacctgttttgatgctgtcatagacaactttgatgtgtacaaggtgaggttctgagtagggataggaaggacaggcagacatggacagtcagaaaatgttcagagggatacactgaaacaaaacaaaacaaggccaggcagtggtggtgcacacctttaattctaccacttgggggatagaggcagggaaatctcaatgagttcaaggccagcctgatctacagagcaagttccaggacagccagagctacagacagaaaaccaaaataggagaaggaggtggagaatgggagaatgggggaggaagaggagaagaggggaggaagaggaagaagaaacaaagaaaggaagagagagagagagagagagagagagagagagagagagagagagagagagagagagaaaacaaaatagagacacacagggggacctaagaacagagaaactggggtcggtggccacaaggaaagctccagcccccctgtccttccttcttcccccgccccggccccccataggtggagaccattggtgatgcttacatggtggtgtcagggctcccagtgcggaatggacaactccacgcccgagaggtggcccgaatggcacttgcactactggatgctgtgcgctccttccgcatccgccataggccccaggaacagctgcgcttgcgcattggcatccacacaggtcagactacagaaggcatccagggctgaaactagggaacaagactaaacctttatcccctatctctcaccacacaccctgggaccacatatcccgactcctacctcttctggggtgctcacctaactcctctaacttccctggactcagctcccttcttttcccctcctaggtcctgtgtgtgctggtgtggtagggctaaagatgccccgatactgcctctttggagacacagtcaacacagcttcaagaatggagtctaatggagaaggtaggatggcccttctggagggaatgagaagggtgattgcccagtgcatcctgctgcttatgccttcctagttcctcagcttgctcctgccttctctctgcctaccctgacttcccttatgcacataactcccacattgtaaattaagactattgttgggggtggggttgggggtggggggttaaaaatgcactaagcccaccttagccccaaagcttacttaggtaccagaaatgttttcaaagcacttttattagcttacatctgagcaaagcaatctaacacaatcccactttttagagatttttaacaagtggcctaacactgaggtatgtgatataagatatttatattctttattttaatatagatctcattaagcaactctggctggtcttgaacttataattctcctgctctattctccaaactgggataacaggcctaagccatcagcttgggaaacaaagtctatttaataatgatgatgatgatgatgatgatgattataatgataatagttatttaatgtactaatacacccacaaagataggtgttttgctggtgaggtagctcactgggttaaggtgcttgctggccaagtctggtgacctgagattgatccttggaacccatatggtaccaggagagaatggattccacaagttgtcctctgacttccatgtattcaacacatacccacatgaatatatgtatacatacaataaatggataaacattattttaaattttatttttatttatttattttttttttttcggagctggggaccgaacccagggctttgcgcttcctaggtaagcgctctaccactgagctaaatccccagcccctttaaattttatttttaaaaactacaacgtggggttggggatttagctcagtgctagagcacttgcctaggaagggcaaggccctgggttcggtccccagctccgaaaaaaagaaccaaaaaaaaaaaaaaaaaaaaaaactacaacgtgctagagtagtagtgcacatctttagtcccagcacaaaggaggcagaggcaggtggatttctgagttggaggccatcccggtctacagagtgagttcccagacagccagggctacacaatgagaccctgcctaatgaaacaaaacaaaaaccaaacaacaatccacaaagtctgaaaatgtcctccccacccacaataaataaatacattttaaaattatgagaaaatgtaatctaaaacgccaagcatgtgacaaactgtcattctcatttctgggcctaagctcctccacacagcagtaactctgtttcaggattgtaaaagatctagcacaattctttgggtaggcagtaggcatctaataaatgctcctttccatccatcccttgatcttgtcccctgtttcctctatttttgtgtatatggctattgtctgaggcagtatctcaagttgccaaggttgacttgatcctctggctggcacctaacctaaacgctcagatcacagaattgtttcaccaggtctgtttgtttgtttgtttgtttgtttgttttttggtttgttattttgtcttgagacagacactccctccccctcccccccttccttgttttgtttgtgtaacaagcagctctgactgtcctggacttaatttgtagacccctctggtctcaaactcagagattctgcctgccactgcctccacaagtgctaggaataaatgtatgtgtaaccacctctgtgagagcctgtggcagacactaacagaaagacactcagaattcacacctctgcttccaggtgtacacacacacacacatacacacacacacacacacacacacacatacacgagagagagagagagagagagagagagagagagagagagagtactaagtcaagtaactgatctcaacaacttacatagtgtttcccatgggccccactaaatctagaaactttgtgagtgctttatttgcttatttgaggggtctaaagtctcactcaggtggagaagagtggagttaaaccctcagacagcactcacccttttgaaataagctctgtcggggttggggatttagctcagtggtagagcgcttgcctaggaagtgcaaggccctgggttcggtccccagctccggaaaaaaaagaaaaaaaaaaaaaaaaaagaaccaaaaaaaaaaaaaagaaataagctctgtcactgagggccttttacacactagggagacaaaggacattggttttagttatctgaactgatccaagctgagctccatactgagttggaacagcatctgcagtgtgggttcctaaccagtgctgtacgccccctcgggagctgggtaagtctgaaaagcaatcctgggccatagtatttttccacagtcaaaaagatgctctgtaatcccttccagaattgagtctcgtctggagattgatggcttaaaaagtgtccgttgagctgagaatatgactcactccatagagtgcttgcctagcaggaagaaagcgctgggttctatccctacggcacataaaccagccttggtgatggtcattccagcacatggcaaatggagacagggaggtcaggaggtcagagtcagtttagataacatgacctcttacttcaaaagagagtaaacagggctgggaaggcccagagtgtcagctcagcagtttagagctcttcctgctcttgtggagaacacgcgtgtgttgtataggtatgtgtatgttatgcagtcacacttcacaaggttcatctggggcttcctgagctaaaggaagcaagcgccatgcttcctggtcttcatctgcttgcaccctgctgctcccatctttggtgctcctcaccctcctcccctgtcctctccagccctcaagatccacttgtcttcagagaccaaggctgtgctggaagagttcgatggtttcgagctggagctccgaggggatgtggaaatgaaggtagagaaggactccttagaccccagaggatcccaaggccacgcccgtaacttaaatatctcaagtgatttgggggagtgggtgtgccattccctaacccgcctaatctttttattttctccagggcaaaggcaaggttcggacctattggctcctgggggagcggggatgtagcactcgaggctgacctactgccctgctgttccttgtcacccctcctccctgtgccagaggtgacagaggtgtccagcttccacctctcccacagcagcccagccactgtggaaggattagggacctgaccagcacagtcaccagatgtgacctctgagagaggatggagatggtggggactgcaggggacacctaagtttgtaggactgactgaaacacacagtccctcccatggcacccttgtggcacacatgcccagtcccacccttactctgctgcctagattgggacagcgattccttctctgccctcaacttagctccactgtgacttatagggagggaattgccacctgaaggaaacagaaagaggttagagtttgcaggaggcgggcagtcctgtgtcacaaatactcccctcacttccagcccaccacctgccccacagactttggacacagctcactgaggagaagagaagctgccggttaccttgcttctcctgtgaaccaaaccattaaagtctttattcctgtgacactgacacgtttcttcttgggaagagagggttgctgggaaacagtagtgttctttctctaccttctgcttccaaaagagttacctttggggctggggatttagctcagtggtagagcgcttacctaggaagcgcaaggccctgggttcggtccccagctccaaaaaaaaaaaagaaaaaaaaaagagttaccttcaactttgtttctttttcattgttgttgatgttgtaactaattttaagctttcttttttttttttttttttccccttcttctctgagccaggtgtagacctggctgtcttggaactcactctgtagaccaggctggcctggaactcacagagatccacctacctactgctgggattaaaggcatgtgtggcccccgaccctggctaattttacacttttaatcgacgagaccacagaattc

SEQ ID NO: 3651 - DNA, 680 bp, Rattus norvegicus
cagcactgggtaaacagatgactggctgcgtaccgggcggggctatttaagaggagtcgccctgccgcctgccctcaacttagctggacagcagccgttggaaaccgccaagccagctgactccgcatccgaagatatgaagtgcggcgtgtgtctgtgcgtggtgatggcagtcctggcagcaggcgccctggcgcagccggtagtccctgtagaagctgtggaccctatggagcagcgggcggaggaggcgccccgaaggcagctgagggctgtgctccgaccggacagcgagccccgagcgcgcctgggcgcactgctagcccgatacatccagcaggtccgcaaagctccctctggccgcatgtccgttcttaagaacctgcagggcctggaccctagccacaggataagtgaccgggactacatgggctggatggatttcggccggcgcagtgctgaggactacgaatacccatcgtagtgggccagcctctcggcgctgcttggaggaggcggaatgagaaaacaaccacgcacacgacccctcgcctctaatgtttgacattttgagtttatttattaagtccccaatgtgaaatctgtctgttcagagtgtgcaatgcagccacacacctcagcccagctgagcggtgggaaggcaatgtttccctctggtg

SEQ ID NO: 3652 - DNA, 960 bp, Rattus norvegicus
tgaacccagctgctggcgataaactccccaagtgtgaggcagtgtgtgggaagcccaagcatcctgtggaccaggtacagcgcatcatcggtggttccatggacgccaaaggcagctttccttggcaggccaagatgatctccagacatggactcaccactggggccacactgatcagtgaccagtggctgctgaccactgcccaaaacctcttcctgaatcacagtgagaatgcgacagccaaggacattgcccctaccttaacactctatgtggggaaaaaccagctggtggagattgagaaggtagttctccaccccgagcgctctgtggtggatatcgggctgatcaagctcaaacagaaagtgcttgtcactgagaaagtcatgcctatctgcctgccttccaaagactacgtagcgccaggccgcatgggctatgtgtccggttgggggcggaatgtcaactttagatttactgaacgtctcaagtatgtcatgctgcctgtggctgaccaggagaagtgtgagctgcactatgagaaaagcacagtgcctgagaagaaaggcgctgtaactcctgttggggtacagcccatcttgaataagcataccttctgtgctggccttaccaagtatgaggaagacacttgctatggtgacgctggcagtgcctttgccgtccatgacacggaggaggacacctggtatgcagctgggatcctgagctttgacaagagttgtgccgtagctgagtatggtgtgtacgtgagggcaactgatctgaaggactgggtccaggaaacaatggccaagaactagttcagggctgactagagggctgcacacagtggggcagggcaattcaccctggaagaggaagtagaagggttggggacataatctgagggctgctagccctgcattgctcagtcaataataaaaaacgagctttggaccc

SEQ ID NO: 3653 - DNA, 912 bp, Rattus norvegicus
cgggcggcgctgcaggctgagatcgaggagctgcgggccactctggagcagacggagaggagcaggaagattgcagagcaggagctgctggacgccagtgagcgcgtacagctcctccacacccagaacgcgagcctcatcaacgccaaaaagaagttggaaaatgatgtttcacagttgcagagtgaagtggaggaagtaattcaaagagcacgcaatgcagaagagaaggccaagaaagccattactgacgccgccatgatggcggaggagctgaagaaggagcaggacaccagcgcccacttggagcggatgaagaagaacatggagcagacggtgaaggacctgcagcaccgtctggacgaggctgagcagctggcgctgaagggcggcaagaagcagatccagaaactggaggccagggtacgtgaacttgaaggagaggttgagaatgaacagaaacgtaatgctgaggccgttaaagggttaaggaagcacgaaagaagagtaaaggaacttacctaccagaccgaggaggaccgcaagaacgtgctgaggctgcaggacctagtggataaattacaggcgaaggtgaaatcttacaagagacaagcagaggaggctgaggaacaatccaacgtcaacctggccaagttccgcaagctgcagcacgagctggaggaagccgaggagcgggcagacatcgccgagtcccaggtcaacaagctgcgggtgaagagccgcgaggttcacaccaaaatcagtgcagagtaaacgcatcttgaggaggccgccaagtggctgaaggaaaggcacagaatgtgctgccttgggtcgcttgctgggtcgcttgcctctcgtgtttacttttctcccactgctgactgaataaaaccacaactcattgtaatt

SEQ ID NO: 3654 - DNA, 1657 bp, Rattus norvegicus
ggatctctaacaagactctattaccctctcccttctttgttgcagtgctgctggaccattgctcattcagttttagtgaaagctatgacggagaggagatggctttctctgcagcgtgtgtactaaagcagataacaatagtccaccattggttcagaagggtatcttttaatcactcatttccttgactttgcaggcatgcacactcgaatgtgaagggcagctgccttctttcaaaatctgggagacctgcaaggatctcctgcaggtgtccaagcccgagttcccttgggataacatcgacatgtacaaagacagcagcaaacaggatgagagccacttgctagccaagaagtatggagggttcatgaaacggtatggaggcttcatgaagaagatggatgagctttaccccgtggagccagaagaagaggccaatggaggcgagatccttgccaagaggtatggcggtttcatgaagaaggatgcagatgagggagacaccttggccaactcctccgacctgctgaaagagctactgggaacaggagacaaccgtgcgaaagatagccaccaacaggaaagcaccaacaatgatgaagacagcacgagcaagaggtatgggggcttcatgagaggcctcaaaagaagcccccagctggaagacgaagcaaaggagctgcagaagcgctatgggggcttcatgagaagggtcgggcgccccgagtggtggatggactatcagaagagatacggaggcttcctgaagcgctttgctgagtctctaccctcggatgaagaaggcgaaagttactctaaagaagttcccgagatggaaaaaagatacggaggctttatgcggttttgaagcccttcccagcagtgatcccgggcccccactagcctgctccatcccccgtgagcaactgccccatcagtgatggtctgtcatgtgctgcttgtgctgtacagttgccctcgtggtctggataactgctgcctgaaagctgtgatttttagggggttgtctgtattcttttgagtcttgaagctcagtattggtctcttgtggctatgttatcatgctgaaacagtctgttacctcatcccttctgacaaaacgtcaataaatgcttatttgtatataaaaataataaacccgtgaacccaactgcacaacgatcttgtaagaactggctgtcatttgtgggtcaatgctagatggagagacaaagctatcacctgctatgacagaataattgcttgccttttcctttcctgacccaggctgcagaacatttttctttagctctattagtatgtgaactcttaaataagtaaacgcaatagaacaaaattatatgcaaagacaatttaaccacattttatccatgcagaatgtgacagccagaatggcggagtacttagtctaaatttgctcagaagttgaaacatgaatgggattaaggccctaatcttcttattcccagtcagtgtacctttatgctccattttctccccctccatccaggagtctggcaagaacaggaaaaaaacatgtcactatatcttgttcagcattgcacaccctccaccatggccacagtagattctctaataactaatgagtgagtgaaggaagtgtatcggtgaattc

SEQ ID NO: 3655 - DNA, 1009 bp, Rattus norvegicus
ggaattcggcactgcagtggcggccgggcccgatctggcccgcgagacccctgagcgcttccgaggagcccggctggatctcccgccccggcctcgcctccctgccgagcttccagcgcctcgggacgcgatgaggacctgggcttgcctgctgctcctcggctgcggatacctcgcccatgccctggccgaggaagccgagataccccgggagttgatcgagcgactggctcgaagtcagatccacagcatccgggacctccagcgactcttggagatagactccgtaggggctgaggatgccttggagacaaacctgagagcccatgggtcccacactgttaagcatgtgccggagaagcggcctgtgcccatccgcaggaagagaagtattgaggaagccattcccgcagtttgcaagaccaggacggtcatttacgagatacctcggagccaggtggaccccacatcggccaacttcttgatctggcccccatgtgtggaggtgaagcgctgcactggctgctgtaacaccagcagcgtcaagtgccagccctcaagggtccaccaccgcagtgtcaaggtggccaaagtggagtatgtcaggaagaagccaaaattgaaagaggtccaggtgaggttagaggagcacctggagtgcgcatgcgcgacctccaacctgaacccagaccatcgggaggaggagacggatgtgaggtgagatgagctggctgccctctcccgggacacggatgtacgtggcgtgtgacattcctgaacatactatgtatggtgcttcattgccaatgtgcgtgcagtctttgttctcctccgtgaaaaactgtgtccgaggacaaagagacagtgtccgtttgttcagtgtgacatcaaagcaagtactgtagcactcggagagacagtgagaaagcttccttgtcacagagagcgaaaacaaaaccacaaaaaagaaaaaaaaaaaaaacaaaaaattaaaaaaaaaccgaattcg

SEQ ID NO: 3656 - DNA, 722 bp, Rattus norvegicus
tgtacaagccacaaatctgttctgttttcctcaggtggactttgagctggagtctttctctgaaaggaaggaggaggagaaggaagaattgatggagtggtggaaaatgatgtcagagactttgaatttctaagaaaggctcctaactaatggctttaatatatccatagactatagtaagatgcaacgtggctcttttattttaggttgtgtgcagttaatatttaacatcggtttatttttgatcatttaagtagtagttgctaatcacttaaatacacttggacagaaccgtagtgtctggatcgacttcattctttcatgaacattcgctttaaaatctaggaagatcctttaacctagttggtgacaatgtcacatgacagatgccatgaaaaagtcaaccgatgtagcttggatctgtgagcactgtgtgtatggcgagaatcacatagttccatataagttgtccttagtctcttgtgctgatccactgtataagcatgatcctgttaatgcgcttctgagggaaggaaaacgtacgtgctttgcaaaggggctctgagcagaaggaaaacctagttcttgcgtgtactttgaagaacagaactgtattagtcagcctgttagtgcaacttcagagtttggggttttgtcttgattgcagattggcccagaattgcattctaaatgaataaaggataaaaaaaaaaaaccacggc

SEQ ID NO: 3657 - DNA, 1384 bp, Rattus norvegicus
ctccagttctccccgcccaccctacagaaagtgtctcctgattggctttgaggccgcagggctcaggttacattcgcaagagttgcggagcgcgggagaccggacccaagaggagagaggctggttctgcaccgattctgtgctggtccgggagtgcccgacagcccctgaactaccacccagcattgtacaaacccacccccactctgagccaggctccaccccagccaaggaccctcaacaccggcaatggactgctgcacggagagcgcctgctccaagccagacgacgatattctagacatcccgttggatgatcccggagccaacgccgctgcagccaaaatccaggcgagttttcggggccacatggcgaggaagaagataaagagtggagagtgtggccggaagggacccggccccgggggaccaggcggagctgggggcgcccggggaggcgcgggcggcggccccagcggagattaagccagaactgaacgttttagaagttccagaggagagtcggatgccgcgtccccttcgcagtgacaagacttccctactgtgtttgtgagcccctccttcccaccaaccagccagcttcaggagccctcccctctccccgccgcgtcccagagattccctctcccaggctggcttcgtcgtggcgtagccaagtccgtgccctttttagctcctcagtctaacgtggtctcctttcgccttttctctccaccctcgtcccaaaccccatactcccaaaaatgtccttttgcttcacgcccacctgtccacgcgcccagcatgcagctctgcctccgcagcctcggtgcgcttcgctgcgcgtactgcagagggcgcccaatgcgtcgcccaagtactctcaaaaaaaaaaaaaaaaaaaaaaaaaaaaaaaaaagaaaagaaaagaaaaaaaaaaagaaagaaagaaagaaaaagaaaagcaaccaccaagtcctttcgttctgtgggcaacgaaagggggcgccccgcgtctttccaccctaacctaacctcaacctcctaaacctggggctaggaaagaggggaagtgtttttcatggttacctgacgacgtcccttgctctaatgggaagtgaagtcctatcccacacctgcctgtcaccccttttctcttgagaacgcgccctgagagcagcccctcccgctctcctttgtttatgcaaaagcctccggagcgctgggaggctggctcccgcaggaggagtcttccgcagccctgaccctatagcctctaccccgttgggctcctggggttgtggctggaaggtttttaatctctgcgtgtgcatgttaccatactgggttggaatgtgaacaataaagaggaatgtctaagtgt

SEQ ID NO: 3658 - DNA, 3660 bp, Rattus norvegicus
agctacccagatcaacggtgctctaccgctgaatcgctcgctgcggattttccacccaggccacaaccttcagtagaaggacaaacatcacagccagtgagctgccaagcagtgctccgaccgaccttgtcaaagagagcagctggtcccagttttagtcagcacctctcagcataagtgtctgggtcacagaaggagaacaggtcaacatttccaaagacatttaacacaccagcacaaaaggctacttaggttgtctttgtatgaatttggttgactagagaagtaaattaaaaaggtgctttgattgaagaagtcacatggacataatcaccatttcaacaatatattagatgatggttattggaacagcccaaacatttaccacagagcaagagatatagcttgagtggctactagactattccagaatcaaggaatggatgactacaggtatcgggacaactatgagggctatgcccctaatgatggctactaccggggcaatgagcagaacccggaagaagatgcacagagcgatgttacagaaggccacgatgaagaggatgagatctatgagggcgagtaccaaggcatccctcatccagatgatgtcaagtctaagcagactaagatggcaccgtccagagcagatggccttcggggccaggcagacctgatggctgagagaatggaagatgaggagcagctcgctcaccagtacgagaccatcattgatgagtgtggccatgggcgcttccagtggaccctctttttcgtcttggtcttggccttgatggctgacggagtggaagtgtttgtggtgagctttgctctgccaagtgcagagaaagatatgtgtctgtcaagttccaagaaaggaatgctcgggctgattgtctacctaggaatgatggcaggagccttcatcctggggggcctggctgataaactgggaaggaagaaggtcctcagcatgtccttggctatcaatgcttcctttgcctccctctcctccttcgtgcagggatatggagctttcctcttctgcagactcatctcaggcataggtattgggggctccctgccaattgtttttgcctacttttctgagttcttatcacgggagaaacgcggtgagcatctcagctggctgggtatcttctggatgactgggggcatctacgcatctgccatggcctggagcatcattccacactatggctggggcttcagcatgggaaccaattatcacttccacagctggagagtgtttgtcatcgtctgtgctctgcctgccactgtgtccatggtggccctgaagttcatgccagaaagccccaggttcctgctggagatgggcaagcatgatgaagcctggatgattctcaagcaagtccatgacaccaacatgagagctaaggggacccctgagaaggtgttcacggtttcccacatcaaaactcccaagcaaatggatgaattcattgagatccagagttcaacagggacttggtaccagcgctggttggtcaggttcatgaccattttcaaacaggtgtgggataacgccttgtactgtgtgatgggaccctacagaatgaacaccctgattctggctgtggtctggttcaccatggccttaagttactatggcctgacagtgtggttccccgacatgatccggtatttccaggatgaagaatataagtctaaaatgaaggtgttttttggtgagcacgtgcatggcgccacaatcaacttcaccatggaaaaccagatccaccaacatgggaagcttgtgaacgataagttcataaagatgtactttaagcatgtcctctttgaggacacattctttgacaaatgctattttgaagatgtgacatccacagatacttatttcaagaactgcaccattgaatcgactaccttctacaacacagacctctacaaacacaagttcattgactgtcggtttatcaattccacctttctggagcagaaggagggctgccacatggactttgaagaggacaatgattttctgatttacctcgtcagcttcctcggcagcctgtctgtcttgcctgggaacataatttctgccctgctcatggacagaatcggaagacttaagatgattggtggctccatgctcatctctgcagtctgctgcttcttcctgttttttggcaacagcgagtctgcgatgatcggctggcaatgcctgttctgtgggaccagcattgcagcctggaatgctctggatgtgatcacagtagagctgtatcccaccaaccagagggccactgccttcggcatcctcaatggactgtgcaaacttggtgccatcctgggaaacactatctttgcttcttttgttgggatcaccaaagtggtccccatccttctggctgctgcttctctggttggaggtggcttggttgcccttcgactgccagagactcgagagcaggtcctgatgtgaacagcaccgtggggagaggaagatgggaagatcttttttcaggacacttcagcacagccacacctcctgcctctcactgtccacaggacaccacggacagcacagaaggagaaatggactgtgtgatccctagtttaggacccacttcagttgttaatacgtttttaactcaggtcattggctaggggtgcccagagtcaaccttaggatcccagagctgtgcgcttagcttcaggtctctcgatccaaggcagggggaggacactccagtaaatccatatagtaagcaagaaattgcttgcatttcagactgacattgaggacaagaaacacttaatctcctctatgtagcttctgggagcccagtgacctagcagattgcctcagttgggagtgggatcaatacataaatatcagattcacagaacagactatatatttgcatttgaaagtatcacctatcatatttttccttttgaaaattggcacggtagtattgaagatactctgatatagaaaaacccaatattgaagcaaaatgtatatagactgacttttcatctcaagcgtcctgaactttgcacaaagaagaggtgacacgtcaagagtgatatttattatggttttgctctactcagagacacttgaggttggttattatgtaaactatgtttgtatatagcagttttgaggttttattcccacaaatggtagctgctaagattgccagcattttagccgaatttggggagaactcgccattcaaggtcccaggaaactggtgcaaatggatgatgtttaagcatgatgtcagtgcagccatcttgcctgctgtcaggaggatgtacttggcaagccacatgctatttcctttacctgggaatttttcttcaacttggtagggcagttacttttctctccaatgctgatcgcttgtgaaactcaggtccatgggtcgtttgatgctgtttacccaggaagaacaggaagaaaggtttatttttatttttattttttaatggctgcttgcattttccttttaaagaaaaacaaaacaaaacaacacaggtaactggccaaggatgggaaaatgaaatcacagttcttcaaagtgtgagtccttactgtttgatttcaaaggaaaacacaatgcacttttattacagcat

SEQ ID NO: 3659 - DNA, 2443 bp, Rattus norvegicus
ccagccatgcagcctcacctcagccaccagccttgctggagcctccccagccccagcgtccgtgaggcggcttccatgtatggcactgctgtggccatcttcctggtcatcctggtggctgcactgcagggctcggagcctccggagagccccttcccttaccacatccccctggaccctgaagggactttagagctctcgtggaacgtcagctatgaccaggagatcatccacttccagctccaggtgcaagggccgagggctggggtcctgttcggaatgtcggatcgaggtgagatggagaacgcagacctcgtcatgctctggactgacggggacaggacctactttgcggacgcctggagtgaccagaaagggcagatccatctggatacccatcaggactaccagctgctccaggcacagagggtgtcaaacagcctatccctgctcttcaagaggccctttgtcacctgcgaccccaaggattatgtcattgaggatgacactgtccatctagtgtatgggatcctggaggagccattccagtccctggaggccatcaacacctcaggcctacatacgggactacagcaggtgcagcttctgaagcctgaggtctccactccagccatgcctgcggatgtacaaaccatggatatccgggctcctgacgtcctcatccccagcactgagaccacatactggtgctatatcactgagctacccctacacttcccccgacaccacatcatcatgtatgaggccattgtcacggagggcaatgaggccctggtgcaccacatggaggtcttccaatgtacaaatgagtctgaggccttccccatgttcaacggaccctgcgactccaagatgaaacctgacagactcaactactgtcgccacgtgctggcggcatgggccctgggcgccaaggcattttactacccagaagaagccggtgtccctttggggagctcaggatcctcccggtttctccgactggaagttcattaccacaatccacggaatatacaaggccggcgcgactcctctggcatccgtctacactacacagctagtctccgacccaatgaggcaggcatcatggagcttggactggtgtacacgcccttgatggccatcccccctcaggagaccacctttgttttgactggctactgcacagacaggtgcacccagatggcactgccgaaatctggaatccgcatctttgcctcacagctccacacgcacctgaccggcaggaaggtgattactgtgctcgccagggatggccaacagagggaagtggtgaacagagacaaccactacagcccccactttcaggagatcagaatgctgaagaatgctgtgactgtccaccagggggatgtcctcatcacttcgtgcacatacaacacagaaaacaggacaatggccacagtgggggggtttggaatcttggaggagatgtgcgtcaactacgtccactactaccccaaaacagagctggagctctgcaagagtgccgtggatgatggcttcctgcagaaatacttccacatagtaaaccggttcggcaatgaggaggtctgcacctgccctcaggcctctgtcccccagcagttcgcctctgtgccctggaactctttcaatcgtgatatgctcaaggctttgtataactatgcccctatctctgtgcactgtaacaagacctctgccgtccgcttcccgggtaactggaacctgcagcctctgcctaatatcacttccgcagtggaagaacccgacccacgctgccccatccgacagactcggggacccgccggccccttcgttgtcatcactcacggaggcagacactgagtaattgttcttcagcctctcctcgttttgtccctactgggctcactccagctctgcgcaccccacatgaagacccccttccatagaatagtgctgttcacctaggaggagggggtatcaccttggagacacctgcacggctgcatcccatgaggtctgactggacagagcagctctggacatcatcactgctggctccacagagggacaactcaatgtgggagtccagattcaactccacaggacctcccttgcctccagaacagccttaccaggctgggtgcagacttcccaagcctcacagtcctgaccctgttggcctctggtggtaacttgtgttggtgtatgccatgacaacactgtttaaatagtcctttgcagagtgaaaaaaaaaaaaaaaaaaaaaaaaaaaaaaaaaaaaaaaaaaaaattccaaagaaataatatttgaagcagcaaaagaaggatcattaaacagagcattattaatggtaaatgttccaagggagattctgcttcaaacccaccatagaatgctgatcagtaagcacagcaatacatatgagtgtaaaaa

SEQ ID NO: 3660 - DNA, 1538 bp, Rattus norvegicus
gaaactttcacgcgagcgggaaatatgggatgtattaaatcaaaaaggaaagacaatctgaatgacgatggagtagatatgaagactcaaccagttcctgaatctcaacttttacctggacagagatttcaagcaaaagatccagaggagcaaggggacattgtggtggccttgtatccctatgatggcatccacccagacgacttgtctttcaagaaaggagaaaagatgaaagttctggaagagcacggggaatggtggaaagctaagtccctttcatcaaagagagaaggcttcatccccagcaactacgtggccaaggtcaacaccttagaaaccgaagagtggttcttcaaggacataacaaggaaagatgcagaacgacagcttctggcaccagggaacagtgccggggctttcctgatcagagaaagtgaaactttaaagggaagcttctctctttccgtcagagattacgaccctatgcatggcgacgtcattaagcactacaaaatcagaagtctggacaatggtggttattacatctctccacgaatcacttttccctgtatcagtgacatgattaagcattaccaaaagcagtctgatggtctatgcagaagactggagaaggcatgcatcagtcccaaattacagaagccatgggataaagatgcctgggagatcccccgggagtccattaagttggtgaaaaagcttggcgcagggcagtttggggaagtctggatgggttactataacaacagcacaaaggtggctgtgaagaccctcaagcctggcaccatgtctgctcaagcattcctggaagaggccaacctcatgaagaccttgcagcatgacaagctagtgcggctgtatgctgcggtcaccaaggaggagcccatctacatcatcaccgagttcatggccaagggtagcttgctggatttcctcaagagtgacgaaggcagcaaggttctgctcccgaaactcattgacttttcagctcagattgcagaaggcatggcgtacatcgagcggaagaactacatccaccgcgatctgcgagctgccaacgtgctggtctctgagtctctcatgtgcaagattgcagactttggcctcgcgagagtaatcgaagataatgaatacacagcgagggaaggtgccaagttccccatcaagtggacggctccagaggccatcaacttcggctacttcactatcaagtctgacgtgtggtccttcggaattctcctgtacgagatcgtcacctatgggaagattccctacccagggagaactaacgcagatgtgatgaccgcactgtcacaggggtaccgaatgccacgcatggagaactgtccagatgagctctatgacatcatgaaaatgtgctggaaggaatcagcagaggagaggccaacctttgactacttacagagtgtactggatgacttctacactgccacggaagggcagtatcagcagcaaccgtagtgggctctagagtcgacctcaggcatgaagcttgtctc

SEQ ID NO: 3661 - DNA, 1376 bp, Rattus norvegicus
gggggtgccgcgccggccgcagagccctgatgctggcccggaggaagccggtgttaccggcactcaccatcaaccctaccatcgctgagggcccgtcccccaccagcgagggcgcctccgaggcacacctggtggacctccagaagaagttggaagagctggacctggatgaacagcagaggaagcggctggaggccttccttacccagaaggccaaggttggtgagctcaaggacgacgactttgagagaatctcagaactgggtgcaggcaatggcggcgtggtcacaaaggcccggcataggccctctggcctcatcatggccagaaagctgatccacctggagatcaagccagctgtccgcaaccagatcatccgggagctgcaggtgctgcatgagtgcaactcaccgtacatcgtgggcttttatggggccttctacagcgacggcgagatcagcatctgcatggagcacatggacggtggctcactggaccaggtactgaaggaggccaagcgcattcccgaggacatcttagggaaggtcagcattgcggtgctccggggcctggcgtacctccgcgagaagcaccagatcatgcatagagatgtgaagccctccaacattctggtgaactctcgtggagagattaagctgtgcgacttcggagtgagcggccagttgattgactccatggccaactcatttgtagggacacgctcctacatgtccccagaacggctgcagggcacccactactctgtgcagtcggacatctggagcatggggctgtcgctggtggagctggccatcgggaggtaccccatccccccacctgatgccaaggaactagaggccagctttggccggcctgtggtggacggggcagatggagagccccatagtgtctcaccgcggccccggccccctggacgccccatcagtggtcatgggatggacagccgaccagccatggccatctttgagctgctggactacatagtgaatgagccacctcccaagctgcccagtggtgtgttcagctcagacttccaggagtttgtgaataaatgtctcattaagaacccagcagagcgtgcagacctcaagctgctgacgaaccatgccttcatcaaacgctctgagggggaggacgtggacttcgctggctggctatgcagaaccctgcggctgaagcagcccagcacacccacgcgtactgcagtgtgacagccatcgctcagcagtctgtgtccttgtcctgtggcacagcggccgcctttggggacagcagtggtgtgtgttgtggcaggggacctgtgcctgtgcatttggaaaagcaaacaaagtggagaaagagagaaaaaaaaaaaa

SEQ ID NO: 3662 - DNA, 3499 bp, Rattus norvegicus
agatccctatcactgagcacccggaggcaaggctcagaaccccaggatcaggtgagtggcagagtggctggccaccttgtcctgtccagatactggttccagtgttcaagtggcagctagtccctatgctgttgttagtctacctgacccctggctgggtctctagcctctctgctttccccatgcatacccgacctcagaagagcaactggagattgtctgagctcccttctctgttctgggtggtttcagactcctttttattgtaatagaaagtctctccctacccagcatcaagctgcatagctaaattgattatctctttctcagagcaaaataaggtatcagttcttgatgggctgacgcatatctgaaggtagcagaagtccaaggggggggaaaatgccgagagccatgggctgcacctgctctaggaagtagaacagagacttaaactggtgcccaatattttcttgcatacaagctagaataaactgggaaatatcacacactgtattgagtctacctcagagtactttaatgcctggactatgtatgcttgggcactagggacatgggacattccacaggggagcagacgaatagcacaatagtgacttggtggaggtagatttgcctttgattcccagatctacctcccaccttggggggggctctcccacagcctcaggatcccagtcttaaataattcagcacacggtactgtgaacttgctagtgggttttactctgttcttaatgcagcaacatggagttctcccgtccaccgctagtgcatgtgaagggtatcccactcatcaaatactttgcagagacaattgggccattgcagaacttcacagcctggcctgatgacttgctgatcagcacatacccaaagtctggtgagcactggttcccaccatatacacactttggaagcaggtctagactctaagccctgctcacctcttgtccctccctttccaggtactacctggatgagtgagatcctggatatgatctatcagggtggcaagctagagaagtgtggccgcgcccccatctatgcccgggtacccttccttgagttcaaatgtccaggggttccctcaggtatgtgcatgggggtgctaaaaacaagtggagaaaggcaggaccaggtcccagtttaacaaagttccctgttcaacataggtcttgaaactttggaagagacaccagccccacggctccttaagacacatctgcccctgtccttgctccctcagagtctgctggatcagaaggtcaaggtaaaaacaaacaacaaaattcccattatggtagtaccttccggcatgtggggagcagaggcagaacgactgggagcatttgctgcacagcaagttcaagactgtgtctcggggctggggatttagctcagtggtagagcgcttacctaggaagcgcaatcctgggttcggtccccagctccgaaaaaaaagaaccaaaaaaaaaaaaaaaagactgtgtctcactcaaaaagacaaagaaagaaggattggaagggaaaaggggtgagaggaggcaggaacctttggagtcatcgcggctttggtttgttctgttgggaactgtaggactactcaagccctggttcatctcatatggagggttactggctgtcactctggaagggctcaggtaacaaggaaagtgtatgctgagtctaggtgttcacaggacgtagacaggctgatgggactctgacttagcatgtggatgtactgccaagaaaggagtcagataaaacagttcaaggaattgccaggactttggtatcagagaaggtacaatcttaggacaatgatacccataccatgagatctcaacaactcaactgccagcttgttttctcttctgctatcccaaaaggaagtgttgggaattcccgcatgctagaaggtcccaccacctcacttgatcttgtgaagggtgataggaaagcagaagaaacagaactgtgggtgggctgtcttcccctgcaggtgatctacattgcccgaaatgcaaaggatgtggttgtctcctattataacttctacaacatggccaagctgcaccctgatccaggcacctgggacagcttcttggagaacttcatggatggggaaggtgggtatgagtttgctgcaagtaaggctggacctgaggggcacagctgtggctcacaaggcctgtgcctacgccctgtcctctcccagtgtcctatgggtcgtggtaccagcacgtgaaggagtggtgggagctgagacacactcaccctgttctctatctcttctatgaagacataaaggaggtgagcctgcctgctcccacttgcttctgtgtcatacctgctgggtaggaaccttacctggccctatactggccctctgagccccatgctatccaagccccactgcagaccagcacttgcagtcctacttcctgctgagggaccacagcacaagctcagcaggagagctgcacagcccttaccttgcttgcagtaggtgttagtcatatgtgccatcactgattgggtggcttgctgctcttgcttctccctgctccagaggtgcaagtctgggcgccagtgatcaaagtctgtccctgtcctctcccagaaggaacccagtgatcatgccaagatggcagggtgggaagcctctattttgccccagggtaagaggcacagagtcaaggaatcagttctgagaattccttagtagaagtgacctgctccttgcaggtgaccctccaaccttattccatcaagcatccaaactgagatcttcttcctgttccagaaccccaaaagggagatcaagaagattctagagtttttggggcgctctctacccgaggagactgtggattccattgttcaccacacatctttcaagaaaatgaaagagaactgcatgactaactacacaaccatccccactgagattatggaccacaatgtttctcccttcatgaggaaaggtgggtagtagcctagataggaagggagattggatgtaaccttgtaacctatagtcagtcagtctctctctctttctcttttcctctctctctctctctccaggtactactggggactggaaaaataccttcactgtagcccagaatgagcgctttgatgcccactatgctaagacaatgacagattgtgacttcaagtttcgttgtgaactatgagtggattatggctatactgggaaccaaggcaaactgacacagcccatcatgatctcaagtaaaatgtgatgtgttcaatctacttgttgtatgcctagaggaaatctgagctcagagaataggattggggatgtggctgaggcagagggttttatcaacgcatgtcaggaaagcaatcagtcccaacacctaaaaagaacctaaagtacaaacatgcaaaaaatagtaacataaactatattttacctgaaagaataaatgccactggg

SEQ ID NO: 3663 - DNA, 2215 bp, Rattus norvegicus
cccacgcgtccgggacaatgaagctcctcaattacgcttttgtgtatcgtcgctttctccttgtggttttcactgttttggttttattgccactccctctcatcatccgtagcaaggaagcagaatgtgcctacatcctctttgttattgccacattttggatcacagaagccttgcccctgtcaatcacagctctactgcctgggttaatgttccccatgtttggaatcatgtcttctacacatgtagcttctgcttacttcaaagactttcaccttctgctaattggagtcatctgcttagcaacatcaatagaaaaatggaatttgcacaagaggattgctctgaggatggtgatgatggtgggggtgaatccggcctggctgacgttggggttcatgagcagtactgccttcttatctatgtggcttagcaacacctctactgctgccatggtgatgcccatcgtggaggcagtggcgcagcagatcaccagtgctgaagcagaggccgaggccactcagatgacttatttcaatgaatctgccgcccagggactcgaagttgatgaaactattattggacaagaaacaaatgagaggaaagagaaaacaaaaccagctctaggaagcagtaatgacaaagggaaagtgtcaagcaagatggagacagaaaagaacacagtcacaggagcaaagtatcggtcaaagaaggaccacatgatgtgtaagctcatgtgtttatgtattgcttactcttcaaccattggtggactgacgacaatcactggtacctccaccaacctgatcttctccgagcatttcaacacacgctaccctgattgtcgctgcctcaactttggatcttggtttttgttttccttcccggtcgctgttattcttctacttttgtcttggatttggcttcaatggcttttcttaggattcaactttaaggagatgttcaagtgtggcaaaaccaaaacactcaaagaaaaagcttgtgccgaggtgatcaagcaagaatatgaaaaacttgggccaatgaggtatcaagaaatcgtgaccttggtgatcttcattgtaatggccttgctctggttcagtcgggaccctggctttgtcactggttggtcagtcctgttttcagagtacccgggttatgttacagattcaactgttgccttagttgcaggaatccttttctttctaattccagccaagaaactgacaaaaatgacatccacaggagatattattgcttttgattattctcccctgattacttggaaagaattccagtcattcatgccctgggacatagccattctcgttggtggaggctttgccctggcagatggttgtcaggtatcaggactatctagctggataggaagtaaattatctcctttaggttcgttaccagtttggctaataattctgatatcctctttgattgtcacatctttgacagaggtagccagcaacccagctaccattaccattctgttccccatattatctcctttggctgaagccattcatgtgaaccctcttcacattttgctgccatccacactttgtacctcatttgcatttctcctgccagttgcaaatccacccaatgccattgtgttttcatatggccacctgaaagtcattgacatggttaaagctggactcggagtaaacattttgggtgttgctgtggtgatgctgggcatgttcacctggatcgaacctatgtttaacctccacgaatatccctcctgggctcctgacattgttaatcagaccatgccatgacacacacacaagagctaccagtttgcggtggcttcaggactcgctaagaatgactgtacggtacagccggattggactggcacacgcgaatcttcgatgcagctattccaattgcagagcgtgccccacacatgcccctgtcaacctcataagacagagttcatatcttttgaaatacaatcaacgtgcatctacccgccttcgtccaaaaatcaggttgagacgcatcgcagaccagctacatgctctttgtccattataatgacacttaaggaccttcaaaaaagttaggccatccgtccgtcgcatcttaaattcggagttcattgggacatttcaaacatcaattcactatttgaaattttttttatgaaactaaaggcagaaaataaagtgtgaaagtaaacgag

SEQ ID NO: 3664 - DNA, 1152 bp, Rattus norvegicus
atgcatatatattcagcagccagccggctgtgcacaagctgaccaagcgcatccccctgcggagacaggtaacagtttcggccgagtccagctcgtccatgaactccaacaccccactggtgaggataacgacacgtctgtcctcaacggcggacaccccgatgctagcaggggtctctgagtacgagttgccagaggatccaaagtgggaattccccagagataagctgacgctgggcaaacccctgggggaaggctgcttcgggcaagtagtcatggctgaagcggtgggaatcgataaggacagacccaaggaggcagtcaccgtggcggtgaagatgttgaaagatgacgccacagagaaggacctgtctgacctggtgtcagagatggagatgatgaagatgattggtaaacataagaacatcatcaacctcctgggggcctgcacccaggatggacccctctatgtcatagtcgaatacgcatcgaaaggcaacctccgggaatacctccgggcccggaggccacctggcatggagtactcctatgacattaaccgagttcccgaggagcagatgaccttcaaggacttggtgtcctgcacctaccagctggcgagaggcatggagtacttggcttcccaaaaatgtatccatcgagacttggcagccagaaatgtgctggtaacagaaaacaacgtgatgaagatagcagactttggactcgccagagatatcaacaacatagactattacaaaaagaccacgaatgggcgacttccagtcaagtggatggctcctgaagccctttttgatagagtttacactcatcagagtgatgtctggtccttcggggtgttaatgtgggagatcttcactttagggggttcaccctacccagggattcccgtggaggaactttttaagctgctcaaagagggccacaggatggacaagcccaccaactgcaccaatgaactgaatacttggacctcacccagcctctcgaacagtattctcctagttaccccgacacaaggagctcttgttcttcaggggacgattctgtgttttctccagaccccatgccttatgacccctgcctgcctcagtatccacacataaacggcagtgttaaaacatgaattcc

SEQ ID NO: 3665 - DNA, 2040 bp, Rattus norvegicus
taaaccagtgagcgaacgttttatcttttgaaagaccaaaggctcttttcagagccatcacttgttcatgtaagagttggtaaccaaaccctggttttacctactttgttgcaagcccatatcaatcttaaaagcatcaaactaattatatttgctggttgggctaaatctttaatctttaacaggtttgtggttcccgcagagagattattgggatcgtagaaacaggctggtttttatttttatagtcagctcttgcagtactttacctagtattatttctcagtagcagcagacttaacgtctgggattgggagaaagtacatagcgttttacaggaattgctgggtaagcctttacaatgcaacagcgttcagaggctagtggacgtgtagttccggttatatggctgcttgctttgtcatttcaaacagtcccctgtggagcaagaatattgcttggtttctgagtcctagacaaagtacccaagtgcatattttacatatcaaagtagacctagcccatactgttcctggttccctgccactcttgactggtctcagaccttggggaaatcaaccaacagcagtttcccaacaaacctgccgtccacgtgttctaatctggctcacttcagctgagaaataacctatcacttttctctcccggcaccagaagcgaaaaataaaacccaaggaggatagagaacatactttttttttaaaaattattcacttgagtatttcttatttacatttcgagtgttattccctttcccggtttccggcaaatatccccctaatccctccccctccccttctttatgggtgttcccctccccatcctccccccattgccgccctccccccaacaatcgcgttcactgggggttcagtcttagcaggacccagggcttccccttacactggtgatcttactaggatattcaatgctaccttttttttttttttttttaaagatttattcatttattatatataagtacactgtagctgttttcatatagaccagaagagggcatcagatctctttacagatggtcgtgagccaccatgtggttgttaggaattgaactcaggatctctggaagagcagtcggggctcttaaccacttagccatttctccagcccaagaacatacttttcagagtggtttctgggatatctagggtcatgacatttcaatgtcaagatttctttgcctcatgttttttaagcggctcaatacaagatacaggtgtagacataaacttaacgttcagctgtgccagattaaaaacattaaaaatgtaccaatctgttttatcagtgtacaagaattaaccaatcaccacctgaactcctcagccaatagtactactgcgcgtgatttttcaaaagtagaccagcctataaggatgcttctctggggaggcggggtacgagtatcgcgcgtgcaaatgcaagcgtacttaagggcaaccctttcgcggcttttcatctttttcttcctaccatggcccgtactaagcagaccgctcgcaagtccaccggcggcaaggctccgcgcaagcagctggccaccaaggctgcccgtaaaagtgccccggccaccggtggcgtgaagaagccccatcgctaccgtccgggtaccgtagcgttgcgtgagatccggcgctaccagaagtcgaccgaactgctgatccgcaagctgccgttccagcgcctggtgcgcgagatcgctcaggacttcaagaccgacctgcgcttccagagctcggccgtcatggcgctgcaggaggcctgtgaggcctaccttgtgggtctgtttgaggacaccaacctatgcgccatccacgccaagcgtgtgaccatcatgcccaaggacatccagctggcccgccgcattcgtggcgagagggcttgaggagttctgtgatccacgcaaccactttaaaaggctctttttagagccactaatcttccaaagaaagagctgaagctggctttcgtaactagtgggttttaatatgtcagcta

SEQ ID NO: 3666 - DNA, 5395 bp, Rattus norvegicus
ttgttttcaggccacggtacacagctctcagctgcgctactggactccgggctgggaagctagaccagcttcttctgacgcgcgctgcggacccagccgagaggacgcgagtggcgggcccagcgggcagggtccggaggtcgtcggccgcggcgatgtctgcccggtgctgtgctggccagttggcctgctgctgcggatctgctggttgtgccctctgctgtggctgctgccctaagttccggcaatctcggagcacccgcttcatgtatttattctacttcaccctggtcatcatcccctgctgcgtgatgatgtcaccctctgtgatgaagcagatgacggagcacattcccttttttgaagacttctgtaaaggcatcaaagcgggcgacacctgtgagaacctggtgggctattccgcggtgtacagagtctgctttggaatggcttgtttcttctttgtgttttgtgtgctgaccttcaaagtcaacaacagcaaaagttgtcgggcctccattcacaacggcttttggttctttaaattgctgctgttaggggccatgtgttcaggagcattcttcattccagatcaggagacctttctgaatgtctggcgctatgtgggagctgtggggagcttcttcttcatttgtatccagctcctcctgattgtggagtttgcacataaatggaacaagaactggactgcaggcaccgtccgtaataagctgtggtacgcctccctgtcgctggcactcatcatgtattccattgccgttggcggcttggccttgatggcagtgttctacacacagtgggatgactgcatggacaacaagattctcctgggagtgcacggtggcctatgcgtgctaatctctctggcagccatctcaccctgcgtccagaatcgacagccacactctgggctgctgcagccagggctcataagctgctatgtcacctacctcaccttctcagcactgaccagcaagcccgaaaaagtagtcaaagatgaacacgggaagaatgtcaccatatgtgtgcctgacttcgggcaagactttcgtcgagatgaaagcatggtgacctggctgggcacccttctcttagttgtgtgcatctcatattcatgtttgacatcgacgacgaggtcgagctcggatgccctgcagcggcgatacggagctcctgagctggaggtggcccggtgctgtttctgcttcggtccagatggggaagacacggaagagcagcagaatgtcaaggagggacccagggtcatttacgatgagaagaaaggcaccgtctacagctactcctatttccactttgtcttgctcctggcttccctctacgtgatgatgactttgaccagctggttccactacgaaaacgccaccattgagaccttcttcgttgggagctggtccatcttctgggtcaagatggcctcctgttggatgtgtgtgctgctgtacctgtggaccctggtggctcccctttgctgtccttccaggcagttctctgtctgaggatgtccaggtgccccacagctcagcaggcctgtgcccactctggagggctgcccctggaacgtgtgcaccaggggttaagcagcagctggtgccctgtgcaaagctgacatccccaggcttaattaagcctgacaaaacgccatctccagatgagcttctcactgtcaagtccaaaaggaaacaaactaccagtttgctctacaggaattgaaccccgtagccaagctggtaggtgcggttatatcgtctctgtatgccttacccacaagctagctagagttttgctgctgccgttcctgggtgtgcagagctgggggcacagcagccaccacagggagagcacggcctttctggcctgccactctcatccttggcataaagagcaacaacaaaacactgagtcctcagcctgaggtgggcctgttctctgtcactcactcttgccccctggagcccccacagctcctgtttatacagagtacagaggaagtccccccccactttgagcccccctttgagtccaccctcaactacttctgcatgtccctgccccagcattttctattgaggtcatgatgctgggagtcacggccttcccgtcccctctgcgcctgacagaagtccttcattcttgtctagggtagtgtctataataatgtgaaaagcacagtttgctcacacctctgtgggacactccaccatgcttcccctacccgatgcaggtcactgcagtaatcctggtgacggtgtccatgcttgtaaaacagggtgcttgctgttatcttgcccaggcagtggaggattacagttcttacttgtttgtctcattaacaggaatgctttaaggatcttaacaaaaacgttgcttctttactgcagcctgccacaccctctcagagtgttaaggtcagcctccctggttctcccccaccatgaggacttcctcacttacagtgtgtccccaatgctaacatcatagatttttggaagtagagaagggctggggtgaggatccaggcagcttctaacagagctggccagacagattggctgggcaagctgtggaagtgcggaattagaccgagatgcaaaagcaggtgattggggttatctcacaagactacgattatatccacagaaattcccagatatggttttggaaagtaatgctcacgtgtgtgcattttagtgctggtgttcttggcaagggaggaaatttccccagtgcctatctgaacaagtcaggcagaaccgggaccacctaagcccagttcccgcatgccgaaatgtcagattcttcacttctgctcactcctgtgcccctgctaaaaggacccaggggaaagaaatagcaaattctttggagaacttgcctggtttacagtattcgagatcctgtcttaaaaggtatacaaataaggacatttatttgtctgtaaacttcatcataattcctggcataggaggaagaggtcagggcctctcagcagttcacagacacaggagaatcacagaaagcaaagctataccctaactctcaagtctagttaatccagtaggagtgggaccctcaaaaactgggaatgaatggttcagaaagtggcctgtgccagccggctccgtgcagcagcccctgctgtgcctgagggaggttctgtgaccgaggcagaggggaactcaagtagtggtgggagcagtattgtttttcgaaggtcagtcttctctgctgagactggcagcctcatgccaggtcacagccaggctgacaaggccacacattcctgggctggcctcttttggcccttttcctctcggtaaagcagctcaggcaaacccagtcagaaccagtgacagagccctagtggcttctctctgaaccaaccaagccccactcactctccggctgcctgagtcttggttgagtgcatgccccgtccttcagaagttaggtctcaccggaggaagagctgccatgcccttctttactctcagctgatggtattggattgatggtcagaatgaagatggctgtgcttgaggatgaatggtttccaagtaagctatacctaagaattgaacctttaatctcagccgaagcccggggagctctgagatttctaggccagctagaccctatttcaaaacaaaaggttaacatttgtgatcagctgtgagaaactactcaggtagaagcctgtttgtgagcttaagaacactgttgtttgtgagacttgagaaaactggaaagtgtgccattgctctggggtaacaacagcaaagctcacttgcttgttccaccggtgacttttaatgatacagacctttgctttgagcagtaccggggcaggactgaaagtgcatgctttaaagctctgctacttagccatgcagccctggaggcagagttttggaaatcatgtgttctctccctctcgtttttgtgagtaaaacattagttatgccagggaaagattctcctggggtctcgttcccactgacctagttcccacaccattgctgagtcctgctttgtggtgctggatagctgatctgggcttcttgggaagtcatcacatgacttgttctccagaggtttggggagttttatatagtgagtgaatggtgatgtggaaagagttgtaggggcatagagtattgagactttggggttccgaatcccataaggagtggccaatgagagacatagtgccatgtttccatggagacttcactcaagtgttaattgctcccttcccaaattgtcaccctctgcctttatccgatgatgtactcatgtaaactttgcggaatggcccgtccttggtgcttcatattaccctggaaagagagctccagagcctgcatttaaacttctgggcttctcttcttccattgcctttctaagcagtggctcttttttatgtgctgaaacaaaccaatgcacatcccacatactgccaagaagtgaaagggcttcaggaagacgagctccagagaggaccctgggcctcctccatcagacatgagcttgcaatctgatcatagactctcaaggtttcttctgtgactcactcactagtaagcattttcatttcctgcagagatgagctctctggcattggggtgacttcagtagataggtgagctgacaagagggcttgagctcgttctcattttctgtttcctattggtgaagcactcacagagacaagttatttcgaaaggccggaacacttggcttttaccaaagaggtaatttaattttgttttagttgcgcaagggcagagccagaatgcattcatccagttgacttccagaagcttaaccacattcatgtgagggaaatgatagaagtctttaaggtaatcctttgggatcctgggaaattctctcaggtaaagaaagattacagcagatgagtaatatatgtcttgagagctatttataaaaactgtaagaggatcattttgtttccatttattaaagatttaaacttttttactttgtaaagaaaaactacatttttatagtcataactgttaattttttaagaaagatttttttggaaacaattagctgtagccaaattttgtggttacagttttgctatagtggagtttgaatgcaatttctgtggtaagtctactgtttgtttataaaggtctccgacctggttagattttgctaccttttaaaatagttattttttccccattagccacaaggccaattatggatttgtatttgtttttccaatgctaatttttctatgaagcacctgaaattaactggccttttcctatgtagaaaactcaaacttgttaactgtgtatttaataaaatgtaaacttga

SEQ ID NO: 3667 - DNA, 825 bp, Rattus norvegicus
atgcgggaccggctgccggacctcacggcgtgtaggaaaagcgacgatggagacaatgctgtcatcatcacggtggagaaggaccacttcatggatgccttcttccatcaggtggaggagattcgaagcagcatagccaggattgctcagcacgtggaggatgtgaagaagaaccacagcatcatcctctctgccccaaacccagaaggaaaaataaaagaagagctggaggacctgaacaaagagatcaagaaaactgctaacaggatccggggcaagctgaaggctattgagcagagttgtgatcaggacgagaatgggaaccgaacttcagtggatctgcggatacgaaggacccagcactcagtgctgtcacggaagtttgtggacgtcatgacagaatacaatgaagcacagatcctgtttcgggagcgaagcaaaggccgaatccagcgccagctagagatcactgggaggaccaccactgacgaggagctggaggagatgctggagagcgggaagccgtccatcttcatctcggacattatatcagattcacagattactaggcaagctctcaatgagatcgagtcacgccacaaagacatcatgaagctggagaccagcatccgagagctgcacgagatgttcatggatatggccatgtttgtcgagactcagggtgaaatggtcaacaacattgagagaaacgtggtgaactccgtagattacgtggagcacgccaaggaagagactaagaaagccatcaaataccagagcaaggccagacggggtgtgctctgtgctctcggccgacagtgctga

SEQ ID NO: 3668 - DNA, 1570 bp, Rattus norvegicus
ggagcccagtcctggactctgaggttctcccactcagtaatcagtactgcagcactgcacagactcctcaccatggacttcaggctcagcttggctttccttgtccttttaataaaaggtgtccagtgtgaggtgcagctggtggagtctgggggaggcttagtgcagcctggaaggtccctgagactctcctgtgcagcctcaggattcactttcagtgactatgacatggcctgggtccgccaggctccaacgaagggtctggagtggatcgcatccattactactggtggtggttacactttctatcgcgactccgtgaagggccgattcactatctccagagataatgcaaaaaactcccaatacctgcaaatggacagtctgaggtctgaggacacggccacttattactgtgcaagaatctacggagggtcccactactttgattactggggccaagcagtcatggtcacagtctcctcagctgaaacaacagccccatctgtctatccactggctcctggaactgctctcaaaagtaactccatggtgaccctgggatgcctggtcaagggctatttccctgagccagtcaccgtgacctggaactctggagccctgtccagcggtgtgcacaccttcccagctgtcctgcagtctggactctacactctcaccagctcagtgactgtaccctccagcacctggtccagccaggccgtcacctgcaacgtagcccacccggccagcagcaccaaggtggacaagaaaattgtgccaagggaatgcaatccttgtggatgtacaggctcagaagtatcatctgtcttcatcttccccccaaagaccaaagatgtgctcaccatcactctgactcctaaggtcacgtgtgttgtggtagacattagccagaatgatcccgaggtccggttcagctggtttatagatgacgtggaagtccacacagctcagactcatgccccggagaagcagtccaacagcactttacgctcagtcagtgaactccccatcgtgcaccgggactggctcaatggcaagacgttcaaatgcaaagtcaacagtggagcattccctgcccccatcgagaaaagcatctccaaacccgaaggcacaccacgaggtccacaggtatacaccatggcgcctcccaaggaagagatgacccagagtcaagtcagtatcacctgcatggtaaaaggcttctatcccccagacatttatacggagtggaagatgaacgggcagccacaggaaaactacaagaacactccacctacgatggacacagatgggagttacttcctctacagcaagctcaatgtaaagaaagaaacatggcagcagggaaacactttcacgtgttctgtgctgcatgagggcctgcacaaccaccatactgagaagagtctctcccactctcctggtaaatgatcccagagtccagtggcccctcttggcctaaaggatgccaacacctacctctaccacctttctctgtgtaaataaagcacccagctctgccttgggaccctgcaaaaaaaaaaaa

SEQ ID NO: 3669 - DNA, 1715 bp, Rattus norvegicus
agcagctgggtaggcaccatggccgggagcaccaccatcgaggcggtaaagcgcaagatccaggttctgcagcagcaggctgatgatgcggaggagagggctgagcgcctccagcgggaagtggagggagaaaggcgggcccgggagcaggctgaagctgaggtggcttccttgaaccgtaggatccagctggttgaagaggagctggaccgcgcccaggagcgccttgccactgctttgcagaagctggaggaagcggagaaggctgctgatgagagtgagagaggtatgaaggtgattgaaaaccgggctctaaaagatgaagaaaagatggagctccaggaaatccagctgaaggaagcaaagcacattgcagaagaggcagacaggaagtatgaagaggtggctcgtaagttggtgatcattgaaggagacttggaacgcacggaggaacgcgccgagctggcagagtcccgttgccgagagatggatgagcagatcagactgatggaccagaacctgaagtgtctgagtgctgctgaagaaaagtactctcaaaaagaagacaagtatgaagaagaaataaagattcttactgataaactcaaggaggcggagacccgggctgagtttgctgaaagatcggtagccaagctggaaaagaccattgatgacttggaagataagctgaagtgcaccaaagaggagcatctctgtacacaaaggatgctggaccagaccctgctggacctgaacgagatgtagaccttccccatccctgccctgccctgcggccgctcctccctctgaccttgacaccgcctgaggccagcctccctgaagctggccttgaaactgagggctgatctttttaactgaaggctgctttccctcctgccacccctcttacccctcttgtctttttcacaaaactgtgtcagcctcttcccagagttccagctggagggctgaacacctttgggaacaatatttaagggaatgtgagcacagcgcaaagtgtcctcaatgcagttgtgatatgcacattgtgattactttttatcttagcaaccatttttaacattccaagcacttgtgcagcttggagcagcacatcttagcctaatggatactgtctctccatggaggagaaacacaggaatgggcctgccttactgagagccagcagagcccaggcagactccactgtgggagacctcagtgctctgtaccaagtcttagccaaacaacagggttctaggaagttagccaaaaacgaaaaccattccggtctgtgaaggttttcagctttgatatctttgaacaactttacacttatttttagttttgactttttccgtccgatgtgaccaaataggagagtgagacatctgagacgcccccgcctcccagggccttgtgcatgttaggccagcgtgctaccgttacccccagccctgagcccgaacttgtctcagctctacccctttcccaactgctcagaaatggatcatgctgccccttagtgttgtggtgacctcttagtgttcacctgcccccaagggagacggaaaaggaaattatgtttgtgccactgatttagccacatgaaagtcatctcattgctctttcctgaagctgctgtctctaaagtgtgccatctctttgtgctttgtatctgtcagtgctggcgaaatcttcaatagcttatcttt

SEQ ID NO: 3670 - DNA, 1101 bp, Rattus norvegicus
agcagctgggtaggcaccatggccgggagcaccaccatcgaggcggtaaagcgcaagatccaggttctgcagcagcaggctgatgatgcggaggagagggctgagcgcctccagcgggaagtggagggagaaaggcgggcccgggagcaggctgaagctgaggtggcttccttgaaccgtaggatccagctggttgaagaggagctggaccgcgcccaggagcgccttgccactgctttgcagaagctggaggaagcggagaaggctgctgatgagagtgagagaggtatgaaggtgattgaaaaccgggctctaaaagatgaagaaaagatggagctccaggaaatccagctgaaggaagcaaagcacattgcagaagaggcagacaggaagtatgaagaggtggctcgtaagttggtgatcattgaaggagacttggaacgcacggaggaacgcgccgagctggcagagtctaagtgttctgagctggaggaggagctgaagaatgtcaccaacaacctcaaatctcttgaggctcaggcggagaagtactctcaaaaagaagacaagtatgaagaagaaataaagattcttactgataaactcaaggaggcggagacccgggctgagtttgctgaaagatcggtagccaagctggaaaagaccattgatgacttggaagatgagctctatgcccagaaactgaagtacaaggccattagcgacgagctggaccacgccctcaatgacatgacctctatataaactgacaccgtttctgctctgtcctggatctacccccctttcaggggtaattgatatgatataaggggcctaggaatacaattgatgttagggcgtttattagaataatgttggtgtactcggctatgaagaatagggcgaatggtcctgcggcgtattcgacgttaaagcctgagactaattctgattctccttctgttaagtcgaagggagctcgatttgtttctgctagggttgaaatgtatcatattatggctattggtcaggcggggattaatagtcagatatgttcttgtgcacttataagtatttctagggagaaggagccgcttatta

SEQ ID NO: 3671 - DNA, 1402 bp, Rattus norvegicus
gaattcggcacgagccaggccccagccgagcgccaacgctgaataggcaaactgaccaggagccctggctgtggctggggggcagtgggccatgccaggggcagtggaaggccccaggtggaagcaggcagaagacattagggatatttatgacttcagggatgttctgggcacgggtgccttctcagaagtgatcctggcagaggacaagaggactcagaaactggtggccatcaaatgcattgccaagaaggccctggagggcaaagaaggcagcatggagaatgagatcgccgtcttacacaagatcaagcaccccaacattgtagccctggatgacatctatgagagtgggggccacctctacctcatcatgcagctggtttcaggtggagagctgtttgaccgaattgtggagaaaggaggctacacagaacgggatcggagccgcctcatcttccaggtgctggatgctgtcaagtacctgcacgacctgggcattgtgcaccgggatctcaagccagagaacctgctatactacagtctggatgaagactccaaaatcatgatctctgactttggcctctccaagatggaggacccaggcagtgtgctctccacagcctgtgggactccaggatatgtggcccctgaggtcctggcccagaagccctacagcaaggccgtggactgctggtccataggagtcattgcctatatactgctctgtggctacccgccgttctatgatgaaaatgatgccaaactttttgaacagattttgaaggctgagtatgagtttgactctccttattgggacgacatctctgactctgccaaagatttcatacgtcatttgatggagaaagacccagagaagaggttcacctgtgagcaggccttgcagcacccctggattgcaggagacacagctctggataagaatatccaccagtcagtgagtgagcagatcaagaagaactttgccaagagcaagtggaagcaagctttcaatcgtaccgctgtggttcggcacatgaggaagctgcagctggggcaccagccaggagggacagggacagacagctagccacggagagctgctgacacccacagctggggggccagcagctggctgctgctgtcgagactgctgtgtggagccaggctcagaactccccctgcaccacccccaagctctagggccatggactgaacatcaaggagtcagggtttcgtccgtgaggggttggaggcagcctgcttcctcctcaccccagaactggggagtttctgaccccatacttcttccctcccctctcactcttcactgcattttccatacaaatgtttctattttattgttccttcttgtaataaagggaagctctgtgccgaattc

SEQ ID NO: 3672 - DNA, 2576 bp, Rattus norvegicus
  misc_feature (1147)..(1147): n is a, c, g, or t
aggagtgggagaaggagctatctctggggtggggcagtcgagagaagaaacacagactgggttattgacccacgtgccttagcatcgcgtctcttgggtaggaggtaggaagtctgtcaagaagtccctgggtgttagatagatagtggtggcatacaattttaatcccagcgcttaggaatgagaggcaggaagatctctgagtttgaggccagcctggtctacatagtgagttccaggatagctagggctacacagtgaaacctttcaggaacaaaaacaaaaacaaaaacaaaacaaaacgaggtccctaagtgcagatagaaacgtagctatttgctctgagagagaccacacatagaccggagagccaccgcaaaggtgatttgccccacaggtatgcctaccagccccagcacatgtatgtgcatttaagcctttagcttctgactcatacaccatcagagggaaggcaggctgccaggtgccttatgcctccgcccagtgcacacccctggcaggcagttgttggcttctcccatggacagtgaggtagtgtgctttgtgtgtggccagtccccagggatctatggtggtagagacaccacccttccacatggcttctccttatattaccaagagcttggctcagatctccccttccagaacctctgcccataggataagcctccccattcctctctcctttgtagactaagtcaggagctatagaaatttgtcctcttttttaaccaaaggattgagaggctacaagaaatggctggggaggactggagagatggctcagtggttaagagcacagactgttcttccagaggtcctgagttcaattcccagcaaccacatggtggctctacaaccatctgtgatgggatccgatgccctcttctggtgtgcccgaagacagcacatggtgtactcacatacataaaataaataaataaatcttaaaaaagaaagaaagaaagaaagaaagaaagaaagaaagaaagaaatggctgggggccagagggtggggtggggtggggcaggctggtggccttaggtccagaaaccactggacctaaggggtgccaaaccaggcctttaggtgggtcttaggtaatggtaggctagaaggtgggantctgtccttgtaggttcacccctgttctggagctctcaaggcttcagaaggtagagctgggtaattgtggagctccagtttgggacagaagtacagaacctcaagttagggttcctgggaggaaggtagtgttcccggggggtacatttgcacccctgggtagtccctgatccatgatccatcactaatcccatcttgagagtactgactctcacttcaccagtggccagggagatggaggtacccctgagccttgcacagagccaggccagggggtagataaagggtaggtgtgaacgggaggctcagtcagggctgaacagtgagagctgaatgtccagctatcagcaagggcaccatcagcttgttaggcaacagtcagagtcccaatccccatcgactctacaaactactctgaaactcagggcagtagaagccccaccagccctccatatttactgtatgtaggcttagtctagtctctacctggtaccaaccacgactcagcctcctccttagctgggcggtggacttggaccgctgagctctgggcgcttctcccagagataagaaccactcttcatcaattgtgcctcaaggcatcagggaagcggcctgggcatggcttcatccttgttaggtgctcaagcttagattctgtggttcctggatgggagtcccctcttctgatttcccctgtgaagttgtggctgcagtccagtctgctggcaaaggtcagggtgttcacatgcggctggccagggtgaacctcctggtgtctgtgtgggttagatctccaaaaggctgggtgggaagggttgggttacaaggctgagactatgaatgtcagtcctcaactttgagaagcgttaaaatatgtgcagactccttggatgctaatttgcatctctctgtgctttatttgagagagagagagagagagtgttttgaagcagggctttctcaccctggaaaccaaattgacctcaccagttttattaggaccggcaatcacaccacatccggctttatctgcacttcagaagtttcctgtgcccaccccggctccagctagccctcgcaggtgcaagaggctaggttgggcgctgcgatcttcgaggggaggacccaacgtctctattcaggacctgaggctagccctgccctaggcagggggcggggcctgggtctgcaggagcacccggactccttagagggtccccggaagactcagcactcctgcatggcacttggccagtttatcttgccggaggcgagcatggaccagatgaccattcttggccggtcggcctagatcagagttcccaggggtccaagtcccgaactgagggggtggggcgggggcggggccttaaagggcagggccacggggtccctgaaaagcgcggaccaggcgggcgccacccag

SEQ ID NO: 3673 - DNA, 3883 bp, Rattus norvegicus
ttctttcagcattgaaatgttcaacatcaccacgcaagccctggggtctgctcataacgggaccttttcagaggtcaactgcccagacactgagtggtggagctggctcaatgccatccaggcccccttcctctgggtcctcttcctgctggccgcactggagaacatctttgtcctcagcgtgttctgtctgcacaaaaccaactgcactgtggctgagatctacctgggcaacctggcaggcgcggacctcatcctggcctgcggattacccttctgggccatcaccatcgccaataacttcgactggctgttcggagaggtgctgtgccgcgtggtgaataccatgatctacatgaacctctacagcagcatctgcttcctgatgcttgtgagtatcgaccgatacctggcgctggtgaagaccatgtccatgggccggatgcgcggggtacgctgggccaaactgtacagcctggtgatctggagctgtacgctgcttctgagttcacccatgttggtgttcaggaccatgaaggactacagggaagagggccacaacgtcacggcctgcgtcattgtctacccgtcccgctcctgggaggtgttcaccaacatgctgctgaacctggtgggtttcctcctacccctgagtatcatcaccttctgcacggtgcgaatcatgcaggtgctgaggaacaacgagatgaagaagttcaaggaggtccagacggagaagaaggccactgtgctggtgctggctgtcctggggctctttgtgctgtgttggtttcctttccagatcagcaccttcctggacacgctgctgcggcttggcgtgctgtcgggatgctggaacgagcgtgccgtggatattgtcacccagatcagttcctacgtggcctatagcaacagctgcctcaacccgctggtgtacgtgattgtgggcaagcgcttccgaaagaagtcccgagaggtgtaccaggcaatatgccggaagggaggctgcatgggagagtccgtccagatggagaactccatggggactctgaggacctctatctcggtggaccggcagatccacaagctgcaggattgggcggggaacaagcagtgaacacaagccatcgggcaggacgactgccgagcgtgtgaggactgctgggacctgagcttctcagcctgggttcaggaaggagcttgaagcatcctagggaatcaggcaggtgattccagtcttgtctcacggcataagcgtgctgtgggggatggggaccctggagcatagaggggttgttattactggctggtgctctaaaatccccatgagtggagggggtcatggggtagggatgggagtgacaaagcttccttccctttgggggaaggacagatctcctgccggttttggccctgtggctacatgccagttggcatggctgcctcatttcccagtttcaagagtttaagatttattggtcttctgaaggctgaattctaaggagtctctggtaagagcccagagactgggattctgtggttcctctcacccctagacaaggtggacggtacaaaagaagaaccccaaagcatttatggagcacttgcagagtacacagcattgaacactgtgggcaggagggaagacacacatagtgtaatgtcttaaaggagccctgacgttagtggagaaagccaaggacttgcagtctccagaaggctgctgatggcgtgccaaagcaaggaactgtgggagaggggagagcacagggcctaggggaaccggtaaccctgaacacggtagcctgatccctgcctctgcttcttctgctgtaatgtgagggtgtcctgtgctttgaaaagtggggtgctatatggctgtgaggcgtcagaacacacatcactgggtctggacacacgtcacatgcagacgcatcagaacacacatcacatggagatgcaccagaacgcacatcactgggtcaggatacacatcccgtgcagatgcaccagaacgcacatcactagatcaagacacacatcacacggagacacttggcacagagaaagccactcaggcttactctgcctgcaggtacaagaggccctcactccctcctacctttccctcctagtatcccacccctatgcacacacaacaaagcgtttggtacttgggaagggcgggagaaagcaagtgtttgttttgcaatgagacaaagaaaaagatttctggtgggacctgcccggagaatccacacctcacagcatggctgcaaattggtagctgactgggggagtctaagctgcttcccagggctcctggctcagtgaccaagggatgccaattagtggtttatctgagagtgactcacaaagcagggatgctaccaaagagctgacccatcatccaaggtcacttaactgagggcgtcaattccaggcccagctccctacatggctgcagggtgcctcgtgagtgatgtcaggggtgggtagggctgcctgggccctggggaactctgacaggagaaccacccccaccttgggggagaggggaacaacacatctgcatattgagcaggtcttccaccagagataggatagccttccggatggtttcagggccagtgggttccccattagaacctattccaggggccttgggtgagctcagtgtcagtggagacagttgccccagcaacgccatagactcgggtgacagacaccatactcatagtccagaatcttccatgggagtttatttttccacgtgtccgcatcctgtgataaacttaacgacaggggccacttaagggaaagagaagggttactttgtctctcagtgtcaaaaaaaaaggctatggtccagtgtagccggggtctgtatggtaaacagagcagtaaatggagacccggctggaaccagggcggcatatgaccttcaaatgtctgcccctagtgacctttcacctactaggtcctacatcttaaagcttccatcgcctttcaaaataggaccagcagtcaggaatgaagggaggtgcctttcagactcaactataacaatttcactgccaattggctggcttctgaggctaacacactgtcaagcccctggggacatctgagggacatatcaaacaacctccaacaccaagccacgcaggagctgaccgctcgatagccgggggctacggagactcaggaaatgggcagagttcactggtgtttctggccaggctggagccaagggagagcctacatggcaaaaggcccgtgaatccccaccaatctgactctgaatttcctaagagagaagaccccaggaaattcttttttccaccccatcctccacttgtagccaaaagaaggaaacagatggcatacgctgagaatggactcagccacacccatactgtgaaggcgaagcagggccccaccctcagaggagaagttggtgggctacgggcgtgagggacgcggcctgggtccctcagggtggctgaagggtctgaaactgggtcactgcagggtctgcaactaggtctgcaggagggaagcccccttgtgcctttcgtcgacaccctgatgagaaaccatgtccattgaaggacggagaaagctctgtaccgtgcagaggaagtggccgacaagggaggagcactctgtgtaagaacacacctcctctgtgcgctggaataaacagatgaattttgcatggtgtttccctgtgtcaaacttcccgaacctctgagctctgactcggggcactgcctttggtagtcaaaagccttgggagatgagggatgcattccgttcccatggaaataaacattggtctccaagcatttttaattgagtggcagggtggtgggctggg

SEQ ID NO: 3674 - DNA, 2834 bp, Rattus norvegicus
ttaagaactgagtccccctttccctgtctcttcgcagaggaggcctaccagaaactggccagcgagaccctggaggagctggactggtgtctggaccagctagagaccctgcagaccaggcactccgtcagtgagatggcctccaacaagttcaagaggatgcttaatcgggagctcacccacctctctgaaatgagtcggtctggcaaccaggtgtcggagtacatatcaaacacgttcttagataagcaacatgaagtagaaattccctctccgactcagaaggaaaaagagaagaagaaaaggccgatgtcacagatcagtggggtcaagaagttgatgcacagctccagcctgaccaattcctgcatcccaagatttggggttaaaacagagcaggaagatgtcctggccaaggaactagaagacgtgaacaagtggggcctccacgttttccgaatagcggagctgtctggcaaccggcctctgactgttatcatgcacaccatttttcaggaacgagatttgttaaaaacgtttaaaatcccagtggacactttgattacgtatcttatgactctagaagaccattaccatgctgacgtggcctatcacaacaacatccatgctgcagatgtcgtccagtcaactcatgtgctgctctctacacccgctttggaggctgttttcactgacttggagattctcgcggccatttttgccagtgcaatacatgatgtggatcatcctggtgtgtcaaatcaatttctgatcaatacaaactcggaacttgccttgatgtacaacgactcctccgtcttagagaatcatcatttggctgtgggctttaagttgctccaggaagaaaactgtgacattttccagaatctgaccaaaaagcaaagacaatctttaaggaaaatggccattgacattgtactagcgacagacatgtcaaagcacatgaatctgctggctgatctgaaaacaatggttgaaacgaagaaggtgacgagctctggcgtcctcctccttgataactattctgacaggatccaggtcctccagaatatggtgcactgtgcagacctgagcaaccccacaaagccactccagctctaccgccagtggacggaccggataatggaggagttcttccgtcaggaggaccgggagcgtgagcgtggcatggagataagtcccatgtgtgacaagcacaacgcctctgtggaaaaatcacaggtgggcttcatagactacattgttcatccactctgggagacatgggcagacctcgtacatcccgacgcccaggacattttggacactttggaggacaatcgtgagtggtaccagagcacaatcccccagagcccctcccctgcacctgatgaccaagaggacggccgtcagggacagactgaaaaattccagttcgaactaaccttagaggaagatggcgagtcagacactgaaaaggacagtggaagtcaagtggaggaagacactagctgcagtgactctaagactctgtgcacccaagactcagagtccactgaaattccccttgacgagcaggttgaagaggaggctgtagcagaagaggaaagccagccccaaactggcgtcgcagacgattgttgtcctgacacgtaacagtgtaaaggctgtcacaccttttctttttcttttttttttttaaagtagaaaaaaatcgtttccaaagtgcatgtcacatgccacaaccatggtcacacctcactgtcatctgccaggacgtttgttgaacaaaactgacttgaactactcagtctggcgctcaggaatattgtaaccagttctttcgccgccccccccccccccatgtcatcggagaagggagatgtcttcacgaacatgatgtcgacatgacgtcagctcggtagagctgacaaagcagataaaatcaactccaactgttttcaagggagcgtggctcatccagctgcccagacgtagattggattgcagggttcctttctggtttgtttgcaaaaaaattttaagaagaaaagaaggcatttgatgaactcacagatgaagcaatgaaaacatcaggaacaggacacagcttggatctgtccccaggaggaggatgagccacagaaattgcataattttctaatttcaagtcttcctgatactaactgaacagtgtggttcaatgagccatgctcacctctacattttgtatgatatgtaaaacagattttttgtagagcttacttttattattaaatgtattgaggtattatatttaaaaacaaaaacaaagcaaaactctgttcagaacttcatctgccactggttatttttttctaagaagtaacttgcaagttttcagtacggatcagtactacactggataaatctcatttatgaatttgacttccaccttagagttcatagcaattaactgatttgtagtgattcattgttttatataccgatgacttccatactttaaaacagagaaacaaatttatgttgccagaaaccctttttgtaagtgtccattgactccttttgtttcactcctccgcccgccagaagagttgctgtcccacattgctgccctcactgtgtgcaaagtgagtatttattctgtaatatgttgatgtgcattatgtccagtgtgtcttaaacctcataggagttcagtcatcacttgctgttgtctgaagcaaatgggaaatatataaatacccagtagctaaaacagcctgtcttttctaggcattttcctacccactgccttctgatgacttcctttttttccccctgtgtcggaattc

SEQ ID NO: 3675 - DNA, 1814 bp, Rattus norvegicus
ccaaggcagaaaagtaactgtcaaatgcgcggctcctttaaccagagcgcccagtccggctccgagagtcatggcgaccgcagcgtctaaccactacagcctgctcacctccagcgcctccatcgtgcacgccgagccgcctggcggcatgcagcagggcgcggggggctaccgcgaggcgcagagcctgcaggtgcagggcgactacggtgcgctgcagagcaacgggcacccgctcagccacgctcactggatcaccgcgctgtcccacggcggcagcggcgggggcggcggcggtggtggaggaggcgggggaggcggcgggggaggcggcgacggctccccgtggtccaccagccccctaggccagccggacatcaagccctcggtggtggtacagcagggtggccgaggcgacgagctgcacgggccaggagcgctgcagcagcagcaccaacagcaacagcagcagcagcaacagcaacagcagcaacaacagcaacagcagcagcagcaacaacagcgaccgccacatctggtgcaccacgctgccaacaaccatcccgggcccggggcatggcggagtgcggcggctgcagctcaccttcctccctccatgggagcttccaacggtggtttgctctattcgcagcccagcttcacggtgaacggcatgctgggcgcaggagggcagccggctgggctgcaccaccacggcctgagggacgcccacgatgagccccatcatgcagaccaccacccgcatccgcactctcacccgcaccagcaaccgcccccgccacctcccccacaaggcccaccgggccacccaggcgcgcaccacgacccgcactcggacgaggacacgccgacctcagacgacctggagcagttcgccaagcaattcaagcagaggcggatcaaactaggatttactcaagcagacgtggggctggcgcttggcaccctgtacggcaacgtcttctcgcagaccaccatctgcaggtttgaggccctgcagctgagcttcaagaacatgtgcaagctgaagcctttgttgaacaagtggttggaagaggcagactcatcctcgggcagccccaccagcatagacaagatcgcttcgcaagggcgcaaacggaaaaagcggacctccatcgaggtgagcgtcaagggggctctggagagccatttcctcaaatgccctaagccctcggcccaggagatcacctccctcgcggacagcttacagctggagaaggaggtggtgagagtttggttttgtaacaggagacagaaagagaaaaggatgacccctcccggagggactctgccgggcgccgaggatgtgtatggggggagtagggacacgccaccacaccacggggtgcagacgcccgtccagtgaactcaagcaggggaggggcagagcttggggctcccctcccctttggtccacagtctcaactgggacctctgttccccctgtaacttctgattgttttttttttttaattattattttcccggtcccttaaaaagagaaaaaaatagagaaattaaggagaaaggaaagtaaaagtaaaacactggactaacctataacaggtagcaggtgtattcatgggttttgacctttgcaagcgagtacccaggcaatgaagtagaatgtctcctagtaagagtgaagtgtgtgtgtgtgtgtgtgtgtgtgtgtgtgtgtctgtgtgtgaaagagagagagagagagagagagagagagagagagagagagagagagagggaggagtcctggtaaaactaaataaattacc

SEQ ID NO: 3676 - DNA, 1786 bp, Rattus norvegicus
tgagggactcgcacttgcaatatgactttggaggaattctcggccgcagagcagaagatcgaaaggtaagtgtgcctgcggactcggtggccgccacccctacggcttcgcggcccggaaccctactgacccgctctcgccctgcgatctgcaggatggacacggtgggcgatgccctggaggaagtgctcagcaaggctcggagtcagcgcaccataactgtcggcgtgtacgaggcagccaagctgctcaacgtgtaatggccccggccacccgcgcccccgcctcccgcttacccacccgcttctaccccgccgtccccggagcttgtacactcaccgttgcccactgtctgtagagacccggacaacgtggtcctgtgcctgctggctgcggatgaagatgacgaccgggacgtggctctgcagatccatttcaccctcattcgtgctttctgttgcgagaacgacatcaacatcctgcgggtcagcaacccgggtcggctggcagagctgttgctactggagaacgacaagagccccgctgagagcgggggcctggcgcagaccccggacttacactgtgtgctggtgacggtaagagaccaggggctgcagctcagaatctgctggggtggaccttgtcgagctggacgctgatctcgcgggggttctgatactgtgaggagcgtgtctaagctcatgggtggcctccagcggcggatgatatcagtgagtcagcaggctacccagctacccctgcctacctctgcactagctcgtgtgactaattctttgagcagaacagattagataaagccacattaagttcccggttcacccttcgttaagaagtcagcttcattcttcatttgctgtcaaagctaaagatagaagtcgtgtaggagacagaccttattaactccctggatatagatacatctcgtgaatgtgacggagtggaattcttttctttgctgctcttgagtttgtttaaacgagccctctccaccctcctccccaccgcttaaaaatgtgtggtgggtggatagtgttttcagaaagaaatgtgctgctgtctcggtcttctggttttttgtttttgtactcttttgacttgtgtagggaagtggtagcctgattatttgtgctgccagtgaaaagtgctattcattgtcaggaaagataaaagagttcagctgccctccctgcagctctcacgtgcacacagcctgagaatgtttttcagaagtattttacttatgactccaccaggtagcgtgcttggaagggcagtcttgagaatgataacttcatgaagagtggggtagttaatatgcaaaactgtgtggctcagtgtgcattacaggtgtttagacttgcgaaacgctgtttggcagaatgtttggggtttggccctttcaaaagtagtacagctagtacgatacgctgatcatattatggggaagtaatttttctaaatctgttctcagaacccacattcatcacaatggaaggatcctgccttaagtcaacttatttgtttttgccgggaaagtcgctacatggatcagtgggtgccagtgattaatctccccgaacggtgattccccgaacggtgatggcatctgaatggaaataactgaaccaaattgcactgaagttttgaaatacctttgtagttactcaagcagtcactccccacgctgatgcaaggattacagaaactgatgtcaaggggctgagttcaactacaggagggctaggagatgactttgcagaagcat

SEQ ID NO: 3677 - DNA, 1619 bp, Rattus norvegicus
agatctcagcaattagaaggccacaaggctaggggttcccaacagccgagaggaaactgtacatctgacagacccactctatctcactgctgaggtgagtgggggggagtgaggcccaggatggctgtacctgcctctctcacgctgctgctgaggtgtgcctcccacctggcttccatcgtgagggacagggtgcagcatgcaaaaaaataaagccattgggagcatcgtaagaaaagactgcccatctgaaatgcccaaaatgagcgtgcacaccccacctgcccaaggacctggtaacttcctagaagatcagaagttgtcattcttggaaaaataacaatgcctcatgggaaagtggttcatagatcagtctttagaaacccctctacatgtgtacctcggggtactcagctggaacattccaggatctggttctgcccgaagcccatgtcctggtcagtattcaacagtcaataaagcttgctttaaatatggcccaaaatagtggaattaatttcctatctggtaaatctcaagattaacacagcctcacctccttctcaaaagtttctcgataccatggatacctcaggccccagttagttggtcttcacaactggagcttcctgtgagctgtgctttgcatagtctccaggcttccaagagcccagtgcacctcagaaagtttttccccctctggagataagtaagtctttcaaggattcatggtgccccaccaccaacaccaataccaacaccaacaggacacgtacgttccagatatgggcacaaaacaaggtgtcagaggaagaaagtcgtggccacatcctctcctgaagacagcaacaccgcatccccccatcctgtcccatggccctctagcctttgccacttagaggaggaaaacaaaggcaaaacagtctctttctcttgacaacagatggtgactcactgggcatagggaaggcacctttactcaggaaacagcctgaagcctcagagaccgagcttgaagcaggaactgaagggaaaagtagacctgctttgttgcaggtcatgggtgggtctcagaagcactatgaggaaagtatgcgcagaaggggaagagtcaaccctgggctgggtatgagtgccaccaggcagtcacagaggtcaggaaacttgagcaaggtaggagatccggggcataaggttatgggctcttataaccacaactgtggttctgctggttaatcttttatttgcccacagccacattttgtccacaaactctgtcctgaaaggggactgactgaagaaaacatccagcaagctctgggcaaggaaggacagcagcagagagcgagggccgtgttcgctgtgccagaggatggaggtgcacaacgtatcagcccctttcaatttctccctgccgcctggctttggccaccgggccacagacaaggcgcttagcatcatcctggtgttaatgttgctgcttatcatgctctcactgggctgcaccatggaattcagcaagatcaaggctcacttgtggaagcccaaaggggtgatcgttgccttggtggcccagtttggcatcatgcccctcgctgcttttcttctcggcaagatct

SEQ ID NO: 3678 - DNA, 2401 bp, Rattus norvegicus
caacatgggggactctcacgaagacaccagtgccaccatgcctgaggccgtggctgaagaagtgtctctattcagcacgacggacatggttctgttttctctcatcgtgggggtcctgacctactggttcatctttagaaagaagaaagaagagataccggagttcagcaagatccaaacaacggccccacccgtcaaagagagcagcttcgtggaaaagatgaagaaaacgggaaggaacattatcgtattctatggctcccagacgggaaccgctgaggagtttgccaaccggctgtccaaggatgcccaccgctacgggatgcggggcatgtccgcagaccctgaagagtatgacttggccgacctgagcagcctgcctgagatcgacaagtccctggtagtcttctgcatggccacatacggagagggcgaccccacggacaatgcgcaggacttctatgactggctgcaggagactgacgtggacctcactggggtcaagtttgctgtatttggtcttgggaacaagacctatgagcacttcaatgccatgggcaagtatgtggaccagaggctggagcagcttggcgcccagcgcatctttgagttgggccttggtgatgatgacgggaacttggaagaggatttcatcacgtggagggagcagttctggccagctgtgtgcgagttctttggggtagaagccactggggaggagtcgagcattcgccagtatgagctcgtggtccacgaagacatggacgtagccaaggtgtacacgggtgagatgggccgtctgaagagctacgagaaccagaaaccccccttcgatgctaagaatccattcctggctgctgtcaccgccaaccggaagctgaaccaaggcactgagcggcatctaatgcacctggagttggacatctcagactccaagatcaggtatgaatctggagatcacgtggctgtgtacccagccaatgactcagccctggtcaaccagattggggagatcctgggagctgacctggatgtcatcatgtctctaaacaatctcgatgaggagtcaaacaagaagcatccgttcccctgccccaccacctaccgcacggccctcacctactacctggacatcactaacccgccacgcaccaatgtgctctacgaactggcacagtacgcctcagagccctcggagcaggagcacctgcacaagatggcgtcatcctcaggcgagggcaaggagctgtacctgagctgggtggtggaagcccggaggcacatcctagccatcctccaagactacccatcactgcggccacccatcgaccacctgtgtgagctgctgccacgcctgcaggcccgatactactccattgcctcatcctccaaggtccaccccaactccgtgcacatctgtgccgtggccgtggagtacgaagcgaagtctggccgagtgaacaagggggtggccactagctggcttcgggccaaggaaccagcaggcgagaatggcggccgcgccctggtacccatgttcgtgcgcaaatctcagttccgcttgcctttcaagtccaccacacctgtcatcatggtgggccccggcactgggattgcccctttcatgggcttcatccaggaacgagcttggcttcgagagcaaggcaaggaggtgggagagacgctgctatactatggctgccggcgctcggatgaggactatctgtaccgtgaagagctagcccgcttccacaaggacggtgccctcacgcagcttaatgtggccttttcccgggagcaggcccacaaggtctatgtccagcaccttctgaagagagacagggaacacctgtggaagctgatccacgagggcggtgcccacatctatgtgtgcggggatgctcgaaatatggccaaagatgtgcaaaacacattctatgacattgtggctgagttcgggcccatggagcacacccaggctgtggactatgttaagaagctgatgaccaagggccgctactcactagatgtgtggagctaggagctaccaccctcccacccctcgctccctgtaatcacctaacttctgccgacctccacctctggtggttcctgcctggcctggacacagggaggcccagggactgactcctcctggcctgagtggtgccctcctgggcccctaggcagagcccggtccattgtatcaggcagcccagccccagggcacatggcaagagggactggacccacctttgggtgatgggtgccttaggtcctctgcagctgtacagaaggggctcttctctccacagagctggggtgcagcccccacacgtgattttgaatgagtgtaaataattttaaataacctggcccttggaataaagttgttttcagt

SEQ ID NO: 3679 - DNA, 2963 bp, Rattus norvegicus
gaattcaagttgctgtcaacatcagtaaagtcatagaggtgactgaatgctcccttagcactatgaagtagatcccatacccctcccccacaacacaggccctctccggtgtgctgaacccttccattctccgtgcactttctttctgttctgctgaacctctgtcactgaaatcttaacagccctctctctatgcctgagagcctgagagaggtctggagagtaactataccctttaaagccggtaagcatatgcgctggggcaattggaagatcttgctcctgcttttggccttgccacctgtgtccccatgcctttgggatacctgcctagcctctgtaagtctaatttcaaatctctcacatgatgacgctctcgtatcccttcagatttgctccctggagtgccaggacctggtgccgccctcggaggagtgggagacatgccggggcttttggtcttttctcaccctgactgcctctgggctccatggcaaggatgacttggagaatgaggttgctttggaagaaggctacacggcactgaccaagctcttggagcccctcctgaaggagctggagaaaggccaactccttaccagcgtctcagaggaaaagctcaggggtctctccagcaggtttggcaacggaagagaatctgagctactgggcactgacctgatgaatgatgaagccgcacaggctggcacgctccatttcaacgaggaggacttgagaaaacaggccaaacgctatggcggctttttgcgcaaataccccaagaggagctccgagatggctggggacgaggacaggggccaggatggggatcaggtagggcatgaggacctgtacaaacgctatgggggcttcctgcggcgcattcgccccaagcttaagtgggacaaccagaaacgctatggtggttttctgcggcgtcagttcaaggtggtgactcggtcccaggagaaccccaatacctattccgaagatttagatgtttgatggataacacttcccctccatggagttgggtctgccggcttcctgcttcatcctcctctgcttattccttcgcttgctccgttcagcattcccatgaaaacatctaaacccagcccacgccctgttccgcctaggagtggagtgttcgtttgcgggcagtggtggggaagagtggggatcccctgctaatccatccagtgtgccggctcaaacccctaggacctctaaactaccactaccaagggtagctctttgacatcagcccaaccgctctatccctgtgaccccttcccaccctagaatccagagaaccttgtctttgtacctataggtctgtggtctccaaacttcactgatcacgtcctcctcttcggaagaaaaatgagcactccctgttagtattgcatgtgaaccatgaggcatacagtgtagaaacataaaacaagatatgtgcaaaatacatgcaaatgaagatcctaactgcattctcagccacacaggctcgtcttgtgcacactgctctggaaagctacaggctaaatgaaagcctttcagggacagggattataaccctagaaggccaggcctctagcatgctaattgtatgtgcatccagagttctcatggtttccaaggtgccttggaaaagcccagctcctagaccctggggagggcagtgcctttcccaagagtgacaccccctgctcacgaggaaaagccattcctctgaaggctgaagtgataagggggggagcaaagcaaactaatttgttctgtacaacaaattcagaatttgggccagttcccacagccctcattaaaaaagatcagtttcacacttcaagcccacgaggaactgaatcgtagtggagctgatgcagctgagcgcagctgtgctcctcagtagttgacttggctgcgggagccagagccatttgctgagccatttggccgggcatatgcactggcactgggaagggggatccagaagcagtagctgaaggagagactggtccccctcggtattacactgagcctcattctccatgtctccaaataaaagcagagaaagaggatcaagtgggttcgctggattcaaataacccagaatcagaggccaggtcctctttggtttcctctccccatcagatatttagattggtaggttaaggagatggggctggacgggagagaaagcagtctggatttgcgtatttggatggaagcagactggatttgcatctttgcataagataacttgagtgtccctctccacacacagtccacagcctttaggagctcttcatgtgttctgaaatgtgtagattgttttatggtgacttgtgcgctgcttaaaaaaaaatcacatttatccaaattacttggaacatgtgagtccttaataggtctgtgtagtttcctgcttctctggtacaataaataaagttatgcagatggcttgctgtgtttgcgtggatatattcgagtcgtctccagagaaagtgcatggcattatatataagcagatatgatatgtatatacttacataagcacacatacacacgtatagctgtattggaggattgaacctggtgcctcatgtgcgattggcaaacattctacctccaagctccagcccctatagtcctattaggaaaaactgtggaataacagaaagcaagagactgagtgtccacagatttatatatgtaaattaagtctgtgtgactttgggcaagtcactgacctctctggaccttcttatgtctataaaataaagatgaatagggcagtgtgtgtagtgtggctgacaggacagatgaagtcaaacatgaaaagttcccagcacttagtaggttcaataaatgagagtttccatgcctatgtggtcttaaggaacagtggcaaagttgggcatttggcaacaaaacagggaggacagagagaggtactgcag

SEQ ID NO: 3680 - DNA, 518 bp, Rattus norvegicus
acctcatatggaaccacacccgaaaacctggggactacagcaatgacctgatgctgctccacctcagcgagcctgcggacatcacagatggggtgaaggtcatcgatctgcccacgaaggagcccaaggtggggagcacctgccttgtctcaggctggggcagcaccaacccctctgagtgggaattccctgatgatctccagtgtgtgaacatccacctactgtctaatgagaagtgcatcaaagcctacaaagaaaaggtgacagatctgatgctgtgtgcaggagagttggaagggggcaaagacacttgcaggggtgactcaggaggccccctcatctgtgatggtgtgctccaaggcatcacatcatggggctctgtcccatgcggtgaacccaataagccaggcatctacaccaaacttattaagttcacctcctggataaaagaagttatgaaggaaaacccctgagtgtcacactgtaccctgatctcaataaaacccaccatgcagcac

SEQ ID NO: 3681 - DNA, 859 bp, Rattus norvegicus
aagatcaccacctgctgctactggacacacgatatcatgtggttcctgatcctgttcctcgccctgtccctgggacagattgatgctgcacctcctggccagtctcgggttgttggaggatataactgtgagacgaattcccaaccctggcaagtggctgtcattggtacaactttctgcgggggtgtcctgatagaccccagctgggtgatcacagctgcccactgctatagcaagaattatcgtgttttgctgggccgaaacaacctagttaaagatgaaccctttgctcagcgccggcttgtcagccaaagcttccaacaccctgactacatcccagtcttcatgaggaaccacacccgacaacgtgcgtatgaccacaacaatgacctgatgctgctccacctcagcaagcctgctgacatcacaggtggtgtgaaggtcatcgatctgcccactgaggagcccaaagtggggagcatctgccttgcctcaggctggggcatgaccaacccctctgagatgaaattaagtcatgatctccagtgtgtgaacatccaccttctgtctaatgagaagtgcatcgaaacctacaaaaacattgagacagatgtcacgctgtgtgcaggagagatggatgggggcaaagacacttgcacgggtgactcaggaggccccctcatctgtgatggtgtgctccagggcctcacatcggggggcgctaccccatgcgctaaacccaaaacaccggcaatctatgccaaacttattaagttcacctcctggataaaaaaagttatgaaggaaaacccctgagtgtcacactgtgccctggtctcaataaaacccaccatgcagc

SEQ ID NO: 3682 - DNA, 1605 bp, Rattus norvegicus
ttgctggtgctcactctcacctgtcttattctcctgtcaatctggagacagagttctgggagaggaaagctccccccaggccctattcctctcccaattattggcaatatctttcagctaaatgtgaagaacatcacccaatccttaaccagtttctcaaaagtgtatggtcctgtatttactctttactttggcacgaagcccactgtgatattgcatggatatgaagcagtaaaagaagccttgattgatcatggggaggagtttgctgaaagaggaagcttcccagtagctgaaaaaattaataaagaccttggaattgtttttagccatggaaatagatggaaagaaataagacgctttaccctcacgactctgcggaatttgggcatggggaaaaggaacattgaggatcgtgttcaagaggaagcacggtgccttgtggaggaactgaggaaaaccaatggctcaccctgtgaccccacgtttatcctgggctgtgctccttgcaatgtcatctgctccattattttccagaatcgttttgattataaagatcaggattttcttaacttgatggaaaaactcaatgagaacatgaagattttgagcagtccctggacacagttttgcagttttttccctgttttaattgattattgtccgggaagtcatacgacattagctaaaaatgtgtatcatattagaaactaccttctgaagaaaataaaagagcatcaagaatcactggatgttacaaatccccgggactttattgattattacctaattaagtggaagcaggaaaatcacaatccacattcggaatttacacttgaaaacttatcaatcactgtgactgatttgtttggtgctgggacagagacaacaagcacaacactgagatatgctctgttgctcctgctgaagtgtccagaggtcacagctaaagtccaggaagagattgatcgtgtggttggcaaacatcgcagcccttgcatgcaggacaggagccgcatgccctacacagatgcccatgatcatgaggtccagaggttcattgacctcattcctaccaacctgccacatgcggtgacctgtgacattaagttcaggaactacctaatacccaagggaacaacaataataacatcactctcatcagtgctgcatgacagcaaagaattccccgacccagagatatttgaccctggccactttttagatgggaatggaaagtttaagaaaagtgactatttcatgcctttctcagcaggaaaacggatgtgtgcaggagagggcctagcccgcatggagttatttttattcctgaccacgattttacaaaactttaagctgaaatctgtacttcacccaaaggatatcgatacaactccagttttcaatggatttgcctctctgccaccattttatgagctgtgcttcattcctctctaaagagatcaaattggctggggatttagctcagtggtagagcgcttacctaggaagcgcaaggccctgggttcggtccccagctccgaaaaaaagaaccaaaaaaaaaaaaataaataaataaataaagagatcaaattgcctggcaaa

SEQ ID NO: 3683 - DNA, 571 bp, Rattus norvegicus
gcagcttgttccttcacggtcaccaaacgtccgcatcaaaccagaggccgccatcatgacgaaggaccagaatggaacctgggaaatggagagtaatgagaactttgaaggctacatgaaggccctagatattgattttgccacccgcaagattgcagtgcgtctgactcagacgaagatcatcgttcaagacggtgataacttcaagacaaaaaccaacagcacgttccgcaactatgacctagatttcacagtgggggtggagtttgacgaacacacaaagggtctggatggccggaacgtcaagaccctagtcacctgggaaggaaacaccctggtgtgtgtgcagaaaggggagaaggagaatcgtggctggaagcagtgggtcgagggagacaagctgtacctggagctgacctgcggtgaccaggtgtgtcgacaagtgttcaaaaagaagtgatgggcccaggggaagcctggaacatgtgtagagttctctgccattctgaaaagcagcattgggactccctggttcctgacagagccccccttgcatcactgcctgggtttg

SEQ ID NO: 3684 - DNA, 2571 bp, Rattus norvegicus
ggggcgggccaatggcggcggtcctataaaaaggcagctccgcgcgctctcttcctaagaacacaagaatcccttgtggagtgtcggtttaggttgcagggtcttaagtgagtcagggcgcggaggtccggcgggagacgcatagtcacagaacgtccattctccgtttcacagcccgcacagcttgagcctcgagcgcagcgcggccatggagcccagcagcaagaaggtgacgggccgccttatgttggccgtgggaggggcagtgctcggatccctgcagttcggctataacaccggtgtcatcaacgccccccagaaggtaattgaggagttctacaatcaaacatggaaccaccgctatggagagtccatcccatccaccacactcaccacactctggtctctctccgtggccatcttctctgtcgggggcatgattggttccttctctgtgggcctctttgttaatcgctttggcaggcggaactccatgctgatgatgaacctgttggcctttgtgtctgccgtgcttatgggtttctccaaactgggcaagtcctttgagatgctgatcctgggccgcttcatcattggagtgtactgtggcctgaccaccggctttgtgcccatgtatgtgggggaggtgtcacccacagctcttcgtggagccctgggcaccctgcaccagctgggcatcgtcgttgggatccttattgcccaggtgttcggcttagactccatcatgggcaatgcagacttgtggcctctactgctcagtgtcatcttcatcccagccctgctacagtgtatcctgttgcccttctgccctgagagcccccgcttcctgctcatcaatcgtaacgaggagaaccgggccaagagtgtgctgaaaaagcttcgagggacagccgatgtgacccgagacctgcaggagatgaaagaagagggtcggcagatgatgcgggagaagaaggtcaccatcttggagctgttccgctcacccgcctaccgccagcccatcctcatcgccgtggtgctgcagctgtcccagcagctgtcgggcatcaatgctgtgttctactactcaacgagcatcttcgagaaggcaggtgtgcagcagcctgtgtatgccaccatcggctcgggtatcgtcaacacggccttcactgtggtgtcgctgttcgtcgtggagcgagctggccgtcggaccctgcatctcattggtctggctggcatggcgggctgtgctgtgctcatgaccatcgccctggccctgctggagcagctgccctggatgtcctatctgagtatcgtggccatctttggctttgtggccttctttgaagtaggccctggtcctattccatggttcattgtggccgagctgttcagccaggggccccgacctgctgctgttgctgtggctggcttctctaactggacctcaaacttcatcgtgggcatgtgcttccaatatgtggagcaactgtgtggcccctacgtcttcatcatcttcacggtgctgctggtactcttcttcatcttcacctacttcaaagttcctgagaccaaaggccggaccttcgatgagatcgcttccggcttccggcaggggggtgccagccagagcgacaagacacctgaggagctcttccaccctctgggggctgactcccaagtgtgaggagcccacagccagtcccgcctgctcccagcagccccgaggatctctctggagcacaggcagctagatgagacctcttccaaactgacagatctcgggcgagccgggcctgggcacctttcttcagtcagcaatgaagtccagaagaatattcaggactttgatggctccagaatttttaatgaaagcaagactgttgctcagatctattcagataagcagcagattttataatttttttattactgattttgttattatttttttttttatcagccactctcctatctccacactgtagtcttcaccttgattggcctagtgcctgagggtggagaccacgccctgtccagacacatgccttctttgccaagctaatctgtagggctggacctttggccaaggacacacgaatactgaacaatggctaggaggctttaccgcaggaggcggtagctgccacccacttctgcaggcctggatctcgacaccataggggtccaggctccatttaggattcgcccattcctgtctcttccaactcaaccaaccactcgattaatctttccttgcctgagaccagttgaaagcactggagtgcagggaggagagggaagggccaggctgggctgccaggttcaggtctcctgtgcactgagggccagacaaacaccatgagaaggacctcggaggctgagaacttactgctgaagacacggacactcctgccctgctgtgtatagatggaagatatttatatattttttggttgtctattaaatacagacactaagttatagtatatatctggacaaacccacttgtaaatacaccaacaaactcctgtaactttacctaagcagatataaatggctggtttttag

SEQ ID NO: 3685 - DNA, 1913 bp, Rattus norvegicus
ccccgttctcagttcgatggttggctgcaatcattcgagctttctaacggcacctaataccttccacaccagtatttgagtctccagattgaagtcttcttttcaccgagcaccctcttcctgatgctcttgcagccattgaggtgaagctggcaaatatggaggcagagataaacaccctgaagtcaaaactggagctaaccaacaagtgtaagtgttctctgggtcccgggtgttctcactccacttccctgcagatctcgagttcagggaaagtgggagagggctaacggttctgaatgctaactttaccccaggtctctgcaagcatcctctttcttatgatgtaatatcgttccgtctcctcaccaactctggctgagacattagacttgtctcgggaccagggaggttgctcagtagtaaaaaagcgctcagcacacaagcctaaagacttgaatttaatccctagaacctacagtgggagaagagaatcaactcttaaatgctgtcctctgacctacacggacacatggtgccgtgcacgtagacacatacagagaaacacacacacacacacacacacacacacacacacacacacacacacaattttaaaaagatattttactccttacaaacaaggaaagggaaatcaggaagtacaactcatagagcttgcagacagtgtcaagaaagggccgtgtggaagtctgttttgtccaacatctttgttgtttactccccactcaccattcttagctgaatattggtgcccttttcttattctggtgcccaaatggggcagggaggacacaagtgccatcctgtgtttacctgtttttttttttaactgatgtcgatgttaacagtgagctatcccaggaggctcccgctgatttcatgaaattgtggatttctctcacggctctactgctgttctgggtcatacctttttcctaggttctatttagagtcctgaaatcccagaggactttttcgactaaggtcctggctgggcaccacactgagtgagcctcatccactctgatttcagtgcatgccttctccatgggtaaaaagtctgggaagaagttctttgtgaccaaccatgaaaggatgcccttttccaaagtcaaggccctgtgctcagagctccgaggcactgtggctatccccaagaatgctgaggagaacaaggccatccaagaagtggctaaaacctctgccttcctaggcatcacggacgaggtgactgaaggccaattcatgtatgtgacaggggggaggctcacctacagcaactggaaaaaggatgagcccaatgaccatggctctggggaagactgtgtcactatagtagacaacggtctgtggaatgacatctcctgccaagcttcccacacggctgtctgcgagttcccagcctgaggaaaccagtgcctccatcgtctccttggctctcagtcgcttccaaagaaaattcagttactggtttctcaagtttagtgttaagtgattcttttgatgggagagaatgtatttgcttgtggcatgaggacacgaatagaagctgaccgggaggcaccaggatctggttgagcacggagcaaaggtcacatccattttgctaggaacacagcaagaagtcaactatggaaaacctacaataaatatcccctgcccttttcaccagaggaccaaaggtggtccttatctgtgccagagtggcagctgatctcagccataaaagcacccaattccctttctccatgaattgtcactaagtggtgtcaaacgtgcctgtttgaagtcatcctcagtctacaaggtgttcttgcctcttgtgtgttcctttacaaggaatctctatctggtggaggggggaagagagctaacacttctggatactt

SEQ ID NO: 3686 - DNA, 1444 bp, Rattus norvegicus
cggccgtcgttcttctgcgtgcgcccggagctgcaagcacaagcagtctgcgttcctgctccgtcggaatcccgcctgccgccgccgccgccgccatgcccttctccaacagccacaacacgcagaagctgcgcttcccggccgaggatgaattccctgatctgagcagccacaacaaccatatggccaaggtgctgacccccgagctgtacgcggagctccgtgccaagtgcacgccgagcggctttacgttggacgacgccatccagactggcgtagacaatccgggccacccgtacatcatgacagtgggtgcagtggcgggcgacgaggagagttacgacgtattcaaggaccttttcgaccccatcatcgaggaccggcacggcggctaccagcccagtgatgagcacaagactgacctcaacccagacaacctgcagggcggcgatgacctggaccccaactacgtgctgagctcgcgggtgcgcacaggccgaagcatccgcggcttctgcctcccccctcactgcagccgtggggagcgccgcgccatcgagaagctggcagtagaagccctgtccagcctagatggcgacctgtctggcaggtactatgcgctcaagagcatgaccgaggcggacgagcagcagctcattgacgaccacttcctcttcgacaagcctgtgtcgcctctgctgctggcctccggcatggcccgcgactggccggatgctcgcggcatttggcacaatgacaataagacgttcctggtgtggatcaacgaggaggaccacctccgggttatctccatgcagaaagggggcaacatgaaggaagttttcacgcgattctgcactggcctcactcagattgaaactctcttcaagtctaagaactatgagttcatgtggaaccctcacctgggctacatcctcacatgcccatccaacctgggcactgggcttcgggcaggcgtgcacatcaagctgccccacctgggaaagcacgagaagttctcggaggtgctcaagcgactgcggcttcagaagcgaggcacaggtggtgtggacaccgctgctgtgggtggagtttttgatgtctccaacgctgaccgcctgggcttctcggaggtggagctggtgcagatggtggtggacggagtgaagctactcattgagatggagcagcggcttgagcagggtcagcccattgacgacctcatgcctgcccagaagtgaagccgtggccctagccaccaccaggctgccgcttcctaacttattacccgggcagtgcccgccatgcatccttgatgtttgccgcctgccgggtgagccccttagcctcgctgtagagacttctgtcgccctgggtagagcctttattttttctgatggctaagctgttgcagacactgaaataaattagggtttggcctgcc

SEQ ID NO: 3687 - DNA, 286 bp, Rattus norvegicus
gggttgtgcacatgagtactaccagctctcaagctgtgtttctggattacaggccttcaagagcagaatcagcagcctccccaatgtgaagaagttcctgcagcctggcagtcagagaaagccagccatggatgcaaaacaaatcgaagaagcaaggaaggttttcaagttttagcggagctgcactgtccaatttcttgtaatccaggctctgatgttttgcaaaaaatgagaagcaattgttgatcctggctattttgcaataataaaaaaatgaacaaatgga

SEQ ID NO: 3688 - DNA, 1312 bp, Rattus norvegicus
gcttggctgcagcagagacagatccctctaacttacccagagatcagaccttccgtattccttgggagggtggtggcttctcttccacttcccacacattagtgtcctgggaggccctgtgccccctccttagctgctctcacctttgcacaggtggtggggaggtggtggcgttggccagaacattggccatctttgtctaactctgtgggattcagaggagtctggtatctccatgacattccagtgactgacccctctctctctcctgtgaccacccctcctctcccccacagggctcctacagtgacacaggagagtgttttggttgtgtttgaagagacaggggaaacctgcccccatttctcagcatcaaatcctgcaattcttctgtccctacagagctagagcagttatcaaccctccccaccacctccctgggcagatgctggccttgggaacaggcaaaaggcagccttctccaacctcagcatcacatcagaacccatactccctcccctgattagcaaccacagcatttctccaatgcagatggctcctgcccttaaaggaggcgggagccaatatccttgaagtgatgaaagcccactctcggactatgggaaagaggcaattaagtgtcaagtgtgccagacagctgtgacagttgtgaaataccctagcttctgataacagaatgagttacttcttcccagtcaggaaggtaggccctttccagctgtgcagttctgccccactgtctgaacaggtttgtctcagggttggaaggatggcactcctttaccccctccccagtcacataccaccaaagctcgagaaacccagcttacgcatattcctatatatgtcacaagccccttgatgtgagcgtagcagggaaggcttgcaattagactcgtttaataaagactctctttgttcttgcattggactcacaattcctggcagtctcctggggttcccgtgaactgggcataacatgttgactgcctcagactgtaaggcctgtgtatccctgctccgaattcctgtctgccagcctgccactctgtggttcagagtctctgtggtgccagtgaaaccaccagctcagctcttgtgatctcgagtccccaggtcttgtctgtagctctgcctctgggtaattccagaggctccatctgtgtacggcagcaccccagcacctcaggcttcctatctccactctgtagtacaaccagtttaagagtattcctgttatagtaaaataataaaaaaataaaaacagtacattgtcttttattccactagg

SEQ ID NO: 3689 - DNA, 2680 bp, Rattus norvegicus
  misc_feature (1001)..(1001): n is a, c, g, or t
aagcttacagataggggctcgaatcgctgccactttccgctgtagatacagaagcctcctggaccgccagctccccgtggcagccttggggagtttctggctgaggccgagcctggctagcagcgttggggagtgtgcttggggaagggtccacctttggtgggggagaccagtaggtccagtaggtccagtaggtctaagaaagccgctggggaccttgcggtccgggacacctgctccgggagcgggaaaaaccttgctcgactgcttccctcccagcgctcgcagttgtcccagagatgctccccaagtacagtgtctggtccctacagacccgcgcgcagacagcaggcaattcccgcgacaggcaatctaagcggtccctgctttatctttctctctggcagcgggactcgacggggagaagtaaagagggatctgggggatgctcactcttggatgttcccttctcctctcagagcgggctgcctggaattggggtgtgggtggctccagacgccgccactcgagcggctgtggctccagcctcctcccccgctgatgggggcgggaagtggctgtgggagtcacccgggcgtgactgcccccgaggcccctcctgccgcgacaagggcgctccataaaagcccgttggcgacccgctctacgcatcccaccggtggagctcattcctcgcagaggcgcccagagcagagcacccgctgcgcagagaccacagcccgcccgccatggtgagtgccaggaccaactgggacagcggtgcgggcccctagactcccttgaacttgccctgcagccggccccctgagcttgttctgccaacttgacacccagctctttggggcagctaaatttcacttgctggactctggttcgaccctccacctgtccttctccggagccctcctatctaggcgctccacctccacgccggttatcttttgaaggaagggagaagaacgtggggacacctatccctnggcagcggtggggttttgtttgtttgtttgtttagttggttacaaccaggaatccagattgcatgcgtggtcctagagggagattcccccaaagtattttccctggcatggggagccccgtgcccagtcacctccaagatctgaactgagcctctgggtatctgactgtcacaggatctgtagccacacagatcataagcgactcagaagaaaagtttctcctccgagggtgatttaggaacaagaggagaaaagtggtctttctttaaaatagagggcagaacttacaattctattctaaaagggggccctctgcttctcactaggagcgttggagggaagtttcatgaacaatggggcggagcagaggggccaggtccgggcaagtggttctctagggctctggaagtggagcctgcccaatctgggctttttttcctagggtctgggatgggaatagatgagggtctagagtggtagctggaatcgggacaaaggcgagcattctctgcatctccaagtctgagccttctgtatccacagatgctaggtaacaaacgaatggggctgtgtggactgaccctcgctctatccctgctcgtgtgtttgggcattctggctgaggggtacccctccaagccggacaatccgggcgaggacgcgccagcagaggacatggccagatactactccgctctgcgacactacatcaatctcatcaccagacagaggtgggtgtatccgcggctggtatctcgagccccaaaaaactgcggttctgggaatcttggacgccagagaccatttctttctccttgttctgtcccagaataggacaggatccggcatatattcagctctagataaatatgtgagatgggtacacacgccacaaactggatacattgtctttgtcactagactttctctccaacccccgaaactgagattcagtacctctgggctgtgtctgtctcccacccacctttcctgcctcttttgcttacatcagttggatgttgtacttacccagcaccctccttgggaaaaggcagcatcaggagcaggggtgcaacagtgtaaaggtgtaacctaatctagagtaaacaaccacccccaaagaaaaccaaggagacagtccagctgtcagagagtggatagaccttccagcctgcccagggcaaagggagtggcagcatttagggaaataaataaataaataaataaataaatgagagagagagagagagagagagagagagagagagagagagagagagagagagagaacgaaccatgggtttcttctgaactatctcagccctacacttgaaaattgctagatggtcttaaaaagctgacttctctcattttatagcaattgcgttctgaaaagaaagcgtcccatgaagaagaaacaaaacaaagcaaagcctttccgctaaggactctggtggatacagacagctccactggctggggcctgagagacagacggggatctgtatttttaatgtccagaaagtggaagagaggtgccttgcctttcctctcagcattaaaatcaaacagaaaaaaatcaaatccaagctattttacaaacaatatgggacttagtttgcaaagtcagtgcattttagttctaaatcatttaacaacacatttcaattaccgagaac

SEQ ID NO: 3690 - DNA, 1624 bp, Rattus norvegicus
gttaagtgttggtcatttgtctttgggagcctgggcccgtgggggcagccatggggctgctgattggagatgacctctgggctgtggtcatattcacagccatcttcttgcttctggtggacctggtgcaccggcacaaattctggactgcccactaccctcccggccctgtgccactccctgggctgggaaacctgctgcaggtggactttgagaacatgccatatagcttatacaagcttcgaagccgctatggtgacgtgttcagcctacagatagcctggaagcctgtagttgtgatcaacgggctgaaggccgtgcgggaactgctggtgacctatggagaggacactgctgaccgccccctactgcccatctataatcacctgggctatgggaacaaatcaaaaggtgtggtccttgcaccttacggacctgagtggcgagagcagagacgattctctgtgtccaccctgcgcgacttcggcgtgggcaagaaatcgctggagcagtgggtgacagaggaggccggccacctctgtgacaccttcgccaaggaggctgaacatcccttcaatcccagcatcctcctgagtaaggctgtgagcaacgtgattgcctcccttgtttatgctcgtcgatttgagtatgaggaccctttcttcaacaggatgctcaaaacattgaaggagagctttggagaggacaccggcttcatggcagaggtgctgaacgcaatcccaattctccttcagattcctgggctgcctggcaaagtcttccccaagctcaattcatttatagccttagtggataagatgttaattgagcacaagaaaagctgggatcctgcccagccgccccgagacatgactgatgccttcctagcagagatgcaaaaggccaaggggaatcctgagagcagcttcaatgatgaaaatctgcgcttggtggtgattgacctgttcatggcggggatggtgaccacctcaaccacactgtcctgggcccttctgctcatgatcctgcatccagatgtgcagcgccgagtccacgaggagattgatgaggtcatagggcaggtgcttcgtccagagatggcagaccaggcacgaatgccgttgaccaatgctgtcatccatgaggtgcagcgctttgcagacatcgtcccgacaaatataccacatatgacatcccgagacattaaattccaaggcttcctcatccccaaggggacaaccctcatccccaacctgtcctccgtgctggaggatgagaccgtctgggagaagcccctccgcttccatccagaacacttcctggatgcccagggcaactttgtgaagcatgaggccttcatgccattctcagcaggccgcagagcatgcctgggggagcccctggcccgcatggagctcttcctcttcttcacctgcctcctgcagcgcttcagcttctcggtgctggccggccggccccggcccagcacccatggcgtctacgcattgccagttactccacagccttaccaactctgtgcagtggctcgctagcaggggcaggggctccattcttctccccggtttggtctgattgatgtccaataaacaacttctgtatcttc

SEQ ID NO: 3691 - DNA, 2348 bp, Rattus norvegicus
ctttgctgcattctgactagtggccaagcacgtgacatcccgaacttctgcaaaggtacaataagggccgaccatttaattttggataaccagttggtgtgttcttccttggactatgtcagagagtcacaatgaccttgcacagtaacagtacaacctcgcctttgtttcccaacatcagctcttcctgggtgcacagtccctcggaggcagggctgcccttggggacagtcactcagttgggcagctacaacatttcacaagaaactgggaatttctcctcaaacgacacctccagcgaccctctcgggggtcacaccatctggcaagtcgtcttcattgccttcttaaccggcttcctggcattggtgaccatcattggcaacatccttgtcattgtggccttcaaggtcaacaaacagctgaagacagtcaacaactacttcctcttaagcctggcctgtgcagacctgatcatcggggtcatttccatgaacctgttcactacctacatcattatgaaccgttgggcactggggaacttagcctgcgacctctggctctccattgactatgtggccagcaatgcctctgtcatgaatctgctggtcatcagctttgacaggtacttttccatcactaggccactcacctaccgagccaaaagaacaacaaaacgagctggtgtgatgattggtctggcttgggtcatctcctttgtcctatgggctcctgccatcttgttctggcaatactttgtagggaagagaactgtgcccccaggagaatgtttcattcagtttctgagtgagcccaccatcaccttcggcacggcgatcgctgccttttacatgcctgtcaccatcatgactattttatactggaggatctataaggaaactgagaagcgtaccaaagagctggctggcctacaggcctctgggacagaagcggaggcagaaaactttgtccaccccacaggcagttctcgaagctgtagcagctatgaactgcaacagcaaggtgtgaaacgatcatccaggaggaagtacggtcgctgtcacttctggttcaccaccaagagctggaagcccagtgccgagcagatggaccaagaccacagcagcagcgacagttggaacaacaacgatgctgctgcctccctggaaaactctgcttcctccgatgaagaggacattggctcagagaccagggccatctattccattgtcctcaagcttccaggccatagctccatcctcaactctaccaagctaccatcctcagataacctgcaggtgtccaacgaggacctggggactgtggatgtggagagaaatgctcacaagcttcaggcccagaagagcatgggtgatggtgacaactgtcagaaggatttcaccaagcttcccatccagttagagtctgctgtggacacaggcaagacctctgacaccaactcctcggcagacaagaccacggctactctacctctgtccttcaaggaggccacgctggctaagaggtttgctctcaagaccagaagtcagatcaccaagcggaagaggatgtcgctcatcaaggagaagaaggccgcccagacgctcagtgccatcttgctagccttcatcatcacgtggaccccctacaacatcatggtcctggtgaacaccttccgtgacagctgcatacccaaaacctattggaatctgggctactggctgtgctatatcaacagcaccgtgaaccctgtgtgctatgccctgtgcaacaaaacattcagaaccaccttcaagatgctcctcttgtgccagtgtgacaaaaggaagaggcgcaaacagcagtaccagcagagacagtcggtcatttttcacaagcgagtgccggagcaggccttgtagaaaaggggtatgttgagagcagtgaccacgcaagcgcgtcagcccacacagcctagcaggagtctggcgcaggtggggggagccatccctgatggtgataaaatgggtttttatcgacctcacgggagagaagctacctgtttactgatccattgaataactgattttggtccaatgccaattcagcaggaaagaaggagaggcataccgctaaacatgaagagatgtgttctgaaacagacttttaagtggattttgtttcctctaagagaaaaagaaattattgtctcagagcaagtatcctcagaaattggtctgcctgggtctcttaattcctatcagctctggaatcactggtgagcctcaaggcactagatgccatgtgctctccctaagggtcccaaagtgtccatccagatcccatgtgaagcacggctagcttgaaaa

SEQ ID NO: 3692 - DNA, 4360 bp, Rattus norvegicus
aagtactgctaaacctactttccagagaagatgaaactgctggcagctggaggcagggtgtgaacgcctgtgttcacacattccaattcacagccggcactggctgtggtcaaattccaggtttccccgtacctgcgtgtgtgggacacggggtgggggtcaaagagactctttcaatctggtggatctattaatagttatttttgactggctgcttcctccacccccagtttgccctgccgtaggtactgtctttgtaggtggggtggtagaaaccggtccctcaggaaagaacctggggatttgaagattcaaaaacagtctctaggagctcagtgtcttaatttttcagggtccgggtccaagggtcttggctaggttccttagggcccgcccaaggtcagaacacctggtcttccggcggacgagccagatgcgctctgtgtggaccaagaacacccaggagatgcccgcaggcaccttgaggaaggtcagctcccctgtaccgttttgtaccgcctggatgcagtggatggaagccgtaccccatgctaaaaacctggtatctcttgccatgaccccctcaacactgctgtcggcctgacaaggcaggaagcagggaaggcaggaacctcaagtgctaactggctttccagactcagtctctcgccccaggcatgtgtgtgaagcaggtctaggtatctacggtcctgggatttcgtcttcgagatcctgagcgagcgccacggggttgaccaaactgcgcagcggggtcgagacttggggaccatggggtgggccgctgggggtgtcgagggttgttgcctcggacaaagcggcggcaccaccccaaagcgcgggccaatggaatgaatgggctataaatagccgccaatgggaggccggcgacgcgccccttaagagctcagggagcagcgagcggccgtcgttcttctgcgtgcgcccggagctgcaagcacaagcagtctgcgttcctgctccgtcggaatcccggtgagcgggtcggagggtgaggggctagtcctgagggcgtacgcggttgggtgcatcacgcgcagctcgttgcccggagcgcgtccggaccgccggggaacttgggatgcgccggactcaaaagatgcagacctcgctgaccttggtgacgtccgaggaaagcttcgggggtccggattggtctgcagggtctctggagaccggtgtgtaaagctcctctgaccccgctcttccccgcagcctgccgccgccgccgccgccatgcccttctccaacagccacaacacgcagaagctgcgcttcccggccgaggatgaattccctgatctgagcagccacaacaaccatatggccaaggtgctgacccccgagctgtacgcggagctccgtgccaagtgcacgccgagcggctttacgttggacgacgccatccagactggcgtagacaatccgggtatgcacacccttgtagcgtcaggctttcgtctccccaacaagccccccgggcaaggatcccactgctcttccctgaacctcggcggggtggggtctcctggtcctctctgcgcttagccataagggcctcagtgccttgctctagcttggcgctgacgtcactgtcgccgcgccccatcctccaggccacccgtacatcatgacagtgggtgcagtggcgggcgacgaggagagttacgacgtattcaaggaccttttcgaccccatcatcgaggaccggcacggcggctaccagcccagtgatgagcacaagactgacctcaacccagacaacctgcaggtgcggggcgtcagggtccgggcgtgctggggagagggggtctcggcgctcactccggccactgcttgcatccctagggcggcgatgacctggaccccaactacgtgctgagctcgcgggtgcgcacaggccgaagcatccgcggcttctgcctcccccctcactgcagccgtggggagcgccgcgccatcgagaagctggcagtagaaggtagggtccggtatcagccaccagagctgctgcgttcttgtctgggcgcgcagcgttcccccagggtctgagggtggaagacccaactaagacagcggggacactgccgcgggcgggtggcgagctttctagctcgcccacccacccaccggctccttgaactctgtactccgcagccctgtccagcctagatggcgacctgtctggcaggtactatgcgctcaagagcatgaccgaggcggacgagcagcagctcattgacgaccacttcctcttcgacaagcctgtgtcgcctctgctgctggcctccgcgatggcccgcgactggccggatgctcgcggcatttggtacgagccctcttccctcacagtccccggaaggtggggcacggcctgaattcgtagattgtgcgttaccacactgtgcgcaggtgaccttggttctgcggatgactgaggtccctgcgccgcgggaggccgcagtctccagggattcaagggtggtgaccagtttctttggcgtctgttctccgccctcctcctgggagccggcgcttcttgttttctctcctccttctcacccccttattccgccgggattctgccaggtgccagtgacgcaaaagcctccgcacccgtccggcagggctcctacccctgcagactgcgcgggcgagcgtgcttcctctggtgggctgctctggctgctccagccccttgcgggccacgcagcacatgactggtgattgaggtgccctggtctccctgccttcgagtgttgctgggtgggcgtcttagagacagcccacactcctgcacttggaaagcgctttggaggtcacccacctagggcgtcctgctgggtgtgacctaactaaggctgtagactttgactttgtctgcccgaccccctcctccaggcacaatgacaataagacgttcctggtgtggatcaacgaggaggaccacctgcgggttatctccatgcagaaagggggcaacatgaaggaagttttcacgcgattctgcactggcctcactcaggtctggcctggtgctaaggagggagggggtcggggggatttgagtccacatttcccagggtgcttggggttccagctacattttcccttaactttcccttcaccttcagattgaaactctcttcaagtctaagaactatgagttcatgtggaaccctcacctgggctacatcctcacgtgcccatccaacctgggcactgggcttcgggcaggcgtgcacatcaagctgccccacctgggaaagcacgagaagttctcggaggtgctcaagcgactgcggcttcagaagcgaggcacaggtgaggggcagacgactcaggtgaagcagcaaacgcggctttccccagccctgctgacctgcctgtctcccatccccaggtggtgtggacaccgctgctgtgggtggagtttttgatgtctccaacgctgaccgcctgggcttctcggaggtggagctggtgcagatggtggtggacggagtgaagctactcattgagatggagcagcggcttgagcagggtcagcccattgacgacctcatgcctgcccagaagtgaagcctggccctagccaccaccaggctgccgcttcctaacttattacccgggcagtgcccgccatgcatccttgatgtttgccgcctggcgtgagcccttagcctcgctgtagagacttctgtcgccctgggtagagtttattttttctgatggctaagctgttgcagacactgaaataaattagggtttggcctgccctatgtctgagtgttgcttctcctttcttagagacagtcgtgtgtgtgtgtgtgtgtgtgtgtgtgtgtgtgtgtgtgtgtgtgtgtgtgtccatccgtccttcctggcctgtcacttcacctagcagatgaaacatgagtcttaagatacagggcagagggagggagacttgagtgcagcctgaacatctaaggacatttgtacttgcagggtggagcctagtatttccttagctccagccagctaaagggagtcagcaacttgacatcttccccagtttctttctgccgcattcctggcagcctgaatatctaaagttctatctcttcacttccttcccctccaggcttcaacacttactccagttcttaaataattctctccctacttcctccagcttccaaccccaggttgagtgcctcctcctgatccctcagcccagctctccagccccatccagacaagagcttttcagaaccacccgtccctctctcttgcagcttcctctctggggccctcctccttgggaggagacaagctt

SEQ ID NO: 3693 - DNA, 668 bp, Rattus norvegicus
aggatctgaaaacggtgactccacccaaggtctccttgtttgagccatcagaagcagagattgcagacaaacaaaaggctaccctcgtgtgcttggccaggggcaacaaccctgaccatgtggagctgagctggtgggtgaatggaggagatccgcatggggtcagcacagaccctcaggcctacaaggaaagcaacaatatcacctactgcctgagcagccgcctgagggtttctgctaccttctggcacaatcctcgcaaccacttccgctgccaagtgcagttctatgggcttacagaggaagacaactggtcagaggactcacccaaacctgtcacacagaacatcagtgcggaggcctggggccgagcagattgtgggattacctcagcatcctatcaacaaggggtcctgtctgccaccatcctctatgagatcctactggggaaggccaccctgtatgctgtgctagtcagtgccctggtgctgatggccatggtcaagaaaaaaaattcctgagacaaactttatgcatcctgagctgttctttaccctggccatggattttcccgcaccttctccaatccctgttcctaaggacttgtctcctctccctccatggaaatctaccattcctcattaaccccttgactatgaaacagactg

SEQ ID NO: 3694 - DNA, 1758 bp, Rattus norvegicus
agaccttatacatagtctgattagaccaggatcatggatactagtgtccttctcctccttgctgtcctcctcagcttcttgctattcctggtcagaggccatgcaaaagttcatggtcatcttccaccaggaccccgtcccttacccctcttgggaaacctcttgcagatggacagaggaggctttcgtaagtctttcattcagcttcaagaaaaacacggagatgtgttcacagtatactttggacctaggcctgtggtcatgctgtgtgggacacagaccataagggaggctctggtggaccatgctgaggctttctctggccggggaataattgctgtgcttcagccaattatgcaggaatacggtgtgtcctttgttaatgaagaaaggtggaagatccttcggcgattatttgtagccaccatgagagactttgggataggaaagcagagtgtggaggatcagataaaggaggaggccaaatgtttagtggaggaactgaagaatcatcagggagtctccctggacccaacgttcctcttccagtgcgtcacaggcaacataatctgctccattgtctttggagagcgctttgactacagagaccgccagttcctgcgcttgctcgacctgttgtataggaccttttccctcataagctcattctccagccagatgtttgaggtctactctgacttcctgaagtactttcctggtgtccacagagaaatctacaaaaacctgaaggaagtcctcgactacattgatcatagtgtggagaaccacagggccactttggaccccaatgctccccgagactttatcgatactttccttctgcacatggagaaggagaagttgaaccactacacggagttccatcattggaacctaatgatatctgtgctctttcttttccttgctggcactgagtctacaagcaacactctctgctatggattcctgctcatgctcaagtaccctcatgttgcagagaaagtccaaaaggagattgatcaggtgatcggctcacagcgggtcccaacccttgatgaccgctccaaaatgccatacactgaggcagtcatccatgagattcagagattttctgatgtttctccaatgggtttgccatgcagaatcaccaaagacacattgttccgagggtacctgctccccaagaacactgaggtgtacttcatcctgagttcagctctccatgacccacagtactttgaacaaccagacaccttcaatcctgagcacttcctggatgccaatggggcactgaagaaatgtgaagctttcatgcccttctccataggaaagcgtatgtgtcttggagaaggcattgcccgaagtgaattgttccttttcttcactaccatcctccagaactactcagtgtccagccctgtggatcctaacaccattgatatgactcccaaggagagtggattagccaaagtagccccagtgtacaagatttgctttgtagcccgctgattgtgctgaggcagtcagccgactcacttctgttcaaaatggccccatttttctgattctgggagacctgctggagaccaggcccaaggttgctgagtcattcctcacttcttcccaacagcctcagtccccatttatcaggtctccatgctctgtgatctatgctattggactatgtataaggtctgaattctatgtctacaggtttgcctagtatgtatggttcatgtaaacaggatcatatagtgc

SEQ ID NO: 3695 - DNA, 1780 bp, Rattus norvegicus
tctcttgctgtttgcccaatttggggacacccatcctcaccaccagtggtggacaccacaaaaggcaaagtcctggggaagtatgtcagcttagaaggatttacacagcctgtggccgtcttcctgggagtcccttttgccaagcctcctcttggatctctgaggtttgctccaccagagcctgcagagccctggagcttcgtgaagaacaccaccacctacccgcctatgtgctcccaagatggagttgtgggaaagttactcgcagatatgttgagcaccggaaaagagagtatacctctcgagttttccgaagactgtctctacctgaatatttacagtcctgctgacttgacaaaaaacagccgattgcccgtgatggtgtggatccatggaggtggactaataataggcggagcatcaccctatagtggactagctctctctgcccacgaaaacgtggtggtggtaaccattcaataccgcctgggatttgggggattgtttagcaccggtgatgaacacagccgggggaactgggctcacttggaccagctggctgcactacgctgggtccaggataacattgcaaactttggagggaacccggattcagtgaccatctttggagagtcagcaggaggtgtcagtgtctctgctcttgtcttatctcctctggccaagaacctcttccacagagccatttctgagagtggtgtggtcctcactacaaacctggacaagaagaatactcaggctgtggctcaaatgattgctactctttctgggtgtaataacacctcatcagccgccatggttcagtgcttgcgccagaagacagaggctgagctcttggagcttacagtgaaactggacaatacctccatgtccactgtgattgatggagtggtactgccaaagacaccggaagagatcctgactgagaagagtttcaacacggtcccctacatagtgggcttcaacaagcaagagtttggctggatcattccaacgatgatgggaaatctactctctgaaggcagaatgaatgagaaaatggccagttctttcttgaagaggttcagccctaaccttaacatctctgagagtgtgattccagcaatcattgagaagtacttaagaggaacagatgaccctgccaaaaagaaggaacttctcctggacatgttttcagatgtctttttcggtatcccagctgtactcatgtcccgtagcctcagagatgccggagcgcccacctacatgtatgagtttcagtatcgcccaagcttcgtgtctgaccagagaccccagacagttcagggagaccatggtgatgaaatcttctctgtatttgggactccatttttaaaagagggcgcctcagaagaggagaccaatcttagcaagttggtgatgaagttctgggccaactttgctcgaaatgggaacccaaatggagaggggctgcctcactggccaaaatatgatcagaaggaagggtatttgcagattggtgccaccacccagcaagcccagaaactgaaaggagaagaagtggctttctggactgagctcttggctaagaatccacctcagacagaacacactgaacacacataaatgggtctctgccagcctcagtaccagaggagcaaagatggggctattccacaaaggatggctatttgccaaagatgaatcttacagaggaaactgcacaattgtacagttggggtatttgtatctcaactttgaaataaatttccttttagaaagc

SEQ ID NO: 3696 - DNA, 6182 bp, Rattus norvegicus
gccatatccttggcactaggttaggccctctgtgggggcagggcttatgagcaagcccacaccaggacagattctcagttcctggaaccactttcttgcctagggcctttccctgaacatcccagatgagcacctggaaaggaaaggaggccttggttccttcaggtggcgtttccagccagccacaggggagctgggcctgggagacagaagtgacagtgtgccttggagcgtgtcccttagtcctgcaggctcaaaatgcagagtcagtgagtgtacacttcctacaggctcaagaatggcataacctgtctgtccagctgcccttcctccctggcagggggttgggatagggcccagggctacatacagctgtggcctagagtgtgcagggagccatctgaaaggggccagttgggcagaagcatttctttttcctgtaccttcctgctctgtgcccaaagccagctgtcatccttggccatcttccccagagagtcttgaacaacttaggaagagagccgaggaggacactgaacctatacaaagaagagagctggctggagaacacagtagtttgcagcagagccaagttctggcatctgtggtgaggtggccacacctacccaggctcttctccctgcaggtaattgaggagttctacaatcaaacatggaaccaccgctatggagagtccatcccatccaccacactcaccacactctggtctctctccgtggccatcttctctgtcgggggcatgattggttccttctctgtgggcctctttgttaatcgctttggcaggtaagcaggaaagacgccagcccatgtcgttctgcatgggagctctggggaagctggtaatagaaacatccctgactattggcctcatccctggggagccctgggggttcccttgggagctggctaacctgcgacccattcccaggcggaactccatgctgatgatgaacctgttggcctttgtgtctgccgtgcttatgggtttctccaaactgggcaagtcctttgagatgctgatcctgggccgcttcatcattggagtgtactgtggcctgaccaccggctttgtgcccatgtatgtgggggaggtgtcacccacagctcttcgtggagccctgggcaccctgcaccagctgggcatcgtcgttgggatccttattgcccaggtaagccagtctgggtctacctgaccagcactgcctctggcacagctttgtccctcgggtcacagtcgagcagagcttttctacccaaccctgcctaggacagcctcacggtaggcagatcccagagcacacaggagccccaggcccacccgcctacagctagagcccttggccttcatttgggcttccaggcctagaagccttcatgggtagggtattcctcttctagaggtccctccacccaccctttagtcctacagccagagtagcaacccccacatgtgtgcagacacatttatacgtggctttatcccttgtctttttttttttttttttttttttagatttattcatttattatatataaacacactgtagctgtcttcagacacaccagaagagggcatcagatctctttacagatggttgagagccaccatgtggttgctgggaattgaactcaggacctctggaagagcagtcgggtctcttaactgctgagccatctctccagcccttcccttgtcttgtataatttgagctggttttgcagattcgagaatggggtcagagaggtccttcctctcgccagcagctggtgggcagggaaggcccgcttggtggctgggtggatgctggagtagggccagggtcagggcactcacagtcctagttcttgtccaggtgttcggcttagactccatcatgggcaatgcagacttgtggcctctactgctcagtgtcatcttcatcccagccctgctacagtgtatcctgttgcccttctgccctgagagcccccgcttcctgctcatcaatcgtaacgaggagaaccgggccaagagtggtacgggctggccctgccctcctccctgcccccctgagctcaggcctttccccactctgagacaccccaccttccctccggtcccaccagtgctgaaaaagcttcgagggacagccgatgtgacccgagacctgcaggagatgaaagaagagggtcggcagatgatgcgggagaagaaggtcaccatcttggagctgttccgctcacccgcctaccgccagcccatcctcatcgccgtggtgctgcagctgtcccagcagctgtcgggcatcaatgctgtgagtgtcccacctaccccttcctgtggccccagccaagtccaggctccagtgtgcaccgtgactgaggcccaaggaaaattattttagtctgcccacgggtacacaacctgcagcagttatttacctgcctgggtactgctcatccccctccacatacatacacatacccacttattcattcaccttgggtcccacacccactggtaactagcacagcggaaggagaaggccataaacatggtggctctgtctccaacgatctccctttctggcaggtgttctactactcaacgagcatcttcgagaaggcaggtgtgcagcagcctgtgtatgccaccatcggctcgggtatcgtcaacacggccttcactgtggtgtcggtaagtcgtgcttttggtcagcagccaggatccggtccggttcagggcatcaggacacaatggcagcctgttgtgggagctagactaaatgtcagtaaacttgtgaggctcattactcatacctttcagctgactcagatgcccagggaggtgagaaggcaagtgctctcccaaggtcacagccagtatacattagttctctgatctccagtacctgtcaccccgtaccctgggctcagaaggcatattccttccctcggtccctacaagccccaagctagagcttggtggggaaaggtgttcccctactagtgtgtgtgttgccttaaatttagctactgaggtgggcctctgaaggggcaccagacagagagagcatgcctttctcctttccacagctgttcgtcgtggagcgagctggccgtcggaccctgcacctcattggtctggctggcatggcgggctgtgctgtgctcatgaccatcgccctggccctgctggtgagtgctggggacctggatttagacacaacgggcatgttcaaggtgccgtgactgcagatttcacctggatttagatcccaaaattgcccacattgcacccagcctaggttgtccatacagtgtgtctctggcctgggatctgaccctcgggttgtctcctcccatcttgatcttcctcttccctgcctggggacttgggacatcctgcacatgtagacccaaactttcatctccatgtgatagtgccttgcctaaagctgaaccttgtagagtctttacctctatagcctcaattcatctccagagcaaccctcagccatataatggtcccctcagtaccacagcggtgcacaaacacacctgcctccattctccaaaccaggaactgagcttctctgaaggactaccctttgtgaatatttgcatatattcaatgagttacttagatctgaaagtagaattcatttgtttcatatgtgccttctacacacaggctggtggcagatttaaatggtatttttatcatatctatattttgactaacatcaaacatggtcaggtggaattttcccttctggaaccatgtgaccagctcaaaaagcttcagattttgaagcattttgcatttctggtttttcagattagagatgtttaccttgcatttcccattttacttaaagtcccgtgttggataaggaatgaagctaagaattgaccttaggtcagctggtccctagtctgtcactaaacactaaccactatgacaacacacacacacacacacacacacacacacacacacacacaccctcctgagtctcacccaacaaggaaaagcaccatggagtccaagagcactaaaggacaggcatggactagacagacccctgtgagaccgagaccctgcatagggtacctgggtgtgtctgttgcttttctaattgctgtaataagacaccatgcaatttataaaaacaatttgacctggggactcatggtcatgagtccacagccatgatgctagagagctcgcagcaggaaggcaggcctgctgctggggtccttactgaggatgacacacctccagcaaggccacatcccctgtccttcccaaacattccaacgtgagcctatccaagtcaccccaggcctgcccctctgcagcttctcttcctcctgagaagctgtcacatcccacctaacctcacccattctccctcaacaggagcagctgccctggatgtcctatctgagtatcgtggccatctttggctttgtggccttctttgaagtaggccctggtcctattccatggttcattgtggccgagctgttcagccaggggccccgacctgctgctgttgctgtggctggcttctctaactggacctcaaacttcatcgtgggcatgtgcttccaatatgtggaggtgagccacatcaccactgtcctccatcactcaactccatggagggagctagcgcgctatgtgatgtactggcccgagtcatatgacagatagcccagaagcccaggtcacctggcagggccgcccggtccaggctctccctccccttggttcagttttcccagcacttctgggtggctggtagcagttcccttcttcagaccaaaggttcagggtccttttagccaggctggcgggtgacgtgcgtgtgtgtgtgtgtgtgttttttttccagcaactgtgtggcccctacgtcttcatcatcttcacggtgctgctggtactcttcttcatcttcacctacttcaaagttcctgagaccaaaggccggaccttcgatgagatcgcttccggcttccggcaggggggtgccagccagagcgacaagacacctgaggagctcttccaccctctgggggctgactcccaagtgtgaggagcccacagccagtcccgcctgctcccagcagccccgaggatctctctggagcacaggcagctagatgagacctcttccaaactgacagatctcgggcgagccgggcctgggcacctttcttcagtcagcaatgaagtccagaagaatattcaggactttgatggctccagaatttttaatgaaagcaagactgttgctcagatctattcagataagcagcagattttataatttttttattactgattttgttattatttttttttttatcagccactctcctatctccacactgtagtcttcaccttgattggcctagtgcctgagggtggagaccacgccctgtccagacacatgccttctttgccaagctaatctgtagggctggacctttggccaaggacacactaatactgaacaatgagctaggaggctttaccgcaggaggcggtagctgccacccacttctgcaggcctggatctcgacaccataggggtccaggctccatttaggattcgcccattcctgtctcttccaactcaaccaaccactcgattaatctttccttgcctgagaccagttgaaagcactggagtgcagggaggagagggaagggccaggctgggctgccaggttcaggtctcctgtgcactgagggccagacaaacaccatgagaaggacctcggaggctgagaacttactgctgaagacacggacactcctgccctgctgtgtatagatggaagatatttatatattttttggttgtctattaaatacagacactaagttatagtatatatctggacaaacccacttgtaaatacaccaacaaactcctgtaactttacctaagcagatataaatggctggtttttagaaacttggtttcaaaatgcttgtggattggggccaggcaggtttggatggaagtgagaagggcagcatggctatgaccatgcagtggctggggatctcaaatctgtatgacctctgtcccagaggaaaactcaagtcagtatttcatcacactgctttcagactgatagctaaccaggacatcaagctt

SEQ ID NO: 3697 - DNA, 1316 bp, Rattus norvegicus
ctgcagctttactgagagatactcataattcgatggatttggaatgtgcttgcagctagacagcttccttgatttttaaaaacataaggtgacatcaaattagcttcttttctttttttaatggccagctttttctttggctgacaccagcagcaaaagtgcaagaaatttgctgctgtaagagtcaggtcttctgttttagactcttttgtgcttcatcgtttttagccatggtgactttgagtgggtaacgggattgttaaatggctcaaaaggaagactgcatggggaaatgattagcacagctcctggcttgataaacgttggtactcccagtctcctctcgttctggttcatccatccccggaaaggaacctacgcctaggaaaactcctgctgatgtttctggcagagatataggacagagccttagtccagaggatcctggctccctggggtcctgggagcacctgtctggtgttctatctccctcccccagagccattattctggtggggccatggggcgggtccggccatggaccgggcgggcacagaacaggtgggtgcaggctgggtgtccggcgctgggacacaagtgctctgtgtgtagggtgggcggaagtcagggcgtttgatctgaattctaaagggtgttgttcacgcgccccacaaaggtcccattgtacagacactgggtataaagcagcatatgactctccagcaccgggaggcgatgaattgggacgcaggcgcgaccacagggaccactccccctacacagacatgagaccataggggagctgtctgggtggcctcaaggataggcgctcccccgaggtaaccgggctatctgggtttgccataagtcaggtgcaaaggagctgggggtcggggggaggacgccagaagagtgggctaatcagcagaacaagttaggcctggggaagaaagggactcaagaggaatgaatgctggatgtatgtgaagaaaggggatggggctcagagagaggtcaagtcaagcaaaggaagaaaggctggcgccaagagggaaacgcaatggccatccttgcttgctctagtcagcagctcttagaggagatgggggcagggggaggcagcattaccatgcctagcttcctgccctaacctgacagcttgcttcctgcctcttgtttcccaggtgtgaatgaggcaggatgaactggacaggtctatacaccttgctcagtggcgtgaatcggcattctacagccattggccgagtatggctgtccgtcatctttatcttcagaatcatggtgctggtggtggc

SEQ ID NO: 3698 - DNA, 1382 bp, Rattus norvegicus
ggcggtgtatttgcccttctccagactcctggatcacaaaacgccagcatccaggcaaaagggaggaggaggaaaaagacattgaagctgaagagaggggagacttgggagaagggggagcctggagactccacaaacgacagcaccccggccgacgtgccaaccaggacaagtattcatgggcagatgaggaggacagtgactggatgccacggtcctggttaccagatttctttctggattcctggttctcagatgtcccccaagtcaagcggcagcaccctggcaggcgatccttcccctggatggagtctgatgtcaccaagaggcaacatccaggccggaggttcatagatcccgagctccaaagaagctgggaagaaaaagagggagagggtgtcttaatgcctgagaaacgccagcatcctggcaaaagggcattgggtcatccctgtgggccccaggggacttgtggtcaaacaggcctgctccagcttctaggtgacctgagcaggggtcaggagaccctggtgaagcaaagcccacaagtggaaccctgggacaaggaacctctggaggagtaaggccagagtcaggctttaggtctaggatgatgtaagccctgtattccctatcctgttcccttcactagctgtcctctcttagatgctaaccctgggccctctgtacataacgtccacccaaaccccttccttaccgacttcagagactttagaaagccagtcaggaagttaaaaccctacttatcccttcaagcaagggggtggggagtcacaccccttcagcactggccaagatggttctttcacaccttctaagggacctcctcagaaaggaagggtagaattgaaatgttttggtgttaaaacttctgtaatctgccccatgtggtaagactgacctggtatagcttcagcgcatcctccaaggttggggtccctgagcagtttgggagatgtttagatatgtccttggggtggggggtcgcatcttgtatataaccctgctttgttaatctcaatgacaataaaatatatccaggtcacctgttgctctgctcttctgtgtagattgaggtttttctttgggggtttattggggtgactcccagccacaagctcttcccaaaggacattaaaagagctccctcttacatgaggaaatcgggaccctcttaccattcccattctcagaaacaatgttactgtggctaagggtctgactctgtagtctttgattggctgggtgtagtgggtggagattaagaaactaaagaatacagctatggagccttgaatctaccaagatttgggggtggggagggaaatgcaggaagggtggtcctgtaatagtaccaagaa

SEQ ID NO: 3699 - DNA, 408 bp, Rattus norvegicus
actttgttgctgaagtaacccagactccaagatacctgatcaaagagaaaggacagagagtaaatatgagctgtagtcctgaaaaggcgcatactgccttttactggtatcaacagaaccagaaaaaagaacttacatttttgattaattttcgaaaggtagacattattgaccaaacagacttggtcaagaagagattctcagctcagtgtgtcccagacttacactgcaccctggagatcccatcctctgaagaaggagactcagcattgtacttctgtgccagcagtctgaccgggaccaacaatgaaagattgtttttcggccatggaaccaagctgtctgtcctggaggatctgaaaacggtgactccacccaaggtctccttgtttgagccatcagaagcag

SEQ ID NO: 3700 - DNA, 412 bp, Rattus norvegicus
cttggatgttagtgctcagactatccatcaatggccagctgtcaaggtccaggctgtgggcagtccactctctctgcagtgcaccgtaaaggggacatcaaaccccaacctttactggtactggcaggctccaggagggacccttcagcaactcttctactcttttaatgttggccagtcagaattggtggtgcagcggaacctctcagcttccaggcccaagagtgaacagttcatcctgagcactgagaagttactcctcactcactctggcttctacctctgtgcctggagtccaggacagggctcatatgagcagtatttcggtcccggcaccaagctcacggttttagaggatctgaaaacggtgactccacccaaggtctccttgtttgagccatcagaagcagag

SEQ ID NO: 3701 - DNA, 787 bp, Rattus norvegicus
gagagagaaaccagagagtgagccgagacagcaaacatcagatcgtgccccgacccacgccagcatgggctccttctccatcaccaagggcttcttcctcttcctggccttttggctcccaggccatattggagcaaatcccgtatacagtgcggtgtccaacacagatctgatggatttcaagaacctgctagaccacctggaggagaagatgccggragaagatgaggtcatgcctccgcaggccctgagcgagcagaccgatgaagcgggggcggcacttagctccctctctgaggtgcctccctggactggggaagrcaacccgtctcagagagatggaggtgctctcgggcgcggcccctgggacccctccgatagatctgccctcttgaaaagcaaactgagggctctgctcgctggccctcggagcctgcgaagatcaagctgcttcgggggtaggattgacaggattggagcccagagcggactaggctgcaacagcttccggtaccgaagataacagccaaatctgctcgagcagatcgcaaaagatcccaagcccttgcggtgtgtcacacagcttggtcgcattgccactgagaggtggtgaataccctcctggagctgcagcttcctgtcttcatctatcacgatcgatgttaagtgtagatgagtggtttagtgaggccttacctctcccactctgcatattaaggtagatcctcacccctttcagaaagcagttggaaaaaaataaatccgaataaacttcagcaccacggac

SEQ ID NO: 3702 - DNA, 3352 bp, Rattus norvegicus
gggctatgtctcgtccctttggagtagcattgttgtttggaggagttgatgagaaagggcccaactgtttcacatggacccatctgggaccttcgtacagtgtgatgctcgagcaattggttctgcgtacgagggtgccagagctcttgcaggaagtttaccacaagtctatgactctgaaggaggccatcaagtcttcactcatcatcctcaagcaagtcatggaggagaagctgaacgcaactaacatcgagctggccacagtgcagcctggtcagaatttccacatgttcacaaaggaagaactggaggaggtgatcaaggacatttaaggaggggccatcctcgaacttctgtgggacagtttcagttctaatggctcttagactttatttccaactccacgtcgtgaaaatatccagtatatgtatgtgtgtttttttatgatgtctgtacataacagcaattctgaaataaaaaaaatttacaaaaaaaaaaaaaaaaaaaaaaaaaaaaaaaaaaaaaagcaccgcggacagcgccggccgcgccgcgcccagctcagcctgctcagccctctcgtcccgaggttcgcgctcagcgctctctctaactagccgctgcaccatggcagaatcccacctgcagtcatctctgatcacagcctcacagttttttgagatctggcttcatttcgacgctgatggaagtggttacctggaaggaaaggagctgcagaacttgatccaggagcttctgcaggcacgaaagaaggctggattggagctatcacctgagatgaaaacctttgtggatcaatatgggcagagagatgatgggaaaataggaattgtagagttggcccatgtcttacccaccgaagagaatttcctgctgctctttcgatgccagcaactgaagtcctgcgaggaattcatgaagacttggagaaagtatgacactgaccacagtggcttcatagaaacggaggaacttaagaactttcttaaggacctgctagagaaagcaaacaagaccgtgcatgatacgaaacttgctgagtacacagacctcatgctgaagctgttcgactcaaataatgatgggaagctggagctgacagagatggccaggttactaccagtgcaggaaaatttccttcttaaattccagggaatcaaaatgtgtgggaaagagttcaataaggcttttgagttatatgatcaggatggcaacggatacatagatgaaaatgagctggatgccttactgaaagacctgtgtgagaaaaacaaacaggaattggatattaacaatatttctacatacaagaagaacataatggccttgtcggatggagggaagctgtaccgaacagatcttgcccttattctctctgctggggacaactagagttggtggccacaaccacttgctagtgatacattgtatctaaaaccataactgtgcgctataaaggagtaggctgtattttcttttatatctgtaaattctactgcatatagagaattatccaggatgtgtggcacattcttttctgcttgtttctatactgtttgtaatgtacagtttttgtaagcatataattgaaaagaagaaagtctatgcttaggccagtcagtataatccattttcaaagatgaatctaacatgattctgctttcataaatacagatgaacacttggatttccctaaaactctaccatctcaacaattctagtgtcagatgtgtaaatgcagctgtcagtgagtaaaagaataattcatgacaagccaagtgttttttaatttaggcaatcatagaactgtcccacaaagcacttctgtgcgtttccatctagtggaagggatgtgcttctgcttgtgaagcaccaaatatcaatagttaactatggctttatcataaaacgatctccctagagatttaatttactgatcagtggcatgtctactgcttgaatagataccacactgttggttcaagctggcttggtggcaagggaaggtagccagatgacacataaatctgtctgatactatgcctatatttccaagaagtctattgcagagagtatgaccttagcccattttctaaattattttcatgtgttccagatgacaattattctagtaaactgctgttttgtgtcatattctgtgtgtactctctgattaaattcaatgtactgagtaaaaaaaaaaaacggggctgcggcattgcgcccagcagcggactccgagatccatagacctcggcgaacccttgctctcgaccacccacccactttcggaaccatggccgcagtggcagcagcctcggcagaactgctcatcatcggctggtacatcttccgcgtgctgcagaagcctggcgcacacggtgtcccggaccggcggcaggtgctgggggagcgcaggcaccgagcccccaactgaggccccatctcccagccctgggcggccgtgtcatcaggtgctcctgtgcttctcgaccagcatgggagccaatgccgcgcaggaatggggggtcccctgtgctccctcgtcagagagcacttgccaaggtcagtgaggggccggtagtccagaaaagcagcaccggaccaatgatgaagacatccagttcctttcccagccccccccccctttgcccctgtcccatggccggcgggtgggagaggatgggggaagaggggagcaaccctcgagatatgggcgtaggcaccacattctgatctggaccaagttggaacagcagccatctcagccgcacaagatcctaccatggagagctaacacccccaccaaccagcagaatggacattctgacatcaccagctgaaaccctgaatctcggtggcagaagagaaagtgtcaactgcgtgcagcactgggggagtggagggtgtgggtggtggaggaagagggttaagaaaactagtggggccctcttgctgtccctgtcctatggcacgcatattcctgccttgctccctcactccccctctcccctgccttccaaagccccaccccccaaaaatgtgtcacttgattcggacctattcaaccagtaattggatcccacctttaccaaaacaccgtctctgacccccggcccttcactgatcttgcttatccctggtctcacgcagcagttgtggttgctattgtggtagtcgctaattgtactagtttacgtgtgcattagttgtgtctccccggctagattgtaagctcctggagacagggaccacctccacaaaaaataaaaaaacggacctctcctgtcttgtagtgtcctaggaccctgcagggcagtgggggtgcacc

SEQ ID NO: 3703 - DNA, 783 bp, Rattus norvegicus
gaacagttcttgcgctatgaagtcctgtatgctcatctttttcctggccctactgtgtgcagaaagagctcagggcctaaagtgctacagttgcatagaagtcccacttaatgctaactgctcaacagctacctgcccctactctgatggagtgtgtgtttctcaggtgttagaagctgtagagggctctgtaagacggacagcaaagagcaatctctgccttccaatctgccccaagtttcctcaaagaaccgagatcctgggtaccgttgtctacacgaaggtttcctgttgcaatacagatctttgcaatgcagcaggtcccactggaggcagcacctggaccgtggcaggggtgcttctgttcagcctgggctcagtcctcctggagaccttgctgtgatggcccctccaaggccccgccacccttgtccttttagcctcatgtgtaatcactcctctgaagccctctagtgataaattctgagtaatagaaactcccaggtgggggtagggtgtggaacaccttgattcaactctatagcccctgctgggtaggtgccccactcccctctctaggactttcagatctgtacttcctggaatgccattgtgttgtggtttgctgctcttggccctggaggcacatggacagcacagggaagaggcagaaacccaaggcactgtgacaccacccccatccatacataaaaatctggggttctgcagggttcccacacatgcctctcaaggttcccctattttagtccaataaactctctg

SEQ ID NO: 3704 - DNA, 1819 bp, Rattus norvegicus
actgtgaacagtaaggattttgatttttaagatgcctgggaagtggatttctgctcttctcctgctacagataagttgctgtttccaatctgggaactgtgggaaggtgttggtgtggccgatggaattcagccactggatgaatataaaaacaatactggatgaacttgtacagaggggccatgaagtcactgttctgaaaccttcggcttactatgttcttgatccgaaaaaatcgccagatcttaagtttgaaactttccctacatctgtcagtaaagatgaactggaaaattatttcataaagcttgtggatgtgtggacttatgagttgcaaagagatacatgtttgtcttattctcctttactacaaaatatgatagatggattttctgattactatctaagtctttgtaaagacaccgtttcaaacaagcagctcatggcaaaactacaggaatccaagtttgatgttcttttgtcagatcctgtggctgcctgtggggagctgatagccgaagtgctccacattccttttctgtacagtcttcgcttctctccaggctacaaaattgaaaagtccagtggaagatttatattacctccatcttatgtaccagtaattttgtcaggaatgggtggcccaatgacattcatagacagggtaaaaaatatgatatgtacgctttattttgacttttggttccatatgtttaatgccaagaaatgggatccattttacagtgagattttgggaaggcccaccaccttagctgagacaatgggcaaagcagaaatgtggctcattagatcctactgggatttggaatttccccacccaacattaccaaatgttgactatattggaggactccaatgcagacctcctaaacccttgcccaaggatatggaagattttgtccagagctctggagagcatggcgtggtggtgttttctctggggtcaatggtcagcagcatgacagaagaaaaggccaatgcaattgcatgggcccttgcccagattccacaaaaggttctttggaaatttgatggcaaaaccccagcaaccttaggacccaataccagagtctacaagtggcttccccagaatgacctccttggtcatccaaaaaccaaagcctttgtaactcatagtggagccaatggtgtctatgaggccatctatcatggaatccctatggttggcattcctatgtttggagaacaacatgataacattgcccacatggtggccaaaggagcagctgttacactgaatatcaggacaatgtcaaagtcagatttgttcaatgcactaaaggaaataataaacaatccattctataaaaaaaatgctgtgtggttgtcaaccattcaccatgaccaacctatgaagcccctggacaaggctgtcttctggattgagtttgtcatgcgccacaaaggggccaagcacctgaggccacttggacatgaccttccctggtaccagtaccactctctggatgtgattggattcctgctcacctgttcggcagtcattgcagtccttactgtaaaatgcttcttgtttatttaccgactctttgtgaagaaggaaaagaaaatgaagaatgagtagagctcatttacaatgcactacaggaatgaaatttcagcctcattctaatttatgaatcaccttcttaacacttcctgattatttttttgtcaaggcagatcatctttgtaagaagacatataactccgtaaatactgatatgttatcaaaaattccatcattcataaattttaatagcacttaatataaaaatat

SEQ ID NO: 3705 - DNA, 630 bp, Rattus norvegicus
aaccatgaactttctgctctcttgggtgcactggaccctggctttactgctgtacctccaccatgccaagtggtcccaggctgcacccacgacagaaggggagcagaaagcccatgaagtggtgaagttcatggacgtctaccagcgcagctattgccgtccgattgagaccctggtggacatcttccaggagtaccccgatgagatagagtatatcttcaagccgtcctgtgtgcccctaatgcggtgtgcgggctgctgcaatgatgaagccctggagtgcgtgcccacgtcggagagcaacgtcactatgcagatcatgcggatcaaacctcaccaaagccagcacataggagagatgagcttcctgcagcatagcagatgtgaatgcagaccaaagaaagatagaacaaagccagaaaatcactgtgagccttgttcagagcggagaaagcatttgtttgtccaagatccgcagacgtgtaaatgttcctgcaaaaacacagactcgcgttgcaaggcgaggcagcttgagttaaacgaacgtacttgcagatgtgacaagccaaggcggtgagccaggctgcaggaaggagcctcctcagggtttcgggaactagacctctcacc

SEQ ID NO: 3706 - DNA, 542 bp, Rattus norvegicus
aacagtaatgacagagagggctggagagatggctcagtggttaagagcacccgactgctcttccaaaggtcctgagttcaattccagcaaccacatggtggctcacaaccatctgtaaagagatccgatgccctcttctggtgtgtctgaagacagctacagtgtacttatataataaacaaataaatctttaaaaaaaaaaacaaaaacggggctggagagatggctcagcggttaagagcgcccgactgctcttccagaggtcatgagttcaattccagcaaccacatggtggctcacaaccatctgtaaagagatctgatgccctcttctggtgtatctgaagacagctacagtgtacttatatataataaataaataaatctttaaaaaaaaaacaaaacaggggctggggatttagctcagtggtagagcgcttacctaggaagcgcaaggccctgggttcggtccccagctccgaaaaaaagaaccaaaaaaaaaaaaaaaaaccaaaacaaaaacaaaacagtaatgacagagag

SEQ ID NO: 3707 - DNA, 1144 bp, Rattus norvegicus
aacccttctctgtctcctgcaggtgccacctgtgaggatcaggcagctgctggagggcttgcccaggagcctgaggaaggtctcttcacttatgtattccggccatcccaacacatacgcagccaccaggtgacttcagcccagctgtggttccacacggggctcgacaggaagagcacagcagcctccaatagctctaggcccctgctagatcttctggtgctgtcatctggggggcccatggctgtgcctgtgtccttgggacagagccccccacgctgggctgtcctgcacctggcggcctccgctttccctctgttgacccaccccatcctcgtgttgctgctgcggtgcccactctgttcttgctcaggccggcctgagaccactcctttcctggtggcccacactagggctcgagcccccagtgcgggggagagggctcgacgttcagctccctcgatgccttggccttggtctcctgcagccttgcgtttgctgcagaggcctccagaggaaccctctgcccatgccttctgccatcgagctgccctcaacatctccttccaggagctgggctgggaccgctggatcgtacaccctcccagcttcattttccactactgccatggtagctgcgggatgcccacatctgatctgcccctgccagtccctggggctccccctaccccggctcagcccctgtttttggtgccaggggccaagccctgctgtgcagctctaccagggagcatgaggtccctacgcgtccgaaccacctcagatggaggctactctttcaagtatgagatggtaccgaacctcattacacaacactgtgcttgtatctaaaagcacctcgtctcctcctcccacagccactggccaccatcacctcaccatcccacggtcggtcggtcggtcggtcatcagctaggaggaaggtggggtgtggaaagtagacagtttccacttccttttcccttcatctttctgtctgaggcttccacaccccactccacccaggtcctgtggataacaataaagaaggaagtgtgtatgactttgtatcgattccagactgctgactttgataaggggttggggaggtctggggtcagagagaattgcattgtgggatttt

SEQ ID NO: 3708 - DNA, 1858 bp, Rattus norvegicus
agaaaggaacacagtgtgaacagaaggattttgattttcaaaatgccaggaaaatggatttttgctctgctcttgctgcagataagtttctgcctcagatctgcgaaatgtgggaaggtgttggtgtggccgatggaattcagtcactggatgaatataaaaacaatactggatgaacttgtacagaggggccatgaagtcactgttctgaaaccttcagcttactatgttcttgatccaaaaaaatcgccagaccttaagtttgaaacttttcctacatctgtcagtaaagatgaactggaaaaatatttcataaaacttgctgatgcgtggacttatgagttgcaaagagatacatgtttgtctttttctcctttactacaaaatatgatggatgaattttctgattattatctaagtgtttgtaaagacgccgtttcaaacaagcagctcatggcaaaactacaggaatccaagtttgatgttcttttgtcagatcctgtggctgcctgtggggagctgatagccgaagtgctccacattccttttctgtacagtcttcgtgcctctccaggccataaaattgaaaagtccagtggaagatttatactacctccctcttatgtgcctgtaattttgtcaggattgggtggccaaatgacattcatagacagggttaaaaatatgatatgtatgctttattttgacttttggttccatatgtttaatgccaagaattgggatccattttatactgagattttgggaaggcccaccaccttagctgagacaatgggcaaagcagaaatgtggctcattagatcctactgggatttggagtttccccacccaacattaccaaatgttgactacattggaggactccaatgcaaacctgctaaacccttgcccaaggatatagaagactttgtccagagctctggagagcatggtgtggtggtgttttctctggggtcaatggtcagcagcatgacagaagaaaaggccaacgcaattgcatgggcccttgcccagattccacaaaaggttctttggaaatttgatggcaaaatcccagcaactttaggacccaataccagagtctacaagtggcttccccagaatgacctccttggtcatccaaaaaccaaagcctttgtaactcatggtggagccaatggtgtctatgaggccatctatcatggaatccctatgattggcattcctatgtttggagaacaacatgataacattgcccacatggtggccaaaggagcagctgttacactgaatatcaggacaatgtcaaagtcagatttgttcaatgcacttaaggaagtaataaacaatcctttctataaaaaaaatgctatgtggctgtcaaccattcaccatgaccaacctatgaaacccctggacaaggctatcttctggattgagtatgtcatgcgccacaaaagagccaagcacctgagaccacttggacataaccttccctggtaccagtaccactctctggatgtgattggattcctgctagcctgtttggcagtcattgcagcccttgctgtaaaatgcttcttgttcatttaccgattctttgcaaagaagcaaaagaaaatgaagaatgagtagagctcgttgacaatgcactacaggaatgaaatttaagcctcattctaatttatgaatcactttcttaacacttcctgatttttttttgtggaggcagatcatcattgtaagaagacatatagctctgtgaatattgatatgttatcaaaattttaaaatcacttaatgtaaaaaagttgcattgtagaaaaattgaggaaaataaagtttacttgatagtctt

SEQ ID NO: 3709 - DNA, 2140 bp, Rattus norvegicus
aaaccattaaccatgggtttctctgtatttacccctacaagatccctggatggtgtctctgggttcttccaaggggccttcctgctcagtctatttctggtgctgttcaaggcagtccaattctacttacgaaggcaatggctgctcaaggccctcgagaagttcccatccacgccttcccactggctttggggccacgacctgaaggacagagaattccagcaggttcttacgtgggtagagaaattcccaggtgcctgcttacagtggctctcagggagcaaaacacgagtcctgctctatgaccctgactatgtgaaggtggttctgggaagatcagatccaaaggcttctggaatttatcaattccttgctccctggattggttatggtttgctcctgttgaatgggaagaaatggttccagcatcggcggatgttgactccagccttccactatggcatcctcaaaccctatgtcaaaatcatggcggactctgtcaatataatgctagacaaatgggagaagcttgatgaccaggatcaccctctagagatcttccactatgtctccttgatgacactggacactgttatgaagtgtgctttcagccatcagggcagtgttcagttggatgtaaattccaggtcctacaccaaggctgtcgaggatctaaacaacctgactttctttcgtgtgaggagtgccttttatgggaacagcatcatctacaatatgtcctctgatggccgtttgtcccgccgggcctgccagattgctcatgagcacacagatggagtgatcaaaatgaggaaggctcagctgcagaatgaggaagagcttcagaaggccaggaagaagaggcacttggatttcctggacatcctgttgtttgccaaaatggaggatgggaagagcttgtctgatgaggacctgcgtgcagaggtggacacattcatgtttgagggtcatgacaccacagccagtggaatctcctgggttttctatgctctggccacccaccctgagcaccaagagagatgcagagaggaggtgcagagcattctgggtgatggaacctctgtcacatgggaccacctggaccagataccttacaccaccatgtgcatcaaggaggccctgaggctctacccaccagtaccttctgtgagtcgagagctcagctcccctgtcaccttcccagatggacgttccatacccaaaggtatcacaaccacaattttaatttatggccttcatcataacccaagttactggccaaacccaaaggtgtttgacccctctagattctcaccagattctcctcgccatagccatgcttatctgccattctcaggaggagcaaggaactgcattgggaaacagtttgccatgaatgagctgaaggtggctgtggccctgaccctgcttcgctttgagttgctgccagatcccaccaggatcccggtccctatggcaagacttgtgttgaagtccaagaatgggatccacctgcgtctcaagaagctaagataaatctggtggagataggacagctccagaggtctgctgcctgcaatacctgcatttgttactggctaatttatactcattttgctttctctttgattcccatcctctgctgagtgtcccgtcatctcatttttttgccctcatttctgtagcttttcctccagactccatcccagtttgtgcgtggacccatttcccatctgttttcacctctgaccagccactgaacttgccgccagcagcctgtcctccagcctgcttacccctcattatcattggactaacagagaaagatgtattttagagggaaactcttgcactttatctctcttcagttctcagagtcttgggacaatggacatcatgaattaaaatgttcttaaaaatcacatgctgggagaaaattaatcctaaaaattctggcaccagccagaggaaggatgttggctgaaaagaaaagatttctagatatttatgtttgtctcatggtgaaattaatgtatgcctcatcttttctatgaaataataattctgatacagaacagtagagagaaatgaatagtttttgctactttgggccaaactgtaaataaatccatttcacttc

SEQ ID NO: 3710 - DNA, 1008 bp, Rattus norvegicus
cctaccccagtgccgatggcacctatgaggtgtctgtctacaccaacgtgattgtgcgttccaacggcagcatccagtggctgccccctgctatctacaagagtgcctgcaagattgaggtgaagcactttcccttcgaccagaactgcaccctcaaattccgctcctggacctatgaccacacggagattgacatggttcttaagtcgcccacggccatcatggatgacttcacccccagtggtgaatgggacattgtggccctcccaggacggaggacggtgaaccctcaggaccccagctacgtggacgtgacctatgacttcatcatcaagcgcaacgcgctcttctacaccatcaatcttatcattccttgtgtgctcatcacctcgctggctatcctggtcttctacctgccctccgactgtggggagaagatgacgctctgcatctctgtgctgctggcactcacgttcttcctgctgctcatctccaagatcgtgcctcccacctcccttgacataccgctcattggcaagtacctcttgttcaccatggtgctggtcaccttttccatcgtcaccactgtgtgtgtcctcaatgtgcaccaccgctcacccagcactcacaccatggcatcctgggtcaaggagtgcttcctgcacaaactgcccaccttcctcttcatgaagcgtcccggtcttgaagtcagcctggtcagggtccctcatcccagccagctgcacttggccacagctgatactgcagccacctctgccttaggccccaccagcccatccaacctctatgggagttccatgtactttgtgaaccctgtccctgccgctcctaagtctgcagtcagctcccacacagcaggcctccccagggatgcccgtctgaggtcctccgggaggttccgggaagatctacaggaagcattagagggtgtcagcttcatcgcccagcatctggagagcgatgaccgagatcaaagtgtagtcactg

SEQ ID NO: 3711 - DNA, 2137 bp, Rattus norvegicus
cttcaacactctgttggtgtccaagaaatgcattctttctgtagaagggtacagtctgggaaagtaattttgatcaagggtaggaattgggacattgtgtatgttgatttatttttatagttatatgtaaatatatataattatatatatatatttgtgtgtgtgtgtgtgtgtgtgtgtgtgtgtgtgagcatgtgtgtctaggggatgaactcaggttactagacctggagtaggagcctttacctgctcttggtttgttagttgagtttgctttaaataaaggaggattgcctcagcaaatgctgctgatgaaatcacaattgagtatgcacgtcactctacccactcaagggcaagatgataaggttctatcagaccaaccgctgaacaggacctgagtctcccaaggtcatccttgttttgacttgtaaccacaaatttgtcttgccttgtcactataaaacatctgtccattccagcacccttacaagtgacaggagccacagccaaactactgctttgcgtgctaacatcactctactgctttcttcctatagaactttacatttttccttctgaggcaaaatagcacaagatgtttttggaaatgctgaaccccatgcactataatgtcaccatcatggtcccggaaactgtgcctgtcagtgccatgccacttctgctgatcatgggcctcctcctcctgattcggaattgtgagagctcatcttccataccaggtcctggctactgtctgggaatcgggcctctcatttcccatggcagattcttgtggatggggattggaagtgcctgcaactactacaataagatgtatggagagttcatgagagtctggatcagtggagaggagacactcatcatcagcaagtcctcgagcatggtccatgtgatgaagcacagcaactacatctccagattcggcagcaagcgtgggctgcagtgcattggcatgcacgagaatggcatcatatttaacaacaacccgagcctgtggagaacggtccgccctttcttcatgaaagctctgacgggccctggtcttattcgaatggtagaagtctgtgtggaatccatcaagcagcatttggacaggctgggtgacgtcactgacaactcgggctacgtggacgtggtgaccctcatgagacacatcatgctggacacttctaacacgctcttcctggggatccccctggacgaaagttctattgtgaagaaaatccagggttattttaatgcctggcaagcactccttatcaaaccaaacatcttctttaagatttcttggctctacagaaagtatgagagatccgtcaaggacttgaaagacgagatcgaaattctggtggaaaagaaaagacagaaagtttcctcagcagagaaactggaagactgtatggattttgcaactgatttgattttcgctgagagacgtggagacctgacaaaggagaacgtgaatcagtgtatattggaaatgctgattgcggcccctgacaccatgtccgtcactctgtacgtcatgttgcttctcatcgcagagtatccggaggtggaaacagctatactgaaggaaatccacactgttgttggtgacagagacataaggattggtgatgtgcaaaatttgaaagtggtggaaaacttcattaacgagagcctgcggtatcagcctgtcgtggacttggtcatgcgcagagccctggaggatgacgtgattgacggctacccggttaaaaagggaactaacatcattctgaacatcggaagaatgcacaggctcgagtatttccccaagcccaatgaatttacccttgaaaactttgagaagaacgttccctacaggtattttcagccatttggctttgggccccgcagctgtgctgggaagtacatcgccatggtgatgatgaaagttgtcctggttacacttttgaaacgattccatgtgaagacattgcaaaaaaggtgtattgaaaatatgccgaaaaataatgacttgtccttgcatctagatgaggacagccccattgtggaaataatttttcggcatattttcaatacaccttttttgcaatgcctgtacatctcattgtgaatgcacgtgtat

SEQ ID NO: 3712 - DNA, 990 bp, Rattus norvegicus
tcgaccagctccactccagcaccgcggcggaggagagcgaggacgcccaggcaagtgcgcacctgcggagcatcaccgggtccgaccgcaaaatccaacatgaaaatcctcgtggcggtggcggtcttttttctcgtttccactcaactgtttgcagaggaaatcggtgccaacgatgatctaaattattggtccgactggtccgacagtgaccaaatcaaggaggcaatgccggagccctttgagcatcttcttcagagaatcgcccgaagacccaagcctcagcagttctttggattaatgggcaaacgggatgctgggcatggtcagatctctcacaaaaggcataaaacagattcctttgttggactaatgggcaaaagagctttaaattctgtggcttatgaaagaagcgcaatgcagaactacgaaagaaggcgtaaataaaccctgtaacgcactatctattcatctccatctgtgtccgcgagcagtgagcggtaaaataaaaatgtgcgctatgaggaatgattatttatttaatatcaaatgttgttatgagtgaaaaactcaaaaaagtgtttattttttcatattgtgccaataagcattgtaattctaatgtggtgacctcctcagacagaagtagaaattagttgtaacttcagcaaagcacagtgttgatggagttgtacaagtttgccagcgatgcaagtctccaaagacagaaaggctgctgtgaggcagtgcaggcggctgctgctggaggcagagaaactcctgtgtgtcttgcgcttcccttggttgcttttatcctaatgatgtactgagagtttggtatctgactctatttgtatcctagcagcatgtttcctgtgttgtgactatatagagatgtttttaaaagtttcaatgtacttctctggtcttcagtcattgtatgatgtgttgtgatagctaccattttaaataaaagaatgtatcttcagg

SEQ ID NO: 3713 - DNA, 2236 bp, Rattus norvegicus
ggctaagcctggtcaagaacttgaggggcaagtccccggaagtgtgttccttctggaagatggctcctaacacttctaccatggatgaggccgggctgccagcggagagggatttctcctttcgcatcctcacggcctgtttcctgtcactgctcatcctgtccactctcctgggcaatacccttgtctgtgcggccgtcatccggtttcgacacctgaggtccaaggtgaccaacttctttgtcatctctttagctgtgtcagatctcttggtggctgtcctggtcatgccctggaaagctgtggccgagattgctggcttttggcctttgggtcccttttgtaacatctgggtagcctttgacatcatgtgctctacggcgtccattctgaacctctgcgtgatcagcgtggacaggtactgggctatctccagccctttccagtatgagaggaagatgacccccaaagcagccttcatcctgattagcgtagcatggactctgtctgtccttatatccttcatcccagtacagctaagctggcacaaggcaaagcccacatggcccttggatggcaattttacctccctggaggacaccgaggatgacaactgtgacacaaggttgagcaggacgtatgccatttcatcgtccctcatcagcttttacatccccgtagccattatgatcgtcacctacaccagtatctacaggattgcccagaagcaaatccggcgcatctcagccttggagagggcagcagtccatgccaagaattgccagaccaccgcaggtaacgggaaccccgtcgaatgcgcccagtctgaaagttcctttaagatgtccttcaagagggagacgaaagttctaaagacgctgtctgtgatcatgggggtgtttgtgtgctgctggctccctttcttcatctcgaactgtatggtgcccttctgtggctctgaggagacccagccattctgcatcgattccatcaccttcgatgtgtttgtgtggtttgggtgggcgaattcttccctgaaccccattatttatgcttttaatgctgacttccagaaggcgttctcaaccctcttaggatgctacagactctgccctactacgaataatgccatagagacggtgagcattaacaacaatggggctgtggtgttttccagccaccatgagccccgaggctccatctccaaggactgtaatctggtttacctgatccctcatgccgtgggctcctctgaggacctgaagaaggaagaggctggtggaatagctaagccactggagaagctgtccccagccttatcggtcatattggactatgacaccgatgtctctctagaaaagatccaacctgtcacacacagtggacagcattccacttgaatattgggtcctcatctctgaggccacgagttcccttgggcttgctgttaaggaattaacaggagatccctctgctgcttttggacaattacgaagcttctcaaactcactgattccagtgtattctctagcttcaagggaaatgacttcggctctgaaatcagtttgggagtattatcttaggacattataaaacaacaacaaacaaacaaacaaacaaacaaataggccaagagtcaactgtaaacagcttcacttaaaaatcgaactttccagaaaggaagggtaggagttgagtttgctgtccaaacaggtgctaaaactgtccgagcagttttcagattggaaaggtaggtgcatgcctttgttaattaacttctccaataataattgagccttacagcaggagtgggattcctttttctcagaattgacagatgcattgttgatgacggttttatttatttatttattgtactatatgaatattttaaatttatcatagtgaatctatatttaacatatttaacagagcaaaccaatgtgttatctgagactgacctctccatttgtactagcactttatgagccaatgaaacatacgcgtagactctgagattctgaattgtgagttacttctgggaacacagcaaagactgatgtggtggctccttaactcgacaaggacacaaagaaacgcaagaggagaagtgactaatgccaccaatgctccccctaaaaagattttgaaaagattagtttttttttttttttaaaagaagctactattgtgttctgaatgttttaaatggcagaggctttccccggggcgaatt

SEQ ID NO: 3714 - DNA, 2432 bp, Rattus norvegicus
ggcctatcatagtaagaggtcagtatgttttccacacttggataatctcattcaagaatttttgtcaatggacaagtcataagaagcccttccattttagggctcgttgacgtcaccaaggaggcgataaatatctgttgatataattggatgtgagattcagtgttgaaatagcagaaccctgtccctcgctccttggcagggccctattatttatgcaggagcagaggcagcacgcaatcgagctgtcaagagagcgtcagcttattaggcaaatgctgcgtgctttctgaagagggtcgacgttataaaatctcactccgggctctggtgtggagaaactcagagcccaagtacgttgagaaactgaagagaaaggggaaaggcaaagaaaaggagaagagaaaggagaagaggaagaaaacctgcaggaggcatcctgagagaggtacctcgcagaacaacagtgcgggctcacctgccaagggaggagaaggtaggcagcgctagatgggcgcaccaactttgtgctgcctgagctgctgtggtgcgccccggagccagctgcccaagtgctggaatgcctgtgcctatgcatgtatgtgtgtcgctaactgtgccttaaaattccgatgacagccgcgatgtggcaaaaagctaagttagacggcggctgcggctgctcatctttatgcactcaatccaatctgccactcattgctcatagtctgtgtaaagaatggctcccttattgtgtcccatacccgcaagcaaagggagcaagggcaggaatggagacagagaggaggaggtagttcttaatttggaagaaaatgatgtccgaaagggcgattagagcggcgaatagcttaaacctgtggcacttctccgggctcaagaaagtcagtttggggaagacttaggaagaggagtcagggggtgtcccttttaggtctccaaggaagggtcacctgcaggctcgcaccatatgagctttgcaggtacatagcttcagcaccgcggacagcgtcacagaagcccagagcctgtcttgtctgtgtctgtcggataggaagtcccgctacaccttccagctgagctaaactctgaccagtcttacctctctcccccaccttctctttcctccaccttgtctctccctctaccccaacctcggctgcagagagcgcccctaaacatgcggctgcggctgctggtgtccgcgggcatgctgctggtggctctgtcgccctgtctgccttgcagggccctgctgagcaggggatccgtctctggagcgccgcgggccccgcagccgttgaatttcttgcaaccggagcagccccagcaacctcagccgattctgatccgcatgggtgaagaatacttcctccgcctggggaacctcaacagaagtcccgctgctcggctgtcccccaactccacgcccctcaccgcgggtcgcggcagccgcccctcgcacgaccaggctgcggctaactttttccgcgtgttgctgcagcagctgcagatgcctcagcgcccgctcgacagcagcacggagctggcggaacgcggcgccgaggatgccctcggtggccaccagggggcgctggagagggagaggcggtccgaggagccgcccatctctctggatctcaccttccaccttctgagggaagtcttggaaatggccagggcagagcagttagctcagcaagctcacagcaacaggaaactgatggagattatcgggaaatgaaatgttgcgcttggccaaaacgattctgcatttagcacacaagtaaaaataaaaaatttaaaacacagtattctgtaccatactgcagctctgatatcatttgtttatttttatatagcttgaagcatagaagatgtacagggagagagcctatataccccttaattagcatgcacaaagtgtgtttctttgtagtaacaaaacagcgttatttgtattgttcacgcttagtttctatgtgcaaataagtgtctttatagcgatatcttaaagaaaatgtggatccaaggaggaaacctttaaaaaagcagatggaagtcacccagttgtttttatttggagacacagtgtaagagaattcattcttgaggggtggctaggacaaaatgtgtaagctctttgaatcaactttttcttgtaaatgtttcaataataaaacatctttctgatccttggtcaatttggttgtgtcagagaacgttgactatatttttaataaaatctgaaaggttgttgtggctttatttttcctcttcagaaatggacccagcacaagaaaataaaaacaatacaacaatcccctccccaaaaaacaaaccctacattttattttctcctaaaaatatgaacattgtcacatagcttacactagccctgcaatttgtcctgg

SEQ ID NO: 3715 - DNA, 1800 bp, Rattus norvegicus
tcctataacccacctcagggttatggacaacagaaccagtacaacagcagcagtggaggtggtggagggggcggtggaggcaactatggccaagatcagtcctctatgagtggcggcggcggtggtggtggttatggcaggagtgtttgacatagacctggaccagccagaggatgcaggctctgaggatgagctggaggaggggggtcagttaaatgaaagcatggaccatgggggagttggaccatatgaacttggcatggaacattgtgagaaatttgaaatctcagaaactagtgtgaacagagggccagaaaaaatcagaccagaatgttttgagctacttcgggtacttggtaaagggggctatggaaaggtttttcaagtacgaaaagtaacaggagcaaatactgggaagatatttgccatgaaggtgcttaaaaaggcaatgatagtaagaaatgctaaagatacagctcatacaaaagcagagcggaatattctggaggaagtaaagcatcccttcatcgtggatttaatttatgcctttcagaccggtggaaaactctacctcatccttgagtatctcagtggaggagaactatttatgcagttagaaagagaggggatattcatggaagatacagcttgcttttacttggctgaaatctccatggctttggggcatttacatcaaaaagggatcatctacagagacctgaagccggagaacatcatgcttaatcaccaaggtcacgtgaagctgacagactttggactatgcaaagaatctattcatgatggaacagtcacgcacacattttgtggaacaatagaatacatggcccctgaaatcttgatgagaagcggccacaaccgtgctgtggattggtggagtttgggagcattaatgtatgacatgctgactggagcacctccattcactggggagaatagaaagaaaacaattgacaaaatcctcaaatgtaaacttaatttgcctccctacctcacacaagaagctcgagatctgcttaaaaagctgctgaaaagaaatgctgcttctcgtcttggagctggccctggggatgctggagaagtccaagcgcatccattttttagacacattaactgggaagagcttttggctcggaaggtggagcccccctttaagcctctgttgcaatctgaagaggatgtgagtcagtttgattcaaagtttactcgtcagacacctgttgacagccccgatgactcaactctcagtgaaagtgccaaccaggtctttctgggttttacatatgtggctccatctgtacttgaaagtgtgaaagaaaagttttcttttgaaccaaaaatccgatcgcctcgaagatttattggtagcccacgaacgcctgtcagcccagtcaaattctctcctggggatttctggggacgaggtgcttcagccagcacagcaaatcctcagacacctgtggaatacccaatggaaacaagtggaatagagcagatggatgtgacaacgagcggggaagcttcagcgccacttccaatccgacagcccaactctgggccatacaaaaaacaagcttttcctatgatctccaaacggccagagcacctgcgtatgaatctatgatgaaacaatgcttttattaatgcaaatgcaaaaaggaaacaaatcctggaaggggatgtgtgaggatcctgcaagataaaaatgagaaaatggcagtctcaaagagtcagtgtcattacctggaatgctttcgatggaggaaaaaataaacatggatt

SEQ ID NO: 3716 - DNA, 1293 bp, Rattus norvegicus
gaattccctgatctgagcagccacaacaaccatatggccaaggtgctgacccccgagctgtacgcggagctccgtgccaagtgcacgccgagcggctttacgttggacgacgccatccagactggcgtagacaatccgggccacccgtacatcatgacagtgggtgcagtggcgggcgacgaggagagttacgacgtattcaaggaccttttcgaccccatcatcgaggaccggcacggcggctaccagcccagtgatgagcacaagactgacctcaacccagacaacctgcagggcggcgatgacctggaccccaactacgtgctgagctcgcgggtgcgcacaggccgaagcatccgcggcttctgcctcccccctcactgcagccgtggggagcgccgcgccatcgagaagctggcagtagaagccctgtccagcctagatggcgacctgtctggcaggtactatgcgctcaagagcatgaccgaggcggagcagcagcagctcattgacgaccacttcctcttcgacaagcctgtgtcgcctctgctgctggcctccggcatggcccgcgactggccggatgctcgcggcatttggcacaatgacaataagacgttcctggtgtggatcaacgaggaggaccacctgcgggttatctccatgcagaaagggggcaacatgaaggaagttttcacgcgattctgcactggcctcactcagattgaaactctcttcaagtctaagaactatgagttcatgtggaaccctcacctgggctacatcctcacgtgcccatccaacctgggcactgggcttcgggcaggcgtgcacatcaagctgccccacctgggaaagcacgagaagttctcggaggtgctcaagcgactgcggcttcagaagcgaggcacaggtggtgtggacaccgctgctgtgggtggagtttttgatgtctccaacgctgaccgcctgggcttctcggaggtggagctggtgcagatggtggtggacggagtgaagctactcattgagatggagcagcggcttgagcagggtcagcccattgacgacctcatgcctgcccagaagtgaagcctggccctagccaccaccaggctgccgcttcctaacttattacccgggcagtgcccgccatgcatccttgatgtttgccgccgcctggcggctgagcccttagcctcgctgtagagacttctgtcgccctgggtagagtttatttttctgatggctaagctgttgcagacactgaaataaattagggtttggcctgcc

SEQ ID NO: 3717 - DNA, 13222 bp, Rattus norvegicus
gtgttctcttagggtctgtatgacatctgtccaagatcttctggctttcatagtctctggtgaaaagtctggtgtgattctgttaggtctgcctttatatgttacttgacctttttcgcttactgcttttaatattctttctttattttgtgcatttggtgttttgactattatgtgacgggaggtgtttcttttctggtccaatctatttggagttctgtaggcttcttgtatgcttatgggtatctctctttaggttagggaagttttcttctatgattttgttgaagatatttactggtcctttgagctgggagtcttcactctcttctatacctattatccttaggtttgatcttctcattgagtcctggaattcctgtatgttttggccagtagcttttccgctttacattatctttgacagttgagtcgatgatttctctggaatcttctgctcctgagattctctcttccatctcttgtattctgttggtgatgcttgtatctacggctccttctctcttcctttttctatatccagtgttgtttccatgtgttctttcttgattgcttctatttccatttttaattccttcaactgtttgattgtgttttcctggaattctttcagggatttttgtgattcctctctgtaggcttctacttgtttatttatgttttcctgtttttctctacgggggttcttcatgtctttcttgaagtcctccagcatcatgatcaaatatgattttgaaactagatcttgcttttctggtgtgtttggatattccgtgtttgctttggtgggagaattgggctccgatgatgccatgtagtcttggtttctgttgcttgggttcctgagcttgcctctcaccatcagattatctctagtgttactttgttctggtatttctgacagtggctagactatctataagcctgtgtgtcaggagtgctgtaggcctgttttcctgttttctttcagccagttacgggaacagagtgttctgctttcaggcgtgtagtttttccaatctacaggtcttcagctgttcctgtgggcctgtgtcttgagttcaccaggcagatggcttggagcaggaaggtttgtcttacctgtggtcccgaggctcacatttgctcgtggggtaatgcttatgagttgtccccgggggcagcaaccaggaagatctgtgccgccctttccaggagcttccgtgtaccagggttccagatggcgtttggtgatttcctctggaatcagtaatgtgggcagagtgtagtctcctctggtttcccaggcctgtctgcctatctgaaggtttagctctccctcctatgggatttgggtgcagagaactgtttatctggtcggtcccttcaggttctggtggtgtctcagacgcaggggacctgatactcctgtgcccttatctccaggaacccagaggccgtatacagtttcctcttgggccagggatgtgggcaggggtgggcagtgttgctggtctcttccgctctgcagtctcaggagtgcccacctgtccgggcagtgagctctctctcccacaggatttgggagcagtgatctgctgtgggtagggatccgcgggtttgggaatcctgctgaaaaccggaagtgttcagtcccagaggaattttgcatctgtgtgccctgagttcaccaggcaggtcgcttgaagcatgaaagtttgtcttacctgtggtcccgaggctcaagtttgctcatggggtgttgcttatgagctctctgcaggggcagcaaccaggaagatctgtgccaccctttctgggagcttccatgcaccagggttccagatggcgtttggtgttttcctctggaatcagtaatgtgggcagagtgtagtctcctctggtttcccaggcatgtctgcctctctgaaggtttagctctccctcctacgggatttgggtgcagagaactgtttatctggtcggtcccttcaggttctggtggtgtctcagatgcaggggacctgatactcctgtgcccttatctccaggataaggtctcttgtgctctgcagtctcaggagtgcccaactgtccgggcggtgagctctctctcccatgaggtttgggagaagcgatctgctccgggcagggatccacggggggggggggggtttgaatatgaatcttttgatatcaaagttaatgtctatttcatgagtttacctcattcatcaatgagatactacataatgtttaatatgtgttcaataaatattatgagtagttcagagataagagagtgggtatatacatagactttaccaagatcagctactagggatttgactttactgtttaccaaagttgatgttgcagagtaataaactttggagtctgaggtcactccctgtctttttttctactctccctcccacaagtaggtgtgtctacctcctcatgatttaaatgcaggtgttccacatgttcagagaccctagtgatccagaagccattaaccatgggtttctctgtatttagccctacaagatccctggatggtgtctctgggttcttccaaggggccttcttgctcagtctatttctggtgctgttcaaggcagtccaattctacttacgaaggcaatggctgctcaaggccctcgagaagttcccatccacgccttcccactggctttggggccacaacctgaaggtaggaagaagggagagcatggaagagtatgaaaagtaggaaagttatacagggcagtctgctctgtgataatcatgtagtttctgaagaacactgggtttacttctaagagcaggcttgccttaatcgtgtggggcatactctttttaaaaagatacatgatgacaataggactcaaatctcagaatgtagaagggaatgggaaaacagcctggctttatggagtgggtgggtgatgttagctacagagaagcaactaatctaggctgttatctgagagaacttctagaagtgatgctttctatgctgtctatcagtttcctctgagattgaaacttcccagtttggagagaaacagatgattacaatacagggtgttgtaaagagaggtacaaacttccatccagaaagaaagtcccttacgataaaggaagttctatggtggaggggaaacattccatcctgcaagggaactcctaaacttcagaaagcaaacaactcaagggctttgtggagcctctgacactttctggattagttagcgtcccccaccctcaagtgtatataagctttaagaatgactgactgtgataccagctctcagcagaatataatttggctgggtctgtgtgaagaggcactcagtgtgggattacacacttagccacatttaagaatattaaactcagagctctttccccagtagcttctctaagaagccttagcttcatctaacaagggtccaggatctggctagggcaaatccgtggacatagcaatggcctagatggaagggacaaaaaggacagatcatcaagccaactcaaatttctaccttttcctgaacattctgagcaatgctcctgtggtggtcctgcatctcccataccacacaaagcactagatgtcaaagaacatctttatgaatttgtcttttctttgatgtctgttcccaaaggacagagaattccagcaggttcttacgtgggtagagaaattcccaggtgcctgcttacagtggctctcagggagcacagcacgagtcctgctctatgaccctgactatgtgaaggtggttctgggaagatcaggtgagagtccaatctcatttacatctgtagcatatctgtcatccaaagttcattacaagtctgtgtaatattagaaaagagtgatactagccatcgatgtctaattaatacctaccattcccactgtctagagaccaacatatggctagcaataattagatagttctcagcacttaaaataactgcacaaggcttaaattttcttcctttcttccttccttccttcctcccttccttccttttccttttacaactaaattgagttgatgtgttttacaaattttccaaacatcataatgacagagacattcattgctgatacaatgaagtctgcctttccaagtcgagctaactcccaatacaaagacagaagggaatggaaggcagtgtgagtgggaatgcatcaacttgaaatccaccaagaactaacgacatggttattgaaatgactcggttggtgcaggggtttgctgctcaagcctgatgacctaatgttgagctctgaaacccacattgaattcgaattcagtgggaggaatgaactaactccacagagttgtcttctgaactctacacagacactgtagcaggtgcaccacaaataataatttttaaaattctgaaaaatgaaagaaaaagcttgtagttttgaacaccatcctcctatctggtcctcaagatctgtcttacttttcagatccaaagccttatcaatcccttgctccctggattggtaagtatattaaaataaggagtgtgttttcttcactactctctggctaatggagaagaacgggtgactggtcacagtatcatgatccattcctaaatcaagcattatttctcttctcctaatcagtccttagttctttttaatgctgcatgatgccaggtttctgccatattatttcttcaaacattcattgtcagacatttatatatatatccctcttgacctgatcccaacatgttttaatccttcatttcattctgtcttagtcacagcagatttatcagacaaactggacttctccctttctatgtctttgtctaataaaacacccttactattactgaatttttatttccccattttatcccagttaatgtaaccaaatgatcccaggagtacctttgattccacctctgtcagacacactaacgatcagtctctggcacaggttatggtttgctcctgttgaatggaaagaaatggttccagcatcggcggatgttgactccagccttccactatgacatcctcaaaccctatgtcaaaatcatggcggactctgtcagtataatgctagtgagtttctctgtctctttctcattttattgtacccacctgacagcacacccacaatgactctactcttaaacacattctagacgatcacatagactaataactcctgttgttgctatgaagtaagtctcccacaaatgcataaattggacagcttctgctcagcaggatggagtcacacacttcagagagcactgtggtaaatataggaccaagtgttgtcacagtggacaagacaccatacagtgtaaactccctgtttttggctgaactggatagtggcagcttcaagacaagaatgtcttggaccccaggccttctgtgtgatcttaagtggctcatgtgtaagtagaaaccaggttcacatcctcacacccttacctgccaaatccttacctcatattaggtcctagtttctggcgtcaccatttgaaaggtgaaatgtaattaaccaatagcacacatgaggcatgttcacccaggacaacagcttttcttttcctttatacattttattccttcctgtatttgtgtttatacaaatttttcaagtctggtttagtcttgaaagtttgaaggggccatttttgtaaactgaaagattactttgtttctaaaaccaaataagcaataattaaacaccatgagaaaatacgctgttttgttaaagagtttggaagaagcagacaacagattacaaacatttgcttcatgcttttaatttactggaagcaaatgaactcaatggagagggacgctagactgattatctatagataaagagaaaagtattagtctaaacacaggtcgtctgaagaaaattaagaaattgtctcgttctcaccacaggacaaatgggagaagcttgatgaccaggatcaccctctagagatcttccactatgtctccttgatgacactggacactgttatgaagtgtgctttcagccaccagggcagtgttcagttggatgtgtgagtaacaaccctttgttgtagaatctttggtcttaccagtccgtttagtaagttatgattaagttcagtcagttagtcagtaagaagaaagtggggcaggtaagacagttccctccacaaaacataagattcttattcagttctagaccaaactcttatttcaaaccagaaccaaaccagccagccccataagacactgtggaaccctggcatgtgtctaaagttccaatggtcaaaaaatcttgaagtggtgtgtgccttggtattgcatgttccatggttgaaagaatgactatagagaacctactctatttttaggaaagataccccaatcaccagtatattgtacctcctgtccatagaaattccaggtcctacaccaaggctgttgaggatctaaacaacctgattttctttcgtgtgaggagtgccttttatgggaacagcatcatctacaatatgtcctctgatggccgtttgtcccgccgggcctgccagattgctcatgagcacacaggttctgtcttcctccttcctgccttcctttctttgtcaggtacattgcaaagacatgatcagatatctcagacatagtgagtttgccagaagcctctgtaggactggagtcagttactaagatgtaagttttgggagcaagaatgttagcattaaaactgcattacaggaattgtcaaatttattacattggggacatgtgcgtcatggctctgtggcccatgaacctgagtggaggttgaggtatatgagattgagtagacttcaaatcatgacgagattcccacctgcacatgcatctggggcttcacaggacacacacattaggttcagggattgtgtgtattactgtagctctgtgttctgtctgacaagtgctgtcatgggatagatggagtgatcaaaacgaggaaggctcagctgcagaatgaggaagagcttcagaaggccaggaagaagaggcacttggatttcctggacatcctgttgtttgccaaagtgagtggagaacagggttaagatttggcccagaagcacagatgagatagaaagtctgttttctcacattcattcagatggaggatgggaagagcttgtcagatgaggacctgcgtgcagaggtggacacattcatgtttgagggtcatgacaccacagccagtggaatctcctgggttttctatgctctggccacccaccctgagcaccaagagagatgcagagaggaggtgcagagcattctgggtgatggaacctctgtcacatggtgagaaccattcatctgtcttcttaaaggagagacctctggtctgcccagatttgtgtgactcttcaggatggactttatttcagggaccacctggaccagatgccttacaccaccatgtgcatcaaggaggccctgaggctctactcacctgtaccttctgtgagtcgagagctcagctcccctgtcaccttcccagatggacgttccatacccaaaggtaaccaaatccagtcacctatatgctcacgtgtgtttctgttgtcccagcaaactgaatctttactttgaagttttgagatgagattataaggttaagactgaggcagtctcctggaagaaatgtcacatgctggttaaatgtcattctcagccttgaagttacagtcacttcatatactcagggttgaaaaaaaatagacgcaggtcttgtcatgataaggttttgtttatgagtaaaataacaaaatggtaagggaaactattgtgtgggtgtcatggctcccagtgtctcaggaaactgaggtgaggaaagaggggagctgctaagttctgagttcctttgtcacatgtccaaggcacatgttagcgaaaccatccttggatatggtcccacctctgccacatgcaaacagtgtaaacctaagtaaagataatgggactcattgaaaatttagtatttcatgtgaaaaatgggcatgaaacagtgccttttgggggtgttagaaggggaattgtgtcttgttagctagtgtatgttcttcaatggtgtgtgtaagacatttaatgaacgtgttctgtcattgcactaaagtgccgtgtacccccaatacttctttgctgtctgtcatcatcaggtttatggttgtctaatgtatacttcactaaactccctatccccaaaaggatcattagctctacacggtgactccttatatacaggccatatgtatatgccactgggattggctctagagccaattctttggcttaattatgttttttttccatctttattaacttgggtaaatcttatttacatttctttttttcccacttttattaacttgagtatttcttatttatatttcgattgttattccccttcccagtttcacagccaacaggcccctaacccttccccctcccattctgtatgggtgttcccctcctcatccttcccccattaccacgctcccccccaaaccatcacgttaactggggggttcactgggggctcactggggggttcagtctcggcaggaccaagggcttccccttccactggtgctcttactaggctattcattgctacctatgaggttcgagcccagggtcagtccatgtatagtctttgggtagtggcttagtcctagaagctctggttgattggcatcgtttttcatatggggtctcaagacccttcaagctctttcagtcctttctaagattccgtcaacgggggtcctgttctcagttcagtggtttgttgctggcattcgcctacatatttgctgtattctgtatgtgtctctcaggagagatctacatctggctcctgtcagcctgcacttctttgcttcatccatcttatctagtttggtggctgcatatgtatgggccacatgtggggcaggctctgaatgggtgttccttcagtctctgttctaaactttgcctccctattccctcccaaaggtattcttgttccccttttaaagaaggagtgaaacattcgcatattgattatcagtcttgagtttcatgtgttctgtgcatctaggacaattcaagcatttggctaatagccacttatcaatgagtgcattccatgtgtgtttttctgtgattgggttacctcactcaggatgatattttccagttccaaccatttgcctatgaattttataaagtcattgttttgatagctgagtaatattccgttgtgtagatgtaccacattttttgtatccattcctctgttgaagggcatctgggttctttccagcttctggctattataaataaggttgctatgaacatagtggagcttgtgtctttattgtatgttggagcatcttttgggtatatgcccaagagagttatagttgggtcctcgggtagttcaatgtccaattttctgaggaacctccagactgatttgacttaattatgttttactccatgttttctcccctcccccacaggtatcagagtcacaattttaatttatggtcttcatcataacccaagttactggccaaacccaaaggtatgaaagcctggggaagagtgaagactcactcagttgcaactttaagcattctgtattcttttgcgttggaaatgggcttgactccatccatgctggccctgtgctctctctgcaggtgtttgacccctctagattctcaccagattctcctcgccatagccatgcttatctgccattctcaggaggagcaaggtgatgggaaagggttggagggaaaggatggagggttgccacatattaatattctatatttctgattgcttatgtccctatgtggtcacttgcatgtatttcttttggtagatgtggttagatggtatcatgtctttgtgtttgtgcaaaaggaaagaaggcaccaactcagtataacacagaaatttttattaacccggcgtcctgtgaccactaagacatctgtatgaaaattagtatgttttggtattttaactaattctgaacttcatatttcagaattatattccctatgaaaattaagcttagaagttttcaaaaatcttaaaggatcagtttctctttctcaaaattctcattacagtctcatagatttccttattaactcaacagttggatgcttctataaatctttaaaatatatgtgtctataaatatatgtgtaacaaatatatattaagtactataatgtgatatgtttaaaattctaaaaactttgtgggttcctctgttaaagtcatatatgtaagagttcacagcttcctataggttggacactggggctatcatcacatgttttttacttctagcctcacaccagtttttctgcatatacaaatgcttatcacatgtatatacattcctaatttgtagagctatgcatgctggaagggacttcagtgaacaggcctggtgtacttagtctagtggtgccgaaaccggaaatgaggacattaaatagcttctgaggaaaatcctctgttgagtgatgatgcccaccactagctgatgtgtgcagtgacagagctctgagggagatgagcagctaaaaaattccagagtctacaggactcatcctgtagaccacagattccctctaagatttcttaagggttggatacaatggtcatcagagttaatatgtctctatggatcacaagggggagaaaatgaaaggtaagcatttcttctgatttaccaattctgtgaaacttaaagctgtggattagctcccacagaacaggcttcagatgtggcattttactggaagacatatgacacagtttatcccatagtgaagaatgtcatcttaaccagctaaaagcatactgcagccattggaggataggagagtcgcaggttgtcaagttcctagcttaaatatccttatcctctatgcatattattgtgtttttagaattcgaattcaactctattaattcaaatgaaaaagaattttaaaaatgtactttttttctgccacgttccttgctgagacaggagaatgtagccaatcacttatacctgatgcagccatcattccttctttctgccttagcctcatgtgtccctcactgacatcttatgaaaagttacacactccttgctgccctatagcctgaagtgtggtgggtccttgagtaaagcacccttgctaccttagagtccaggaggaggtgaatgccacagaggatagggagctggctgactcttagcttgttgtttgggtgtggcagcaaggctaaagggaagcattagtggcatttacagccacatgagttgaaataggaagtggagctatacaggtaagaggtggtaactcaacaaaccttcactaaggatggttctgtctggggcacctggagctgtcccagacgacagtgtgcatagtaggaagagcattgcgagggtgaccgtggggatccaaagaccaagataggaaaatgcaaatgcaaataaggccttttctggaataaggttatatgggtactgatgatagtagcctgggggaaatgagggattagagcctgaaagctgagtgggaggaagatggaggaccaacttgaggatccccaatcagaggcattcactacaagcgtctaccactgatatttgactcccattgtagaatcaatccatttttgtacatagatgataatccccaagatggtgacctaccccttctcatattgaccagaataggaatattcacactggagatccagagactgttagtggagagaattggctagatagtaattacctcattaaataactcacgtgcttggactccatgcccacagagctggcactgtccaaatgacattctgtacacccaagaacaggactagggaaagagagagagacagagagagagagagagagagagagagagagagagagagagagagagagagacctagaggagctagagaatttatcataggtcaggagcctaagcttgaagacaagggattgaggtggttgtataacctataaagaaagtgatctcaaagcaagggaatgatttaggcatgtggtctataaataaaatgattaggctgataccatcgcgggggggaaccctgatgccccacaggactgaggttaaaggatcaatactcaccgtacccagagcaagtctcaggccacatcttacgtatgtgtccctgcttggttcaggaactgcattgggaaacaatttgccatgaatgagctgaaggtggctgtggccctgaccctgcttcgctttgagttgctgccagatcccaccaggatcccggtccccatgccaagacttgtgttgaagtccaagaatgggatccacctgcgtctcaagaagctaagataattctggtggagataggacagctccaaaggtctgctgcctgcaatacctgctttttgttcctggctaatttatactcattttgctttctctttgattcccatccttctgctgagtgtcctgccaactcatctttttgccctcatttctgtagcttttactccagacaccttcccagcttgtgcgtggacccatttcgcatctggtttcacctctgaccagccactgaacctgccgccagcagcccgtcctccagcctgcttacccatcatcatcattggactaacagagaaagatgtattttagagggaaactcttgcactttatctcccttcagttctcagagtcttgggacaatcggcatcatgaattaaaatgttcttagaaatcacatgctgggagaaaattaatcctaaagattctggcaccagccagaggaaggaaggtgactcaaaagaagagatttctagatatttctgattgtctcatggtgaaattaatgtatgcctcatcttttctatgaaataatagtactgatgcagaacagtagatagaaatgaatagtttttactactttgggccaaactgtaaataaatccatttcacttcattaatttctgtttcatatttttatttaagatacagaaatctactcagcatgaacctatgctccctgaagcacttttggcaagtcagccatcagagaagcctgttgccatctgctccccactgttagaatggggtagaattc

SEQ ID NO: 3718 - DNA, 2575 bp, Rattus norvegicus
ctgcagaagggatagtgacattggccacacacctgggtgtataccccacagcctcgtttcctcagagtctcatttctcacctgagtgggagactgggtgtgcgagggagaagtcactcatggctgatcagctgagagctgggaagaggcccttcccacatgtctggtgtctaggcaccctttctctttcactcgtggtgtgggaggggacattggcacctggagatgccccagaaggcattgctgtgtgaccttgtctttgggccaggatgaaaattctatcctaatcagctctcttttgttaaggggctggagttccagaagttccttgccatttaccagcttttagtcatttgaatattggagagtgagcatctttgagctgaaatcttcacagggttttgaggggtggggagtactggaaggtggggcagggtatcagagtggttgcgtgagccacctagctccttctggcctggagatcagtggagaagagaacttgaaagtttgtgtgaaggtcacgtgtggtgatcagaacctaggacagctaccagagtgcccggaagtggtgcagcccggccctacagctagatgcttggtagccggctgggcctggattacaggttcgaggacactctcccagagaggctggtgatggtgggtgctaactggaagtgtttttgatgagtcaccccataagccccacacctgccccaggctgggaaaactggggttctccctgtcatttccaatacgggtggggcacggtattaaaggccctcaggttttgcatgatagaagggaggcaggaaacaaggacctgttagtgtcccccacacactcccacccatgcccagcccatgcctatacaaggctgcggtttatagcctccacccacaacgaacactccacagaggcacagaggggtgaattctcaggtcctgagctcagcaggcaggaatgtgtctgataaatcagagataaccccacccctactccatgagaagggctggccgacacccgaccccagataaaaggcagaggcaccgttgctgagaggctagtgcacgcgagctgcttgcggaggcgagacaagagagagcaggacaccatcgcagctgcctggcccatcacttctgcagcatggatctccagaaggtgctgccccagatgattctgctcctgcttttccttaatctgtcgccgctgggaggtcactcccatcccctgggaagtcctagccagtctccagaacaatccacgatgcaggtgagcaccgagggtctgcatagggagatggagcctgcctgaagggttttgggcagcagcaatgaaaagacctcatgtcctttgggaattaaccacgcgagagtcaggaaacggaaagattgggcagcagatcccttaaccacaggcactgtggaagggtgggggagcagtgtgatgtgtgtgtgtgtctgaggtctgggcttcccaattcgtcacagaagctgctggagctgataagagaaaagtcagaggaaatggctcagagacagctctcaaaggaccaaggccctacaaaagaacttctaaaaagagtccttaggtctcaagacagcgccttccggatccaggagagacttcgaaattccaagatggcacatagttcaagctgctttgggcagaagatagaccggatcggcgcagtcagtcgcttgggctgtgacggtgagcacctaccttgccgcttccctgcaaagctgcacgcatcccgttccccgcatgccgccctcagaggccccttggtttgctctcagacatacttgcacagcctgcctctaccttaccgacagtcttcaagaccaaggcagtctgtcaggaagtctcacatgggtacttcattacaccgtcccaggtgagcacctacctccttcagaggtgtcacaggcttcccagggaacagactgcctgatgtctgatgtctgatcactctgagcatctcccctccgtcttcaccaaactgaattatccgaggcaaagggcaggcccagtgagatagcttttcccagagccgttaaacttcgacatcatctgggaaccaaagatgggggtgcggtgtggcaggggaagctcagctcctgcctcagtttcactccccagtctgacactggtttctcctcccacagggctgaggttgttttaggaagacctcctggctgcagactccggcttctgactctgcctgcggctcttctttccccagctctgggaccacctctcaagtgatcctgtttatttatttgtttatttatttatttttatgttgctgattttctacaagactgtttcttatcttccagcacaaacttgccacagtgtaataaacatagcctatttcttgcttttggaaaaggatttgtgtcatgagtttcaatccaatcctcatctcttttactttgcttttgtttactttggcttcaggcagggtctctctatatcatagacctggctctcggggtaactcactctgtagaccaggctggacctcagactcacagagatccactgcctctccaacagagtgcaggattagg

SEQ ID NO: 3719 - DNA, 2595 bp, Rattus norvegicus
gcagtcccgcagcctggcgtcttgctgatcctcttgctcaacctcctccatcccgcgcagcctggaggggttccaggagctgtgcctggtggagttcctggcggacttcctggtggagttcccggtggagtctattatccaggagctggtatcggaggaggcctgggaggaggagctctgggacctggaggaaaaccgcctaagccaggtgccggacttctgggagcgtttggagcaggtcctggaggacttggaggtgctggccccggggcaggtctctcctatgcttcaaggccaggtggtgttctggtgcctgggggaggagcaggggctgcagcagcttataaagccgcggccaaagctggggctgggcttggaggcattggcggagttccagggggtgttggagttggtggagttcctggggctgttggagttggcggagttcctggggctgtcggtggtattggtggcatcggtggcttaggagtctcaacaggtgctgtggtgcctcaacttggagctggagtcggagccggaggaaagcctgggaaagttcctggtgtcggtcttccaggtgtatacccaggtggagtgctcccaggaacaggagctcggttccctggtgtgggagtgctccctggagttcccactggcacaggagtcaaggccaaggttccgggtggaggaggtggtgctttttctggaatcccaggggtcgggccctttgggggtcagcagcctggtgtcccactgggttatcccatcaaagcgccaaagctgccaggtggctatggactgccctataccaatgggaaactgccctatggagtggctggtgcagggggcaaagctggctacccaacagggacaggggtcgggtcccaggcagcagtggcagcagctaaagcagcgaagtatgcaggtgctggaggaggtggagtcctccctggtgttggagggggtggcattcctggtggtgctggcgcaattcctgggattggaggcattacaggcgctggaactcccgcagcagctgctgctgcaaaggctgccgctaaggctgctaagtatggagctgctggaggcttagtgcctggtggaccaggagttagggtcccaggtgctggaatcccaggtgttgggatcccaggtgtcggtggcattccaggtgttggtggcattccaggtgttggtggcatcccaggtgttgggggccctggtatcggaggtccaggcattgtgggtggaccaggggctgtgtcaccagctgcagctgccaaagctgctgccaaagctgccaagtatggagccagaggtggagttggcatcccgacatacggggttggtgctggtggctttcctggctatggtgttggagctggagctggacttggaggtgcaagccaagctgctgctgccgctgccgctgccaaagctgccaagtacggtgccggaggagctggaaccctgggaggcctggtgccaggtgcagtaccaggtgcactgccaggtgcagtaccaggtgcactgccaggtgcagtaccaggtgcactgccaggtgcagtgccaggtgtgccgggcactggtggagtgccaggagcaggtacccctgcggctgcagctgctgccgccgctgccaaggcagccgccaaggcaggccagtatggtttgggccctggtgttggtggcgttcccggtggagttggtgttggtgggcttcccggtggagttggccctggtggtgttactggtattggaactggtcctggcaccggccttgtacctggtgatcttggaggagcagggacaccagctgctgccaaatctgctgctaaggcggctgccaaagcccagtacagagctgctgctgggcttggggccggtgtccctggacttggggttggtgctggtgtccccggatttggggctggtgctggtggatttggggctggtgctggtgtccctggatttggagctggagcagttcctggatccctggctgcatccaaagctgctaaatacggagcagcaggtggccttggagggcctggaggacttggtgggcctggaggacttggtgggcctggaggattcggtgggcctggaggtctcggtggtgttcctggtggagtagcaggaggtgcacctgctgctgctgctgctgccaaagctgccgctaaggctgcccagtacggtcttggtggagctggaggactcggggccggtggactgggagccggaggactgggggccggtggactgggagccggaggactgggagctggtggactgggggctgggggagtgatccctggtgctgtaggccttggaggtgtgtcccctgctgcagctgctaaggctgccaaatatggtgctgctggccttggaggtgtcctaggagccaggccattcccaggcggaggagtggcagcaagacctgggtttggactttctcctatctacccaggtggtggtgctgggggcctgggagttggtggaaaacccccgaagccctatggaggagcccttggagccctgggatatcaaggtgggggctgctttgggaaatcttgtggccggaagagaaagtga

SEQ ID NO: 3720 - DNA, 2897 bp, Rattus norvegicus
aagctttgtctccacagtgctggcattttaagctcaccctaccaggctcagtgttttgtatgataatttggggatcaacctcaggtcttcatgattacaaagcaatcaatttgctgtctgagctatctccttggcccctggttctatatttgtttcccacagtgtccacacaacaagtactggctccgagctttgccatctgggcttcgcaaaggctgagctgggactggaaagctagctctgtggttaagagcacttgcttcttttgcagagaacctgtgtttgattcctagcatccatgttgggtggcttacaaatgcctgtaaccaagggatcagatgcccttctctggcctctgagggcattacacacacacacacacacacacacacacacacacacacacacacacacacgtacgtacgtgcacacgcacgtgcttataagataaagaatttttttttttggttcttttttttcggagctggggaccgaacccagggccttgtgcttcctaggtaagcgctctaccactgagctaaatccccagcccaagaatttttttttaaaggctgtgaagctagggatactgaacaagatgcccgtagtgaccagcagcaagtagttactgacagttccctgggctgccccagaccatggctgtagatctgccttcattagtggtctcttgagtctgggttcaggatcaagatagcacacattccggtccccagctccgaaaaaaaaaaatatagcacacattccctccgaccacacatttctctgactaagtacctgaaggtagctggctcctgctgtaggtcaaacatccgggcaagggggccacatgtgtctacatgtaacacctgtaaaagagaattagattagcttcctggctaggccactgtgctctgtggcacctgaactgacagcacccagaagcaagcagtacaagaatgggggggtcttaggtgggggtctggtcctgaactccctgtgacccttccaatggaggatgaagttcatataatgaggatcagccagggtccctctagatcacccaatgcaaatgaagacatgatccaaatcctacttcccctcctaaaggtgtatgtgcttgtcaatcatcttctgtaagcccacctctcctgtactccttcccatacttttaagagttttttcagggggttggggatttagctcagtggtagagcgcttgcctaggaagcgcaaggccctgggttcggtccccagctccgaaaaaaaaaaaaagaaccaaaaaaaaaaaaaaagttttttcaggtgcctctacacctctggcaggaagctcatatacagtttctccttaaacatacagaggtctgtgtttggccccagatcttatactcaagagacaatgactagagtgagaactctattcagaacattaagtatcctttcttcttggtcatcctccgtggcctccatccatccgggtttgtccgatccctaactcctgtactcttatctttcccagacacatttttctagtaagagcgatccccttccactgcactacatgatttattgcttactctgtcctgtatgccttgtcccacaagacgtgggctgcactcctccgcccaggttccccctagcacaaaggatatgaagaggtggtgccaggctctcacctgaggggtgggctagggtgcccaagacttggggcgcagccctgggcccctccaccgcggcggtcgctctctcaagtgagggcttttatatttttatcaccgcggtggggttgcggacctggcgccatggcaacgggggcggggctcatttgaatacccaaatattcgtgagccgcgggcatccggggctcgggcaagatgaaccccgccccctagcaacggttgccgggacacgcggcagatccggtggaagggctccctagagtaataagagagaaggcggaaggctgaacacagtgaagacactcacagtggttcagagagccgcccatgagaggcttctggccagctctcggttatcagcctgctagctgaatagaccaagccgagcttgcaccccgggcggcgaccgaggtgagcgtgcaacctcaggcctgcaccacctgagtaaaaaccctgtcggttttctgaggatgtgcttactcgtttctttgaaatttcaaaaagtgttgaaaacatgtcatttgcgtctgacacagatgtaccctacttgcttgagtgggtggaacatttcatttcgccccaataccaacttttctgactttcggggtcgttcttcaagtggacgcagtatgagctgctgcagtgttgggacctcgagtttgggagaggtagggggtcttctccaaagcacgaggagcgcggtgtaatgggccgacgctgccccaggatggagccttcgctccacctcggcctacggcagctaggggttccggcgaactctgtcttcctctggtattccgcgtccgcggtgcagactgtcctcgactccaggacccggtcggaatgacctttccgctcctgggcctttgggcctttggtgaggcttcagggtggaggctctttggcaggctctctcaacgcgactcgagcgtacaccagtttctctccggaggaatcccaggctcgtaaccactgtctgggtctctcttttctgcacctaagaactaggaatcactgttgactgcagcacccaagttccgacaccgccctcccacctaggctcctcctagcagcggcttctgacggatgggttgctcagccaatcataacaggtggcggtggggcggagttcgaccaatcatcggcggcctcgagttgacggacgggcgcggggcggagcggggcggggcgagcgcgggcccggccaagtccccgccgtcc

SEQ ID NO: 3721 - DNA, 2841 bp, Rattus norvegicus
  misc_feature (1946)..(1948): n is a, c, g, or t
gacggcagagtaagacaacccctccttccaaataaaagaaagaaaagaaaaatgtagacaactcctactaaaaagaaacagatttccagagcgattgctgcagagcttggagcactaagcctgtgaccttgggtaagaattgtgcaggatggatacctttgtttggagccctggaataagataatatccacagaattatgagaaagggttaaaataaagtttccgcattatcaagaaggtcttgggttgctagcacaaatatatctatctcttcattttcagcaaatcacttggaagcaaaggacagacagaaaagtgcaaataactggggatagttagaggcagagaagttgatgagattactctgcaaaattgagtaaaccttatatattgtgaatacatggtagaccgggatgtctacacaggcatgggtgaaaataaaccatctattgaagtctgaggaaagctttctcatgccaaatgtttatctgaacttgaattaccctttaatcctggtcccttagctatgacacagataacttagctgtggcaggatggtccaaatccttatgtctcttcttcaagtcagtgttgcacatttcgctttgcaagcagaaaagaaattggtacagaagcattaaagaggctctcccatggtcacacaggcatggaaggtgattgctcagactcgggccctgtatgtcttatttctgtggccaactccaactaaagacgtgctaaatataataagaaataaacttctcgggctggaaagatggttcagaggttaagagcactacctgctgttccagaggtcctgagtgcaattcccagcaacccgatggtggctcacaaccatccatgctgagatccgatgccctcttctgacctgcaggcctacatgtaggcagaaagctgtatgatgtatacataataaataaatattcaaaaaggagaaaatttaaaaagaaagaaaagaaataaacttctcttgagaaaggaggattaaaactgtgtcaatacagagccattgtgcagaacattgggccagacatttacagtatgtgtttatgaaaatggaaggataggaaaggttgatgtctactggatgaaataaatgaccaacaaggtaaaagattaatgccaaagagaaaaggaatagtggttccaaagccaacaggactggcttttcagaaactctcttagcccttagcctttccagatacaaacaatttctacctgatccaggtagtcatcagcaaaatgctaatttcacccctctttactttccagaggatctgaaaacggtgactccacccaaggtctccttgtttgagccatcagaagcagagatcacagacaaacaaaaggctacccttgtgtgcttggccaggggcttcttccctgaccatgtggagctgagctggtgggtgaatgggaaggagatccgcaatggggtcagcacagaccctcaggcctacaaggaaagcaacaacatcacctactgcctgagcagccgcctgagggtttctgctcccttctggcacaatcctcgcaaccacttccgctgccaagtgcagttctatgggcttacagaggaagacaactggtcagaggactcacccaaacctgtcacacagaacatcagtgcggaggcctggggccgagcaggtaaatggcacctggagagctgacaagaaaactaaacacgactagtacttcaaaaatatgaaatgatctatgtagaagcaaagaatagacccaggaaaaagcccaaatggtgggacagataatcaaggacatggtgtcagaaaaccatagcatatgctttcttccaaggaatacttaaactcaaggggcagttcaggccaattggcttcccagttctttagtttctctgagctgtgtttatgagttcctcacagaccctcatagcctagtatttnnnagtccatcctgatgtagattttaaggtctcggtgacattgcctggcaccatcagaagacagtgtgaggagtatcagcggagagtgcttatgccatctgacgtgcatctgtctgtggccttaacattcacctttaaattttgttgttgggtgtagaacatccccaagaagtgccattctttcacccattttttcctccctctcttttctttcagactgtggaatcacctcaggtgagtaaatctctcaactttctctaagtcttctgtggtcttggctttgaaaacaggacacaaaattctacaaacatggagtttggggctgcccaaaggaacctgtttataagcacctactcactctcctttcctattaacagcatcctatcatcaaggggttctgtctgccaccatcctctatgagatcctactggggaaggccacgttgtatgctgtgctagtcagtgccctggtgctgatggccatggtaagaatggtaggatgggacaaacggttggaggtatagactgcagtgtatggaatgtatggtgatcttagaggaggacccaaccctgatatccagtcatgtcaaaaataccataaggaacacagtacaaagtaaaactggaggaatgcttatgtttgtactcctggaggatgaggagaaccaaggagctctcttcaagatcatacttgagaatctatttcctgtataacccctccctctgctccatggattctggaggtttaacaatgtcttttctttctcaggtcaagaaaaaaaattcctgagacaaactttatgcatcctgagctgttctttaccctggccatggattttcccgcaccttctccaatccctgttcctaaggacttgtctcctctccctccatggaaat

SEQ ID NO: 3722 - DNA, 6264 bp, Rattus norvegicus
attccactgttggagcttgagggagtgaaacaaacagaggaactgtgggcgaggactggaggcttggggctcactttttcctccgggctatcggattttcttagcaaactgacgtaggaggagaagttctcaggagcgatggggacctcccaggcctttctggtcctcagctgtctcctcacagggccgagcctcatcgtctgccagctcttattaccctccatccttccaaatgagaatgagaagattgtgccgctgagttcgtccttctctctgagatgcttcggggagagcgaagtgagctggcagcaccccatgtctgaagaagaggaccccaacgtggaaatcagaaccgaggagaacaacagtagcctctttgtcacggtgctggaagtggtcaacgcctcagcggcccacaccggatggtacacttgctattacaaccacactcagacagaagagagtgagatcgaaggcaggcacatttatatctatgtaccagacccagacatggccttcgtgcctctcggcatgacggattctttagtcattgtggaagaggacgattctgccatcataccctgcctcaccacggatccagacactgaagtaaccttgcacaataacgggaggctggtgcctgcctcctacgacagcaggcagggcttcaacggaaccttcagtgtggggccttacatctgtgaggccaccgtcagagggaggacgttcaagaccagcgagtttaacgtttatgccttgaaagccacgtcagaactgaatctggagatggacacacgccagactgtgtataaggcaggagaaacgatcgtggtgacctgcgccgtctttaacaatgaggtggttgacctgcagtggacttaccctggagaggtgagaaacaaaggcatcaccatgctggaggagatcaaactcccgtccatcaaactggtgtacacgctgaccgtccccaaggccacggtgaaggacagtggagattatgaatgtgctgcccgccaggccacgaaagaggtcaaggaaatgaagacagtcaccatttctgttcacgagaaaggcttcgtccagatcaggcccacctttggccatctggaaactgtgaacctgcatcaggtcagagagttcgtggtggaggtgcaggcctacccgacccccaggatatcctggctgaaggacaacttgaccctgattgagaatctcactgagatcaccaccgatgtgcagaggagccaggagacgaggtatcaaagcaaattaaagctgatccgggctaaggaagaagacagcggccattataccattatagttcagaatgacgacgacatgaagagctacacgtttgagctgtcaactctagttcctgcctccattctggagcttgtggatgaccaccatggctctggcgggggacagactgtgaggtgcacggctgaaggcacccctcttccgaacatcgagtggatgatctgcaaggatattaagaaatgtaataatgacacttcatggacagttttggccagcaacgtctcgaatattatcacggagttccaccagcgaggcaggagtacagtggagggacgagtgtccttcgccaaggtggaagagaccatcgcagttcggtgcttggcaaagaacgaccttggcattgggaacagagagctgaagctggtggctccctccctgcgatctgagctcacggtggcggccgcggtgctggtgctgttggtgattgtcattgtctctctcattgtcctggttgtcatttggaagcagaaaccacggtatgaaattcgatggagggtcattgagtcaatcagccctgatggacatgagtatatttatgtggaccccatgcagctgccttacgactccagatgggagttcccgagagatggactagtgcttggtcggatcttgggatccggtgcatttgggaaagtggttgaaggcacagcttatggattaagccggtcccagcctgtaatgaaggtggctgtgaagatgctcaaacccacagccaggtctagtgagaagcaagctctcatgtctgagctgaagataatgactcacttgggaccgcatctgaacattgtgaatttgctgggagcctgcaccaagtcaggccccatttacatcatcacagaatactgcttctatggggatttggtcaattacctgcataagaacagagatagcttcatgagccgacacccagagaagccaaagaaagacctggacatctttggattgaatcctgcagatgagagtaccaggagttacgtgattttatcttttgaaaacaatggtgactacgtggacatgaagcaggctgacaccacacagtacgtgccaatgctggaaaggaaggaggtttccaaatactccgacatccagagatcgctgtacgatcggccggcctcctataagaagaaatccatgctagactcagaagccaaaaacctcctttcggatgatgactccgagggtctgactttgctggacctactaagcttcacctaccaagtggcccgagggatggaatttttggcttcgaaaaattgtgtccaccgggacctggctgcccgcaacgtccttctggcgcaggggaaaatcgtgaagatctgtgacttcgggctggccagagacatcatgcacgattctaactacgtgtcaaagggcagcactttcctgcctgtgaagtggatggcacctgagagcatttttgacaacctctacaccacgctgagtgacgtctggtcttatggcgttctgctctgggaaatattctcccttggtggcacaccctaccctggcatgatggttgattctactttctacaataagatcaagagcggatacaggatggccaaacccgaccatgccaccagtgaagtctatgagattatggtgcagtgctggaacagtgaacccgaaaagagaccctccttctaccacctcagcgagatagtggagaatctgctgcctggacagtacaaaaagagttatgaaaagattcacctggacttcctaaagagtgaccatccggctgtggcacgcatgcgtgtggactctgacaacgcgtacatcggtgtcacttacaaaaatgaagaggacaagctgaaggaatgggaaggaggcctggatgaacagagattgagcgcagatagtggctacatcattcccctgccagacattgaccctgttccagaggaggaagacctgggcaagaggaacagacacagctcgcagacttcggaagagagcgccatcgagacgggttccagtagttccactttcatcaagagagaggacgagaccattgaggacatcgacatgatggatgatattggcatagattcctcagacctggtggaggacagcttcctgtaactggcaggctcggagtgtctatcatcttctctgggagcctcctcgggatccccttaagaaaaccacttcattgcaatgcaaaggttgagacttgggtgatgtggagacagaagttcccggccaagggtcttgggaagcctctgtgaatgactgggatactcggatcgaacgttgtccatgctgccccttgcaatccgtcagtagcatctcagcggcgtgtgaggtttggaaatggacggacaagggagtgactggccacagaagacgggctttgtgtttccggggcattggtgagattcccacacccaacttgtactgcagacaactccagcattgtaattatgtaaataaccctagccgaggacgtgttagatctgtgttaaccctcctctctggacctctgaagagaccactcagtacatccgtgtgcttccttccctcttggaatctcgtgtaccagctgctgttgaatttttctcctgaagtacatgcaaaaccactttgaactttggaaggtactggaatgttgtgttttactgtcttattagtgttaaagagggcaaaagataaaagactaaccaaccttgtgtagtagatttgggtcccttaggagcccaagaacgaatgttctgtatcttgtaatctatacatataacaccactactgttaacaataatgctaaagatgtaatccctaacctgatttctttacagagaaagcacaattaattagaacaaaacccttactaagtagatgacgagtttggcagttttttttttaacatttatattaagtaacatgtttctcaataaaatataataggtttagtggtttaaagttagcaagccctagagagcagagtgtaagtagtgttgtccagaaggccaaccttttgttgtagtgttctaagctgtttccctaatccaaggccctaagaacagttaatcgcctctgagttactgggattagaaataagcaaaacagaacccccgggtgtcctaaatgttcttagtagaaaggcttaagtctgagcccagtgtgacttctcatgctgtgtgtgaccttgtggaaaagaaccgtccacaaaaaggactccggtgggcagaagtatcttttgtggccagtgatgacttggatggatcccacccatacttaccttttaaatctatgacctcttaaggatgcgtcaacatcagcgcctcacttttcctctcttgtctcaaagagaaagagctgggaaccctgaaaccacggtggagctgaagattcgaaggctatgtgggcgtgaactggctccttcattcccaccgtttgcaactagggtcacaagcctcagtggtttcagacctccgccccagagatctggaattacgaggtctgacgggagcaagaagctatattatgttttaattaactccttggcgctcttgaggagtcagtgttcagaaacgctggcttgggttacaggggtttgctgcgggtggggcagggcagccttgaaaattggaactgagctagaagtcgaccacgcaggaaggctactatttttaagtccttggcttcatgtcaatgccacgtatccagcaattcctgcccttgattaacttccagcttagccgaggctgagaaaacaagatcttggcttgggcacatcttccagttctagtcagcgtgggtaccacttcccaccggatggaggacctgagctcgctcacctcaaagagggcccacaaatggtgcaagcccgtgtgccaggtctgtgtctaaccagctccggaaccggtggggaagataaaaaggtttctggatttgggggctttaggtgggaggctatcacaagcatccaaactgccaaactggttagtgtgggttcattggcattctctgcaatgtgtctaattgctgactctgtatgaatgaaacatggggtatgattaactgcaatcactgtatgcacttccagcaggtgatgctttggaaggcgcagaagcaataacaaggtacttgactacctactggcataatctcaatgcaaaccccaactttccccctctcacagtcagtgtgaggactgagccagattggccaattgagaagcaaaaacctgactagattcttttgagccaattagacttgaaatacgcccatgtttctagactcgcagctcaagtggtctgtttaccacgcgtttgcacagccttggttttgttgcttccttttactctaatgtctgtcacttgggaccttgcatgacaatttgaggttggaggaagcttctcagaccgacagtttggccatccctaccagtacttgcctctgagattaaatgggattgcattcgttttgtttctgagacagggcctctctatgtagccctggctgccctggaactcactgtgtaaaccaggctggccttgaactcccagagatccattgtctctgtccccccagggctgggattgctggtgtgtaccaccacactcagcagggatacatttttattttcaaacagtgttttgactgtatcctggtttctttttggcctctgcagagtcctggaagaaatttaccaattttctctgctttctattcttatttttatgatgacaatcaaagctggcccgaagaacacaatttgtgacttttttttttttaaataatcagtgatgtccttaaaatgtggtctgccaacctgtacaaaatggtcctatatttttgaagagggacgtgagataaaatgatgttatacatcgatatgtatatatctgttgctatgtagacttggagaatactgccaaaacgtgtatgacaagctgtatcactgcctttgtttatatttttttaactgtgatattccgg

SEQ ID NO: 3723 - DNA, 1318 bp, Rattus norvegicus
acctcatcagactctgacccagttcttgaatgactttggagacccagatgtttcagaatgcacattctggaagccaatggctactcccaccactgacaatgttgctgctgtttgcttttgcagacaggcagacggcaaatcttccgaaggctgtggtgaaacgtgatcccccatggatccaggtgctcaaggaagacactgtgacgctgacgtgcgaagggacccacaatcctggaaactcttctacccagtggttccacaaccagagctccacctggggccaggtccaagccagctacacgtttaaggccacagtcaatgacagtggagaataccggtgccgaatggcgcacaccagcctcagcgaccccgtacatctggaagtgatttctgactggctgctgctccagacccctcaactggtgtttgaggaaggggaaaccatcacattaaggtgccatagctggaagaacaaacagctgactaaggtcttgttgttccagaatggaaaacctgtgaggtattattatcaaagcagcaatttttcaatccccaaagccaaccacagtcacagtgggaactactactgcaaagcatatctaggaaggacaatgcatgtgtccaagcctgtcaccatcactgtccaaggttcagcaaccgcgtccaccagctctctagtgtggttccatgccgctttctgcctagtgatgtgcctcctgtttgcagtggacaccggcctgtatttctgtgtacggagaaatcttcaaacctcgggggaggactggaggaaatccctgtcagtcggaaagtacaaggctccacaggacaaatgacatcccatcgtatggctaaacagcggcagcttcttttcagccacaccgccgcttcatctacagccttcctttgaaagcaacttaccaccaggctggatatttggtcctgcaatcacaactgctaggaggctgaggcaggaggatcaccaaaggctgcccgggttttagagaagagagagtgcaagtctatcctggataacccaataagaccctgggtttagatggcttatcaggaaagagcacccattgctaagctcacagacaagaccacagattgatccctaaggacacagggcaaagggagagaacaaattcctgaaagttgtcctctgacctccacacgtccaccatggcagatgcacacaataaacaaattaaaatgtaatatatatattttaaacaagaggtggggaaaggctgggggttggtggcacagtttttatccaggacacatgatgctctggattttgacctcctataataaa

SEQ ID NO: 3724 - DNA, 1630 bp, Rattus norvegicus
ccaggaggagcgcactggagccaagccgcagacgggactccagactccaaagaggccacaccatgaagattctcctgctgtgtgtggcactgctgctgacctgggacaatggcatggtcctgggagagcaggagttctctgacaatgagctccaagaactgtccactcaaggaagtaggtatgttaataaggagattcagaacgccgtccagggggtgaagcacataaagaccctcatagaaaaaaccaacgcagagcgcaagtccctgctcaacagtttagaggaagccaagaagaagaaagagggtgctctagatgacaccagggattctgaaatgaagctgaaggctttcccggaagtgtgtaacgagaccatgatggccctctgggaagagtgtaagccctgcctgaagcacacctgcatgaagttctacgcacgcgtctgcaggagcggctcggggctggttggtcgccagctagaggagtttctgaaccagagctcacccttctacttctggatgaacggggaccgcatcgactccctgctggagagtgaccggcagcagagccaagtcctagatgctatgcaggacagcttcactcgggcgtctggcatcatagatacgcttttccaggaccggttcttcacccatgagccccaggacatccaccatttctcccccatgggcttcccacacaagcggcctcatttcttgtaccccaagtcccgcttggtccgcagcctcatgcctctctcccactacgggcctctgagcttccacaacatgttccagcctttctttgatatgatacaccaggctcaacaggccatggacgtccagctccatagcccagctttacagttcccggatgtggatttcttaaaagaaggtgaagatgacccgacagtgtgcaaggagatccgccataactccacaggatgcctgaagatgaagggccagtgtgagaagtgccaagagatcttgtctgtggactgttcgaccaacaatcctgcccaggctaacctgcgccaggagctaaacgactcgctccaggtggctgagaggctgacccagcagtacaacgagctgcttcattccctccagtccaagatgctcaacacctcatccctgctggaacagctgaacgaccagttcacgtgggtgtcccagctggctaacctcacacagggcgatgaccagtaccttcgggtctccacagtgacaacccattcttctgactcagaagtcccctctcgtgtcactgaggtggtggtgaagctgtttgactctgaccccatcacagtggtgttaccagaagaagtctccaaggataaccctaagtttatggacacagtggcagagaaagcgctacaggaataccgcaggaaaagccgcatggaatgagacagaagcatcagttttctatatgtaggagtctcaaggagggaatctcccagctttccgaggttgctgcagacccctagagaactccacatgtctccagcgcctaggcctccaccccagcagcctctccttcctctgggttctgtactctaatgcctgcacttgatgctctcgggaagaactgcttcccccacgcaactaatccaataaagccaccttgcgat

SEQ ID NO: 3725 - DNA, 3643 bp, Rattus norvegicus
tgtgtaggtttttaattgacttccttaattgatatagagggcacactgccttcccctcctcgtttggatctcatgctgttttaactttgtgatggctgaactcttggaagcagcatattcaacccgagaattagctgaaagattttcaccggatacaaaacttttcttccttaaccaggaacacgtttgtgtccccgaatactcaaagtgctttttttggcctttgcttccgtgagaacttacagctcagccgtgggctctccctagcaccgtgaagggaggcataatcaagaagcatcacacttctgtaactcttactatggaagaggagaaggcagccagaggagccacacatgttctccgcttcagcacgtcctagcgccagggcacgaagatgaatggtgagcccaggctatgaccccctagtctctccacacttcatctgctacaacttccggcttagacatggaaattctttgtgaagacaatatctctctgagctcaattccaaactccttaatgcaattaggtgatggcccgaggctctaccataatgacttcaactccagagatgctaacacttcggaagcatcgaactggacaattgatgctgaaaacagaaccaacctctcctgtgaagggtacctcccaccgacatgcctctccattcttcatctccaggaaaaaaactggtctgctttattgacaactgtcgtgattattctcaccattgctggaaatatactggtcatcatggcagtgtccctagaaaaaaagctgcagaatgccaccaactatttcctgatgtcacttgccatagctgatatgctgctgggtttccttgtcatgcctgtgtccatgttaaccatcctgtatgggtaccggtggcctttgcctagcaagctctgtgcgatctggatttacctggatgtgctcttttctacggcatccatcatgcacctctgcgccatctccctggaccgctatgtcgccatccagaaccccattcaccacagccgcttcaactccagaaccaaagccttcctgaaaatcattgccgtgtggaccatatctgtaggtatatccatgccaatcccagtctttggactacaggatgattcgaaggtctttaaggaggggagctgcctgcttgccgatgacaactttgttctcataggctcttttgtggcatttttcatccccctaaccatcatggtgatcacctacttcctgactatcaagtcacttcagaaagaagccaccttgtgtgtgagtgacctcagcactcgagccaaactagcctccttcagcttcctccctcagagttctctgtcatcagaaaagctcttccaacggtccatccacagagagccaggctcctacgcaggccgaaggacgatgcagtccatcagcaatgagcaaaaggcgtgcaaggtgctgggcatcgtgttcttcctgtttgttgtaatgtggtgcccattcttcatcaccaatatcatggccgtcatctgcaaagaatcctgcaatgaaaatgtcatcggagccctgctcaatgtgtttgtctggattggttatctctcctcagctgtcaatccactggtatatacgttgttcaataaaacttataggtccgccttctcaaggtacattcagtgtcagtacaaggaaaacagaaagccactgcagttaattttagtgaacactataccagcattggcctacaagtctagtcagctccaggtgggacagaaaaagaactcacaggaagatgctgagcagacagttgatgactgctccatggttacactggggaaacaacagtcggaagagaattgtacagacaatattgaaaccgtgaatgaaaaggttagctgtgtgtgatgaactggatgctatggcaattgcccagggcatgtgaacaaggttatacccatgtgtgtggggcggggataaggaggctgcaacaaattagactactccagtcgaccaactataatgtcctgacagcattggagctaggagtgttacgatgctttaattattgccaatgagatctctaaaaccattggccttttgtgcaattgtaatgaggcataaaatgcatctaagtaacttctattgtcaaatacgaacctggctgcccatgttgtggatgggtagcatgggagtgagttggtgacttattattgtatataaaagtagctagaaatactgaaaataatgaatagcttaaaaaagtgtttcaaattcaccacgacatatattttgaaaagaaaaaatagacagtaatatgacatttgtattgctaatataattcattgaaatacttgacaatatttttcattcttgctttttcatagatgccattttgaaatgttcacaagaccgctagcatttgctgcatttgtcgttaattctcagatgtggaagggttttaaatgttattcgataacacgctgctttctcttctacttcttgggctttacctgaatttgaaatgtggtcttgtttcgtatatttttcttctctgtaaagtatcaaaggataattccactttcccaagtacagttctagaacgcgcttcaaataaacagcatcctggaggtgttcggtaactcactagggaacgactgcgctgcgcatgcgccctttgagcagtgaccagtacaaagagttgactgtcacagctgaacaacaaactcaggtttctcgctgttagcagtagcttcttaggctatttctgtaaaaatcaagtgactttcatattgacagttatcaggtaaaactgatgttttcaaagagctgggaaatagagctctgttgacaaaagaatgcttgcctcacgtgcaggaaatcctagagtggatctccagcaatgcataaccaggcatcatggtgcacggctgtctgtaatcctagcacttgggaaatgcaggcaggaagatcaggaattcagtcattctcagctgtttatcttgtatgaggccaccgtgaactgcatgagatcgtgtctccaaactaaataaataaatataggggtattttttaatgacacttttagattaatgtatttatattatttgtaaaaacgggttagcttggttccataagcgatatgttggactggatctgatgagtggagcagttctagcataacaaggatataagattttgcattaaaatgacaacttaattggttgttatgaaaaaagtatgaatagattcattttgagaatcaaccagttcgatttctttcttaactgattcagaaaagggcctgtatcaactctcgagaattttttcatttttttttctcatatttgccaagccaacaaggaaatgggaaaatatcagttgactcaaagattgcacccaatgcatagaataacacagcaaattggattcaatccataaataccaagatttaaaacaatattcttgttccttccctcaaaaactacatttactctgacaaatcccaattaaaaagcaaataccagttaccgtaatgttttgcagaaatggctactacagaccaacaaagaccagctgaagttaatccaccaggacactgtgagcacattactgttgaaacagaccatagatacagggtaaaatgctgaaacattcttcctaatacaaa

SEQ ID NO: 3726 - DNA, 4854 bp, Rattus norvegicus
gaattctgaaactcaccagggagacttgttgagcactgaaaaaataaaagttcaacctatgaatactatcttccacgggattgcagctttcctatgcaagccaccacagcttctcacatctcagtgtagaagtggatgtggaacatcggataggctaacagcagagacaagctggaacctcaaagcaagttgcgtgcagtgggggaggaggttgcattgagcaagtattcagaaactcagagatgtctctggatgttgtgtggaaagtgtctattttaggtaacgaaagtttatactatatagaatgacctaaatacattgatatatccactttaccccaaaaagaaaaataataataaggagaaaaaaacaccttagttcttaggatcatgacattactatgacatctttgtcttaaaattcaatatcactcaaagcctctgtttcgaatagccatgcatagattccggtttcttaaaaactactgggtgtaatctttttaaccagtgatcagtgttcaagtacatgagtcattacaagaaagtgaacaatccaaggtaccattccaccataggaaagtgtggggagagagtaaacaaagcacatacttagaacaatctataaagaagagggaatgccaagggagaccagaaacagaattggacaaggacagaaaaccagcagaacctgctacaacatagctgtactttataatgaccatttcctgccctctcttacaaatccaagctgggttcagacagctctcagacctctcctgttctcttcattttccagaggatctgaaaacggtgactccacccaaggtctccttgtttgagccatcagaagcagagatcgcagacaaacaaaaggctaccctcgtgtgcttggccaggggcttcttccctgaccatgtggagctgagctggtgggtgaatgggaaggagatccgcaatggggtcagcacagaccctcaggcctacaaggaaagcaacaatatcacctactgcctgagcagccgcctgagggtttctgctaccttctggcacaatcctcgcaaccacttccgctgccaagtgcagttctatgggcttacagaggaagacaactggtcagaggactcacccaaacctgtcacacagaacatcagtgcggaggcctggggccgagcaggtaagggggccttggggagctggtaagaagaatgatcatcagtagtgccaaagaaaaacggaaagatgcaggtgaaaagccaggaagtcaggatacagaaaatacactggaaagtgataaaaagcctaccaagaagataaactagacaactgtgtataattctcactccagatcctcattctgtcagccttacatgtaagatctccagtctatgccacttgtgcagctcagtatccgaatcattagctttggtgcctatgccatgggttttaagaacacttggtacaacagaagagagatggttctgggacctcctggggggaggggtaatctgggcctatcaaactatgctagctcctaggttgacttaattttcaatcttcttaataaaaaggggtctcatccattttcctctctctctttctattctttcagattgtgggattacctcaggtaagcgagttaactctttcttcacctctcatgatcttgactgtagaactagctacctggccaacggtacttacctgctctccttttgtcaacagcatcctatcaacaaggggtcttgtctgccaccatcctttatgagatcctgataggaaaagccaccctgtatgctgtgcttgtcagtacgctggtagtgatggctatggtaaggaacgggcagatggtccttacaggggagatgacacatggaacacaagacacttaaatccaggggcttaagggctcttccaggattagatgggagcagtagagaaagctctgctcccatgccattaaggacaagaagaaatttcaaagaattttagtgaatgatctacagagaggacatgctatgataactcaaaatgcccaagggatattttagtagctctataatttgtcagaacaatgggccttcctacattcttcaagccccactatgcatggccattggaaaacctaaaatgcttctcatccgcaggtcaaaagaaagagttcctgaagccagacctgaaggtgaatccaagagcttacaacccattgtggtgttgatacagattttcttctaccggcgcttctgaagagcctattctcctttgtgaatcccaaagtctgcctagtcatgtatatttgtgtttgtatgtttgaaatccttgtggcctggagagtgcctagcacacttacaattagtaaccataaccaataaaacatgttctagaatggcctgactctctctggtgtgtgtagatatctttatttcttttctctccccaaactccttgatcaatttatgattagaaaagaagagatattcaagaaaaatgatgcccatccagggtaagagaagtgaaggcctcaccctcaaattaacagatgatgattggggttggggatttagctcagtggtagagcgcttgcctagccaagacgggccctgggttcggtccccagctctggaaaaaaaaaaaaaacagatgatgattaagtttggaaggtagtgacagaaactaaaaattctcaagagagaaggacagaggtcctgagtacaggaagtctcttaacttcaaaaccaaaccaactaaacaaacaaaagattagtgctctgggggacagcagctacagattacacaaatgtatccacctgcaacttgtcatgcccctgtggctaacaaggcttggttccatgtgtgtcacctatcttcctttaggcctttcactgaacacatgtgttcattcaccaagcagctttcctagatgattacccatgacaatgcactgacttggaaaattatattccaatggaaaatgtgtctttcacttaaagtacaaatcgttgttaaattataccccagtgaaatggatgggtgtaaatcacatcacacaagtgtgcctagttgtacagaacttagagcttcctataagcaagagcaagacctatttctacatctagaaagcctgcatatctcttgagatctcgctgcagccattgtggagtagttgagatacttaagatggcataaatactcaatgattcatcatacttcataatcccccatgctttgttcctctcatcctcgtcataccattctgcatgttctcctcctgcctgttccacttggagcaacacatacccttcttcccttagcaatccttacttcattttgaggacttggattaattgtcttcctggagcctttagtggtttttgccagtccttcctttctactaagactagatcaaaacattctcaattgtttagcttcttgtaaatacttgctttgaatatttatcatactcaatgggaactgtttcttatctgacacttcccatgtaactgatggcataactaaggtgttatttctgatagtaccctggaatgctgaatggtatttgctttggggtagacctttgtggtaattttctaataaacatgtgaatggtgagggaaatgcaagtgaccggttttataaacagtcatttcattgaggccttccctcttgcttacatatgagttcagagtttaatctgtgcaaaaatacaatacagctacagacagacatggttacatgtatattcatatcactcactctgaacacatcactgtaatgcattgattctgaccagtcatagaacagaggtaactaaaccacagttttcaagaaaacaatctgtctacacagggactaagtcaaggggaaacaaaaaagaacagaaataaaagccagcactttgaaatagctgagtgaactgtccacaaagttgtactcggccagttagataatcaggagggcatgcaaacatacagattcttcaaaaacgtgtactttgtgcacaacagagagtgcttgtgctcaccagaggcaggagaaaaagtacaaacaacatggctgaattctttggagtttagctattttgggaacaagaaagagtcagagacagcaataatcaaaaccaaggctgagaaaccatattagcacaagcctctctgagaatggactcatttcttgcaaccagcatagaatctaacacttgagtaacccactaaggacttgtggactaaataaatgagaaagctgaagcattgtccagtaagcaataggaatggatgagtcgtttctgaggagcgacatgtctcatacttcataagtatagacgagagcagagcactctgtggagtctcctgttagcagccttaccacttcactcctcccacctatcttcctataaatgccagcctaagcaggtgggcactgtgtctcagaggggaaacccagtgacatagatgctctcagagagggagagaacatgttcagaacaggggctccctccctgcatcaacaacaccaccatcagtcccaagaacatctccaagctcctctcctaagatttacccagcttgagatttttcccagcccctctcagccagacaaacctctctgccacctggtctccctgcccctgcccaggcactggggtagggcacaagaaacttttttgtatcttggtgtaacattgtggggactggggggggccacaatgattcaactggaagaggtgcttttacaaaaagctctaacccccaaaacaccaactctctgcccaagaaatgcatttaacatgtgaggaggagtctgtgtgagtggacctacaaggtcttctaatagctaagcattttcttgtcctagaaagctt

SEQ ID NO: 3727 - DNA, 6903 bp, Rattus norvegicus
  misc_feature (6844)..(6844): n is a, c, g, or t
ggaaggggcccggatgtactgaggatgcattacaatctcacgaaaggaggcggtagtggaaagcagcagtttttggtgtttggtgcaataatggggatcaggtaatcacccgaaggagcaagaaccactgcggatccacggcttcctggatttgcgcgagagccgccggcctcggaggagggatccatccagagccgctcgcggctgttgctgcatttcttcctctttgtggcttctcctttccaagcagtttttggccaatggtcaatgaaaacacgaggatgtacgttccagaggaaaaccaccaaggttccaactatgggagcccacgcccagctcatgccaacatgaatgccaatgcagctgcaggacttgcccccgagcacatccctactccaggggcagcactgtcctggcaggcagccatcggtgccgcccggcaggccaagttaatgggcagtgctggcaatgcgaccatctctaccgtcagttccacacagcggaagcggcagcagtatgggaaacccaagaagcaggggggcacaactgccacacggccgccccgggctctgctctgcctgactctgaagaaccccatcaggagggcatgcatcagcattgttgaatggaaaccatttgaaataattattttattgacgatttttgccaattgtgtggccttagcaatctatattccctttccggaagatgactccaacgccaccaactccaacctggaacgggtggagtatctcttcctcatcatttttaccgtggaagcatttttaaaagtgattgcctacggactactcttccaccccaacgcttacctccgcaacggttggaatttactagattttataatcgtggttgtagggctttttagtgcaattttagaacaagcaaccaaagctgacggggccaacgctctgggagggaaaggagcgggattcgatgtgaaggcactgagagctttccgtgtgcttcgtcccctgcggctggtgtctggagtcccaagtctccaggtggtcctgaactccatcatcaaggccatggtgcccctgctgcacattgccctcctcgtgctcttcgtcatcatcatctatgccattatcggcctggagctcttcatggggaagatgcacaagacctgctacaaccaggagggcataatagatgttccagcggaagaggatccctccccttgtgctttggagacaggccatgggcgacagtgtcagaacgggaccgtgtgcaagcccgggtgggatgggcccaagcacggcatcaccaacttcgacaacttcgccttcgccatgctgacggtgttccagtgtatcaccatggagggctggacagacgtgctgtactggatgcaagacgctatgggctatgagttgccctgggtgtattttgtcagtctggtcatctttggatcctttttcgttctaaatctggttctcggtgttttgagcggagagttttccaaagagagggagaaagccaaagctcgaggagacttccagaagcttcgtgagaagcagcagctagaagaagatctcaaaggctacctggactggatcacccaggcggaagacatagaccctgagaatgaggacgagggcatggatgaagacaaaccccgaaacatgagcatgcccacaagtgagactgagtctgtcaacaccgaaaacgtggctggaggtgacatcgagggtgaaaactgtagagcccggcttgcccaccggatctccaaatccaagttcagccgctactggcgccggtggaatagattctgcagaagaaagtgccgtgccgcagttaagtccaacgtcttctactggctggtgatcttcctggtgttcctcaacaccctcaccattgcctccgaacactacaaccagcctcattggctcacagaagtgcaagacacggccaacaaggccctcctggcccttttcacggcagaaatgctcctgaagatgtacagcctgggtctgcaggcctactttgtatccctcttcaaccgctttgactgtttcattgtgtgcgggggcatcctggagaccatcctggtggagacgaagatcatgtcgcccctgggcatctccgtgctgagatgtgtgcggctgctcaggattttcaagatcaccaggtactggaactccctgagcaacctcgtggcgtccttgctgaactcagtgcgctccatcgcctccctgctgctactcctcttcctcttcatcatcatcttctccctcctggggatgcagctgtttggtggaaagttcaactttgatgagatgcagacccgtaggagcacgtttgataacttcccgcagtctctcctcactgtgtttcagatcctgaccggggaggactggaattcggtgatgtatgatgggatcatggcttatggcggcccctcttttccagggatgttagtctgtatttacttcatcatcctcttcatctgtggaaattatatcctactgaatgtgttcttggccattgcggtggacaacctggctgatgcggagagcctgacctctgcccaaaaagaggaagaagaagagaaggagagaaagaagctggccagaccggccaggactgccagcccagaaaagaaacaggaggtgatggagaaaccagcagtagaggagagcaaagaggagaaaattgagctgaagtccattacagcagatggagaatccccgcccactaccaagatcaacatggatgacctccagcccagtgaaaatgaggacaagagtccccactccaacccaaacactgcaggtgaagaggatgaggaggagcccgagatgcctgtgggcccacgcccccggcccctgtctgagctgcaccttaaggaaaaggcagtccccatgccggaagccagtgcatttttcatcttcagcccaaacaacaggttccgcctgcagtgccaccgcattgtcaatgacacgatcttcaccaacctcatcctcttcttcattctgctcagtagcatctccctggcggctgaggaccccgtccagcacacctccttcaggaaccacatcctaggcaatgcagactatgtcttcactagtatctttacattagaaattatccttaagatgactgcttacggggctttcctgcacaagggctctttctgccgaaattacttcaatatcctggacctgctggtggttagcgtgtccctcatctcctttggcattcagtccagcgcgatcaacgttgtgaagattttaagagtgcttcgtgtcctcaggcccctgagggccatcaacagggccaaggggctaaagcacgtcgttcagtgtgtgtttgtggccatccggaccattggaaacattgtaattgtcaccactctgctgcagttcatgttcgcctgcattggggtccagctcttcaagggaaagctctatacctgttcggatagttccaaacagacggaggcagaatgcaagggtaactatataacatacaaagacggagaagttgaccaccccattatccagcctcgaagttgggagaacagcaagttcgactttgacaatgttctggcagccatgatggccctctttaccgtctccaccttcgaggggtggccagagctgctgtaccgctccattgactcccacacagaagacaagggtcccatctacaactatcgtgtggagatctccatcttcttcatcatctacatcatcatcattgccttcttcatgatgaacatcttcgtgggtttcgtcattgtcaccttccaggagcagggggaacaagaatacaagaactgtgagctggacaagaaccagagacaatgtgtggaatatgccctcaaggcccgacccttgcgaaggtacatccccaagaaccagcaccagtacaaagtgtggtacgtggtcaactccacctacttcgagtatctgatgttcgtcctcatcctgctcaacaccatctgcctggccatgcagcactacggccagagctgcctcttcaaaatcgccatgaatatactcaacatgcttttcactggcctcttcacggtggagatgatcctgaagctcattgccttcaaacccaagcactatttctgtgatgcatggaatacatttgacgccttgattgttgtgggtagcattgttgatatagcaatcaccgaggtacacccagctgaacatacccaatgctctccctctatgagtgcagaggagaactcccgcatctccatcaccttcttccgcctcttccgggtcatgcgcctggtgaagctgctgagccgaggggaaggcatccggaccctgctgtggaccttcatcaagtccttccaggccctgccctatgtggcccttttgattgtgatgctgttctttatctatgcagtgattgggatgcaggtatttgggaagattgccctgaatgacaccacagagatcaatcggaacaacaacttccagacgttccctcaggctgtgctactgctcttcaggtgcgccactggggaggcctggcaggatatcatgctagcctgtatgccaggcaagaagtgtgctccagagtctgagcccagcaacagcacgaaaggggagacaccctgtggcagcagtttcgctgtcttctacttcatcagcttctacatgctctgtgccttcctgatcatcaacctctttgtagctgttatcatggacaactttgactacctgactagggattggtctatccttggtccccatcacctggatgaattcaagagaatctgggccgaatatgaccctgaagccaagggtcggataaaacacttggatgtggtgaccctcctccgtcgaattcagcccccactgggttttgggaagttgtgtcctcaccgtgtggcctgcaaacgcctggtgtccatgaacatgcctctgaacagtgatgggacggtcatgttcaatgctacactgtttgcccttgtcaggacagccctgaggatcaaaacagaagggaacctagagcaagccaatgaggagctgagagccatcatcaagaaaatctggaagaggaccagcatgaagctgttggaccaggtggtgccccctgcaggtgatgacgaggtcacagtgggcaagttctatgccaccttcctgatccaagagtacttcaggaaattcaagaagcgaaaagagcaggggctggtcggcaagccctcgcagaggaatgcactgtctctgcaggctggcttacgcaccttgcatgacattgggcctgagatccggagagccatctctggggatctgacggctgaggaggagctggacaaggctatgaaggaggcagtgtctgctgcctccgaagacgacatcttcaggagggctggaggcctgtttggcaaccacgtcagctactaccagagtgacagcaggagcaacttccctcagacgtttgccacccaacgcccactgcacatcaacaagacagggaacaaccaagcggacaccgaatcaccgtcccatgagaagctggtggactccactttcacccccagcagctactcatccacgggctccaatgccaacatcaacaatgccaacaacactgccctgggccgcttcccccaccctgctggctactccagcacggtcagcactgtggagggccatgggcctcccttgtcccctgctgtccgggtacaggaggcagcatggaaactcagctctaagaggtgccactcccgagagagccagggggccacggtgagtcaggatatgtttccagatgagacccgcagcagcgtgaggctgagcgaagaagttgagtactgcagtgagcccagcctgctctccacagatatactctcctaccaggacgatgaaaaccgacaactgacctgtctagaggaggacaagagggagatccagccatctccgaagaggagtttccttcgctctgcctctctaggtcgaagggcctccttccatctggaatgtctaaagcgacaaaaggatcaagggggagacatctctcagaagacagccttgcccttgcatctggttcatcaccaggcattggcagtggcaggcttgagccccctcctgcagagaagccattctccttccacgtttcccaggccacgccccacgccccctgtcactccaggcagccggggcaggcccctacagcccatccctaccctgcggctggagggggcggagtccagtgagaaactcaacagcagcttcccgtccatccactgcagctcctggtcagaggagaccacagcctgtagtgggggcagcagcatggcccggagagcccggcccgtctccctcaccgtgcccagccaggctggagctccaggcagacagttccacggcagcgccagcagcctggtggaagcggtcttgatttcagaaggactgggacagtttgctcaagatcccaacttcatcgaggtcaccacacaggagctggctgacgcctgcgatatgacaatagaggagatggagaacgccgcagacaacatcctcagcgggggcgcccagcagagccccaacggcaccctcttaccttttgtgaactgcagggacccagggcaggacagggctgtggtcccagaggacgagagctgtgtatatgccctggggcgaggccggagcgaggaagcgctcccggacagcaggtcctatgtcagcaacctgtagtccgcagggctggcgagacgcgggtgttttttattcgtttcaatgttcctaatgggttcgtttcagaagtgcctcactgttctcgtgacctggaggtaaccggaacagcgtcttcattcactgctgtcgggataagcctcagagctgggcgntgtacgaagtcggcttttcaggggagaaggccaaggccgtggtgcgggggctccagcac

SEQ ID NO: 3728 - DNA, 350 bp, Rattus norvegicus
aacacatggaagctgcagtcacccaaagcccaagaaacagggtggcagtaacaggaggagaggtgacattgagctgtcgccagactaataaccacgactacatgtactggtatcgacagaacatgggggatgaactgaggctgatccattactcatatgatgttaaccgcactgagaaaggagatgtctccagtgggtacaaggcctcaagaccaagccaagaggacttctctctcattctggagtcagcttctctctctcagacagctgtgtacttctgtgccagcagtgataactgggggaggtatgctgaacagttcttcggatcagggacacgactcacggtccta

SEQ ID NO: 3729 - DNA, 1625 bp, Rattus norvegicus
tctagaactctcagtgacctttctccttcagccttctaagggcttgagattactggcatgtactagcaaaacatcatatttgaaatgatctagttttcccatttgatttcaagttcacaagttcgttactcactggaaagtgcccattcctgttatagtacatttcacctagtagacactgaacctaatggaaatgttggcccaacctgtacagctgcatcaatcagtgtatgagtatgaattgttaatatgccaaacagttgactcattattttgggcgattgttttatactgaggagacctttaaatttatgctttctcatttatgtaacttgtttcattataggtacacatatgttctggtttaggagcacttaccatttatgaaaatgcattcacataagcttttgcctggtgtcagcaatttccttctattgggggagtagggaaggtaccgaacagcagcaggcttttagactttaggcaggtgtgactcttgaacttactgtcttatttcacttcatcctccaaggcgtgcactcacttggtgtgcccaccttttaagtgcgagaacaacggacaggcaacatgagtgattggagtgccttacaccagctcctagaaaaggttcaaccctactccacagctggaggaaaggtatggatcaaggtccttttcattttccgcatcctgctcctgggcactgctatcgagtcagcctggagtgatgagcagtttgaattccattgcaacactcaacagcctggttgtgaaaatgtctgctatgaccaagccttcccaatctctcacgtgcgcctctgggtcctacaggtcatattcgtatctgtgcctacactcttacacctggcacatgtgtactatgtgattcgacagaatgagaagttgaagaagcaagaggaggaggaacttaaagttgctcattttaatggggccagtggggaaaggcgcttgcagaaacatacaggaaagcatatcaagtgtggcagtaaagaacatggtaacaggaaaatgagaggcagattgctgctaacctacatggccagcatcttcttcaagtctgtcttcgaggtggccttccttctgatccagtggtacctttatggattcactctgagtgccgtttacatctgtgaacagtctccttgcccacatcgggtggactgcttcctctctcgccccacagaaaaaaccatcttcatcctcttcatgttggtggtgtcaatggtgtcttttgtcttgaatgtcatcgagctgttctatgtcttatttaaggctattaagaatcatctggggaatgagaaggaggaagtttactgtaatccagttgagctacaaaaaccttcctgtgtctcttcgtcagctgttctcaccaccatatgttctagtgatcaggtagtcccggtgggactttcttccttctatatgtaaagagaacagaaccatgtcagttacagtgcatagtcaaagggggaagggcaggcaggaagtatcctttctggcttgtctgagccttttttccccctctgtgatgataaacagaattcttagagggttttaggtagacagaaaagcaaagcaagggtactggacattaacattctaga

SEQ ID NO: 3730 - DNA, 1831 bp, Rattus norvegicus
  misc_feature (601)..(601): n is a, c, g, or t
aagcttaagaaatcgtaagacttgtcttgggttagaagtgtagctcagtggtagaatgcttgcccagcacgtgagaggccctaggttcaattcccagcagagtccaaagaaacctgccttagaaagtaaatgacctgagtgcatattggaaaccatgctcgtaaagcactagagcttgacccttttgctgatccttccttccctaagaggccacttcacatcacatcagttataggtacatgggatactgcttgattcaaactccctactctatcctagtcatggaagaagagataatttcaccccctccaacctgtacatgggctttggggcactcgtatacgctaaacacgtacttcactcaagactcagcatgatggagggtttccttttgtctcttcaccaccagaggctcaggtctgcacacatcttgtctgtaattcagttgtaactactcaaatgtccacaaccatgtgagaaagcagtaaacggttttattagcttcgcttcagttactatgacagctgtgctctctgaggcgggtctctctaccgaaagctatcaaggctggttcttaccacaacactggttgccctgtgcntttcttgaggtgaacgtatctctcactgctgggcacccaaactggattatcttgattatcttctttaaagctagagaaaggctgccttgcctgacatcattgcttgaattcctttactctgcgaatgctgaaatctttggtgaaggtggcacagaagagttttcttgctgtccagattaaaatcctcttatcatatatatatgtatatatatatatatatatatatatatattttttttttttttttttttttttttgctgacccagccgaggccttgagtttcagttccctaaaggcatagggattctgacatgttttgcagtagccgttgttgtccatgctgagtgtccataaatgtatgccccggggagttatgcttgactatatcactatgcatggggggcagataaaggggcacataattataaccatatatggcatgaattaatatagagatctccaactgtcccagaaagctttcttctctactcttctccagggtagagctgagcagactaaaagattttatcaaagaaaagccttcaaatactacctcagggatgtttctaaagagtcctgagaagagcagaccctgccgcctccagtagattggacagccgtagctcagaagagcctccagaatttcctgcaggaggcttcagaaggtttccatcgtgaggatgaaagtcagaagccattgcctagccattcacttcaatgttttaatggcagaaaataaatttccagtcacgcatctctaaccacatggcagtcaaactcacagcaaatcaacaggaaagcacggcagggtgtttggggtcgggcaaccggaagtcgggaaggcaacaaattggtactgaaggtgcatgttctgtaaaccgcatggggatagcagaaaattctctgccacatacagcataccttctgcgaaaattccaactgtttctacctctgtagactgttcacataaattcacattggggacgtggatcctgctgacagctgctgacagctggcctcagctgcttcttttttttttttttttttttttttttcctgttctatgttgctttaatcttggctggccagatctcaagtactgttccacaagtgtcattgcttctgtggatcacttcctcatcccctatcccgggtttccggactgggctggcagtgaagataaaacgtgtctagaaagtcacaggagccactgtctggcacttagagcc

SEQ ID NO: 3731 - DNA, 945 bp, Rattus norvegicus
gaattcccccgaatccggagtggcggagatgggcgccgcgaggcgtccagtgcggtaacgcgaccgatcccggagaagccggcgggagccccggggagagttctcttttctttgtgaagggcagggcgccctggggcgggctccggccgcgatggcagaggctgagcggggctgagcccgcagccgcctgcagccttcgggcccccttgagtccctgccatggcgaaacagtacgatgtgctatttcggctactgctgatcggggactccggggtgggcaagacctgcctgctatgccgcttcaccgacaacgagttccactcctcgcatatctccaccatcggtgttgactttaagatgaaaaccatcgaagtagacggcatcaaagtgaggatacagatttgggacacagcagggcaggagaggtaccagactatcacaaaacagtactaccggcgagcccagggaatatttttagtctacgacattagcagcgagcgctcttatcagcacatcatgaagtgggtcagtgacgtggatgagtacgccccagaaggcgtccagaagatcctcatcgggaataaggctgacgaagaacagaaacggcaggtggggagagagcaagggcagcagctggctaaggagtatggcatggacttctacgaaacaagtgcctgcaccaaccttaacattaaagagtccttcactcgtctgaccgagctggtgctgcaggctcacaggaaagagctggatggtctccgaacatgtgccagcaatgagctcgcactggccgagctggaggaagacgaaggcaaaactgaaggcccagcaaactcttcaaagacctgctggtgctgagggtcctgtgtggaatcctccctcccccagtccccttccctcaggagccccgtggaggcagggagtctggcctttgtcatcactgtc

SEQ ID NO: 3732 - DNA, 1725 bp, Rattus norvegicus
gaagctgagagagtcggagacgctatccgcttccatccgtcgtgcagaccctgccggagccgctgccgctatggatgatcgggaggatctggtgtaccaggcgaagctggcagagcaggccgagcgatacgacgaaatggtggaatcaatgaagaaagtagcaggaatggacgtggagctgacagttgaagaacgaaaccttttatctgttgcatataaaaatgtgattggagccagaagagcatcctggagaataatcagcagcattgaacagaaggaagaaaacaagggaggagaggacaaattaaagatgattcgggagtaccggcaaatggttgaaactgagctcaagttaatctgttgtgacattctggatgtactggacaagcacctcattccagcagctaacactggcgagtccaaggttttctattataaaatgaaaggggactaccacaggtatctggctgagtttgccacaggaaacgacaggaaggaggcagcagagaacagccttgtggcttacaaagctgctagtgacattgcgatgacagaacttcctccaacgcaccccattcgtttaggtcttgctctcaacttttccgtattctactatgaaattcttaattcccccgaccgtgcctgcaggttggcaaaagcagcttttgatgacgcaattgcagaactggacacgctgagtgaagaaagctataaggactccacactcatcatgcagctgctacgtgataacctgacgctgtggacctcagacatgcagggcgatggtgaagagcagaataaagaagcgctgcaggatgtggaagatgagaatcagtgagacgtaataaagccaacaagagaaaccatctctgactaccccaccccacccctgcccttggaagttccccattgtcactgagaaccaccaaatttgactttcacatttggtctcagaatttaggttcctgccctgttgtttttctttctttttcttttttttctcccctccccttttttaaaacaaacagttttcagaagttcttaaggcaagagtgaatttctgtggattttactggtcccagctttaggttctttacgacactaacaggactgcatagaggctttttcagcattactgtattgtctccggccacatgtggcaagatcatcattagaaatggaaatgacatttgagagccattagacttctaggtgatgcatctaagaaagattaatcacacaatagaggcatatgcgctgtcatttttcctttttttaattgttaaattgaattttataccaatgtttaaacttaaattgggtgttagcttgaggtgttttgggggagtttgcggtaatggttttgctgtaacgtgtgtttggaactctgctgaagggctgctgaaaagcacggtgctggtaacagtccaacagtccgcggctgctcattcttgccgactcctccctctgacgcaggttagcattgaaggtggtatggaagcctgcatgcgtgttcaactcttcctcttccctcctcctcggcctccctcatcccttcctccttcgctcgctcaacctcttttgttcagtatgtgtaacttgaagctaatttgtactactggatatctgactggagccacagatacagatctgtattgttcttactgaaacacagcatggaattaacattaaacttaaataaaacaaacctaaattaaaaatgcc

SEQ ID NO: 3733 - DNA, 1185 bp, Rattus norvegicus
acattataactagtagaggatcctcatcgaccatggccacagctgcctcgaatccctacagcattctcagttccagctccctcgtccatgcggactctgcgggcatgcagcagggaagtcctttccgcaatcctcagaaacttctccaaagtgactacttgcagggagttcccagcaatgggcatcccctcgggcatcactgggtgaccagtctgagcgacgggggcccgtggtcctccacattggccaccagccccctggaccagcaggacgtgaagccgggacgtgaagatctgcaactgggagcaatcatccatcaccgctcgcctcacgtagcccaccactcgccccacactaaccatccgaacgcctggggagcgagcccggctccaaactcgtccatcacgtccagcggccaacctctcaatgtgtactcgcagccaggcttcacggtgagtggtatgctagagcacgggggactcactccaccaccagctgctgcctccacacagagcctgcatccagtgctccgggagcctccagaccatggtgagctgggctcgcaccactgccaggaccactcggatgaagagactccaacctctgatgagttggaacagttcgccaaacaattcaaacaaagaagaatcaagttgggtttcacgcaagccgacgtggggctggcattgggcacactgtatggcaacgtgttctcgcagactaccatctgcaggttcgaggccttgcaactgagcttcaagaacatgtgcaagctgaaaccactgctaaataagtggctggaggaggctgattcatccacaggaagcccgaccagcattgacaagatcgccgctcagggccgtaaacgcaagaagcgaacctccattgaggtgagtgtcaagggcgtactggaaacgcatttcctcaagtgtcccaagcctgcagcacaggagatctcctcgctggcagacagtctccagttggagaaagaagtggtacgtgtctggttctgtaatagaagacaaaaagaaaaaagaatgactccgccaggggatcagcagccacacgaggtttattcgcacacggtgaaaacagatgcgtcctgccacgatctctgactggaggaagcaaggaggtggcccgctgcactgggagcagtgcttgatacaattctctctttacctt

SEQ ID NO: 3734 - DNA, 3443 bp, Rattus norvegicus
aggcctgaaagccatatgtaatctttgaaggactggtaatggttttaatcacagggatagcatcttttttgacaggcagaacagagcaaagagccgaaccacattggaaatattaatgaggctattatggagcgatggctattgcctatgaactctctcatcatgagtctatacttagaattcagttgaactctggagaggggggaggagcagggcagtgttaatccccagttgtttttgaagttgcctggttagcaggttagtgtctaaagtgatcaaaatggaaacgcacaatgctttcccggctgcgactctctgggtctattttgttttaacctgtttgtcttagggactgtcatattcactctgagaggtgacatttctccgatttctttcaaactagatgttctggggagcactagctgtaatcactttgggagactgatgctccatgacagctagaagttggattgagtttcagtagctactatatataaagctgggtcgacttatgtcaccgcactaattaaatgccatctgggtggctcctctgggttttttgagtccatcacccagttcagatcagtcagaggccaaggaggagaacatgatgatggacctttttgaaactggctcctatttcttctacttagatggagaaaatgtgactcttcagccattagaagtggcagagggctctcctttgtacccagggagtgatggtaccctatccccttgccaggaccaaatgccccaggaagccgggagcgacagcagtggagaggaacacgttctggctcccccaggccttcagccaccccactgcccaggtcagtgtctgatctgggcttgcaagacttgcaagagaaaatctgcccccacagatcgtcggaaagcagctaccctgcgcgaaaggaggaggcttaagaaaatcaacgaagcctttgaggccttgaagcgtagaactgtggccaaccccaaccagaggctgcccaaggtggagattctgagaagtgccatcaactacattgagcgtctgcaggacctgctgcaccggctggatcagcaagagaaaatgcaggagctgggggtggacccttacagctacaaacccaagcaagaaattgtaagcccagatgctaccaaggcagggaaatgtaaaaggcccggttaaaatgtctttcggagaccttaacctccacctgcttggtgcctaccccctttcttgcccggccctcgccctctaaaatgaacccccagtgaccctataagactgagcccctgccctaagcaggaaatgcggtctggcccaaggaagcaggggagacacccccaagccacctcctcccaccctttgccccctccccccgtatttgtttctttcctaatctgttgctctggttttcctttcagcttgagggtgcggatttcctgcgcacctgcagcccgcagtggccaagtgtttcggatcattccaggggcctggtgataactgctaaggaaggtaacacaaaggaaaggtcactgggctgtactggaagaaccagggtcagcacagtacaggggtgctctagcccagcactgagagctcaaagcgagctcagagatgcagggccaaagccgggcggtttttttttgtttttctttttgtttgtttgtttgttttgttttttgttttgttttgttttctctcagggatgcagtcctccgagtgcctcggtggccctttgtgggacatactgcggatgctacatgcgcgatctgtgtgtgttttctgtgttcaggaggagcaagcgtcgatgcttcagcctccagcagtcttcagcgcctttcttccatcgtggacagtatttcctcagaggaacgcaaactccccagcgtggaggaggtggtggagaagtaactcagtcagcatttggaacattcttcgctcagcaggaagagcccctttccgcctaatcatttagattagggctcacagaccccagaatttatgaaaggcaagagacttagtgttaaaaaagaaacctctccccacctcaagtgaaaatccttcggcttggggcttttattataactattattgtatctgaaccgctagtggcttagctctagaaccctaattttgtttttagtttggttggttttttataacatattaacttttgctatgatcacgtgaccctttcctgtcagttgcaaacgaagttcattcctgtctaaatcaaagtgggaacgtttaatcctaagagtatttaatgtacttttgtaaatagtcttagtactttcgtttttatgtaaacctaaaggacatattttaaatgtggaattaagcattgtatataaaatgtgtgagagtctgatattgtaatattaaaatattaatacgtttctacacgtacaaaggcggcattaatctgatttaaccagaaagaccataggggtgtgggtacaaaactaaagaatagccatttttaaacttaaataccacatgtggccacttactcaggcctcttctttcagcttaatttatagggaggaaaatgagttttggggccgtagtctcaattaaactgggcactttaatatttcgtgtatattctttacttgtcatggggtggggtgggggaggatatcagaagtgtctctctcgccgccttcagtggcctttcttttccacactgttcttcggttggtgatctgagtgggatttacttactctgaaatttaattttaaatatatgaagatctttccgatttctcccccaaaaaagagttctttgttcatctccctaaaagatagccaattaatttggcccaatttatttattttctgctccttggtgttccagactgtttccaagtgtagctctaacgtagccagggatagccagttttcttgaactagactggcccccagcagactggaatatcttcaagtgctcttttgtttgagtttattttccaaacagaaagaagaaagagaagtgcaatctgtctcttgcagaggagtggacatccttgaaagggagggggggggtgctgcttcaatagatggaagggttaaatgattggtagcaaaagacaacaacaacacacatgaaacctcttaactggaccaaatagcaaagccccagagacagccggaagccccaggagctctactccatgaagattttacaacgtgtgccgcctctgtttttcctgtaacctcagggggaaaaaacgaccaccaagaaacacagtgggaaggaaggcagagcaaagcacgctggttctgctaaactgtgccttccatctacctttctgagatgggtactttcacttcaccccttacctactgttacttaccgacttgtctactgttcccagtaactccactgccactcttttagctcacatataaaagtcaaacggaaccaagcgtttgccagccgggatcc

SEQ ID NO: 3735 - DNA, 18171 bp, Rattus norvegicus
agagagacggcagcagcgtcccgtccagttcgcctgccgcgctcctcgcttgtcgtctgcctccagatcccagacaggtacgccgctgcgttcggggttccgggatggcaggccggtgtcggggtgccgcggctccagtgggaggacaggcgggcgcccatcctcaacagccctgcgctcacaaaagcgccgccgcgcccctccgacagccaaccacccggctgtgcgccgcggtccggccgagaggggcgcgggaggggtgtgcggagagccagcgcggcgggccgctgtcacgtgggcgccgcgccagccgggtgcaggaggctgggtgcctcgtggatggggccggggcctccactctcatccggaggctttggcagggcacaggaggccgcggtggtacccgggctccagtttggagaggccagttgtgggtctgggagcgcacgaggccccaggggcctcagcggaagtcatcagaccatccaggcctcaccggctgggtggcgcggaagccttctccttggactacggctgcaaggcctgaactgccctgggcaagtgccttagggaccagaggatctatcaaacccttcagctggctcagccaggttacaaggtgttcgaccaaatggcgagaggcttctcctgtcccggatccgcacctagttaggagtggtactctaggtcggatctttgctgaaaggatccggttggcaggggatcggtttgcctcagccctgctaggcctgagcactaagtagtcgggcctgttctctctgggtccttaccatgcctggcgttctggctggccctgcagggcagtcagtctccaccctcatcatgaaagggaagcgttggcttccccgtggcttgaggtgagagtgtcccagaccctgcttcttgaagccccacttctgtttgcaagttccttatgattgggatggagcacccagtaggcaactggagatcatatggtcccaggtaactagcaaggcatggtagggtcaggccaggtcatgtgtctggaagggattaaaaacctcagaagtagctatcccgtgcaagggaacccgagcacccgggctcatccattgattatagctgggtcctgctagtttccaccactggggggctttctgagccctttgctctcagaaagtcagggcctggctgtgaggtgtgctacctgtggattcaggtggctgtagctgggaatgactctatgagggaggcccaccaggctacctaccttcccccacagagaagagccatggaggaggtggtgatagccggtatgtccgggaaattgcccgagtcagagaacctgcaggagttctgggccaacctcattggcggtgtggacatggtcacagacgatgacaggaggtggaaggctggtgagtgtcccctcgggatcaggcagcaggacagactgagagtctcacccaagatgcttctagagacagtgaactccctgtagagctgtgaggttgagaaccggttagaatgagaagggacaggtgtcttggttggttccgcatgcaagacacccaaggtgggccgtagaagaggactggccctttggatctcccatctgtaacctctgccctgagctggcggatagtgtctaagatgacgctcacacccagtggattctaacagtgccatagagcagctagctctacctgatgggcaggtgtgagtcacactgggctggcctggccagcctcggagtaggcagagggtctcccagtcaggtcggggttaccagggggtgatcgccagcctcacttcctgctcctacaggttttgctttgggtcacccacatgtggcggttttggggctcctcattagcagtgaggctgggtcactctctgggaaccttcctccaggacaggttggttccctggcctcagactgtgatgttccacagggctctatgggttgcctaagcggtctggaaagctgaaggatctgtccaagttcgacgcctccttttttggggtccaccccaagcaggcacacacaatggacccgcagctccggctgctgctggaagtcagctatgaagctattgtggacggaggtgggtcattggggtattattattgccctttttaggacttactgtcatgagggctggggacgtagtccagtgggagagcacttgcctagtatgcacaaggacctgggaacatcatcatccccagtccaggaaaaggaaacacaacaatgataccttcttggctctgagatgtcaagagctcagagacaggcatggatggcatgggtccctctagctatgtccccaaccctgatgtagggccagtggctcaggaggcgggggccctgagcagggcacgggtttcacaaccacacacttagtgtcccaggcgcgccctgttaccccagttacttcactccccgacgtctggttgttcttggactgagggcggggcttacagcaggtagcactgcaggggctcagcctcagctttggcaacaacccagtcccactggctgtctctcactctggatcctgctgcttgggtcatggacgtgtccccagggatagaaggccccatagtgggcagccagtgtgggttagtatggcgggggtgagcttcaggttggtagatgctaattaaccctgtacttgataaacagcttgatgtataactgccctggggtagagtagaagaccagaggatgcaggatcctggtaacctcggtggtgaaaatgaaggtcctcaccttgggcctgtctggctgcccaggctctatcaatggctgggcacagctcccagggggttacccactgtcctctgctttcccagcttggacacttggtctttgtcttcttgtatctccttatcacagcctgtcccagggcaggctgcccttggcactagagaactcattggccagcggcctctcgagacccaccagtaacaccagagcccgagggagttgccctcagacaatgctgtcctctgtcttaactatagcctcctatggttgcagctctgacccagaccttagaggtccactgtggcccctatggtacccctctgacccaaacccatgtggttattgctgcccccggcaggtatcaacccggcctcactccgaggaacaaacactggtgtctgggtgggtgtgagtggttccgaggcgtcggaggccctgagcagagatcctgagactcttctgggctacagcatggtgggctgccagagagcaatgatggccaaccggctctctttcttcttcgacttcaaaggtgggtgggcagcccagctctgggcacgacccagctgtatgtgcattcacctacacaacccttttggactcagacttccttattcctggggaaggcactgagtggggtactcacagcccgggaggcggggggtgtgggacagcatctgcccaagggtacccacacccactttatgaccttgtccacaggacccagcattgccctggacacagcctgctcctctagcctactggcactacagaatgcctatcaggctatccgcagtggggagtgccctgctgccactgtgggcgggatcaacctgctgctaaagcctaacacctctgtgcagttcatgaagctaggcatgctcagccccgatggcacctgcagatcctttgatgattcaggtaaggttggcctgggtagggatcgttaggctctactttgcagggctccagcctgtaccctgagtggcatctgggctcctggtggtgtggggaagggaggacgtgtgcatgtatagactcatagcacacaccccatcacaccagagcacctagctgaggtgttgatctactctagggaacgggtattgccgtgctgaggctgtcgtggcagttctgctgactaagaagtccttggctcggcgagtctatgccactattctgaatgccgggacgaacacagatggctgcaaggagcaaggtgggcatggagggaaagagcatggggaatggggacgtggagcacacaaggcttgacaccgtactgtaccattacccatctccgtaggcgtgacattcccctctggagaagcccaggaacaactcatccgttctctgtatcagccgggcggtgtggcccccgagtctcttgaatatattgaagcccatggcacgggcaccaaggtgaaagccctttccagcccatacctgccactcctctatcctcactagagggacctggctgcagccttaacctactctgtcccctgcaggtgggggacccccaggaactgaacggcattactcggtccctgtgtgctttccgccagagccctttgttaattggctccaccaaatccaacatgggacaccctgagcctgcctcggggcttgcagccctgaccaaggtgagcaggctgggggctctgagtcaagaatgatgtggataggtctgtactgtgaccaccacttgacctaccccggggctcctgcctgctcaccaaccagccctttggctgtaccgttgctgaagtggcagggagactgggtacactccctgtggttgctgtgctgacttacatagcttctggctgaaggaaacacttggctgcataaaggacaggtgcagttctgaggaagtatctaggcagccaggtctagcagaatgccccattctgagatgaggagagaggagcgagccagtgtctgatctggtgtgttctttccctgggtgaccctgcacgtgtaggcaccttcagcttgtttctatgctgggaggtgtgcggttgtctggatgacctatctgttggggcttctgggcctggctctcacgtagtttgtgcgctcaagccactgcccccttgacttgggcaccatgcaccctgaccactggtggcaaggccagagaaagacaagggtcttggtgcccagtaccatacacagctcatgggccctggggaggtaggtggccacgcttggtggggacagctgcccagtaaccatgtgttttgtctacaggtgctgttatccctagaaaatggggtttgggcccccaacctgcatttccacaaccccaaccctgaaatcccagcacttcttgatgggcggctgcaggtggtcgataggcccctgcctgttcgtggtggcatcgtgggcatcaactcgtttggcttcggaggtgccaatgttcacgtcatcctccagcccaacacacagcaggccccagcacctgccccacatgctgccctaccgcatttgctgcatgccagtggacggaccatggaggcagtgcagggcctgctggaacagggccgccagcacagtcaggacttggcctttgtgagcatgctcaatgacattgcagcaacccctacagcagccatgcccttcagaggttacactgtgttaggtgttgagggccatgtccaggaagtgcagcaagtgcctgccagccagcgcccactctggttcatctgctcaggtgagcctgctcccatgttcccaggctggccccaaaggaggaggggagtcggtcccttttcttgagggtgaggctggaggttggccatgctatggccctgataagctttctggtacagggatgggcacacagtggcgtggaatggggctgagccttatgcgcctggacagtttccgtgagtccatcctgcgctctgatgaggctctgaagcccttgggagtcaaagtgtcagacctgctgctgagcactgatgagcacacctttgatgacatcgtgcattcctttgtgagcctcaccgccatccaggtatgccaccttcgtggtactcggaccccgggacactccacaccagagtcacgtcagtacataggctcgatcggtatgtaggcagagcttaaataggtacacctgaggaggagcagggtcttctcagaggaccctaagagaggcttggcgtgcttggtgtgctcagctttactgtgagggatggtcaggctagtgatctagggtctacgtgacatggcttatatccccacttcgcagattgccctcatcgacctgctgacgtctatggggctgaaacctgatggcatcattgggcactccttgggagaggttgcctgtggctatgcagatggctgtctctcccagagagaggctgtgcttgcagcctactggagaggccagtgcattaaggatgccaaccttccggctggatccatggcagctgttggtaggatctctctcagggcccccgacctcattaggcaccaggttcttcttggaaggggtttctgtcctgggtactcaaaagaatcagttagctttgttgtgagacatggggttgcaaagggagaagtcactctgctcagattatctttataggagacttcatttctgaccccacaggcccgagcaaggtatgaaacaccatacacatcagatgagggttccaggagctgaggagagccacttaccaaccctaggtgttcatcgcccagcttctcagctgcttaccccctacaccacttaggtgtcatttctgaggtccggctcctttcctacactccctccataatgacacctctcttgagatcagaaacagcagggagggagtaaaggtgccctggaaggtcgactcttagcatcccaacaccattggctctaagtagtgctcatggtccaggaggatgggctgagttcgggccagctctgaggccagcctctctgcttataggtttgtcctgggaagaatgtaaacaacgctgccctcctggtgtggtgcctgcctgccacaactctgaggacactgtgaccatctctggacctcaggtaggcctgcaatcatagcaggacttctgttccctgcaattttgccctggccctgcctaggaggcaaggcctcctcagtctgtgtccaccaagttctgaagggcccagctggtgagctacacttgtcgcaggccctctgggtggactgtgtccctgaccagggaaagccagtccaggccccctgaccactggccttgatgcctgcaggctgcagtgaatgaatttgtggagcagctaaagcaagagggcgtgtttgccaaggaggtgcgaacaggtggcctggccttccactcctacttcatggaaggaattgcccccacgctgctgcaggctctcaagaaggtgagtacctggccatgtgcttggaccccagggcacggtgacttgacctcactcgctaaccaagcgtctgtgtgcaggtgatccgggagccacggccacgctcagcacgctggctcagcacctctatccctgaggcccagtggcagagcagcctggcccgcacatcttctgctgagtacaacgtcaacaacctggtgagccctgtgctcttccaggaagcactgtggcacgtccccgagcacgccgtggtgctggagattgcaccccatgcactgttgcaggtgagcactggtccgcctgggatggggcacatcagcctgccagtcactggcgaaggcgagtggcacggaaggggtcggagcctagctctcctttgctatgtgtaggctgtcctgaagcgaggcgtgaagcctagctgcaccatcatccccttgatgaagagggaccataaagataacttggagttcttcctcaccaacctcggcaaggtgcacctcacagggtaggtctcccttctgtctgctgctcgtgtgcaggcccacaccaacccccatgagaggggttgctgtggcctagctcagtgctggccctcggtcctcatcttggccatcttggggtcttagagcaaaactagggccacagactctcagggacaggtgtgtcacttaacttgtttgtcaccagcatcgacatcaaccctaatgccttgttcccacctgtggaattcccggttccccgagggactcctctcatctcccctcacatcaagtgggaccacagtcagacttgggatatcccagttgctgaagacttccccaacggttccagctcctcctcagctacagtctacaacattggtgagccaggctccgtggtcagtgggttcctcccaggcctgtgggcccgtgctgaggcattgtccttacagacgccagttccgagtcatctgaccactacctggtcgaccactgcattgacggccgtgtcctcttccctggcactggctacctgtacctggtgtggaagacactggctcgaagcctgagcttgtccctagaagagacccctgtggtgtttgagaacgtgacatttcatcaggccaccatcctgcccaggacaggtaagaggcccttcagtgggggctggtgaggtggttgtgactactccgctctgaccttctttttttctctgcaggaaccgtgcctctggaggtgcggctgctagaggcctcacatgcatttgaggtgtctgacagtggcaacctgatagtgagcggtgagtagtacctggctgggcctgtgtggctgaggacctcagctcctagcctgccccatgctcagaccctcctgttgccctgcctcctacagggaaagtgtaccagtgggaagaccctgactccaagttattcgaccacccagaagtcccgatccccgccgagtccgagtctgtctcccgcttgacgcagggagaagtatacaaggagctgcggctacgtggctatgactatggccctcatttccagggcgtctatgaggccaccctcgaaggtgggcagggagcaatccccgagtcagtgagcatgatgaccaggagccattgtcactcctgggccatgtcttgctgggggtcagggaagacggaggaagggagtagaggccctggagcaggtgaggcctcgtgtgctgagcagcccccctactgcaggtgagcaaggcaagctgctctggaaagacaactgggtgaccttcatggacacaatgctgcagatatccatcctgggcttcagcaagcagagtctgcagctacccacccgtgtgactgccatctatattgaccctgcaacccacctgcagaaggtgtacatgctggagggagacactcaaggtagctctggccctcgctctgtccacttgtcctggactgagcattgcctacactgaccagtgtgtctccatagtggctgacgtgaccacgagccgctgtctgggcgtgaccgtctctggtggtgtctacatttcgagactacagacaacagcaacctcacggcggcagcaggaacagctggtccccaccctggagaagtttgtcttcacaccccatgtggagcctgagtgcctgtctgagagtgctatcctgcagaaagagctgcagctgtgcaagggtgaggatccaaaccttccctcttcttcctcagtctttgcctttgaaactcctgaggcaaggcctggatggcggggagctcagggttggtgagagcacagcctaccttccatgggtagcacggcactgctgcatccttcctattgagtttccgctcttcccattgctgtgggcttgtcctgtggacacgctaggaagcaggccctggcagtaggctggaggccgtagagagagaacgtaggcctttctttgtccctcccaggtctggcaaaggctctgcagaccaaggccacccagcaagggctgaagatgacagtgcctgggctagaggaccttccccagcatggactgcctcgactcttggctgctgcctgccagctgcagctcaacgggaacctgcaactggagttaggtgaggtactggctcgagagaggctcctgctgccagaagaccctctgatcagtggcctccttaactcccaggccctcaaggcctgcatagacacagccctggagaacttgtctactctcaagatgaaggtggtggaggtgagtgctgggaaggtagacaggccatgtgcgtggatccagggcaatctcagacccgagcccaaggcaggcagccatgatgtagcagctttctatggcctttgtgctttggtttgttccaccctaaaagattgtggggaacttttcactgctaccagtccaggggatgagatatcagaaggaaggcttctgggaaagaatcctgggatgctctgagctctagcctgggatgtcgcagacagtctccacaggagagtagaggagaacactggaagagcctcccggccagcattgccacaaaactgagcatgagcagcacggagaggctcacccaggccccagggttttctgcctcctagaaacaacagatctaagatgctctcccacaccaggtgctggctggagaaggccacttgtattcccacatctcagcactgctcaacacccagcctatgctgcaactggagtatacagccaccgaccggcacccccaggccctgaaggatgttcagaccaagctgcagcagcatgatgtagcacagggccagtgggacccttctggtcctgctcctaccaacctgggtgctcttgaccttgtggtgtgcaactgtgcgttagccaccctgggggatccagccctggccctggacaacatggtagctgccctcaaggatggtggtttcctgctaatgcacacagtgctcaaaggacatgcccttggggaaaccctggcctgcctcccttctgaggtgcagcctgggcccagcttcttaagccaggtactgctcctgggcatgcagggcaggtaagggctgggtatggttccgccagttcagtacttacaagacttcatacacataggaagagtgggagagcctgttctcaaggaaggcactgcacctggtgggccttaaaaagtcattctacggtactgcgctgttcctgtgccgccgtctcagcccacaggacaagcccatcttcctgcctgtggaggatactagtttccagtgggtggactctctgaaggtcaggctctggggctgggtaccttggcttcccctgacgtatgatcaccctagaggctgaccctactttatcctgcagagcattctggccacatcctcctcccagcctgtgtggctaacagccatgaactgccccacctcaggtgtggtaggcttggtgaactgtctccgaaaagagccgggtggacaccggattcggtaggaaaggccctgagaggtgcctacccttccttcctcaccccctccattcttggtatccttacccactttgcccccacaggtgtatcctgctgtccaacctcagcagcacatctcacgtccccaagctggaccctggctcttcagagctacagaaggtgctagagagtgatctggtgatgaacgtgtacagggacggtgcctggggtgccttccgtcacttccagttagagcagggtaagcctgtccatgccctatatacttaataggcttgtgaggtggcaggggaacaaggagctggccaggtaggcccctgtggcatccttgctttctttcccctcagacaagcccgaggagcagacagcacatgcctttgtaaacgtccttacccgaggggaccttgcctccatccgctgggtctcttctcccctgaaacacatgcagccgccctcgagctcaggagcacagctctgcactgtctactatgcctcactgaacttccgagatatcatgctggccacgggcaagctgtcccctgatgccattccaggtgccaaccaggatgggggcttatgattgggttgctgggagtagagaaggtgcctgtactgtagcagcccagtgaggaggagtcctgcccggctcctggggaagagagggttcccagcaccagaggctgcacttgcatcctgctcccctgacaacctgtcctagggtctgggctaacaggagcctccctctgtctacacacaggtaaatgggccagccgggactgcatgcttggcatggagttctcaggccgtgataagtgcggccggcgtgtgatggggctggtacccgcagaaggcctggccacctcagtcctgttatcacccgacttcctctgggatgtaccctctagctggtgagtggctggctgcagttgggggttatgtgatcttagttggtggccaggctgaattgatcctgtgctccgttccctcaggaccctggaggaggcggcttctgtgcctgttgtctacaccaccgcctactactccttagtagtgcgtggtcgtattcagcacggggaaactgtgctcattcactcgggctccggtggtgtgggccaagcggccatttccattgcccttagcctgggctgccgagtcttcaccactgtgggtaaggccctcaccccctcccgatcccaatcaaggagcttcttgaaccctgtgggccaaacttactggggtctcccttgactgacaggctccgctgagaagcgagcttacctccaggccagattccctcagctggatgacaccagctttgctaactctcgagacacatcgtttgagcagcatgtgttactgcacacaggtggcaaaggtaaataccccctgggccattgcctgagagtgagtgggtcacatagtcagtccagcgctgaggactgaggtacaggtgagcccagtatgaccgactgacatgtttgccaccgtaggggtggacctggtcctcaactccctggcagaagagaagctgcaggccagtgtgcggtgcttggctcagcatggccgcttcctagagatcggcaaatttgatctttctaacaaccaccctctgggtatgactcgtagtcaggagcaggggtgggggctggtgttggggccaggggcatcccacagtgaacaggattctcgaatacaggcatggccatcttcttgaagaacgtcactttccatgggatcctgctggatgcactttttgagggggccaacgacagctggcgggaggtggcagagctgctgaaggccggcatccgtgatggggttgtgaagcctctcaagtgtacagtgtttcccaaggcccaggtggaggacgccttccgatacatggctcaaggaaaacatattggcaaagtccttgtccaggtgaagtgaggccctcgggcaccaagcctggtttcgccttttgtagtgcattttttttctaattatatttacttacttttgatggttgtgagtggcatgtgtgggtaccagaggacaacttgcaggagttggttctcctccatgggtcatcaggtttttttttgtttttttggttcttttttttcggagctggggaccgaacccagggccttgcgcttcttaggtaagcgctctaccactgagctaaatccccagcccgggtcatcaggtttgatagaagcactgttaactacccagctgtctcgctggtcctgggacagcttctgaaccactgctacttgtatgcaggtacgggaggaggagcccgaggctatgctgccaggggctcagcccaccctgatttccgccatctccaagaccttctgcccagagcataagagttacatcatcactggtggcctaggtggctttggcctggaactggcccggtggcttgtgcttcgtggggcccaaaggcttgtactaacttcccgatctggaatccgcacaggtagggcaagtagaagcagttggtagtgtaggcttcccttcagtggaaagtgtcctgggagggctgtaggccactgctttcctctggtgcagccccatttccctgtgtcccataggctaccaagccaagcacgttcgggagtggaggcgccagggcatccatgtgctagtgtcgacaagcaatgtcagttcactggagggggcccgtgctctcatcgctgaagccacaaagcttgggcccgttggaggtgtcttcaacctggccatggtgagaaaagcatgcagggctctgcgtacctccagagcctgagacccaggctgctgctaagtggggttagaacctcagagctgcagcatacactaaaaccccttcttctaggttttaagggatgccatgctggagaaccagactccagaactcttccaggatgtcaacaagcccaagtacaatggcaccctgaaccttgacaggtaggcagttggtccctctgctgagtttcatgtatgcttgcaatgtatactggtccctgctggacttgagggtctggggaagtgaaactgtgccacccgtggccttctgggcctgccctggggaggtacggacatgaaagttatcagactgacatgagtacccacagggcgacccgggaagcctgtcctgagctggactactttgtggccttctcctctgtaagctgcgggcgtggtaatgctggccaatccaactatggcttcgccaactctaccatggagcgtatttgcgaacagcgccggcacgatggcctcccaggtgggcctctttgtctagcccacccctgcttgtggtctcactccccaaagcacctcaccggctgcctcccttgctctcaggtcttgccgtgcaatggggtgccattggtgacgtgggcattatcttggaagcgatgggtaccaatgacacagtcgttggcggcacactgccacagcgcatctcctcctgcatggaggtgctggacctcttcctgaatcagccccacgcagtcctgagcagttttgtgctggttgagaagaaagctgtggcccatggtgatggtgaagcccagagggatctggtgaaagcagtggcacacatcctaggtaagccagcttccgggaccttcccggcttaggtgacttggagccttagttttcccatctgtagaagcagacgacagagttctgtggtctgaatgctggccaggccaggtgattggcagtgatgctggagagccacagtatgtacctggttcccacgtccccttctcagtaatgaccagttacccatcccctttgttaggcatccgcgacctcgcagggattaacctggacagctcgctggcagacctcggcctggactcgctcatgggtgtggaagtgcgccagatcctggaacgtgaacatgatctggtgctacccattcgtgaagtacggcaactcacactgcggaagcttcaggaaatgtcctccaaggctggctcagacactggtgcgtaccaggcagcaggctgtgagagacacaagtgcatcctagtattgtaggcagcagcgctgcccttttgcaaagaacacatgggcctgtgcttaatctgtgtgtgtatgacctcacaagggatgtgtaccagagcccatgtgccaaggctaccctacaccctctgtctttacagagttggcagcccccaagtccaagaatgatacatccctgaagcaggcccagctgaatctgagtatcctgctggtgaaccctgagggccctaccttaacacgactcaactcagtgcagagctctgagcggcctctgttcctggtgcaccccattgaaggttccatcactgtgttccacagcctggctgccaagctcagtgtgcccacctacggtctgcagtgcacccaaggtactgtgcacatggcgaagcagtacatgctgccttgggcctccgttcctcactgactgctggctgagtcctctgtttgtccttacagcggcccccctggacagcattccaaacctggctgcctactacattgattgcatcaagcaggtgcagcctgaggggccctaccgagtggctgggtattcttttggagcttgtgtagccttcgagatgtgctcccagctgcaggcccagcagggcccagcccccgcccacaacaacctcttcttgtttgatggctcacacacctacgtattggcgtacacccaggtgagagccgggccaactggtcctaagcattgccgcctatgtcttggctctgaacacgcttctgggagggtcctggttactttagcccttgcagcatcaatctctccttccctgacagagctaccgggcaaagctgaccccaggctgtgaggctgaggctgaagctgaagccatatgcttcttcattaagcagtttgttgatgcagagcatagcaaggtgggcctgacacaccctagagaggacgaaaggcaaggtcgggagggttggggtctctgtgcctttaaaaatggagcagggaaatccaagcgcttcttcagaaacccgtctgcccagagaaggcagggcagaccgtgtagccccccatcccaccccacatgctcagagtcgttgtcttaggtgctagaggccctgctaccactgaagagcctggaggaccgggttgctgctgctgtggacctcatcactagaagccaccagagcctggaccgccgtgacctgagctttgctgccgtgtccttctactacaagcttcgagccgccgaccagtataaacccaaggccaagtaccacggcaatgtgatcctgctgcgggccaagacaggtggcacctacggcgaggacttgggtgccgattacaacctgtcccaggtaagcgagtgagtggggcagacgaggcggtgtgggacggacgcctgctggtggtcacagaatgacacctgaatgtttacaggtgtgtgatgggaaggtgtctgtgcacatcattgagggtgaccaccgtacgctgctggagggcaggggcctggagtctatcatcaacatcatccacagctccctggctgagcctcgagtgagtgtacgggagggctagacctgcctaccatgaagccacgacccacaccggccaccagagatgctccgatccccaccacaccctgagtgcagggactggggagggtcctgctggtgggaccccctcaccccagtggcccagcaccaccccctcccctggtggctgctacaaacaggaccatcacatgtgtcccagccacttagtggggttcccagagccactgacttggaggcaccctggtctgtgaagagtcagtggaggccagcaagagccaaactgagccttttctgccaagtgacatttgtcacactggttgtttctccattaaattctcatatttattgcattgctgggaaagaccgcccaccccagggttaactcattccagaacccctaaagtgggaaaagccatgtggggaaggctgctggctggagcccctttttgtcttagccctgtacccgctcactgcagggcagggtatggagagggctggttcccggggaacgaggaccccagcagacactgtagcccatggcccttggtccccagcactcccggctgcacccatgatgcagggcctaccagactctgcggaccgcaccgggcactcactgtatttgttttccaagattcaaattgctgcttgggttttgaatttactgcagctgtcagtgtaaagaaacatgtctgaactgtgtcctttttacaccaacctggtaaaaatgctcttgatgctgtcccgttgccacaattaaactgcacgtgagctctggcttccgttcagtctctttccagtcccagacctgagtccccagagcctccacagctcttacagtgagaatcaaattggcccactccttggaaggcgtggcattctgtcagagtaaaaggaaagtagagtgtgctgattcacgttcagcgtgtggggctggctagagaccttggcactgtagtgaacagaatgtgtccacctttaagtcaccctgaaggcatcaccatagctacagcctcacccaggggtagagaatagtactgtctacttgttgactacctggcagttggtgccagcccctatagaggaaaacagcagtgtgtggccactgtgagaagcatatccctggaaacaggtgaccagagcagagggctaatgcctacctgagtcacacaaaactgaccaggcttgagtgtccagaagagtctatcagaaggccacagcattcagtcctatccacagagagcagcagactaagttgtctccttgccagcttagaaaactgcagtgctggggtacaggtagggtgttcaggaggtccgggccccagtgattagtctaagactgaagcatctggttggctgtggtcccacctagaaaattcttaaagctcttgtcatgtacttcctgggaaggacctaccctgtctcaataatgtctctagctcgttggagtctactgactcaaacatttataaagtgtcctagaaaggcctgactcccctacaaggctgtgtgatccttcaaactcacatatgtgagccaataaaaccttgagactcta

SEQ ID NO: 3736 - DNA, 3295 bp, Rattus norvegicus
aagcttgctgatgtctgattggccacttaacactacgtaggcacatgctctagaaaagtgggccgccgtagattttatcagctcacaaggtttcttcggaaaatatggtctaaagttttttccaaagcgtaaagtagaaccactagatttgtggtggaaaatgaaatttgcttatttacaatcggaacttataatttttaactttttaatgttctttggatttttgtttttttccaggtcaagtggatttcgaatagtgtctgagaccaactcaacccagaaaaacaaaatggcccttaactcttctgctgaagatggtatcaaaagaatccaagatgactgccccaaggctggcaggcacagttacatatttgtcatgatccctaccctctacagcatcatctttgtggtgggaatatttggaaacagcttggtggtgattgtcatttacttttacatgaagctgaagactgtggccagcgtctttcttctcaatctcgccttggctgacttatgctttttgctgactttgcccctgtgggcagtctataccgctatggagtaccgctggcccttcggcaatcacctatgtaagatcgcttcggccagcgtgagcttcaacctctacgccagtgtgttccttctcacgtgtctcagcatcgaccgctacctggccatcgtccacccaatgaagtctcgccttcgccgcacgatgctggtggccaaagtcacctgcatcatcatctggctgatggctggcttggccagtttgccagctgtcatccaccgaaatgtatacttcatcgagaacaccaatatcacagtgtgcgcgtttcattatgagtctcggaattcgacgctccccatagggctgggccttaccaagaatattctgggcttcttgttccctttccttatcattctcaccagctatacccttatttggaaagctctaaagaaggcttatgaaattcaaaagaacaaaccaagaaacgatgacatctttaggataattatggcgattgtgcttttcttcttcttttcctgggtcccccaccaaatattcactttcctggatgtgctgattcagctgggcgtcatccatgactgtaaaatttctgacatcgtggacactgccatgcccatcaccatctgcatagcgtattttaacaactgcctgaaccctctgttctacggctttctggggaagaaatttaaaaagtatttcctccagctcctgaaatatattcccccaaaggccaagtcccactcaagcctgtctacgaaaatgagcacgctttcttaccggccttcggataacatgagctcatcggccaaaaagcctgcgtcttgttttgaggtggagtgacaggttcaaagcacactggcaatgtaatgccctgacagaagccagggcagcctctgactaaatggcttacgaccaaaggaccattcaccctgcctcaggatctaagcagaaaatgcgctcatcagactgtagataatgactaaaactctgagagaagactttgaaggagtaaccaagcaaagccgtcttgcattaatagatgatggctagccaaaggaagagtcaggagctggatggattggtgggtctggaaaacagttcgctggcagaaatgcaatctcatcagtctccctttgctatgttccttttgatttccacacgtaggtatgtggcccatgctaaatatttaggcaagaaacaagagatggaaatcaaggtcacttgttctgttcaactcccaaagggcaaggaacctttgttgtccctgtagtcattagcagtggagacccacttgtcactgttactacacctatcgtgcaaagatttgctaatctgtagttatcaagtttcaggactcctttgtaaaattcagccagtgttttagaaacatgtactgtccccagacaatgctagccagtggtgtacttatgtagcagtgttacccaagtccacacatcaaagtcacactgctttaataacgtgacatactaggtacatctgcgttatttcgcatctgagaaatgtacacagtcagaggtgaatacactatattccatacagtctgccttgctctctaaaaatatatattctccacatacgtgaacatctttatctctaaactgtcatttgatgaaattttggcaatgtatgtttacctctaaataaagtaattttattgtaatgtatctaatcttcattatttaaaatagaagcctatctatttttacaatgacatggatagaagtaaaaatacaaaattacaataatgcatttttacttcaagtttgatctggttgatagtttaatatggttagatataggttttatatcccactgttgaaaaaatcatgaaggccagcttgtaccccacaatgtagggaagatacaacatttttaatttttttagttattcatataacagcaaaaacattttcattgctattaacattaaattaatacttttttttactcataagttttggttacatctagttacatgcatggtaattgcaggaaatatagaagctctggaaaacacaaagcaatagtcatatttagttcttcagtgcaaaaatactccattttagtattttagcccataagtaggaagcagagggtgacttgtaaggcctcatgtcttctgcaacctcaaagcccaccccagtgacagatacatgtgcttcaccaggtatgtcagacttactaatcccccagtcctgcccagccaccaactggggatcaagttttcatactcactatacatacatacatatgtaaattatggtgttagagccataatgtatatacaattctgtatataggcttgtccctcagtgtcattgcagagtacttagtataccattcaatgtatttcctcaaacattccagtactgttaaaaaacacaagcacacctgataacattagggaatcaccaaattggagcatttaccattcttctaaaaatactttgggcactagaagtcaccctgagctgatcaagcacacaaatctgataaactccaagaagaagcagaactgagaatatggttataaacgtttttcgtattcccaatatgtaagagcacgttttccagaaagtataacacaacttatatacgctaccagctatgtttagctgtagctcatggcaagctcagtggagaggagttcacttcctctaagaacccaggtgctgtaggctagaacaggaaacaaactagaccagaatattgccatggggcggctgcctagtcaccagaaagctt

SEQ ID NO: 3737 - DNA, 2041 bp, Rattus norvegicus
gcggccgcctctttgtatccaacatccgggtttccccgcaggctcggctccgtggccaccgctcaggagccattttggactcggttcagctcccctccccctcccccccttcatggcccctccggactcggcccctgcgcccggggcccgggcccagccccgttgcgccatgcccgcgtcgggcgcgccctggcccgcgccccgccgccgccccccggctcccgcgtcgccccatagcccgggccgcactgtgcgccgcccgcagcggccctgagcccttatccccgcacgctgcctgggaaccgaagcgcagaagcgcgcgcgtctggaagcgagacccagagaaggagcgggaagcagagcgcagccgccgccgggccctgcgcgcccggggagcgcagcgcggccctgcccgcgggctccgggtgtccgcggggcggccccgcggaacatgacggcgccctgggcggccctcgcccttctctggggatcgctgtgcgccggttccgggcgaggggaagctgagactcgggagtgcatctactacaacgccaactgggagctggagcgcaccaaccagagcggcctggagcgctgcgagggggaacaggacaagcggctgcactgctatgcctcgtggcccaacagctcgggcaccatcgagctggtgaagaagggctgctggctagatgacttcaattgctacgacaggcaggagtgtgtggccactgaggagaacccccaggtgtatttctgctgctgtgaaggcaatttctgcaacgagcgcttcacccatttgccggagcctgggggcccagaagtcacgtacgagccacccccgacagcccccaccctgctcacggtgctggcctattcgctgctgcccattggaggcctctctctcatcgtcctgctggccttctggatgtaccgacatcgaaagcctccctacggccacgtggacatccatgaggaccctgggcctcctcccccatcgcctctggtgggcctgaagccgctacagttgctggagatcaaggctcgaggtcgctttggctgcgtctggaaggctcagctcatgaacgactttgtggctgtgaagatcttcccacttcaggacaagcagtcgtggcagagtgagcgggagatcttcagcacaccgggcatgaagcacgaaaacctcctgcagttcattgctgcagagaaacgaggatgctccaacctggaggtggagctgtggctcatcacagttccttccacgacaagggctccctcacggattacctcaaggggaacatcatcacgtggaacgagctgtgtcatgtggcagagacgatgtcacgaggcctctcgtacctgcatgaggatgtgccgtggtgtcgtggcgagggccacaagccttctattgcccacagggacttcaaaagcaagaatgtcctgctgaagagcgacctcaccgcggtgctggctgactttggcctggctgttcggtttgagccggggaagcctccaggggatacccatgggcaggttggcaccagacggtacatggcccccgaggtgctggagggggccatcaacttccagagagacgccttcctgcgtatcgacatgtacgccatgggcctggtgctgtgggagctcgtttctcgttgcaaggccgcagatgggcctgtcgatgagtacatgctgcctttcgaggaagagattggccaacacccttcactggaggagcttcaggaggtggttgtccacaagaagatgaggcccaccattaaggatcactggctgaaacatccgggcctggcccagctctgcgtgaccatcgaggagtgctgggaccatgatgcagaggctcgtctgtctgcaggctgtgtggaagagcgggtatccctgatcaggaggtcggtcaacggctctacctcggactgtctcgtctctctggtgacctcctcgaccaatgtggacctgctccctaaagagtccagcatctaagcccaggacactaggctttctccagactcagtggatctgaagaaga

SEQ ID NO: 3738 - DNA, 2509 bp, Rattus norvegicus
gatcctgggaaaaaggatgctgctgggagtgcacctctgaatcagttgggttctttttgtctctggttttaaaagctctctggaagagacctgatgtctagaatcttctaagtatgaacaggggaatgctgaagttttgtagttaaatatgtcaatgtctttatgtttcaaaaagcattagaatgtcgaaggcaagaaccccagaaccctgcccatcctcctgtgagaccttgataattatctaacaaatctaacaaaaaactgggctggaccatctgctgggagaagttccagaaccccaagaggccttgggcttcatctgcttccggaagcatctagctgtggagttggtgtcctttcctgggcacgtcttgaggcctttctgctgagctctgtcctgatgtatggctttcacagttgtgaagctgaagtatgactttgttctctggatgggatgagggtgaaggagtgagccgtgtgtgtagaagtctgtgggaagagagaaacactgagcatgtcgctgccaaaccagtccctagaaggccttcctcaggaggcctccaacagatccctgaatgctacaggggcttgggacccagaggtcctgcaggcactcagaatctccctcgtggtggtcctatccatcattacactggccactgtcctctccaatgccttcgtacttaccaccatcctgctcaccaagaagctccataccccagccaactatctcattggctccttggccaccaccgacctcctggtttctatcttggtcatgcccatcagcatagcctataccaccacccgtacctggaactttggccagatcctgtgtgacatctgggtgtcttctgacatcacatgctgtacggcctccatcctgcatctctgtgtcatcgctctggacagatactgggccatcaccgatgccctggagtacagcaagcgccggaccgcaggtcacgcggcggccatgattgcggccgtctgggccatctccatctgtatctccatcccaccgctcttctggcggcaggccacggctcacgaggagatgtctgactgcctggtgaacacatctcagatttcttacaccatctactcgacctgtggggccttctacatcccatccatcttgctcattatcctgtatggccgcatatacgtggccgcccggagtcgaatcctgaacccaccctccctctacgggaagcgcttcaccacagcacagcttatcacgggctctgcgggctcttcactctgctcgctcaaccccagcctccacgagagccacacgcacacagtcggttcccctctttttttcaaccaggtgaaaatcaagcttgctgatagcatcttagaacgcaagaggatctctgcagcccgagaaaggaaagccactaagacattgggcatcattctgggggcctttatcatctgctggctgcctttctttgtggtatccttggtcctccccatctgcagggactcctgttggatccacccggccctctttgacttcttcacgtggctaggttatttaaactctctcattaaccccgtcatctacactgtgttcaacgaagactttcgacaagcgtttcagagagtcgtccatttccgaaaggcctcttagtcgaatttgggggtgactcttgtttatctgttatgtcctgtaacccagctggggttgccttttttaattactgtcgtttctctgggacctgggctgatttgtgctatcttgggtcttggaataaatcaatagatttgttctgtgtttgactgccagcatcttccagacttctgaattactgaaagctaggtgctgtgtaaaaggcgacaggactgaaagacatcccttaacataatatcctcatggttctctggattggaagaaatttaatatgtaggacttagatgagaaactgtcttattctctagaaggctcggagggaaggccttctggtctacctgggattttacagagggctttggaaaatgggtgtgattattgacttgaattaaagtgaatttggagttaaacagagggggttgtcatctcccatagcccactgattagaaaacaacacccaggaattgtttctactgggtcctggttgtccatatggaaagtgaggttggtgacccagggtagatagagagaaattcagaaggtggcagcaggaagagaggtatacgtgggaccagatcaactactctacatccttcattcttccctttgtctctattatataatgttctgaagttaaaacccgtcatcctgctgctcaagaagactgaccagtgtcggatgcaccaagctttgaacggatacctcattctgcccattccgatgtttttattttgaattactatttttttacaacccttgtcgggctggagagatggcttagcagttaagagcactgactgctcttccagaggtcctgagttcaaatcccagcaactgcatggtggctcaccacccttgtcatcagaattc

SEQ ID NO: 3739 - DNA, 786 bp, Rattus norvegicus
cttctaagaccctccaggaatctgcaatcccattctctacctctggagatcagcatggcggacgagagcagcgattcggctggggaaccccagccggcgcctgctcctgtccgacgtcgctcctcggccaactaccgagcctatgccaccgagccacatgccaagaaaaagtctaagatctccgcctccagaaaacttcagttgaagactctgatgctgcagattgcgaagcaggagatggagcgtgaggcagaggagcgacgtggagagaagggccgcgttctgagcacgcgttgccagcccttggtgttggatgggctgggctttgaagagcttcaggacctatgccggcagcttcacgctcgtgtggacaaagtggatgaagagagatacgacgtggaagcaaaagtcaccaagaacatcactgagattgcagatctgacccagaagatctatgacctgcgtggcaagtttaagcggcccactctccgaagagtgagaatctcggcagatgccatgatgcaggcactactggggacccgggccaaggaatccttggacctgagggcccacctcaagcaggtgaagaaggaggacactgagaaggaaaaccgggaggtgggagactggcgcaagaatatcgatgcactaagtggaatggaaggccgaaagaaaaagtttgagggctgagcccatggctctcacactgtgctctgaagggcatctctgaggaataaatttctttaaactggaaaaaaaaaaaaaaaaaaaaaaaaacggaattcg

SEQ ID NO: 3740 - DNA, 7011 bp, Rattus norvegicus
atggtccgcttcggggacgagctaggcggccgctatgggggcaccggcggcggggagcgggctcggggcggcggggccggcggggccggtggcccgggccaggggggtctgccgccgggccagcgggtcctgtacaagcagtccattgcgcaacgcgcacggaccatggccctgtacaaccccatcccagtcaagcagaactgcttcaccgtcaaccgctcgctcttcgtcttcagcgaggacaacgtcgtccgcaaatatgctaagcgcatcaccgaatggccgcccttcgaatatatgatcctggccaccatcatcgccaactgtattgtcctggccctggagcagcacctccctgatggggacaagactcccatgtctgaacgactggatgacacggaaccttacttcatcggcatcttttgcttcgaggcgggcatcaagatcatagctctgggcttcgtgttccacaaaggctcctacctccggaatggctggaacgtcatggacttcgtggtggtcctcacagagattcttgccacagctggaactgactttgatctgcgcaccctgagggctgtgcgtgtgcttaggcccctgaagttggtgtctggaattccaagcttgcaggtggtgctcaagtccatcatgaaggccatggtcccgctgctgcagatcgggctgctgctcttcttcgccatcctcatgttcgctatcatcggcctcgagttctatatgggcaaattccataaggcctgcttccccaacagcacagatgcagagcctgtgggtgactttccttgtggcaaggaggcccctgctcgtctgtgtgacagtgacaccgaatgccgggagtactggccaggacccaactttggcatcaccaattttgacaacatcctgtttgccatcttgaccgtgttccagtgtatcaccatggagggctggactgacatcctctacaatacaaatgatgcggccggcaacacgtggaactggttgtacttcatccccctcatcatcattggctccttcttcatgctcaacctggtgctcggtgtgctttcaggagagtttgccaaagagcgggagcgagtcgagaaccgccgtgccttcctgaagctccgcaggcagcagcagattgagcgagaactgaatgggtacttggagtggatcttcaaggcggaggaagtcatgttggcagaggaggacaagaacgcagaagagaagtcccctttggatgcagtgttgaagagagctgctaccaagaagagccgaaatgacctcatccatgcagaagagggggaggaccggtttgtagacctctgtgctgctgggtctccctttgctcgtgccagcctcaagagtgggaagacagagagctcatcgtacttccggaggaaggagaagatgttccggttccttatccgtcgtatggtgaaagcacagagcttctactgggtggtactgtgcgtggtggccctgaacacgttgtgtgtggccatggtacactataatcagcctcagcggcttaccactgcactgtactttgcagagtttgttttcctgggtctcttcctcacagagatgtccctgaagatgtacggtctagggcccagaagctacttccggtcttccttcaactgctttgactttggggtgattgtggggagtatctttgaagtagtctgggctgccatcaagccaggaacctccttcggaatcagtgtgctgcgggctctccgactgctgaggattttcaaagtcaccaagtattggaactccctgaggaacctggttgtttccctcctcaactccatgaagtccatcatcagccttctcttcctgcttttccttttcattgtggtcttcgctctgttggggatgcagctgtttgggggacagttcaactttcaagatgagactccaaccaccaattttgataccttcccagctgccatcctcactgtgtttcagattctgacaggagaggactggaatgcagtcatgtatcatgggattgagtcacaaggaggagtcagcaaaggcatgttttcatccttttacttcatcgtcctgacactgtttggaaactacaccctgttgaacgttttcttggccattgctgtggacaaccttgccaatgcccaggagttgaccaaggatgaagaggagatggaagaggcagccaatcagaagcttgctcttcagaaggccaaagaagtagctgaagtcagccccatgtctgctgccaacatctccattgctgccaggcagcagaactcggccaaggcgcgctcagtatgggagcagcgggccagtcagctaaggctccagaacctgcgtgccagctgtgaggcactgtacagtgagatggacccggaggagcgcctgcgttatgccagcacgcgccacgtgaggccagacatgaagacacacatggaccgacccctagtggtggaacctggtcgggatggcctgcggggacccgccgggaacaagtcaaagcctgagggcacggaggccaccgaaggtgcggatccaccacgccgacaccaccggcatcgtgatagggacaagacctcagcctcaacccctgctggaggcgaacaggacaggacagactgcccaaaggccgaaagcaccgagaccggggcccgggaggaacgtgcgcgccctcgtcgaagtcacagcaaggaggctccaggggctgacacacaagtgcgttgtgagcgcagtagacgtcaccaccggcgcggatccccggaggaggccactgaacgggaacctcggcgccaccgtgcccaccggcacgcacaggactcaagcaaggaaggcaaggagggcactgcaccggtgcttgtacccaagggcgagcgtcgcgcaagacatcgaggcccgcgtacgggcccccgtgagacagagaacagtgaggagcccacacgcaggcaccgtgcaaagcataaggtgccaccaacacttgagcccccagagagggaggttgcagagaaggagagcaacgtggtggaaggggataaggaaactcgaaatcaccagcccaaggaacctcgctgtgacctggaggccattgcggttacaggcgtgggctctctgcacatgctgcccagcacctgtctccagaaagtggacgaacagccagaggatgcagacaaccagcgtaatgtcacccggatgggcagtcagccctcagaccccagcaccactgtgcatgtcccagtgacactgacaggccctcccggggaggccactgtagttcccagtgctaacacggacctggaaggccaagcggagggcaagaaggaggcagaggctgacgatgtgctgagaagaggccccaggcccatcgttccctacagttccatgttctgcctcagccccaccaacctactccgtcgcttctgccattacattgtgaccatgcggtactttgagatggtgattcttgtggtcatcgccttgagcagcattgccctggctgctgaggatcccgtgcggaccgactcattccggaacaatgctctgaagtacatggactacatctttacaggagtcttcacctttgagatggtcataaagatgatagacttgggcctgctgctgcaccctggggcctacttccgggacctgtggaacattctggacttcattgttgtcagtggagccctggtggcatttgcattctcgagcttcatgggaggatccaaagggaaagacatcaataccatcaagtctctgagagtcctgcgagtcctgcggcccctcaagaccatcaagcggctgcctaaactcaaggctgtgtttgactgtgtggtgaactctctgaagaatgtcttgaacatcctgatcgtctacatgctcttcatgtttatatttgccgtcatcgccgtccaactcttcaaagggaagttcttttactgcactgatgagtccaaggagctggagcgggactgcaggggtcagtatttggattatgagaaggaagaggtagaagcccagccaaggcagtggaagaaatatgacttccactatgacaatgtgctctgggccttgctgactctgtttacggtgtccacaggagaggggtggcccatggtgctgaaacactctgtggacgccacctatgaggagcaggggccaagccccgggtttcggatggagctttccatcttctatgtggtctactttgtggtcttcccttttttctttgtcaacatctttgtggccttgatcatcatcaccttccaggagcagggggacaaggtgatgtctgagtgcagtctggaaaagaatgagagggcttgcattgactttgccatcagcgccaaacccctgacacggtacatgcctcagaacaagcagtcgttccagtataagacatggacatttgtggtctctccaccctttgagtacttcattatggccatgatagccctcaacacagtggtgctgatgatgaagttctacgatgccccttatgagtacgagctgatgctgaagtgcttgaacatcgtcttcacatccatgttctctctggagtgcatcctgaagatcatcgccttcggggtgttgaactacttcagagatgcctggaacgtctttgactttgtcactgttttgggaagtattactgatattttagtaacggagattgcgaacaacttcatcaacttgagcttccttcgcctcttccgggcagcacggctgatcaagctctgtcgccagggctacaccatccgcatcttgttatggacctttgtccagtcctttaaggcgctgccctacgtgtgcctcctcattgccatgctgttcttcatctacgccatcatcggcatgcaggtttttggaaacattgcccttgatgatggcaccagcatcaaccgacacaacaacttccggacatttctgcaagccttaatgctgttgttcaggagtgccactggggaggcctggcacgaaatcatgctgtcttgcctgggcaaccgggcctgcgacccacatgccaacgccagcgaatgcgggagcgactttgcctatttttattttgtctccttcatcttcctctgttcctttctgatgctgaacctctttgttgctgtgatcatggacaatttcgaatacctcacgcgggattcttccatcctagggccgcaccacctcgatgaattcattcgcgtctgggctgaatacgacccagctgcgtgtgggcgcatcagttacaatgacatgtttgagatgctgaaacacatgtccccacctctgggtttggggaagaaatgcccggctcgagttgcatacaagcgcctggttcgaatgaacatgcccatatccaatgaggacatgacggtacactttacatccacactgatggccctcatccggacggcactggagatcaagcttgccccagcggggacaaaacagcaccaatgtgatgctgagctgaggaaggagatctcttctgtgtgggctaatctgccccagaagactctggacttactggtgccaccccacaaacctgacgagatgacagtggggaaggtctatgcggctctcatgatatttgacttctacaaacagaacaaaaccaccagagatcagactcaccaagctcctggaggcctgtcccagatgggtcctgtttccctattccatcctctgaaggccaccctggagcagacacagcccgctgtgctccgaggagctcgggttttccttcgacaaaagagtgcaacttccctcagcaatgggggcgccatacaaacccaggaaagtggcatcaaggagtccctgtcctggggcacgcagaggacccaggacgtactttatgaggccagagcacctctagaacgtggccattctgcagagatccctgtggggcagccaggagcactggctgtagatgtccagatgcagaacatgacattgagaggaccggatggggagccccagcctggcctggagagccaaggccgagcggcctctatgccacgcctggcggcagaaacacagccggcccctaatgccagccccatgaagcgctccatctccacactggctccacgcccgcatgggactcagctttgcaacacagtcctggaccggccacctcctagccaggtgtcccatcaccaccaccaccgctgccaccggcgcagggacaagaagcagaggtccctggaaaaggggcccagcctgtctgttgacacagaaggtgcaccaagtactgctgcaggatctggcctgccccatggagaagggtccacaggctgccggcgggagcgtaagcaagagcgaggccggtcccaggagcggaggcagccctcctcctcttcttcagagaagcagcgcttctattcctgtgaccgctttgggagccgggagcccccacaacctaagccctccctcagtagccaccccatatcgccaacagcggcactagagccaggaccccacccgcagggcagtggttccgttaatgggagccccttgatgtcaacatctggtgctagcacgccgggccgaggtgggcggaggcagctcccccagactcccctgaccccacgccccagcatcacctacaagacggccaattcctcgcctgtccactttgctgagggtcagagtggccttccagccttctcccctggccgtctcagccgcggcctttctgaacacaatgccctgctccagaaagagcccctgagccagcctctagcttctggctcccgcattggctctgacccttacctagggcagcgtctggacagtgaggcctctgcccacaacctgcctgaggatacactcacctttgaagaggccgtggccaccaactctggccgctcctccaggacttcctatgtgtcctccctcacttcccaatcccaccctctccgccgtgtacccaatggctaccactgcactttgggactcagcaccggcgtccgggcgcggcacagctaccaccacccagaccaggatcactggtgctag

SEQ ID NO: 3741 - DNA, 2187 bp, Rattus norvegicus
ggagagggaacagcgtgccgcccaggcgacagagctggtgcgggcgccgggagccgcctaggaccgcggcgccggatagagaagggcgggagccgctggtgcccgcctgtcccacgaacggcaggaatgtgacccctcgagcgcgcgccggagcacccctcgcgtggctcccagggctccggttgctcaggcctggacgggtttagctccgggtttagctgggagctgctggattgctgtgcatccccactgggcacccgggcacgcccagccttggctctgcgaagccctgtgccgtaatgtggctggagagtactcttcatgctgccgaggcttgtgacatcttcggctaaatcctccatcctggagaatatgaaagtgctacttgggttcatttgtctcattgtgcctctgctgtcgctggagaccgacaaatgcacggagtatccaaatgaggtcatttcattttcatccgtaaatgaaattgacattcgcagctgtcctcttactccaaacgaaatgcatggcggcaccataatctggtataaaaatgacagcaagacccccatatcagcggacaaggactccaggattcatcagcagaatgaacatctttggtttgttcccgccaagatggaggattcaggctattactattgtataatgagaaactcaacatactgcctcaaaactaaaataaccatgagtgtcttagagaatgaccctggcttgtgctataacacacaagccagcttcatacagcggctccatgttgcaggggatggaagtcttgtgtgcccttatctggattttttcaaagatgaaaataacgagttacccaaagttcagtggtataagaactgtaaacctctgcctcttgacgatggaaacttctttggattcaagaataaactgatggtgatgaatgtggctgaagagcacagagggaactatacttgccgcacgtcctacacataccaggggaagcaatatcccgtcacacgagtaataacatttatcacaatagatgacagcaagagggacagacctgtgattatgagcccacggaatgagacgatggaagctgacccaggatccacgatacaactgatctgcaacgtcacgggccagttcaccgaccttgtctactggaagtggaatgggtcggaaattgaatgggacgatccaatcctagccgaagactatcagtttttggaacacccttcagccaaaagaaagtacactctcattacaacacttaacgtttcagaggtcaaaagccagttttatcgctatccgttcatctgcttcgttaagaacactcatattctggagactgcacacgtacggttagtatacccagttcctgacttcaagaattacctcatcgggggctttgccatcttcacagctacagccgtgttctgtgcttgcatctacaaagtcttcaaggttgatatagtgctttggtacagggactcctgctctgattttcttccccgaaaagcttcagatggaaggacctatgatgcctatgttctttatcccaagacctacggagagggatcctttgcatacttggatacttttgtgtttaagctgttgccggaggtcttggagggacagtttggatacaaactgttcatttgtggaagggatgactatgttggggaagataccatcgaggttactaatgaaaacgtaaagagaagcagaaggctgatcatcattttagtgagagatatgggaagcttcagctgtctgggccagtcatctgaagagcagatagcaatatacgatgccctcatccgggaaggaattaaaatcatcctgctcgagttggagaaaatccaagactatgagaaaatgccagaatctattcaattcattaagcagaagcatggggccatttgctggtcaggagactttaaagaaagaccgcagtctgccaagaccaggttctggaaaaacttaagataccagatgccagcccaacggcgatcaccactgtctaaacatcacttattaaccctggatcctgtgctggacactaaggagaaactgcaggcggagacacacttaccacttggctagtgtgggaaaggcgggcgggccaagactggtggagtgcctcctgtcgtcagatgctgcagctggctctgcctcccagtaaaacagtcatgaaac

SEQ ID NO: 3742 - DNA, 1560 bp, Rattus norvegicus
aagtgagagagctgggcgactggagctcccgcggacgaggagcgagcggcagagcagggattggcgggtgctccccggcccccgcgcacttcttaggcggagcggctgagcggagcgtgtgcgcacgaccccagcccgcctcttggtccttggttcagcgttcggctgctctccacggcaatccgctgccccgggtgggcaccccgaagcatgaacacgcctgcaactctgcccctggggggcgaggacaccacctggacccctgggatcaacgccagctgggctccggatgaggaggaggatgcagtgcggtccgacggcacagggacagcgggcatggtaactatccagtgcatctatgcgctcgtgtgtctggtgggcctggtaggaaacgccctggtcatattcgtgatcctacgctatgccaaaatgaagacagccaccaacatctacctgctcaacctggccgtcgctgatgagctcttcatgctcagtgtgccatttgtggcctcggcggctgccctgcgccactggccgttcggggcggtgctgtgccgcgcagtgcttagtgtggacggccttaacatgttcacgagtgtcttctgcctcacagtgctcagcgtggatcgctatgtggctgtagtgcaccctctgcgagctgccacctaccggcggcccagcgtggccaagttaatcaacctgggagtgtggctagcatccttgctggtcaccctgcccatcgcagtcttcgctgacactaggccagctcgtgggggtgaggcagtagcttgcaacctgcactggcctcacccggcctggtctgcagtctttgtgatctatacttttttgctgggcttcctactcccggttctggctatcggattatgttacctgcttatcgtgggcaagatgcgtgctgtggccctgcgggctggctggcaacaacggagacgctcagagaagaagatcactaggctcgtgctaatggtggtgactgtctttgtgctatgctggatgccattctatgtagtgcagcttctgaatctgtttgtcaccagcctcgatgccactgtcaaccatgtgtccctcatcctcagctatgccaacagctgtgccaacccgattctctatggtttcctctcagacaacttccgacgctctttccagcgggttctgtgcctgcgctgctgtctcctggaaacaactggaggtgctgaggaagagcccctggactactatgctactgctctcaaaagcagaggtggcccaggatgcatatgccctccattgccctgccagcaggagcccatgcaagcagaacctgcctgcaagcgagtccctttcaccaagaccactactttctgaaaaccatttcaccctccctcagcccacctgcaagcaggtctgcaccacactctcaagccagcaacttcaagaaaactcctgttgtcactaagccaggccctttcagcagcctgtgttctgtccctaggagcctcaggactcctgctagcccctgcctctcctaggactgactggctccaaggacaactccgtggg

SEQ ID NO: 3743 - DNA, 1339 bp, Rattus norvegicus
gcactcttgcgggtcgttgtgcgtaacttgcagcaatcatggctagccatctggaactcaacaacggcaccaagatgcccaccctgggtctgggcacctggaagtctcctcctggccaggtgaccgaggctgtgaaggttgctatcgacatggggtatcgccacattgactgcgcccaggtgtaccagaatgagaaggaggtgggggtggccctccaggagaagctcaaggagcaggtggtgaagcgccaggatctcttcattgtcagcaagctgtggtgcacgttccacgaccagagcatggtgaaaggggcctgccagaagacgctgagcgacctgcagctggactacctggacctctaccttattcactggccaactggcttcaagcctgggcctgactatttccccctggatgcatcgggaaacgtgattcctagtgacaccgattttgtggacacttggacggctatggagcaactagtggatgaaggtttggtaaaagcaatcggagtctccaacttcaaccctcttcagattgagaggatcttgaacaaacctggcttaaagtataagcctgctgttaaccagatcgagtgccacccatacctaactcaggagaagctgattgagtactgccattgcaaaggcatcgtggtgactgcatacagtccccttggttctcctgacaggccctgggccaagcctgaggacccctctctcctggaggatcccaggatcaaggaaattgcagccaagtacaataaaactacagcccaggtgctgatccggttccccatccaaaggaacctggtcgtgatccccaagtctgtgacaccagcacgtattgctgagaactttaaggtctttgactttgagctgagcaatgaggacatggccactctactcagctacaacaggaactggagggtgtgcgccttgatgagctgtgccaaacacaaggattaccccttccacgcagaagtctgaagctgtggtggacgaatcctgctcctccccaagcgacttaacacatgttctttctgcctcatctgcccttgcaagtgtccctctgcactgggtggcaccttgcagaccagatggtgagagtttgttagtttgacgtagaatgtggagggcagtaccagtagctgaggagtttcttcggcctttcttggtcttcttcccacctggaggactttaacacgagtaccttttccaaccaaagagaaagcaagatttatagcccaagtcatgccactaacacttaaatttgagtgcttagaactccagtcctatgggggtcagactttttgcctcaaataaaaactgcttttgtg

SEQ ID NO: 3744 - DNA, 2283 bp, Rattus norvegicus
cgtcacttcccctggcctggcggcctcggccgcacttcggacaaacccactgagcgaaatcggcagggccatggccttaggggcgctgcttctgattctggggatactcgggacgcccctcgccccaggagcccgcgggtcggaagccgaaggccaactgcttaagaaacttttctcggattatgatagctcagtaaggccggcgcaggaggtgggagaccgcgtcggggtcagcatcggcctcaccctggcgcaactcatcagcctgaacgagaaggatgaagaaatgagcacaaaggtgtacttagacctggagtggaccgactacaggttaagctgggaccccgcagaacacgatggcatcgagtctctccgtgtcactgctgaatctgtttggctcccggacgtggtgctgctgaacaacaatgatggaaactttgacgttgccctggacattaatgtcgtggtgtcctttgagggctctgtgcgctggcaaccccctggcctgtatcgcagcagctgcagcatccaggtcacctacttcccctttgactggcagaattgcaccatggtgtttagttcctacagctatgacagctctgaggtcagcctgaagacaggcccagatcctgatggacaggagaggcaggaaatctacatccatgaagggaccttcatcgagaatggtcaatgggagattatccacaaaccctctaggttaatccaccttccaggggatcgaagaggagggaaggaaggacatcgtgaggaagttatcttctatctcattattcggaggaagcctctcttctacctggtcaatgtcattgccccgtgcatcctcatcaccctcctggccatctttgttttctaccttccaccagatgcaggagagaagatggggctctccatctttgccctgctgaccctcactgtgttcttgctgctgctggccgacaaagtgcctgagacctccctggcggtccccatcatcatcaagtatctcatgtttaccatgatccttgtcaccttctcagttatccttagcgttgtggtcctcaacttgcaccatcgctcaccccacacccaccaaatgcccttttgggtccgccagatcttcattcacaagctccctccatacctgggtctgaagaggcccaaacccgagagagaccaactacccgaaccacatcactccttctccccaaggagtggctggggccgaggaactgatgaatatttcatacggaagcctccatgtgattttcttttccctaaacttaacaggtttcagcctgaatcacctgctccggacctgagacgatttatcgatggtccaccccgggctgtaggtctgcctcaggagctacgcgaggtcatttcttccatcagctacatggcccgacaacttcaggaacaggaggaccacgatgcactgaaggaggactggcagtttgtcgccatggttgtggaccgtctttttctgtggacattcatcgttttcacaagcgtcgggacgctagtcattttcctagatgccacgtaccatttgccccctcctgaaccttttccttgaggaccctccggtcatttttgccaagtgctgcaggtactctcacgctgtatagcgcttggctcctgtaagaatcttgttcttgtttctgggaagacgttgaagtgggacttgggggggtgagcagggtgccttggacttcaacaaatgtccttcaacccattagttttgttcttctgcagctttgtttttgttggtttttttttgttgttgtttttttgtcgtccccccccccccccccccccggctggggagcgaacccaggatcttgcgcttcctaggtagaagcgctctaccactgagccaaatccccaaccccgtttttgttgtttttgagacagagtctcactctgtgtcccaggctagcctggaactatgaagtccaggctggcctcaaactcccagcagtgttacttccttagcttaccaaatgttggaatggcaggtctggtaagccagcgcacttggattttgtttcttgaaactacacagaatgtcacaacttagatatctagtgaaagagaattataagcaactagtagcttgaaagcctttggaggacaggaaatctgttggctactgtaaggtccccagcaatgcgcacaggtcctaccccataagtgcttaacatttgttgaagagggaaaaaaatccggaaggaaatacaaaataatactgcctacaattgcatgtattgaaattaaaatgta

SEQ ID NO: 3745 - DNA, 792 bp, Rattus norvegicus
atggcattcctttggctcgtgtcctgctttgcccttgtgggggccacctttggctgtggagtccctaccatccaacccgtgctgactggcctgtccaggatcgtcaacggagaggatgctattcccggctcctggccctggcaggtgtcgctgcaggataaaactggcttccatttctgcgggggctccctcatcagcgaggactgggtggtcactgctgcccactgcggggtcaagacctccgacgtggtggtagctggagagtttgaccagggctccgacgaagagaacatccaggtcctgaagatcgcacaggtctttaagaaccccaagttcaatatgttcactgtgcgcaatgacatcactctgctgaagctggccactcctgcccagttctctgagactgtgtctgccgtgtgtctacccaacgtcgatgatgacttccctcctggcactgtgtgcgccaccactggctggggcaagaccaaatacaatgccctcaagacccctgagaagctgcagcaggccgccctgcccatcgtgtccgaggctgactgcaagaagtcctggggttccaagatcaccgatgtgatgacctgcgcaggcgctagcggcgtctcttcctgcatgggtgactccggtggccccctcgtctgccagaaagatggagtctggaccctggcaggcattgtgtcctggggcagtggcgtctgttccacttccactcctgctgtgtattcccgagtcacagccctcatgccctgggttcagcagatcttggaagccaactga

SEQ ID NO: 3746 - DNA, 2793 bp, Rattus norvegicus
aattccatgtagttctcatcaccctcactgttcttaggggggccgggcatgttcagtaggaccaggcgggcatcatgggagcgtgtgacaatgacttcattgagcttcacagcagggtgacagcagatgtgtggctggcaagaccctggcagtgcctgcacaggacgagggcactgggcactacggcaacactggcccctaagacactgaagccctttgaagccataccacaatactccaggaacaagtggctgaagatgatacagatcctgagggagcagggccaagagaacctacacctggagatgcaccaggccttccaggagctggggcccattttcaggcacagtgcagggggagcacagattgtgtctgtgatgctgcctgaggacgctgagaagctgcaccaggtggagagtatcctcccgcgtcggatgcacctggagccgtgggtggcccacagggaactccgtggcctgagacgtggtgtgttcttgctaaatggggctgaatggcgcttcaaccgactgaaactgaacccaaacgtgctgtcaccaaaagctgttcaaaattttgtccccatggtggacgaggtagcaagggacttcttggaggccctgaaaaagaaggtgcgtcagaatgctcgagggagccttaccatggatgtccagcaaagtctcttcaactacactatagaagccagcaactttgcactttttggagagaggctgggcctccttggtcatgacctgaaccctggtagcctgaagttcatccatgccctacattcaatgttcaagtccaccacacagctcctgttcttacccagaagcttgactcgctggacaagcacccaggtgtggaaagaacattttgatgcctgggatgtcatctctgagtatgccaacagatgtatctggaaggtgcaccaggaactcagactcggcagctctcagacctacagtggcattgtggcagcactaataactcagggagctttacctctggacgccatcaaagccaactctatggagctcactgctgggagcgttgacacgacagcaatccccttggtaatgacactttttgagctggctcggaacccagatgttcagcaggccctgcggcaggagaccctggcagctgaggccagcatcgctgctaatccccagaaggccatgtcagacctgcccttgctgcgggctgcccttaaagagaccttgagactctaccctgttggtggctttttggagagaatcctaaactcagacctggtgcttcagaactatcatgtccctgctgggacgttggtcctactttatctgtactccatgggccgaaaccctgcagtgttcccaagacctgagcgctatatgcctcagcgctggctggagaggaaaaggagtttccagcatctggccttcggctttggggtgcgccagtgcctggggcggcgcctggcagaggtggagatgctgctcctgcttcaccatatgctgaaaaccttccaggtggagacactgagacaagaggatgtgcagatggcctatcgctttgttttgatgcccagctctagtcctgtcctcactttccggcccatcagctagtcaccttacatctggggccctaatcagtccaccggcctacttctgtcctgacgcccaaggtcacgcttctctgccagcagaaatcttgggggggggaagaggtcacattgtcatcattcaacacaactgtacacagtttacagctgaagacctccagcatcaggtacaagcaaggccagggaagagattaggagtatcttcagggcaataggtagtctctcctgagcggtcttccccattctttccaacggtcactccaggtggccacggccttcaaagggtctcagagtaaagccagaagtaatctcctccttatggatccattattttgacatgacccacaaaaacattttcacacacagatgggtttttggggggcaaaagatacatagatgatagatatgatatatgatattgatagatagatagatgatagatagatagatagatagatagatagatagatagatagatagatagatagatgatggatgaccagtcatttatgtctgtgttttgtttgaagcctttcacagtggagctggcacatatgagttggtgactctacagtgttttaagagtagacacagctgcacttgctaaggactgggtggttgtggtatcagagatgcaggcaggaggacctgctggaacccagatagtgtgtgaagtccccacagggacggtggtcttccatgaggtcaaggtgttttcctgacttctgccagtgcatgctgcttgggcaaaggtaattctcttgacttgtgaaagtggcccaaagcataagaattttttcaggtatcctttcagctgcaagtcggtagggcgaaaagttttggccaagaacaaccacttcacaggatctcctgtgctcagcaccaaagcacaaatctactggagatgtgtgtgccaaattccaaggtcttaggcctttgagtgtgaggcagtatagagtcagggcctttaatgatataattcgtgtgaaatgagattactgggttgtgcctactccaatgcccagagagcacccaagaagagagtgaggtgccaggtcacagagacagaccccatgtggaagacaggaagtcagacttctgtaagccgaggaaagcagttggaactcctgtagtcttggctccatcactcaatcacttccctggctgtgaaaaataaacttgtgttgttg

SEQ ID NO: 3747 - DNA, 1676 bp, Rattus norvegicus
gcttccctttgcacggtgtcctgtgggtgagaggaggtgctgcaggactccctggacgcaaaatgaagagggttctggttctcctgctggccttagcctttgggcatgccctagagagaggccgagattatgagaaggataaagtttgccaggaactctccacgctggggaaagatgacttcagatctctatcactaatcctatacagcaggaagtttcccagtagcacctttgaacaggtcagtcagcttgtgaaggaagttgtctccttaactgaggaatgctgtgctgagggagcagatcccaactgctatgacaccaggacttcagagctgtctattaagtcctgtgaaagtgacgccccctttcctgttcaccccgggacttccgagtgttgcacgaaggaggggctagagcggaaactctgcatggctgccctcagtcaccagccacaggaatttcccgcctatgtggagccgacgaatgatgagatctgtgaggcgttcaggaaggatccaaagggatttgccgatcagtttctattcgaatattccagcaattacggacaagctcctctgccacttttagttggttacaccaagagttatctctctatggtcggctcctgctgtacttctgcaaaaccaactgtgtgctttttgaaggagagactccagatgaaacagttactacttctcaccactatgtcaaacagagtctgctcacaatatgctgcatatggaaaggaaaaatcaaggatgagccatctcataaaactagcccaaaaagtaccaactgctaacctggaggatgttctgccactcgctgaagaccttactgaaatcctgtccagatgttgtaagtctacctcagaggactgcatggccagagagctgcctgaacacacattaaaaatctgtggaaacttatccaaaaagaattcaaagtttgaagagtgctgttacgaaacaacacccatgggcatttttatgtgtagctacttcatgccaactgctgaaccacttcaattgccagccatcaagctgccaaccagcaaagacctctgtggtcagagtgccacacaagccatggaccagtatacatttgaactaagcagaaggacccaggttccagaagtgttcctcagcaaagttctggatacgaccctgaaaacccttagggaatgctgcgacactcaggactctgtctcctgtttcagcactcagagtcccctgatgaagaggcaactaacttctttcattgaaaaggggcaagaaatgtgtgcagattattccgagaacacatttactgagtacaagaaaaaattggcggaacgactgaggacaaaaatgcccaatgcctccccggaagagctggcagacatggtggccaagcactcagactttgcctccaagtgctgctccataaactctcctccacgctactgtagctcacagattgatgcagaaatgagagacatcctgcagtcctgatgcagggtatatgcaatgccttggacctagaactggaccactctggaaaattgccagataacaaaatcaagcaaataccacagagatggccttccaagaagaccaccaagataattccatttttcccatctacaatgttttttgatgaattataaaaataaattgaaatatagtgcaaactct

SEQ ID NO: 3748 - DNA, 2326 bp, Rattus norvegicus
ctcagccagacagtcctcacctgcaacaggtggcctcaggagtcaggaacatctctacttccccaacgacccctgggttgtcctctcagagatggctatggatactacaaggtgtggagcccagttgttgactctggtcgagcagatcctggcagagttccagctgcaggaggaagacctgaagaaggtgatgagccggatgcagaaggagatggaccgtggcctgaggctggagacccacgaggaggccagtgtaaagatgttacccacctacgtgcgttccaccccagaaggctcagaagtcggagactttctctccttagacctgggaggaaccaacttcagagtgatgctggtcaaagtgggagagggggaggcagggcagtggagcgtgaagacaaaacaccagatgtactccatccccgaggacgccatgacgggcactgccgagatgctctttgactacatctctgaatgcatctctgacttccttgacaagcatcagatgaagcacaagaaactgcccctgggcttcaccttctccttccctgtgaggcacgaagacctagacaagggcatcctcctcaattggaccaagggcttcaaggcctctggagcagaagggaacaacatcgtaggacttctccgagatgctatcaagaggagaggggactttgagatggatgtggtggcaatggtgaacgacacagtggccacaatgatctcctgctactatgaagaccgccaatgtgaggtcggcatgattgtgggcactggctgcaatgcctgctacatggaggaaatgcagaatgtggagctggtggaaggggatgagggacgcatgtgcgtcaacacggagtggggcgccttcggggactcgggcgagctggatgagttcctactggagtatgaccggatggtggatgaaagctcagcgaaccccggtcagcagctgtacgagaagatcatcggtgggaagtatatgggcgagctggtacgacttgtgctgcttaagctggtggacgagaaccttctgttccacggagaggcctcggagcagctgcgcacgcgtggtgcttttgagacccgtttcgtgtcacaagtggagagcgactccggggaccgaaagcagatccacaacatcctaagcactctggggcttcgaccctctgtcaccgactgcgacattgtgcgccgtgcctgtgaaagcgtgtccactcgcgccgcccatatgtgctccgcaggactagctggggtcataaatcgcatgcgcgaaagccgcagtgaggacgtgatgcgcatcactgtgggcgtggatggctccgtgtacaagctgcacccgagcttcaaggagcggtttcacgccagtgtgcgcaggctgacacccaactgcgaaatcaccttcatcgaatcagaggagggcagcggcaggggagccgcgctggtctctgcggtggcctgcaagaaggcttgcatgctggcccagtgaaatccaggtcatatggaccgggacctgggttccacggggactccacacaccacaaatgctcccagcccaccggggcaggagacctattctgctgctacccctggaaaatggggagaggcccctgcaagccgagtcggccagtgggacagccctagggctctcagcctggggcagggggctgggaggaagaagaggatcagaggcgccaaggcctttcttgctagaatcaactacagaaaatggcggaaaatactcaggacttgcactttcacgattcttgcttcccaagcgtgggtctggcctcccaagggaatgcttcctggaccttgcaatggcctggcttccctgggggggacacaccttcatggggaggtaacttcagcagttcggccagaccagaccccaggagagtaagggctgctagtcacccagacctggctgttttcttgtctgtggctgaagaggccggggagccatgagagactgactatccggctacatggagaggactttccaggcatgaacatgccagagactgttgccttcatatacctccacccgagtggcttacagttctgggatgaaccctcccaggagatgccagaggttagagccccagagtccttgctctaaggggaccagaaaggggaggcctcactctgcactattcaagcaggaatcatctccaacactcaggtccctgacccaggaggaagaagccaccctcagtgtccctccaagagaccacccaggtccttctctccctcgttcccaaatgccagcctctctacctgggactgtgggggagtttttaattaaatatttaaaactacttca

SEQ ID NO: 3749 - DNA, 1269 bp, Rattus norvegicus
atggatgtgttcagttttggccagggcaacaacaccacagcgtcccaggagccctttgggaccggcggcaacgttactagcatctccgacgtgaccttcagctaccaagtgatcacctctctgttgctgggtactctcattttctgcgcggtgctcggcaatgcctgcgtggttgctgccatcgccctggagcgctccctccagaatgtggccaactatctcatcggctccttggcggttactgatctcatggtatcagtgctggtgctgcccatggctgctctgtaccaggtgctcaacaagtggaccctgggccaggtcacctgcgacctgtttatcgccctggatgtactgtgctgcacctcgtccatcctgcacctgtgcgccatcgcgctagacaggtactgggctatcaccgaccctatagactatgtgaacaaaaggacgccccggcgcgccgctgcgctgatctcgctcacttggctcattggctttctcatctccatcccgcccatgctgggctggcgcaccccggaagaccgatcggaccccgacgcgtgcaccatcagcaaggaccacggctacaccatctactccactttcggcgctttctatatcccgctgttgctcatgctggttctctacgggcgcatcttcagagccgcacgcttccgaatccgcaagactgtcaggaaggtggaaaagaagggagcaggcaccagcttaggaacttcgtcggcaccgccccccaagaagagcctgaacggacagccaggtagtggggactggaggcgctgtgctgagaacagggcggtggggactccgtgcactaatggggcagtgaggcagggtgacgacgaggccaccctggaggtgatcgaggtgcaccgagtgggcaactccaaagagcaccttcctctgcccagcgagtcaggatctaactcctatgcccccgcctgcttggagagaaaaaatgagcgcaatgctgaagcaaagcgcaagatggccttggcccgtgaaaggaagacggtgaagactctgggcatcatcatgggcaccttcatcctctgctggctgccgtttttcattgtggctctggtcctgcctttctgtgaaagcagctgccacatgcctgcgttgttgggtgccataattaactggctaggctactccaactccctgctcaatccggttatttatgcttatttcaacaaagactttcaaaacgcttttaagaagataatcaagtgcaagttctgccgccgatga

SEQ ID NO: 3750 - DNA, 2168 bp, Rattus norvegicus
actcgctgtagtaattccagcgagagacagagggagtgagcgggcgggttggaagagcccagtgtgcagagccccactccgggcttcctaggaaggcagctctggagtgagaagggctttgcctccaggcttgctgcctcctcgacccaatcctcccgctgacccaacatcagcggtcgcaaccctcgccgcctctgggaaactttgcccattgcaacgggcagacacttctcactggaacttacaatctgcgagccaggacaggactccccaggcgcaggggagggaatttttgtctatttggggacagtgttctctgcctctgcccgcgatcggctcccctgaaaagagctcctcgcgttatttgaagcctgaatttcctttgggaggtggaaaacccgacagtcacgacgatgcccctcaacgtgagcttcgctaacaggaactatgacctcgactacgactcggtgcagccctatttcatctgcgacgaggaagagaatttctatcaccagcaacagcagagcgagctgcagccgcccgcacccagtgaggatatctggaagaaattcgagctgctgcccaccccgcccctgtcccccagccgccgctccgggctctgctctccgtcctatgtcgcggtcgctacgtccttctccccaagggaggacgatgacggtggcggtggcaacttctccaccgccgatcagctggagatgatgaccgagctacttggaggagacatggtgaatcagagcttcatctgcgatcctgacgatgagaccttcatcaagaacatcatcatccaggactgtatgtggagcggcttctcggccgctgccaaactggtctccgagaagctggcctcttaccaggctgcgcgcaaagacagcaccagcctgagccccgcccgcgggcacagcgtctgctccacctccagcctgtacctgcaggacctcaccgccgcagcgtccgagtgcatcgacccctcagtggtcttcccctacccgctcaacgacagcagctcgcccaaatcctgtacctcgtccgattccacggccttctcttcttcctcggactcgctgctgtcctccgagtcctccccacgggccacccctgagcccctagtgctgcatgaagagacaccgcccaccaccagcagcgactctgaagaagaacaagatgatgaggaagaaattgatgtggtgtctgtggaaaagaggcaaccccctgccaagaggtccgagtcagggtcatccccatcaagaggccacagcaaacctccacacagcccactggtcctcaagaggtgccatgtctctactcaccagcacaattatgcagcacccccctccacaaggaaggactatccagctgccaagagggccaagttggacagtggcagggtcctgaaacagatcagcaacaaccgcaaatgctccagccccaggtcctcagacaccgaggaaaacgacaagaggcggacacacaacgtcttggaacgtcagaggagaaacgagctgaagcgtagcttttttgccctgcgcgaccagatccctgagttggaaaacaacgaaaaggcccccaaggtagttatcctcaaaaaagccaccgcctacatcctgtccgttcaagcagatgagcacaaactcatctcagaaaaggacttactgaggaaacggcgagaacagttgaaacacaaactcgaacagcttcgaaactctggtgcataaactgaccggaagtgaggaggagctggaatctcgagtgtaaggagaacggttccttctgacagaacttggacttcaaaaaatgcatgctcaaagcctaacctcacaaccttggctggggctttgggacttcagccataatgttaactgcctcaaagttaaggcataaaagaacttttttttatgcttcccatcttctttctttttcctttaacagatttgtatttaattgttttttttaaaaaaatcttccggtgtacatagggcctttaaatgtaaataactttaataaaacgtttataacagttatacaagattttaagacatgtatgataaaccataattttttttatttaaagaccttttcatttttaaagttgatttttttctattgtttttagaaaaaataaaataattggaaaaaatataattgagcca

SEQ ID NO: 3751 - DNA, 6035 bp, Rattus norvegicus
tgcttcactctgccacagtcagaggtcccataggtccacagctgctgctgctgctctctgctgtcctgccggtgtgactcagccaacactatgagtagcgacaccgagatggaagtgtttggcatagctgcccctttcctccgaaagtcggaaaaggagaggatcgaagctcagaaccagccctttgatgccaaaacctattgctttgtggttgactcaaaggaagaatatgccaaggggaaaattaagagtagccaggatgggaaagtcacggtggagacagaagacaacaggaccctggtggttaaaccagaggacgtgtatgccatgaaccctcccaagtttgacaagatcgaggacatggccatgctgacccacctgaacgagcctgctgtgctgtacaacctcaaggaccgatacacgtcctggatgatctacacctattcaggcctcttctgtgtcaccgtcaacccctacaagtggttgccggtgtacacccctgaggtggtggatggctaccgaggcaaaaagcgccaggaggccccgccccacatcttctccatctctgacaacgcctaccagttcatgctgacggatcgtgagaaccagtccatcctgatcaccggagaatccggggccgggaagacggtgaacaccaagcgtgtcatccagtactttgcaacaattgcagccactggggaccttgccaagaagaaggactccaaaatgaaggggaccctggaagatcaaatcatcagcgccaaccccctgctggaggcctttgggaatgccaagaccgtgaggaatgacaactcttcccgctttggcaagttcatccgcatccatttcggcaccactgggaagctggcctctgcagatattgaaacttatctgctggaaaagtccagagtcaccttccagctgaaggctgagagaagctatcacatcttctaccagattctttccaacaagaagccggaactgatcgagttgctgctgattacgaccaacccttacgactacccattcatcagccagggtgaaatcctggtggccagcatcgatgatcgtgaggaactgttggctacagacagtgccattgacatcctgggcttcaccccggaggagaaatctggactctataaactgacaggggctgtgatgcattatgggaacatgaagttcaagcagaagcagcgagaggagcaagctgagccagatggcaccgaagtggctgacaaaacagcctacttgatgggcctgaactcttcagacctcctcaaagccttgtgctttcccagagtgaaagttgggaatgagtacgttacaaaaggccaaactgtggaccaggttcaccatgctgtgaatgctctctccaagtccgtttatgagaagctgttcttgtggatggtcactcgtattaaccagcagctggacacaaagctaccaagacaacacttcattggggttttggacattgcgggttttgaaatttttgagtataacagcctggagcagctgtgcatcaacttcaccaacgagaaactgcaacagtttttcaaccaccacatgttcgtgctggagcaggaggagtacaagaaggaaggcatcgagtggaccttcatcgacttcgggatggacctggcggcctgcatcgagctcatcgagaagccgatgggcatcttctccatcctggaagaggagtgcatgttccccaaggcgacagacacctccttcaagaacaagctgtatgaccagcaccttggaaaatccaacaacttccagaagcctaaggtggtcaaaggcaaggccgaggcccacttctccctcatccactatgcgggcaccgtggactacagtgtctcgggctggctggagaagaacaaggaccccctgaatgagaccgtggtggggctgtaccagaagtcttccaacagactcctggcccatctctatgccaccttcgctacgacagatgctgacggtgggaagaagaaagtcgctaagaagaaaggctcttccttccaaacagtgtctgcgctgttcagggaaaacttgaacaagctgatgtccaatttaagaaccactcacccacactttgtgcgctgtataatacccaatgaaaccaagaccccaggggccatggaacacagcctggtcctgcaccagctgaggtgtaacggggtgctagaaggcatccgcatctgcaggaaggggttccccaacaggattctgtatggagactttaaacagagataccgagtgctgaacgccagtgccatcccggagggccagttcattgacagcaagaaagcttgcgagaagctcttggcttccattgacatcgaccacacacagtacaaatttggacacaccaaggtgttctttaaggctggcttgctgggaaccctggaggagatgcgggatgagcgtctggccaaactgatcactcggacacaagccgtgtgcagagggttcctcatgcgtgtggaattccagaagatgatgcagaggagggaatccatcttctgcatccagtacaacatccgcgccttcatgaacgtcaagcactggccctggatgaaactcttcttcaagatcaagcccctgctgaagagcgccgagacggagaaggagatggccaccatgaaggaggagttccagaagaccaaggacgagctcgccaagtcggaggcaaagaggaaggagctggaggagaagctggtcactctggtacaagagaagaacgacctgcagctccaagtacaggcggagagtgagaatttgctggatgccgaggagcgatgcgaccagctgatcaaagccaagttccagctggaggccaaaattaaagaggtgaccgaaagagctgaggatgaggaggagatcaacgccgagctcacggccaagaagaggaagctggaggacgagtgctcggagctgaagaaggacatcgatgaccttgagctgacactggccaaggttgagaaggagaagcacgccacggagaacaaggtaaaaaaccttaccgaagaactggcaggcctggatgaaactattgcaaagctaacacgggagaagaaggccctccaagaggcccaccagcagaccctggacgacctccaggctgaggaagacaaggtcaattctctgagcaagctcaagagcaagctggagcagcaagtggatgatttggagagctccctcgaacaagagaagaagctgcgtgtggacctggaaaggaacaagaggaagctggagggagacctgaagcttgcccaagagtccatattagatctggagaacgacaagcaacagctggacgagaggctcaagaagaaggactttgaatatagccagctgcagagcaaggtggaagatgagcagacgctgagcctccaacttcagaagaaaatcaaagagttacaggcccgcattgaggagctggaggaagagatagaggcggagagggccacccgggccaagacagagaagcagcgcagcgactacgcccgcgagctggaggagctgagtgaacgtctggaggaggcgggcggtgtcacctctacccagattgagctgaacaagaagcgtgaggctgagttcttgaagctgcgcagggacctggaggaggccaccctgcagcacgaggccaccgtggccacgctgcggaagaagcacgcggacagcgcggcggagctggcagagcagatcgacaacctgcagcgcgtcaagcagaagctggagaaggagaagagcgagttcaagctggagatcgacgacctctccagcagtgtggagagtgtgtccaaatccaaggccaacctggagaagatatgccgaactctagaggatcagttaagcgaggccaggggcaagaacgaggagacgcagagaagcctaagtgagctgaccacacagaagtcccggctgcagacagaagcgggtgagctgagtcgtcaactggaagaaaaggaaagcatagtatctcagctttccaggagcaagcaagcctttacccaacagatagaggagctcaagaggcaactggaggaagagaacaaggccaagaatgcgctggcccacgccctgcagtcctcccgccacgactgtgacctgcttcgggaacagtacgaggaggagcaggaaggcaaagccgagctgcagagggcgctgtccaaggccaacagcgaggtggcccaatggaggaccaaatatgagacggatgccatccagcgcacggaggagctggaggaggccaaaaaaaagcttgctcagcgccttcaggattcggaggagcaggtcgaggctgtgaatgcaaaatgcgcttccttggaaaagaccaagcagaggctgcaaggggaggtggaggacttgatggtggatgtggagagagccaactctctggctgccgctctggacaagaagcagaggaactttgacaaggtgttagccgagtggaagacgaagtgtgaggagagccaagcagagctggaggcggctctcaaggaatcccggtccttgagcactgagctcttcaaactgaaaaacgcctatgaagaagccttggatcaactcgaaactgtgaagcgagagaataagaacttagaacaagagatagcagatctcaccgaacaaattgctgagaacggtaaaagcatccacgagctagagaaatccagaaagcagatggagctggagaaggctgatatccagatggcgctggaggaagcagaggcagctctggagcacgaagaagccaagatcctcaggatccagcttgaactgacgcaggtgaaatcagagatcgatagaaagatcgcagagaaggatgaagagatcgagcagctgaagaggaactaccagaggacagtggagaccatgcagggcgccctggatgctgaggtgcgcagcaggaatgaggcgatccggctgaagaagaagatggagggcgacctcaatgagattgagatccagctgagccatgccaaccgccaggccgcagagaccatcaagcacctccggagtgtccagggacagctgaaggacacccagctgcacctggatgacgctctccgaggccaggaggacctgaaggagcagctggcgatcgtggagcgcagagccaacctgctgcaggctgaggtggaggagctgcgggccactctggagcagacggagagggcccggaagctggcagagcaggagctgctggactccaacgagagggttcagctgctgcacacccagaacaccagcctcatccacaccaagaagaagttggagactgacctcacacagctccagagtgaggtggaggatgccagcagggacgcaaggaacgccgaggagaaggccaaaaaggccatcactgatgccgccatgatggcggaggagctaaagaaggagcaggacaccagcgcccatctggagcggatgaagaagaacctggagcagacggtgaaggacctgcagcaccgtctggacgaggctgagcagctggcactgaagggcggcaagaagcagatccagaaactggagacgaggatcagagagctagagtttgagctggaaggggaacagaagaggaacacagagtctgtgaagggcctgaggaagtatgagcggcgtgtcaaggagctcacctaccagagtgaggaggacaggaagaatgtgctgagattgcaggatctggtggataaacttcaagtgaaagtcaagtcctacaagaggcaggctgaggaggctgatgaacaagccaatgttcatctcaccaagttccggaaagcccagcatgagctagaggaggccgaggaacgtgcggatattgcagaatcgcaagtcaataaactgcgggctaaaacccgggacttcacctctagccggatggtggtccatgaaagtgaggagtgagcatgtcctcctggtgaggggcagaagatatgcagaatgtatgttttcgtggctcctgaccatcctgcttaatttccacgtaacccctttccacatgcaataaaatttgccttgtttcaagt

SEQ ID NO: 3752 - DNA, 2442 bp, Rattus norvegicus
gacagaaaacctagagatggaattaaattatggccagctctcacaaggtcaactttgatgtattacgtgaatgatggagtgtatgggtcatttaactgcattctttatgaccatgcacatgtcagtccctgcagccgccgccgccggccgccttcagtcagcagctcggcgccacctccggtcggcgactgcggcgggctcgacgaggcggctgacggggcggcggcgggaagacggccgggtgcgccttggggtttagtggcggcttctccatgggtccagccagccgcttccctgtgctgtgagtgtttccaccactccaggagacagcattcagagttgaccttgtgagagctggccataatttaattccatctctaggttttctgtcttattgtttcagaggcacatcgagaaccaaccatgggcagctttactaaggaagagtttgactgccatatcctcgatgaaggtttcactgctaaggacattctggaccaaaaaatcaatgaagtttcttcctctgatgataaggatgctttctatgttgcggacctcggagacgttctaaagaagcatctgaggtggctgaaagctcttccccgtgttactcccttctatgctgtcaagtgtaatgacagcagagccatagtgagcaccctggctgccattgggacaggatttgattgtgcaagcaagactgaaatacagttggtgcaggggcttggggtgcctccagagaggattatctatgcaaatccttgtaagcaagtgtctcagatcaagtatgctgccagtaatggagtccagatgatgacttttgacagtgaaattgagttgatgaaagttgccagagcacatccaaaggcaaagttggttttgcggattgccactgatgattccaaagcagtttgtcggctcagtgttaagtttggtgccacactgaaaaccagcaggcttctcttggaacgggcaaaagagctaaatattgatgtcattggtgtcagcttccatgtgggcagtgggtgtactgaccctgagaccttcgtgcaggcagtgtcagatgcccggtgtgtctttgacatgggaacagaagttggtttcagcatgtatctgcttgacattggtggtggctttcctgggtctgaagacacgaagcttaaatttgaggagatcaccagtgtaatcaacccagctctggacaagtacttcccatcggactctggagtgagaatcatagctgagccaggcagatactacgtcgcatcagctttcacacttgcagtgaatatcattgccaaaaaaaccgtgtggaaggagcagaccggctcggacgatgaagatgagtcaaacgagcaaactttgatgtattacgtgaatgatggagtgtatgggtcatttaactgcattctttatgaccatgcacatgtgaaggccctgctgcagaagagacccaagccagatgagaagtattactcatccagcatctggggaccaacatgtgatggccttgatcggatcgtcgagcgctgtagcctgcctgaaatgcatgtgggtgattggatgctgtttgagaacatgggtgcatacactgttgctgctgcttctactttcaatgggttccagaggccaaacatctactacgtaatgtcacggtcaatgtggcaactcatgaagcaaatccagagccatggcttcccgccagaagtggaggagcaggatgttggcactctgcccatgtcttgtgcccaggagagcgggatggaccgtcaccctgcagcctgtgcttctgctagtatcaatgtatagatgccattcttgtagctcttacctgcaagtttagcttgagttcacggcatttggggggaccatttaacttaattactgctagtttggaatgtctttgtaagagtagggttggcaccaatgcagtatggaaagactaggagatgggggtcacacttactgtgttcctatggaaactttgaatattttatatggatttttattcacttttcagacctgatactaatgagtgcccctcggctgctgagcaagcatttgtagcttgtacattggcagaatgggctaaaagcttatgttgtgacccattttgaaaataaagtatcttgaaatgattggacattggagaatgtgtgcaagtatcccttacagaaggcacaaacttctgcacaggctgtgtgttacagcagtgagtctagcccagcagagatgtggatgatacaaagctgtgccccctctgtacagcatcaatgtgcttagcccatctcaagtgtttactgtgaacttggtgcccaaagtctcttaagagtgtcatctgcctagtggcctcttgacttggccacttcctaaggagagggcatctgaggctctttgaaccttgcctgcagaaaccctgactgctccctcaacccttggccg

SEQ ID NO: 3753 - DNA, 3053 bp, Rattus norvegicus
cccccgagagctttgtgaaggaggaacgctgcacacccgcctcccgcagcacacagccaaccacagctgagcgacacgcaacaagagccaatcacaaggcacttccgaaagctccaggatgcagatgtcttcagccctcacttgcctcaccctgggcctggttctggtctttgggaaagggttcgcttcaccccttccagagtcccatacagcccagcaggccaccaacttcggagtaaaagtgtttcagcatgtggtccaggcctccaaagaccgaaatgtggtcttctctccctacggcgtgtcctcggtgctggctatgctgcagctgaccacagcagggaaaacccggcagcagatccaagatgctatgggattcaatatcagtgagaggggcacagctcctgccctccgaaagctctccaaggagctcatggggtcatggaacaagaatgagatcagtactgcggacgccatctttgtccagcgggacctagagctggtccagggcttcatgccccacttcttcaagctcttccggaccacggtgaagcaggtggacttctcagaggtggaaagagccagattcatcatcaacgactgggtggagaggcacaccaaaggtatgatcagtgacttactggccaagggggctgtaaatgagctgacacgcctggtgctggtgaacgccctctatttcaacggccaatggaagacccccttcttagaggccagcacccaccagcgcctgttccacaagtctgatggtagcaccatctccgtgcccatgatggctcagaacaacaagttcaactacactgagttcaccactccggatgggcacgagtacgacatcctggaactgccctaccacggcgaaaccctcagcatgttcattgcagcaccctttgaaaaagatgtgcccctctccgccatcaccaacattttggacgctgagctcatcagacaatggaagagcaacatgaccaggctgccccgcctcctcatcctgcctaagttctctctggagactgaagtggacctcagagggcccctggagaagctgggcatgactgacatcttcagctcaacccaggccgacttcacaagtctttccgaccaagagcagctctctgtagcacaagcactacaaaaggtcaagatcgaggtgaacgagagcggcacagtggcgtcttcctccacagccattctagtctcagcccgcatggcccccacggagatggttttagaccgatcctttctctttgtggttcggcacaatccaacagagacaatcctcttcatgggccagctgatggagccttgagagtgggatgagaagcctttcctttgggacaaaactggacgtgttataagcagagactctgaagaaaagaattgttttaaggactctttggggagaaagagaaggcctttctttcttaccccggcactggtaaatctttccaaccagcctcccagacctcagactctcgaagaggaaagagtctaactccctcactagggacctatcttactaaggtctcatccaaccatagaactcacagaatctggatctgcccagcattcagcctttggacccagttcccaccaaggccccagcagggccaacccactacgccttcactcagcaaagtcttttgtgttccagtcacactctgggtacctcttgtatcgtcctccattgctatgaaggatgacccaggccaaaggaagaagcactgtcctatctcaaggtccactgtggaaatgaacaccttgcccatccccaaggggcagcagatagacagatcgaatgatcgcccgatatcaagccttctcccagctcccgtcctgccctcccttccctgacagccgccttgtgttatttcagagtgtagatgacttgtttacagcttttttcgacccacaaacttttctcattttgaaagcgtgaaagaaaggtcagatgtgcacgtgccttgctctttatcctgggtctccctgtgaggggagaggggtcctggggagattccaggggtgtgattgaatatttatcttgtttatcttatacgtttgttggggagaagaagcactattaaggagaaagccttttatttaaaccatggcatatggtgtcccatttggggtctgtatccctgtatgtcagggaggcatcactccacaaacccgcccctcgggtggcccggcgtcggggctcacactgccgcctagtggcagccgaacacgcccttgccccatccctcccccgcatcctcccccgtggctcttttccttagggatcttgccaaggtgatgcttggcagcccacggtaaaggaagggggaaaaagattaggtgggagagagagagagagagagagagagagagagagagagagagagagagagagagagagagagagagagaaagagagagagatgtttgagagagggcaaagtggtttcaaatttttccaatacattcagaagccgagtgggaaagggggctgtgtgacctaacaggacagaactttctccaattactgggtgactcagctgcactggtgactcacttcaatgtgtcatttccggctgctgtaagtgagcagtggacacgtgggggggggggggtgaggatgaaagaaacagccagctcctggtcaaccaccttagttagataatcttttttgaaagcttcctagctgggggtatgatcagaaaaccaatttactgaaaaactgcacaggaaggtaacgtgaatctaatttcatagcgggccgctctgcatccgttacatctccactggaaaaaaataatcattttctttttgtgtgtgtgtgtgtgttttagcttttctccctctccctctttctctctcatttcattatgcactggataaccatacaccgtgtaccacaggggcccaaatgtggggtcacatggtcttgaattttgtggggtacatatgcctttgtttgtttgttttcacttttgatatataaacaggtaaatgtgtttttaaaaaataataaaaatagagaatatgcagac

SEQ ID NO: 3754 - DNA, 1540 bp, Rattus norvegicus
ggatcgcacatgggggcgatggcaccgcgcacgctgctcctgctgctggcggcggtcctggcccccacccagacctgggcgggctcacactcgctgcggtatttccacaccgccgtgtcccggcccggcctcggggagccccggttcatttctgtcggctacgtggacgacacgcagttcgtgcgctacgacagcgacgcggagaatccgagatacgagccgcgggcgcggtggatggagcgggaggggccggagtattgggaggagcagacactggtcgccaagggacaggagctggattaccgagtgagcctgaggaacctgctaagctactacaaccagagcgagggcggctctcacaccatccagaggatgtatggctgtgacgtggggtccgacgggagcctcctccgcgggtatgagcagcacgcctacgacggccgcgattacatcgccctgaacgaagacctgaaaacatgggctgtggcagactttgcagcatggatcacccggagcaagtggcagcggaatggtgctgcagagagaagcagggcctatctggagggcacgtgtgtggagtggctcctcagatacctggagcgcgggaaggagacgctgctgcgctcagatcccccagaggcacatgtgacccttcaccccagacctgaaggtgatgtgaccctgaggtgctgggccctgggcttctaccctgctgacatcaccctgacctggcagttgaatggggaggacctgacccaggacatggagcttgtggagaccaggcctgcaggggatggaaccttccagaagtgggcatctgtggtggtgcctcttgggaaggagcagaattacacatgccgtgtggagcatgaggggctgcctgagcccctttcccagagatgggagccttctccatccaccgactccaacttacttctgttgttcttggagctgtggcagtttttgtagttttggccatcattggagctatggtggttgttgtgaggaggaggaggagaaacacaggcaggtacagctcccagagctccgttgtgtctctcccagattgtgaagcatgaagacagctgcctggagtggactgagtgacagacgatgtgttcaggtctctcctgtgacatccagagccctcagttctctttagacaccagtgtctgaagttccctgtgattctatggcttcagtgtgaagaactgtggagtccagcctgccctacacaccaggaccctgtccctgcactgcctgtgttgcctaccacattcagccttgctggtccagcctgggggtggagggtggggacatctgcatcctgtccccctgtgccaccctgagcttcagcccctcactccacactgagaataagaatctgagtgtgaacttgattgttcacatccttgacacagtgtggatagctttttaaattactggatggaatacttagaggttttttgttttggggttttgctttgtttccttttgtttttgaaaaaataaatggcagatggagaagcttccagaaaaa

SEQ ID NO: 3755 - DNA, 1395 bp, Rattus norvegicus
atattctgagccactgggtgacagctgctaactatggagaagggagaggtggcctccttgcgttgccgactgcttctgttgttgctactattgacgctgcctcccacccaccagggacggaccctgagacacattgaccctatccagagtgctcaggactctcctgctaaatacctcagcaatggcccaggacaagagcccgtcactgttctgaccattgacctcaccaaaatcagcaaaccctcttcctcctttgagtttcgaacctgggatccagagggagtgattttttatggggacaccaacactgaagatgactggttcatgctgggactgcgggatggccagcttgaaatccagctgcacaatctctgggctcggcttacagtaggctttggccctcggctgaatgatgggagatggcacccggtggagctaaagatgaacggggattcactgctgctatgggtggatggaaaagagatgctatgcctgagacaagtttctgcatccctggctgaccatccccagctcagcatgaggattgcactaggggggctcctcctccccacttccaaacttcggtttccgctcgttcctgccctggatggctgtatacgccgagatatctggctgggccaccaggcccagctctcaacctctgcccgaactagccttgggaactgtgatgtggacctgcaacctggactgttcttccctccagggacccatgcagaattcagtctccaagacattccccagcctcacacagacccctggaccttttctctggagctgggatttaagctggtggatggagcaggacgactccttactcttgggacagggacaaattcttcttggctcacccttcacctccaagaccaaacggtggttctgtcttctgaagcagaacctaaactagctttacccttggcggtgggactccctcttcaactgaagctggatgtattcaaagtagccttgagccaaggaccaaagatggaggtcctttctacatctcttttaagacttgcctccctctggagactctggtcccaccctcagggccatctctcccttggggctttaccaggagaggactcttctgcttccttttgcctgagtgacctttgggtacaaggacagagactggacatagacaaagccctgagcagaagccaggacatctggactcatagttgccctcagagccctagcaatgatacccacacctcccactaaacccctttgagaagcaggcacggctgtgcacatccttaaatcccggagaggtgaattgggacctcaaggttatccttggctatatgacatgtttgaggccagcctgggctacatgaaaccctgccttcaaaaataaaaaagaactttgga

SEQ ID NO: 3756 - DNA, 2681 bp, Rattus norvegicus
gggagccgatcggtgtgggctggtggagaaggcagcgggagtctgccgccccgaagtccaggtcccctcttcccactcccgcgccggccagcgctgcggctcccctctgccaccatgagaaacatcttcaagaggaaccaggagcccattgtggctccggccaccaccactgccacaatgcctctggcacccgccgcacctgccgataactctacagagagcacgggcaccggggagagccaagaagacatgttcgccaagctgaaggacaaattcttcaatgagatcaacaagatccctttgcccccctgggctctgattgccatggccgtggttgctggcctcctgctgctcacctgctgcttctgcatctgtaagaagtgctgctgcaagaagaagaaaaacaagaaggagaagggcaaaggcatgaagaacgccatgaacatgaaggacatgaaggggggccaggatgatgacgacgcggagacaggcctgactgaaggagaaggagaaggcgaggaggagaaagagccggagaacctgggcaaattgcagttttctctggactatgatttccaagccaaccagctcaccgtgggcgtcctgcaggctgctgaactcccggccctggacatgggtggcacgtcagacccttacgtcaaagtcttcctcctcccagacaagaagaagaaatatgagaccaaggtgcaccggaagacactgaacccagccttcaacgaaactttcactttcaaggtgccataccaggagttaggaggcaaaaccctggtgatggctatctatgactttgaccgcttctctaagcatgacatcatcggggaggtgaaagtgcccatgaacacggtggaccttggccagcccatcgaggaatggagagacctacaaggcggagagaaggaagagccagagaagctgggtgacatctgtacctccttgcgctacgtgcccactgctgggaagctcaccgtctgtatcctggaggccaagaacctgaagaagatggatgtggggggcctctcagacccctatgtgaagatccacttgatgcagaatggcaagagactcaagaagaagaagacgacggtgaagaagaagaccttgaacccctacttcaatgagtcattcagcttcgagatcccctttgagcagatccagaaagtccaggtggtcgtcaccgtgctagactatgacaaactgggcaagaatgaagccatcggaaagatcttcgtaggcagcaacgctacaggcacggagctgcggcactggtccgacatgctggcgaaccctcggaggcccatcgcccagtggcactctctgaagcctgaggaagaagtggatgctcttctgggcaagaacaagtaggcagcggcgcctggggccacgccccagaggacactgacgagctccagagctatcaatacctcagttatgcgaccttagaggtttcttcatttgtttgcggtgtgtcctgttttcctttcctttttctttttttgtctttttaaaaaccaacttccttttggtggctatgtgaagaggcccctaagacgtgaaagagaagcctggctctgttattgtcccaggagctgtccttgttgcatgccctatcacggttgcccctcaccccaagtggggccctctactgtcagagtggaagcacttcctgcttttcctgggttttggaccaacaaagtggcaagcacattctgtgtctcgactgtgtgtgtgtgtgtgtgtgtgtgtgtgtgtgtgtgtgtgtgtgtgtgtgtgtacacgtgtgcccatccatccccaccttgcctctgtttggaatatctcttcgtttctggaatgagtcacggacaatgatgccgtgtgagagaggaaagtcttcaggtactccgaggtgaggagagcccactgcttaagtggtcagaggccagaagctctcatagtccttgcgaaaggccatttggaagacgcaagatgtgatactggatgtattccgaactaggaccaaaggcttgatgccatcccagactccctcttgtcagtcatggcttccccaggagtggggctttgggatcattcatgaaaataaactatttactcgactggtcggattcagccagggaccgccagctccaggatgtcattcttgttgacgacatcaaactttgaagaaacagaagtcccattactcagctctggatctttgcctcgtccagtgggaggcagatgcttcctccctctgcagagtacaagcagtgcgttcatttgcattcacgcaccatctgcttttgcctctgtttccctttttgtgtaagtggaaaaataccatctgacgataagtgctttgcacagagccagagacctattagagggatgcttgggtgtttagttcccttgaggtccaggtaaggaggaggtgtcaagaaggggagcgttggtggacagtgacaagctagacattgcagagctcctcacaactcctattcctgaccctctggaccctttgaccctcagtgatggtagccggagtagcccaggcagaccttaggagaggccccgtccttcccttccttagacagttttctcagaatgccaggaaacacagcgcattcatttcagatgggtggtggagaaaatgtgctaaggtttgcaccctatgttcggaattc

SEQ ID NO: 3757 - DNA, 3520 bp, Rattus norvegicus
tgctaactcctgagcccagaaggaccaagacggacaagctgcgggtgacagtagaagcttcaagcgaacgaaagaaaaagggagctcaccagctggatgcggacctcagaacccggccagaggaccagaacttttgcaagcaacactgcactgcgagcagcccttcttatcccttgagcacccacccagcacccagctttgcctttcccgccgcacgtatgttagtgggagttgctagcagcagcaggtgcagaaaggcgggctgtcttgccttctggaactgtgtggcgtgcagctgctttaacgcaaacaagagcctagcttgaaagtggaggaatgtagagcgaccaggcaaagagcctacacaggagaagcattgctcttgtgagcaagtctcctgctaaccaggactgagttctgcccaggaaacttcccacttcctgtgtggcagaacctcaagcctcaggcatctgcaacaaggtcctgcggcaaggaggtgtgtgtgtgtgtgtgtgtgtgtgtgtgtgtgtgtgtgtgtgtgtgtgtacctctgtgtgtgtttgtgattgccccaaaatggataacgtccttcctatggactctgatctcttccccaacatctccaccaacacctctgagtctaaccagttcgtgcagcctacctggcaaatcgttctttgggcggctgcctacacggtcatcgtggtgacttccgtggtgggcaacgtagtggtgatatggatcattttggcccacaagagaatgaggacagtgaccaattatttcctggtgaacctggccttcgctgaggcctgcatggctgcattcaatacggtggtgaacttcacctacgcagtccacaatgtgtggtactacggcctcttctattgcaagtttcacaacttcttccccatcgctgctctcttcgccagtatctactccatgacagccgtggccttcgacagatacatggccatcatccaccctctccagccccggctctcagccacggctaccaaagtggtcatctttgtcatctgggtcctggctctcctgctggcctttccacaaggctactactccaccacagagaccatgcccagcagagtcgtgtgcatgatcgagtggccggagcatcccaacaggacttatgagaaagcgtaccacatctgcgtgactgtactgatctacttcctgcctctactggtgatcggctacgcgtacactgtggtggggattacactgtgggccagtgagatccccggcgactcctctgaccgctaccatgagcaagtctctgccaaacgcaaggtggtcaaaatgatgatcgtggttgtgtgtaccttcgccatctgctggctgcccttccacgtcttcttcctcctgccctacatcaacccagatctctacctgaagaagttcatccagcaggtctacctggccagcatgtggctggccatgagttctaccatgtacaaccccatcatctactgttgcctcaacgacaggttccgtctgggcttcaagcacgccttccgctgctgccccttcatcagtgcaggtgattatgaggggctggaaatgaaatccacccgatacctccagacacagagcagcgtgtacaaggtcagccgcctggagaccaccatctccactgtggtgggagcccatgaagaggagcccgaggaaggccccaaggccacaccctcatccttggatctcacctccaacggctcctctcgcagcaactccaagaccatgacagaaagctccagcttctactctaacatgctggcctaggcatattcaaggcatgcctctagccatcttgtgttgcattattcatggaagcctctgatttggactttgttggaataccctagcactggggcctttggagaagggtcacaatggttaaggaaaacgtttcatgctgtatgcaatctggattccttcctgtctttgtcaaccatcctccatgctggtgacccaaggcagactagtaaacttctataaagtgagaaggctatccttgctttcccctgcagccatcccacgattcctgaaatgacttcatctgcatgcaaggtgcttatctggggaggaattctgcaaggcacctgacctatttgtctggagcgtctgtctttcttcagcgaagtcagtctcagccatgcgtggactagctcacaccactccagccttccacaggacagtgtgagcgaaagaaggtgccacctaaactgtaatgaaagctgtaccccaacctaagcacacatgaagagaggacacctgccattgtgacacgccgatgtttcagtccattcaaacatcacgggcttgacaatactggattcttctgcattgtgtccgcagtgcaaccaacacggactgaatacgtctacacaggccagctgatgttctaaccaagagtcaggagatccctgccaggctatctgagcttcttttccttctttcgcaaaacatcagaactgaaccaaatactcttaagtgttcctttgaatctcagtgttccctggtttaatggtgtatatagttcattttccgtctccctctccctctccctctccctctccctctccctctccctctccctctccctctccctctccctctctctctctctctctctctctctctctctctctctctctctctctctcacacacacacacacacacacacacttaaaaaaaagccaatggcagcctcaaaaataccaggggtgtcaatacttagagatgggtgtgtataaatatccccccattgatccaaaatccctgcttcaaaaattccttctccaggaagtttctcctctttgacagagcagagaacttcacaggaaaacttgatgtctccagcaggctgcatcccggctctgagagcagcactgaggaggacaagtgtgtggacttcctgctctggctgttcgcgtctttgtgcatgttcttcactttttgctacacacagtggagagtagggaggctgtcctcctggaaagaggagccttgtgtcttctcttcagactctgaaccttgccctcctgctccgctttgccgatctccgtctataagaagttaaaggatccaccaatccgaaaggacatttagtctaacaagagccaagaactgaaactttgcatcctgagatggcttcaggacccctggcaggtgagaatgctgttcctttccgtctcagatgtgactggaagcgaaagcttcatgtgacatccgtgaacatcctcatggttcagataattggatgcacaaaagctctattcatcgtgtcagaaaaaacaaggccacccaccaccaggatttataacttctgccagccttgttgaatcaaacattttgaggacatcggcatacctggagaaggcaagatttatacagaagtaatataaaccagaaaaaaagaaaaggaaaagaaacaagaaccatatctgcagagaattatgggaaagtttaataaactaagtaagggctgctgaatgaca

SEQ ID NO: 3758 - DNA, 3538 bp, Rattus norvegicus
ggtgcccacagggcttgactagtgggatttgggggagcagtgggtgcagcgagcctggtccgttgactgccagcagtagacaccggccgtgtgtgggggaggcggctagctcagtggccttgggccgcgtggcctggcggtagaggagccatggtttctaagttgagccagctgcagacggagctcctggctgctctgctcgagtcgggcctgagcaaagaggctctgatccaggctctgggggagcccgggccctacctgatggttggagatggtcccctggacaagggggagtcctgcggtgggactcgaggggacctgaccgagctgcccaatggcctgggggagacgcgtggctcggaagatgacacggatgacgatggggaagacttcgcgccacccattctgaaagagctggagaacctcagcccagaggaggcagcccaccagaaagccgtggtggagtcacttcttcaggaggacccatggcgcgtggcaaagatggtcaagtcgtacctgcagcaacacaacatcccccagcgggaggtggtggacactacgggtctcaaccagtcccacctgtcccagcacctcaacaagggcacccccatgaagacgcagaagcgggccgcgctgtacacctggtacgtccgcaagcagcgagaggtggctcagcaattcacccacgcggggcagggcggactgattgaagagcccacaggtgatgagctgccaaccaaaaaggggcggaggaaccggttcaagtggggccccgcatcccagcagatcctgttccaggcttacgagaggcagaagaaccccagcaaggaagagcgagagaccttggtggaggagtgcaatagggcggagtgcatccagagaggggtgtcaccatcgcaggcccaggggctaggctccaaccttgtcaccgaggtgcgtgtctacaactggtttgccaaccggcgcaaggaagaagcctttcggcataagctggccatggacacgtataacgggcctccacccgggccaggccccggccctgcgctacctgcccacagttccccgggcctgcccacaaccaccctctctcccagtaaggtccacggtgtgcggtatggacagtctgcaaccagcgaggcagctgaggtgccctccagcagcggaggtcccttagtcacagtgtctgcggccttacaccaagtgtcccccacaggcttggagcccagcagcctgctgagcaccgaggccaagctggtctcagccacggggggtcccctgcctcccgtcagcaccctgacagcactgcacagcttggagcagacgtctccaggtctcaaccagcagccgcagaaccttatcatggcctcgctgcctggggtcatgaccatcggcccaggggagcccgcctccctgggtcccacgttcactaacacgggtgcctctaccctggtcattggtctggcctccacacaggcacagagcgtgccagtcatcaacagcatggggagcagcctgaccaccctgcagccggtccagttttcccagccactgcacccttcctatcagcagcctctcatgccccctgtacagagccacgtggcccagagtcccttcatggcaaccatggcccagctgcagagcccccacgccctgtacagccacaagcctgaggtggcccagtacacgcatacaagcctgcttccgcagaccatgctgatcacagacaccaacctcagcacccttgccagcctcacgcccaccaagcaggtcttcacctcagacacagaggcctccagtgagcctgggcttcatgagccgtcgtctccagccacaaccattcacatccccagccaggacccgtcaaacatccagcacctgcagcctgctcaccggctcagcaccagtcccacagtgtcctccagcagcctggtgttgtaccagagttctgactccaacgggcacagccacctgctgccatccaaccacggtgtcatcgagacttttatctccacccagatggcctcctcctcccagtaaccatggtgactgcctcccaggagctgggctcccagagcctgcacagggggagaggagggccacagccatgctgcctggagggtgttggagcctgccacctgccacaggctgctggccttcccagaactctatgccttcatgctgcagctgctcctccatcatcagaaagggatggctctgaggtgtctcctcagcctgaggggcaagcctcaaggagccggaggacagcccaatctggaccgccatccctgctggttagaatagaaaacttaatgcttggaacagaagggggaagcctgtattgctggcaccctccagtcagagcttgcaggccctgaaggatctctgctgagctcggaggccctacatcaacatggctgccatctgtctcctgtgcctcccaggccactccaccctgcgccagagacccatgtgcctcttggtgggttaccctccctccacaggatcttccaggcagttctctggctaggcttgggagcctagggagcagggctctcctaggctttcccctactaagtcgctcttcctcccggccccaggacctcatttgtttccgtgaccgtatcttctgatgccagcttggcatcttgcctgcactagaaaggctgcttcagggctaagattgtcacccttgttccttagggcacgtaactcatgccaaggtcacatcctaggcaatcacctcctctggctgcagggccctacaacttccttcctggtgtgagagacgtgtagaactcggaagacaaggcctgagcaatgtctagtggagagagtgctgagaccagcagagagaagccacccaaggggctaggggctggcagctattctgatctctggcctgctgcagagagcctggccctcagtgggctcccccctcagcctggaaagagccagcgccccctgcagcctacggccggtcatgggcaagcctagatgtttatttaacttttagtaaagccagtaagaagtgtgtagtagcttcctgattacctaggcatctgtggccaggagggacggtggagggaaggcagagggaagcagggtgaaggcaggggcctgagctgtcggcaggctcatgggatatgtgtttacacatctttttgttcaactggaaatgaggtgaggtgactgcctggatttctgtgtcctcctcggtactgcaagaaacccacccagtccaggtgtggtgccattcccagagtcttaagctggggtgacaaagcgtatccggggtgtgggtggaaggatcccactgtggttttatgagacgtccccctaacattgagcacagaggatgtgcctcggtggcacaatgcctgcctggtaagtgtaaagccacgggtttgatccccggcactcaaacaacaacgcactgacagctccttgtaactacgcaggaggcaaaccaggagactggccaggttgagctacagagacacagacaaacaataaacaaaaagggttggtactgaccagg

SEQ ID NO: 3759 - DNA, 900 bp, Rattus norvegicus
cgcgagcccagtggagcgagtgagctatggccggcctcaactcactggaggcggtgaagcgcaagatccaggccctgcagcagcaggcggacgacgcagaggaccgtgcgcagggcctgcagcgcgagctggatggcgagcgcgaacggcgcgagaaagctgaaggagatgcggccgctctcaaccgtcgcatccagctggtggaggaagagctggaccgggctcaggagcgactggccacagccctgcagaagctggaggaggcagagaaggctgctgacgagagtgagagaggcatgaaggtgatagagaaccgagccatgaaagacgaggagaagatggagatccaggagatgcagctcaaagaagccaagcacatcgctgaggaggctgaccggaagtatgaggaggttgctcgtaagttggtcatcctggagggtgagctggagagagcagaggagcgggcggaggtgtctgaactaaagagtagcgacctggaagaggagctcaagaacgtaactaacaatctgaaatcactggaggctgcttctgaaaagtactctgaaaaggaggataaatatgaagaagaaatcaagcttctgtctgacaaactgaaagaggctgagacccgagctgagtttgcggaaaggacagtttctaaactggagaagacaatcgatgacctggaagaaaaacttgcccaggccaaagaagagaacgtgggcttgcatcagacactggaccagacactaaacgaacttaactgtatataaaccaaaccagaagagtcctgtcttgataccaactccactccagagagtgcaccctgtcttcctctcttataagaagttccgcttactaccatgtctccaccttgctggaaaggccaagcagaaaaat

SEQ ID NO: 3760 - DNA, 1194 bp, Rattus norvegicus
tgccggcgatccgggcttaaagagcgagaggaagggacgctcacctttgagctcctccacaaatagccctggtggctgccacagaagttcgaagttgagagttcggtacccacatcaggcaacagtgccactgttatcttcagggctgattccttttggtctctgccctccgagccaagatggtgagttcgacaacttccgaagtgcaacccaccatgggggtcaagatcttctcagccggcgtttctgcctgcctagcagacatcatcaccttcccgctggacaccgccaaagtccgccttcagatccaaggtgaaggccaggcttccagtactattaggtataaaggtgtcttagggaccatcaccaccctggccaagacagaaggattgccgaaactgtacagcggtctgcctgctggcatccagaggcaaatcagctttgcttccctcaggattggcctctacgatacggtccaagagtacttctcttcagggagagaaacgcctgcctctttgggaagcaagatctcggctggcttgatgacgggtggcgtggcggtattcattgggcagcccacagaggtggtgaaggtcagaatgcaagcacaaagccatctgcacgggatcaaaccccgctacactgggacctacaatgcttacagagttatagccaccacagaaagcttgtcaacactgtggaaagggacgactcctaatctaatgagaaatgtcatcatcaactgtacagagctggtgacatatgacctcatgaagggggcccttgtgaaccaccacatactggcagatgacgtcccctgccatttactgtcagctcttgtcgccgggttttgcaccacactcctggcctctccggtggatgtggtaaaaacgagattcatcaactctctaccaggacagtacccaagtgtacccagctgtgcaatgaccatgtacaccaaggaaggaccggcagcctttttcaaagggtttgcgccttcttttctgcgactcggatcctggaacgtcatcatgtttgtgtgctttgaacagctgaagaaagagctgatgaagtcccggcagacagtggactgcaccacataggcgacttggagaaagggatgctaaacaccattgggctcctatgctgggctcctatgctgggagaccacgaataaaaccaacaagaaatcag

SEQ ID NO: 3761 - DNA, 1687 bp, Rattus norvegicus
tcaatcctcactggccactatgctggacacaggactgcttctggtggtcatattggcctccctgagcgtcatgctcttggtgtccctctggcagcagaaaatcagggggagattgcctccaggacccactcctttgcctttcattggaaattatctgcagctgaatacaaaagacgtatacagttccatcacacagctcagtgagcgctatggtcctgtgttcaccatccaccttgggcctcgccgggttgtggtgctttatggatacgatgcagtcaaagaggctttggtggaccaagctgaggagttcagtggacgaggcgaacaggctacctacaatacactcttcaaaggctatggcgtggcattcagcagtggggagcgggcaaaacaactcaggcgcctctctatagccacattgagagattttggtgtgggcaagcgtggtgtagaggagcgtatcctggaggaggcaggctatttgatcaagatgttgcagggcacttgtggagcccccattgaccccaccatctacctgagcaaaacagtctccaatgttattagctccattgtcttcggggaacgcttcgactatgaggacacggagttcctgtcactgctgcagatgatgggtcaaatgaacagatttgcagcttcacccacagggcagctctatgacatgttccattcagtgatgaagtacctgcctggaccacagcaacagatcatcaaggttactcagaaactggaagacttcatgatagagaaagtgaggcagaaccatagtaccctggaccccaattccccaaggaacttcattgactcctttctcatccgcatgcaagaggagaaaaatggcaattcagagttccacatgaagaacctagtgatgacaacactaagcctcttctttgctgggtctgagacagtcagctccacactacgctacggcttccttctactcatgaagcatccagatgtggaggccaaggtccatgaggaaattgagcaggtgatcggcaggaaccgacagcctcagtatgaggaccacatgaagatgccctacacccaggctgtgatcaatgagatccaaagattttctaacttggctcccttgggcattcctcgaaggattatcaagaacacaaccttccgtggcttcttcctccccaaggccaccgatgtgttccctatattaggttctctgatgacagacccaaagttcttccctagccccaaagacttcgacccccagaacttcctggatgacaagggacagttgaagaaaaatgctgctttcctccctttctccactgggaagcgattctgcttgggagatggcctggctaagatggagctcttcctgctgctcaccactattttacagaacttccgtttcaagttcccaatgaaactagaagacatcaacgagtcccccaaacccttggggtttaccaggatcataccaaagtacaccatgagcttcatgcccatctgattctgagttgaatcaaggtggggcaagagggagagagagcctgaagtggggccagggtgcaggtggagagaacaggggaggtgaagatgagggttaagaagggaccacacccatggaagaaacacaaaagacttctcactttggtaaaattgtaacagtcctaataaaaagaaagaaatactcagtcgg

SEQ ID NO: 3762 - DNA, 2259 bp, Rattus norvegicus
ctggctactatgctggacacaggactgctcctggtggtcatactggcctccctaagtgtcatgttcttggtgtccctctggcagcagaaaatcagggagagattgcctccaggacccactcctttgcctttcattggaaattatctgcagctgaatatgaaagacgtatacagttccatcacacagctcagtgagcgctatggtcctgtgttcaccattcaccttgggcctcgacggattgttgtgctttatggatacgatgcagtcaaagaggctttggtggaccaagctgaggagttcagtggacgtggcgaactgcctacctttaatatactcttcaaaggctatggtttttcattgagcaatgtggaacaggccaagcgtatcaggcgcttcaccatagccacattgagagattttggtgtgggcaagcgtgatgtacaggagtgtatcctggaggaggcaggctatttgatcaagacgttgcagggcacttgtggagcccccattgacccttccatctacctgagcaaaacagtctccaatgtcattaactccattgtcttcgggaaccgcttcgactatgaggacaaagagttcttgtcactgttggagatgatcgatgaaatgaatatatttgcagcctcagccacagggcagctctatgacatgttccattcagtgatgaagtacctgcctggaccacagcaacagatcatcaaggttactcagaaactggaagacttcatgatagagaaagtgaggcagaaccatagtaccctggaccccaattccccaaggaacttcattgactcctttctcatccgcatgcaagaggagaaatatgttaattcagaattccacatgaacaacctagtgatgtcatcattaggcctcctctttgctgggactgggtcagtcagctccacgctataccatggtttcctgctactcatgaagcatccagatgtggaagccaaggtccatgaggaaattgagcgagtgatcggcaggaaccgacagcctcagtatgaggaccacatgaagatgccctacacccaggctgtgatcaatgagatccaaagattttctaacttggctcccttgggcattcctcgaaggattatcaagaacacaaccttccgtggcttcttcctccccaagggcaccgatgtattccctataataggttctctgatgacagaaccaaagttcttccctaaccacaaagacttcaacccccagcacttcctggatgacaagggacagttgaagaagaatgctgcatttctccctttttccattggaaagcgattctgcttgggagatagcctggctaaaatggagctcttcctgctgctcaccaccatcttgcagaacttccgttttaagttcccaatgaatctagaagacatcaacgagtaccccagtcccatagggtttaccaggatcataccaaattacaccatgagcttcatgcccatctgattctgagttgaatcaaggtggggcaagagggagggagagcctgaagtggggccagggtgcaggtggagagaacagagaagatgaagatgagggttaagaagggaccacacccatggaagaaacacaaaagacttctcagtttggtaaaattgtaacagtcctaataaaaagaaagaaacacccagtaggcagcagtaacaacaactgagactcatggggcaaaggtggctcacctctgcagaagctgtcctgcccttctctcactcagtcctctacacaagagcagcatgtccccaagcccaacgtacaggttcaaaagatagaacttaaaaaatttgaacctaaactgaggtggaaaagacacagttagctaggattgacacattggactctatcaccagcattcaggagggagggaacatggctccctaggaggcctgccagaattacaaagtgaaactcatctcaaaaaaggaacaacagaaaataaaatttcaaattgatttctcttagaccataagagtccagatctgtatccaaagctatttggttatattttttgttattgttgttttgtttacacattgtgtttttctttcggtttgtaagtctgtttgggatatttaatttacatttactgattagtgtgggtggtagggcataccatggctcaaatgtggaaaccaaagaaaagcttttggaagtgtcatctcccttacaatacgtgtgtccaagaactcaaattcagacaataaagcttgatagcaagca

SEQ ID NO: 3763 - DNA, 3404 bp, Rattus norvegicus
gaattcccgcaggagtcagtcgaagaagaaagaagcagagttccttgggctccggtctacccatgagtaagagcaaatgctccgtgggaccaatgtcttcagtggtggccccggctaaagagtccaatgctgtgggccccagagaggtggagctcatcctggtcaaggagcagaacggagtgcagctgaccaactccaccctcatcaacccgccacagacaccagtggaggctcaagagcgggagacctggagcaagaaaattgatttcctgctatcagtcatcggctttgctgtggacctggccaatgtctggaggtttccctacctgtgctacaaaaatggtggaggtgccttcctggtgccctacctgctcttcatggttattgctgggatgcccctcttctacatggagctggctctcggacagttcaacagagaaggagctgctggtgtctggaagatctgtcctgtcctgaaaggtgtgggcttcactgttatcctcatctctttctacgtgggcttcttctacaatgtcatcatcgcatgggcactgcactacttcttctcctccttcaccatggacctcccatggatccactgcaacaacacctggaatagccccaactgctccgatgcccatgccagcaactctagcgacggcctgggcctcaatgacacctttgggaccacacccgctgctgagtactttgagcgtggcgtgctgcaccttcaccagagccgtggcattgatgacctgggccctccacggtggcagctcacagcctgcctggtgctggtcattgttctgctctacttcagcctatggaagggagtaaagacctcagggaaggtggtgtggatcacagctaccatgccctatgtggtcctcacagccctgctcctgcgtggagttacccttcctggagccatggatggcatcagagcatacctcagtgtggacttctaccgactctgtgaggcatctgtgtggatcgatgctgccacccaggtgtgcttctccctcggcgttgggtttggagtgctgattgccttctccagttacaataaattcaccaataactgctatagagacgcaatcatcaccacctccattaactccctgacaagcttctcctctggcttcgtcgtcttctccttcctggggtatatggcacagaagcacaatgtgcccatcagagatgtggccacagatggacctgggctcatcttcatcatctatcctgaggcgatcgccacactcccgctgtcttctgcctgggctgctgtcttcttcctcatgctgctcactctgggtatcgacagtgcaatggggggcatggagtcagtgatcactgggctcgtcgatgagttccagctgctacatcggcatcgagagctcttcactcttggcattgtcctggctactttcctgctgtctctcttctgcgtcaccaacggtggcatctacgtcttcacactgctggaccactttgcagctggcacatctatcctctttggcgtgctcattgaagccattggggtggcctggttctacggcgtccagcaattcagtgatgacatcaagcaaatgacagggcagcgacccaacctgtactggcggctatgctggaagctggtcagcccctgcttcctcctgtatgtggtcgtggtcagcattgtgaccttcagacccccacactatggggcctacatcttcccagactgggccaatgccctgggctggatcatcgccacatcctccatggccatggtgcccatttatgcgacctacaagttctgcagcctgccggggtccttccgggagaaactggcctatgccatcacacctgagaaagaccatcagctagtggacagaggggaggtgcgccaattcacgctgcgtcactggctgttgctgtaaagtggaaggagacagctgccagctgggccacctcacaacagcggggacagggagatcgcaaaggaaacccacgagtcaagaaaggaaggagggccacttccatgcttctcctttgtcgtacggaaaaataatcgaagcatgggcttcaacctttgactgttcacacccaaatcattgccacaaagaagcctctgtctgtgtatggctgtaaaaacatacacctctacacagtgaggtcaacaatgtccctgtccctactgggtgggaaaaccctagctggtatcctgtccctgcaaggctgactcccccatctgtggtcactctgggagaacaggtcatactgccccctgaattctagaaggaccttggtacctgtacatacactgtgccagaatccttgtgctcacagtagttgcctaaaccaattctgttgcttacatttacagtgtcaagtatcctattttgctgttggtagaaaagacagttaatacatgccaagtcctttcctggtgcttggctccgagcagacaccttagcattctgttcacacattacacacacacacacacacacacacacacacacacacacacacacacacacggtctgttctgagccacggaggacaagggacttggtgcaagtgaccagagattatgtttttcctttatagatgagataaataaaattcgtgaaataaggttgggagacacaccctacccctggcccctggaaggcctggtcagcttgcagccactttagtatggacttgtaggccacataaaaagtgtactcttcatagtcagtgtgtcctcaccttctggacacctgctctgcacagggtctcgagataacttgaagaccatattcttggcctagagccctacctggtcttcaaggaaagacacccactgtagggtttgatttcctactggctcctgtcacatcaatggacattatccatgttataaatgactttttaaaaccatatttatgtgtgaatcgaacttactctcaaaatgcaaggttagtttgttcaaatccatttgctgaagagtaattagtgtaagaggaaggtatgccaagaatcaccttcttcccggagcactggctttagttcctggagtgaaaagtggatgtcatgattttccttgagctaataaatgcaaactttggcctggcctgtgtcctatataagtggcaccatgtgtctccctgagagagagtcaaccttagtattctctgcaagtatacattggcacgagggtgttaaatgtgctaccagggtgttaaatgcaggcctgttggctttgagactgtagtatggcagagaaggctccggtttaccatctctcagaggagtggctccatgtagacatccaggtgttgtaagcatctgttttttgtgtctatagccagtaccttgtgtgggttcttacaaacaataaaagaaatatatgttggaaaaaaaaaaaggaattc

SEQ ID NO: 3764 - DNA, 1473 bp, Rattus norvegicus
atggatccatttgtggtcttggtgctcagtctgtcctttctgcttctcctgtatctatggagaccaagccctgggagagggaagcttcctcctggccctactcctctcccaatttttggaaattttcttcagatagatatgaaggacatccgtcaatcaatatccaatttttctaaaacctatggccctgtgttcactttgtatttcggctcacagcctactgtggtattgcatggctatgaggcagtgaaagaagccctcattgattatggggaagagttctctggaaggggaagaatgccagtttttgaaaaggctactaaaggactgggcattagttttagccgtggaaatgtatggagagccacaagacatttcacagtcaataccctgaggagtttgggcatggggaaacggaccattgagatcaaagtgcaagaggaagcagagtggctagtgatggaactgaagaaaaccaaaggctcaccctgtgatcccaaattcatcataggatgtgctccctgcaatgtcatctgctccattatcttccagaatcgtttcgattataaagataaggattttcttagcttgatagaaaacgtgaatgagtacattaaaattgtgagcactcctgcatttcaggttttcaacgcattccctattcttctggattattgtccaggaaatcataagacacattcaaaacattttgctgctattaagagttaccttttgaagaaaataaaagaacatgaagaatcgttggatgtttcaaatcctcgggacttcattgattacttcctaattcaaagatgtcaggaaaatggcaatcagcagatgaactatacacaagaacatctggcaatcctggtgactaatttgtttattggtggaacagagacatcaagcttaacgctgagatttgcacttttgctcttgatgaagtacccacacatcacagataaagtccaggaagagattggccaagtgattgggagacaccgcagcccctgtatgttggacaggatccacatgccctacacaaatgccatgattcatgaggttcagagatatattgaccttgccccaaacggtttgttgcatgaagtgacctgtgacactaaattcagagactacttcatacccaagggaacagcagtactaacatcacttacatcagtgctgcatgacagtaaggaattccccaacccagagatgtttgacccaggtcactttctagatgagaatggaaactttaagaaaagtgactacttcatgcctttctcagcaggaaaacggaaatgtgtgggagagggccttgccagtatggagctgtttttgttcctgaccaccattttacagaatttcaaactgaaatctctgtctgatccaaaggacatcgatataaactcaatacgttctgagttttcatcaattcctccaactttccagctgtgcttcattcctgtctaa

SEQ ID NO: 3765 - DNA, 3066 bp, Rattus norvegicus
tcctgagcgccccgccatggccgtcacccccagcctgctgcgcctggcgctcctgctgctcggggcggtgggcagggccggcccccgcccccagggtgccacggtgtccctctcagagacagtgcagaaatggagagagtatcggcaccagtgccaacgtttcctcacggaagcgccactcctggccacaggtctcttctgcaaccgaacctttgatgactacgcctgctggccagatgggcccccaggttcctttgtgaatgtcagttgcccctggtacctgccgtgggccagtagtgtgctccaagggcatgtgtaccggttctgcacggccgagggtatctggctgcataaggacaactccagcctgccctggagggacctgtcggagtgcgaagagtccaagcaaggagagagaaactcccctgaggaacagctcctgtcgctgtacattatctacacggtggggtacgcactttctttctctgccttggtcatcgcttcagccatccttgtcagcttcagacacttgcactgcaccaggaactacatccacctgaacctgtttgcgtccttcatcctccgagcactgtccgtcttcatcaaagacgctgccctcaagtggatgtatagcacggctgcgcaacagcaccagtgggatgggctcctctcgtatcaggactctctgggctgccgactggtgttcctgctcatgcaatactgcgtggcggccaactactactggttgctggtggaaggcgtgtatctgtacacactgctggccttctcggtgttctcggagcagcgcatcttcaagctgtacctgagcataggctggggagttccgctgctgttcgttatcccctggggcattgtcaagtatctctacgaggacgagggttgctggaccaggaactccaacatgaactattggctcatcatacgcttgcccattctctttgcaatcggggtcaacttccttgtcttcatccgggtcatctgcatcgtgatagccaagctgaaggctaatctcatgtgtaagaccgacatcaaatgcagactcgcgaagtccactctgacgctcatcccgcttctgggcacgcatgaagtcatctttgcctttgtgatggacgagcacgcccgaggaaccctacgcttcgtcaagctgttcacagagctctccttcacttccttccagggctttatggtggctgtcttgtactgctttgtcaacaatgaggtccagatggagtttcggaagagctgggagcgctggaggctggagcgcttgaacatccagagggacagcagcatgaaacccctcaagtgtcccaccagcagcgtcagcagtggggccacggtgggcagcagcgtgtatgcagccacctgccaaaattcctgcagctgagccccagtgctgcgcttcctgatggtccttgctgctggctgggtggccatcccaggtgggagagaccctggggacagggaatatgagggatacaggcacatgtgtgtgcgtgcccgcacaccacacacacacacacacacacacacacacacacacacacacacacacacacgctttcctcctcaaacctatcaaacaggcatcggcatcggcagtgcctcctgggaccacagacacatgttctccaaggagaacagcctgctaatttaatctcaggcgacaggaagagaggaagaaacaattgctgttaagacgaggaggacttcttcctgttaaagctgcaaggcccttggggttccctcggacagaactgcaaatcaaccccggaactctcgctcaagggcaattgctgacgggtggaacttgggcttgcgagaggaggcaggtccatgagagacctgcccttggaacctcagccagcacagcgctcatcaaggtgagctggctgtgctgtgtgcacggctggggttgtcacctacatcagccttcctctcggacaagaggcttttctctgtgcatctggagtgccgccattcctccatctgcccgttcatccgccatcctgtctttgccttggggagggggaggtttgttgaagtcatgccgtgcagctctttctggaaatatctgtggatggtgttgaagataagcatgggggagatacaacagaggcagtctttgcccatggccacttcttgcctggtcctttaagccactttgctgcttggtttctgccctgcatgggtactactagggcaggtcccaagttgagaagcccagaggtgaggtgtgaaccctcagttctgttgtaaagatgctcaaataccctctaaggttcatctaaaggagtaacctgcctaggggtgctgttgacctgaaatcaagaggaccaaaggatccattgccaacaccccccatcccccacacacacctcatctgtgaccagagtctatgctttgaatcagaatgggctatatcctctgacctcagaggctatgacccagaagagattcttccctgaatcctcccactttgcacacatatagactttatccttcttcactctgtgtctattcaaacgtataattctggtttctctcaccccacggaagaactagatcacagcaactgttatgtttgagggagtgggggagaaggtgattgatttgaccccctctcccccaccggtgttgataagtagcgtctgtcccacctccagactccacccacacataatgagcagcacatagaccaggatggggggggtggtatatcatgcttgccctcctccaaccactatgagaaggctagcagaagacaccactgcacagacccaagtccaaggactgcctcccagggaattaggcagtgacttcctagaggccaagaaagactccaagagctggagaagaatcctagtcgatctggatctcttttgaggttggggttggggtggctttcaatggattctctcatgaggcttatctctccctcatcccgtggagagtgggggaccctccctagtgctcacactagacactgtgccccttggagaggcataaggcatgtatgggagataataatgggctataaaacat

SEQ ID NO: 3766 - DNA, 3653 bp, Rattus norvegicus
cgccgatctgccgctggaggaccactgctcaccagggctactgaggagccactggccccacacctgcttttccgcatcccccaccgtcagcatgatcgccgcgcaactactggcctattacttcaccgagctgaaggatgaccaagtcaaaaagattgacaagtatctgtacgccatgcggctctctgatgagattctgatagatatcctgacacgattcaagaaagagatgaagaatggcctctcccgggattataatccaacagcctccgtcaagatgctgcccaccttcgtccggtccattccggacggctcagaaaagggggatttcattgccctggatctcggcgggtcttcctttcgaatcctgcgggtgcaggtgaaccacgagaagaaccagaacgtcagcatggagtctgagatctacgacaccccagagaacatcgtgcatggcagtggaacccagcttttcgatcatgtcgctgactgcctgggagacttcatggagaaaaagaagatcaaggacaagaagttacccgtgggattcacattttccttcccctgccgacaatccaagatagatgaggctgtactgatcacgtggacaaagcggttcaaagccagtggcgtggaaggagcggatgtggtcaagttgctgaataaagccattaagaagcgaggggactatgatgctaacattgtcgccgtggtgaatgacacagtagggaccatgatgacctgcggttatgatgaccaacagtgtgaagtcggcctgatcattggcacaggcaccaatgcttgctacatggaggaactgcgacacatcgacctggtggaaggcgacgaggggaggatgtgtattaacacggaatggggagcctttggggatgatgggtccctggaagacatccgaaccgagtttgacagagagttagaccgtggatctctcaaccctgggaagcagctgttcgagaagatggtgagcggcatgtacatgggggagctggtccggctaatcctggtgaagatggccaaggaaggcctcttattcgaagggcgcatcactccagagctgctcacgaggggaaagttcaacactagtgacgtgtccgccattgaaaaggataaggaaggcattcaaaatgccaaggaaatcttaacccgcttgggagtggagccgtctgatgttgactgtgtgtcggtccagcacatctgcacgatcgtctccttccgatcagccaacctggtggccgccacgctcggtgccatcttgaaccgcctgcgggacaacaagggcacaccacgcctgcggaccacggttggcgtggacggttctctctacaagatgcacccacagtactcccggcggttccacaagaccctgaggcgcctggtgcctgactccgacgtccgtttcctcctctcagagagtggcacgggcaagggggccgccatggtgacggcagtagcctaccgcctggctgagcagcaccggcagattgaggaaaccctggcccacttccgcctcagcaagcagacgctgatggaggtgaagaagaggctacggacagagatggaaatggggctgaggaaggagaccaacagcaaagctactgtcaaaatgctgccttcttttgtccggagcatcccggatgggactgaacacggtgacttcctggccttggatcttggaggaacgaatttccgggttctgctggtaaagatccgcagtgggaaaaagagaacagtggaaatgcacaacaagatctactccattcccctggaaatcatgcagggcaccggggatgagctgtttgaccacatcgtctcctgcatctctgacttcctggactacatggggatcaaaggcccccggatgcctctgggcttcaccttctcatttccctgccatcagacgaacctggactgtggaatcttgatctcatggacaaagggtttcaaagccactgactgtgagggccatgatgtagcctccttactgagggatgcggtgaagaggagagaggaatttgacttggatgtggtggctgtggtcaacgacaccgtgggcaccatgatgacctgtgcgtatgaagaacccacttgcgaaattggactcatcgtggggacgggcaccaatgcctgctacatggaggagatgaagaatgtggagatggtggaggggaaccagggccagatgtgcatcaacatggagtggggcgccttcggtgacaatgggtgtctggatgacatcagaacagactttgacaaagtggtggacgaatattctctaaactctgggaaacaaaggtttgagaaaatgatcagtgggatgtacctgggtgagatcgtccgtaacatcctgattgacttcaccaagaaaggcttcctcttccggggacagatctccgaaccactcaagacccgaggcatctttgagaccaagtttctctctcagattgagagtgaccggttagcgctgctccaggtgcgggccatccttcagcagctgggtttgaacagcacgtgtgacgacagtatcctggtcaagaccgtgtgtggggtggtgtccaagagggcggctcagctgtgtggtgccggcatggccgccgtggtggaaaagatcagagagaacagaggcctagaccatctgaatgtaactgtgggagtggatgggacgctctacaaacttcatccacacttctccagaatcatgcaccaaactgtgaaggaactgtcaccaaagtgtaccgtgtccttcctcctgtctgaagacggcagcggcaagggggccgcccttatcacagctgtgggcgtgcggctcagaggagacccttcgatcgcctaaaagccaggatcctcccagcccccagcccgccacccttccagcactcctctctagaaccgacgaccacacccccgtgttccacccagcaagccctgggagacccagccagcgcccactccgccgcagcagagggaggaaggggaccgcagtaacggagcaccacgtagaataccacccagagcgcgtgtgctgttgatctgatctctcgcctggacccctaatccctgccctgccactctgcatgattcaagttcgacctggccatgcattgcccatgagtgaacgtagcggcaccccggtgcgtctactgcagatgtccagctaggaaagagtcccctctcttggacagtcttctgggcccttccaagcccatccgtggagtcggcctctcctcccctctcccccgtgtgaagtgtgttatcaccagcagacactgccggactcctgcccacaggggcgtggcctgaaggcggagtgtggacatggcactgctgttccgttcccttcccctcccagcacccgccgcagcctgccatcccgtctggatgtatcgatgccacagaattgtgaattgtgtgtccgtccgtggagccagtcctagccacattattgacagtcttgcattttgttttgtctcctggtggtgggggtggaggtggtaggggtgcgctaaggtgggcagtcctgtgggagaacatcttgctagaaggaaccaacccacgaaacaacaccatcactggaatttccatcgcccgaattctttagtgagccattgttgtacgtctagtaaactttgtactgattc

SEQ ID NO: 3767 - DNA, 2787 bp, Rattus norvegicus
ctccgcattggatttgggggtcgctattgctcggctgttattattatcgttattttatttttattttttaaacctaagggagaaagacacatacacacaaaactgtgggatttatttaacatgatcttggcaaacgccttctgcctcttcttctttttagacgaaaccctccgctctttggccagcccttcctccctgcagggctctgagctccacggctggcgcccccaagtggactgtgtccgggccaatgagctgtgtgcggctgaatccaactgcagctccaggtaccgcacccttcggcagtgcctggcaggccgggatcgcaataccatgctggccaataaggagtgccaggcagccctggaggtcttgcaggaaagcccactgtatgactgccgctgcaagcggggcatgaagaaggagctgcagtgtctgcagatctactggagcatccatctggggctgacagagggtgaggagttctatgaagcttccccctatgagcctgtgacctcgcgcctctcggacatcttcaggctcgcttcaatcttctcagggacagggacagacccggcggtcagtaccaaaagcaaccactgcctggatgccgccaaggcctgcaacctgaatgacaactgcaagaagcttcgctcctcttatatctccatctgcaaccgtgagatctctcccaccgaacgctgcaaccgccgcaagtgccacaaggctctgcgccagttctttgaccgtgtgcccagcgagtatacctaccgcatgctcttctgctcctgtcaggaccaggcatgtgctgagcgtcgccggcaaaccatcctgcccagttgctcctatgaggacaaggagaagcccaactgcctggacctgcgcagcctgtgtcgtacagaccacctgtgccggtcccgactggcagatttccacgccaactgtcgagcctcctaccggacaatcaccagctgtcctgcggacaactaccaggcatgtctgggctcctatgctggcatgattgggtttgatatgacacccaactatgtggactccaaccccacgggcatcgtggtgtctccctggtgcaattgtcgtggcagtgggaacatggaagaagagtgtgagaagttcctcagggacttcacggaaaacccatgcctccggaatgccattcaggcctttggtaatggcacagatgtgaacatgtctcccaaaggcccctcactcccagctacccaggcccctcgggtggagaagactccttcactgccagatgacctcagtgacagcaccagcctggggaccagtgtcatcaccacctgcacatctatccaggagcaagggctgaaggccaacaactccaaagagttaagcatgtgcttcacagagctcacgacaaacatcagtccagggagtaaaaaggtgatcaaacttaactcaggctccagcagagccagactgtcggctgccttgactgccctcccactcctgatgctgaccttggccttgtaggcctttggaacccagcacaaaagttcttcaagcaacccagatatgaactcccgcctgacaaaatggaaacacacgcatacacacatgcacacacacacacacacacacacacacacacacacacacacacacacacacacaccccttgcaaaaacactttttttcctacattgtctctgaacctttctcctcccaagtttcttctctggagaagtttttctaaaccaaacagacaagcaggcgggcagtcagaagcctgcccagaggtcccctgcaagggacacccagcaccaacgagggctcaaggctcttgagagactcttttctcttcactggtgttttctctctggacaagatgagaccctgatgtggaaggtactttgctgtgcctggtgtggactggggaaaggacagttgcagctgcctactctggggacctgcccaagggttcacagagagtctcagtcagcaaggaagcagggctggccacaaggactttgtcacctcttcctcttggcttcagagatggaaatggtttgctgccatccccagccattatgtggcctagtgggtttaagtctggagtaggaagcctcatggcagcttcaggccatggtgcctgtagtatagctggggttgggagctgttacaggaggaagcttctttggggcatgagcaagccttggttgggcaccagctccaagatgtaccttcctcctttatgccaggaatcttgaagtcaaagagaaatgatcctctgttggctcttttttgtttgtttttgaatttttttgtgggtccatttggcaggtctctcttggggagaagggctgttgagtggggctggggagaccctagctgggcgtgtgtatggagcactctggtgggttcccaagcttgccccttctctcttcttgtttctgctttctctctcatttctgagacattcatgcactgtctgtacatactgggtctcctttctcaacatatgtgtatatccatatccatatatcctatgattttactctttctttcattttttttaaagaaacaaaactatggaaataataccctacagatgagcgaaaatgtattattgtaaagtttattttttttaataatgttgtctatgatgggaagaaaggtaccaggacccctgagccctggtccagttgggctggtggggctgtggccggggactcccgattgcattcactcttaaccaagctccaataaacgtactaggaagcgagtcgccctgtgcttcaaaaa

SEQ ID NO: 3768 - DNA, 1724 bp, Rattus norvegicus
ggcagctggccatctgcctacacctggctgccatgtgggaacttgtgggtctcttgctgctcatcctagcctatttcttttgggtcaagtcaaagacgcccggtgccaagctccccaggagccttccatccctgcccctggtgggcagtctgccgtttctccccagacgtggtcatatgcatgtcaacttcttcaagctacaggaaaagtatggtcccatctattctcttcgcctgggtaccacaactacagtgatcatcggccactatcagctggccagggaggtgctcatcaagaagggaaaagaattctctggtcggccccagatggtgactcaaagcctcttgtcggaccaagggaaaggcgtggcctttgcagatgctggtagctcctggcacctgcaccggaagttggtgttcagcaccttttccctgttcaaggatggccagaaactggagaagctaatctgtcaggaagccaagtcactgtgtgatatgatgctggcacacgacaaggagtccatagacctgtccacgcctatcttcatgtcagtaaccaacatcatctgtgctatctgcttcaacatctcttatgagaaaaatgatccaaaactgaccgccataaagacctttactgagggtatcgtggatgccacgggcgacagaaatctggtggacatattcccatggttgacgatttttcccaacaaaggcttggaggtgataaagggttatgccaaagttcgaaatgaagtactgactggaatatttgaaaagtgcagggagaagttcgacagtcagtctatctccagcctgacggacattctgattcaagccaagatgaattcagacaacaacaacagctgtgaaggccgggacccagatgtgttttcagataggcacatccttgccacggtgggagacatctttggggcgggcatagagacaactaccactgtgctcaagtggatcctggctttcctggtgcacaatcctgaggtgaagaagaagatccaaaaggagattgaccagtacgtaggcttcagccgaacaccaactttcaatgaccggtctcacctcctcatgctggaggccactatccgagaagtgctgcgtatcaggccggtggctcccatgctcatcccccacaaggctaacgttgactccagcattggagagtttactgtccccaaggacacacatgtggtcgtcaatctctgggcactgcatcacgatgagaatgaatgggaccagccagatcagttcatgcctgaacgcttcttagatccaacgggaagccatctcattacacccacgcagagttacttgcccttcggagctggtccccgatcctgcatcggagaggctctggcccgtcaggagctctttgtcttcacggccttgctactgcagaggtttgacttggatgtgtcagatgataaacaactgccccgcctggagggtgatcccaaggtagtctttctgatcgaccctttcaaagtaaagatcacggtgcgccaggcatggatggatgcacaggctgaggttagcacctagaggccacaactaacatccccgatccatacctcaacacccacagtacaatcttagaggtgctagtcccagtgcctcctacggtcctccttcctcctaccccattttctagttggcagcaatggggggtgatacacataaattaaagttttttcaaaaaaaaaaaaaccg

SEQ ID NO: 3769 - DNA, 1413 bp, Rattus norvegicus
atcacatgctgtcagggggaatgcgggctacagcttcctcgcaggcaggagtctcaggttctcctcattcctgcacccagtaacagccccagtgtgaccagctctgtggtggggacacctggactccttcttacagttctggtgctaagggaccacttccaaagctggggaaccccagggaggggtcagtggccagatacccatgttgagcatccaccccctgaaacctgaggccctgcatctgcctcttgggacctcagagttcctaggctgccagcggcgccacacactccctgccagtgagttccgctgcctcacgccggaggatgccaccagtgcgtttgagattgagcgcgaagcctttatctcagtctcgggtacctgccccctccacttggatgagatccggcacttcctcaccctgtgtccagagctgtcactgggctggttcgaggaggggtgtcttgtggccttcatcatcggttcactttgggacaaggagagacttactcaggagtcgctgacactacacaggcctggaggccgcacggcccacctgcacgtactggccgtgcaccgaaccttccggcagcagggcaagggctccgtcctgctgtggcgataccttcaccacctggggagtcagccggcggtgcgccgggctgtgctcatgtgcgagaacgccctggtgcccttctatgagaaatttggtttccaggccatgggcccgtgcgccatcaccatgggatctctcaccttcactgagctgcaatgttccttacggtgccacaccttcctgaggaggaacagtggctgctgacccaagctgcgcacttggccatggcgagggtgggagtgacaagcttgggggctcctgtccacttcccaggtcacatccttctctgcccaactagagctggctagcatgaagggagacagcagttcccaagtggagtagagaggtaagggtcaataaagaggacaggagatggcttcccttcagcacaggctgctgtctgtccccagtggaccgcttgccttctgaacagtgcacaaaggcaagaccaggacgtggaaacgggagcagcgggaggtttgtccccacacttcctcctctccctgctctgtttctgggctccagtgcggtgccctggttcttgggagcctcactctaggccaggctgacatcccttcctggctcctaagtctgggaatgaggggcagccaggagccggggacttgtgaatggtggcatcattggggtacagacatgacacagggccacaccaaagtacactcaggcaccaatgtgctggctcacctgcctccctagttccccttctatcctggtccccctaccagccccagtactgacacaataaagcagctatgttcccaaaaaaaaaaaaaaaa

SEQ ID NO: 3770 - DNA, 4801 bp, Rattus norvegicus
caaaaggagaagccatcagggaaggaatcctatctgcatatttcgtctttagccccatccctcattcccggtggggtttggaactttccatcaattctttccctgtctcatttctctttgagcctttgcctagctgtgcctgtcacagcgagaaatcagtcaccctccgccttccagcactcttaggctctgagaaatttggcatacgggtgtcaggtattaaaacagctaaataaaagatgccctggggctgaaggccagcgtggctggaagttctgggggtcagaagcctgactccgcctgctccaagctctagcaatttaagtcacccgggggttttttgttttggtttggtttggtttttcttgaccttagaaccaccgagaccatgctgttctcgctcaccttcctgtcggtgtttttaaagattactgtactcagtgtcacagcacagcagaccaggaactgtcagtcaggtcctctcgagagaagcgggactaccacgtatgccgccgccggtcctcccaggttcctgattttcttacaaggaaacagcatctttcggattaacacagatggaacaaatcaccagcaattggtggtggatgccggcgtctcagtggtcatggattttcattacaaggaagagagactctattgggtggatttagaaagacaacttttgcaaagagttttctttaatgggtcaggacaagagacagtgtgcaaggtggataagaatgtgtctgggctggccataaactggatagatggggagattctccggacggaccgatggaagggagtcatcacagtaacagatatgaacgggaacaattcccgtgttcttctgagttccttaaaacgtcctgcaaatatattagtggatccaacagagaggttgatattttggtcttcagtggtgactggcaaccttcacagagcagatctcgggggtatggatgtaaaaacactgctggaggcaccagagaggatatcagtgctgattctggatatcctggacaaaaggctcttctgggctcaggacggtagagaaggaagccacggttacattcactcctgtgactataacggtggctccatccatcatatcagacatcaagcacggcacgatttgcttactatggccattttcggtgacaagatcttatactcagcactgaaagagaaggcgatttggatagccgacaaacacactgggaagaatgtggttcgagttaacctcgatccagcctctgtgccgccaagagaactgagagtcgtgcacctacatgcacagcccgggacagagaaccgtgctcaggcctctgactccgaacgatgcaaacagagaagaggacagtgtctctacagtctctctgagcgagaccccaactcagactcgtcggcatgcgctgaaggctatacgttaagccgagaccggaagtactgcgaagatgtcaatgagtgtgccttgcagaatcacggctgtactcttgggtgtgaaaacatccctggatcctattactgcacatgccctacaggctttgttctgcttcctgatgggaaacgatgtcacgaacttgttgcctgtccaggcaacagatcagagtgtagccatgattgcatcctgacatcagatggtcctctgtgcatctgtccagcaggttcagtgctcggaaaagatgggaagacatgcactggttgttccttctccgataatggtggatgcagccagatctgccttcctctcagcctagcatcctgggaatgtgattgctttcctgggtacgacctacaattggaccgaaagagctgtgcagcttccatgggaccgcagccatttttactgtttgcaaattcccaggacatacgacacatgcattttgatggaacagactacaaaactctgctcagccggcagatgggaatggtttttgccttggattatgaccccgtggaaagcaagatatattttgcacagacagccctgaagtggatagagagggctaatctggatggctcccagcgagaaagacggatcacggaaggagtagacacgccagaaggtcttgccgtggactggattggccggagaatctactggacggacagtgggaagtctgtcattgaagggagtgatttgagcgggaagcatcatcaaataatcatcaaagagagcatctcaaggccacgaggaatagctgtgcatccaaaggccaggagactattctggacggacacggggatgtctccgcggattgaaagctcttcccttcaaggttctgaccggacgctgatagccagctctaatctactggaacccagtggaatcgcgattgactacttaacagacactttgtactggtgtgacaccaagctgtctgtgattgaaatggccgatctagatggttccaaacgccgcagacttacccagaacgatgtaggtcacccattctctctagctgtgtttgaggatcacgtgtggttctcggattgggctatcccatcggtaataagggtgaacaagaggactggtcaaaacagggtacgtctccgaggcagcatgctgaagccctcgtcactggttgtggtccacccattggcaaaaccaggtgcagacccctgcttacacaggaatggaggctgtgaacacatctgccaagagagcctgggcacggctcagtgtctgtgtcgggaaggattcgtgaaggccccagatgggaaaatgtgtctcactcggaaggatgatcagatactggccggtgacaatgctgatcttagtaaagaggtggcatcgttggacaactcccctaaggcttatgtaccagacgatgataggacagagtcctccacactagtggctgagatcatggtgtcagggctgaactatgaagatgactgcggccctggtgggtgtggcagccatgcccactgtatttcagagggagaggcagctgtgtgtcagtgtttgaaaggatttgctggcgatggaaacctgtgttctgatatagacgaatgtgagctgggtagctcagactgtcctcccacctcgtccaggtgcatcaacaccgaaggtggctatgtctgccaatgctcagaaggctacgagggagatgggatctactgtctcgacgttgatgagtgccagcaggggtcgcacggctgcagcgagaatgccacctgcaccaacacggagggaggctacaactgcacctgtgcaggctgcccatcagcacctggactgccttgccctgactctacctcaccctctctccttggaaaagatggctgccactgggtccgaaacagtaacacaggatgcccgccgtcgtacgatgggtactgcctcaatggtggcgtgtgcatgtatgttgaatccgtggaccgctacgtgtgcaactgtgtcattggctatattggagaacgatgtcagcaccgagacttacgttggtggaagctgcgccatgctgactacgggcagaggcacgacatcactgtggtgtctgtctgtgtggtggcgctggccctgctgctcctcttagggatgtgggggacttactactacaggactcggaagcagctatcagagagctcaaagaagccttccgaagagtcaagcagcaacgtgagcagtaacgggcctgacagcagcggggctggggtgtcttctggtccccaaccttggtttgtggtcctagaggaacaccaacagcccaagaatgggcgtctgcctgccgctggcacgaacggcgcagtagtagaggctggcctgtcttcctccctgtaactcgggccagtgcacctgacttcctggagacagaagccccgaatatatgagatgggcacagagcaaagctgctggattccaccatcaaatgacaaaggaccccaggaaatggaggggaacccccacttaccctcctacagggaatggcctctagctgtgtgggctgagaagaagctgcattctctccagtcagctaatggatcgagtcaacaaagggcctcagacctgccccagcaaacagagccagttctgtagaaactgggagcagacagaaggtaccgaaagtgaaatagcaaaccaggctgaagggtggtagagcggcagatctggtactcctgtctccacggctaatcactgctcagggtcctgaagataactgcatagctgcatagctgatagccgcgacttctgcttcttgcttcaagcagtcccgttgaagacgatcaaaagagaagtggagaaaaatcatcagaaaccgaagtcaagacggttcacgtgtgtaagctgtgtccttcctacccctggactgttgggctcttttccttgttgtctcagaagaaatgggttaaagcaggcgatcacatgctttgttgattgcacagtagatgatatgatctacatagatcttagctcactctcacggaaaggctggaacattatagatgctgcaagatacactgcaagtgtggcccctgctcataattttgccttctgaattgtgattagtgaaaataattgtaacttagagtccgatttattcagaatcagagcattatttttatactatgaaaatctttgaatgaagatatttaactttaaaaacatttcctaagagacaacagtgtttcttaatcattgtcttttcttcttgcagtctttcccagtgaaaacggtaaattctgctgtttgcatagaatctttaacttatttttaagatatgagattgtaaacaaattgcttgatttatttcaatcaatttattctaattatttaaataaaatcacccctaag

SEQ ID NO: 3771 - DNA, 1432 bp, Rattus norvegicus
cctaggacccttcatgctctgagcatcagtaccttttcacatggactccacggtagtgctcattaccggttgctcttctggaattggcctgcacttggctgttcgtctggcttccgaccgttcccagagcttcaaagtttatgccacattgcgggatctgaagtcacagggaccattgttggaggcagccagggctcaaggatgccctcctggctccctggagatactggaattggatgtcagagactcggaatctgtggctgctgcccgggcatgcgtgacggagggtcgagtggatgtactggtctgtaatgctggacgcggcttgttcgggccgctggaagcgcatgagttgaacgctgtgggtgctgtactggatgtgaatgttcttgggaccatccggatgcttcaggcctttctgccagacatgaaaaggcgccactccgggcgtgtgctggtgactgcgagtgtgggaggtttgatggggctgccattccacgaagtgtactgtgccagcaagtttgcgctcgaaggtctgtgcgagagtctggcgatcctgctgccgctctttggagtccacgtgagcctcatcgagtgcggggcagtgcacacagccttccatgaaaagctggagggcggcccgggcggggctctggagcgagcagatgcccagacccgccacctctttgcccactatcagcgtggttatgagcaagccctgagcgaggcgcaggacccagaggaggtgacggagctcttcttgactgcgatgcgagccccgcagcctgcgctgcgctacttctccacaaaccgcttcctgccgctggcccgaatgcgcacagaggaccccagtggcagcagctacgtcgaagccatgcaccgcgaggccttctctgatctgcaggtccaggagggtgccaaggctggggcccaagtttcaggggatccagacacgccccccagagccctcatttgtctccccgagtgtgcaatccctagggtgacagctgaattgggatggtctgcatcagataaaccgggtcagaacaaatcatgttaccagcaaaagatctaagctagaatctctttttattattttagaatgtgttttgttttaagacaaggtttcactatgtagccctgtctgaactgtaactcataaagatccacctgcttctccttctgtgtgcaaccgcacacttctcagaatcatttgaaatagtgcaaacatcttcatgggtcaagataagagggctgtagtcggggttggggatttagctcagtggtagagcgcttgcctaggaagtgcaaggccctgggttcggtccccagctccagggggaaaaaaaacctaaaaaaaaaaagagggctgtagtcaaggttaagggtttttccttccaataaatgtacttattaattattaaaaaaaaaa

SEQ ID NO: 3772 - DNA, 2006 bp, Rattus norvegicus
gccggcgccgcagctgccgggcctctcgagtcggtggacgcgccctcccgccggcctcgccgcccgcgcaaccgccgtccttcggcctcggctgcgtcgcgccatggcggccccgggcgcccggcggccgctgctcctgttgctgctggcaggccttgcacacagcgccccagcactgttcgaggtgaaagacaacaacggcacagcgtgtataatggccagcttctctgcctcctttctgaccacctatgatgctggacatgtttctaaggtctcgaatatgaccctgccagcctctgcagaagtcctgaagaatagcagctcttgtggtgaaaagaatgcttctgagcccaccctcgcaatcacctttggagaaggatatttactgaaactcaccttcacaaaaaacacaacacgttacagtgtccagcacatgtatttcacatataacctgtcagacacacaattctttcccaatgccagctccaaagggcccgacactgtggattccacaactgacatcaaggcagacatcaacaaaacataccgatgtgtcagcgacatcagggtctacatgaagaatgtgaccattgtgctctgggacgctactatccaggcctacctgccgagtagcaacttcagcaaggaagagacacgctgcccacaggatcaaccttccccaactactgggccacccagcccctcaccaccacttgtgcccacaaaccccagtgtgtccaagtacaatgtgactggtgacaatggaacctgcctgctggcctctatggcactgcaactcaacatcacctacatgaagaaggacaacacgactgtgaccagagcattcaacatcaacccaagtgacaaatatagtgggacttgcggtgcccagttggtgaccctgaaggtggggaacaagagcagagtcctggagctgcagtttgggatgaatgccacttctagcctgtttttcctgcaaggagttcagttgaacatgactcttcctgatgccatagagcccacgttcagcacctccaactattccctgaaagctcttcaggccagtgtcggcaactcatacaagtgcaacagtgaggagcacatctttgtcagcaaggcgctcgccctcaatgtcttcagcgtgcaagtccaggctttcagggtagaaagtgacaggtttgggtctgtggaagagtgtgtacaggacggtaacaacatgctgatccccattgctgtgggcggggccctggcagggctggtcctcatcgtcctcatcgcctacctcatcggcaggaagaggagtcacgcgggctatcagaccatctagcctggtgggcaggtgcgccacagacgcacacgggcctgttctcacatccccaagcttagataggtgtggaagggagggaggcacacttgtggcaaactgttttcaaatctgctttatcaaatgtgaagctcatcttgcaacatttactatgcacaaaggaataactattgaaatgacggtgttaattttgctaactgggttaaatattttgctaactggttaaatgttaatatgttaccaaagtagagctctaaagaggacaagaaggctccacgcatttgacttttaagacttggtgtttggttcttcattcttttactcagatttacgccttacaaagggaatctctggtccagacacttgggcctggcaagggtggctgatggtggttaggctgcacacttgagaagcaaacaggagcagggacgtcctgccacacaggcacgcacagggtcagcctctggacacttggcttgggctgcctggcctggggggctagactctggcatctggctgggcacacccaccagtgtttctgtgctctgccgcctgtgagctaccactttcctaaatagaaaatggcattatggggttggggatttagctcagtggtagagcccttgcctaggaagcgcaaggccctgggttcggtccccagctccggaaaaaaaaaaaagac

SEQ ID NO: 3773 - DNA, 2432 bp, Rattus norvegicus
atcaaaggcagggcatacttcctgttgcccagaccttatataaaacgtcatgttcgcctgggcagcagagaagcacctagcactggcccagcggctgccgcctgaggtttccagaggaccacaatgaacaagtggctgtgctgtgcactcctggtgttcttggacatcattgaatggacaacccaggaaacctttcctccaaaatacttgcattatgacccagaaaccggacgtcagctcttgtgtgacaaatgtgctcctggcacctacctaaaacagcactgcacagtcaggaggaagacactgtgtgtcccttgccctgactactcttatacagacagctggcacacgagtgatgaatgcgtgtactgcagccccgtgtgcaaggaactgcagaccgtgaaacaggagtgcaaccgcacccacaaccgagtgtgcgaatgtgaggaagggcgctacctggagctcgaattctgcttgaagcaccggagctgtcccccaggcttgggtgtgctgcaggctgggaccccagagcgaaacacggtttgcaaaagatgtccggatgggttcttctcaggtgagacgtcatcgaaagcaccctgtaggaaacacaccaactgcagctcacttggcctcctgctaattcagaaaggaaatgcaacacatgacaatgtatgttccggaaacagagaagcaactcaaaattgtggaatagatgtcaccctgtgcgaagaggcattcttcaggtttgctgtgcctaccaagattataccgaattggctgagtgttctggtggacagtttgcctgggaccaaagtgaatgcagagagtgtagagaggataaaacggagacacagctcgcaagagcaaactttccagctacttaagctgtggaagcatcaaaacagagaccaggaaatggtgaagaagatcatccaagacattgacctctgtgaaagcagtgtgcaacggcatatcggccacgcgaacctcaccacagagcagctccgcatcttgatggagagcttgcctgggaagaagatcagcccagacgagattgagagaacgagaaagacctgcaaacccagcgagcagctcctgaagctactgagcttgtggaggatcaaaaatggagaccaagacaccttgaagggcctgatgtacgcactcaagcacttgaaagcataccactttcccaaaaccgtcacccacagtctgaggaagaccatcaggttcttgcacagcttcaccatgtaccgattgtatcagaaactctttctagaaatgatagggaatcaggttcaatcagtgaagataagctgcttatagttaggaatggtcactgggctgtttcttcaggatgggccaacactgatggagcagatggctgcttctccggctcttgaaatggcagttgattcctttctcatcagttggtgggaatgaagatcctccagcccaacacacacactggggagtctgagtcaggagagtgaggcaggctatttgataattgtgcaaagctgccaggtgtacacctagaaagtcaagcaccctgagaaagaggatatttttataacctcaaacataggccctttccttcctctccttatggatgagtactcagaaggcttctactatcttctgtgtcatccctagatgaaggcctcttttatttatttttttattctttttttcggagctggggaccgaacccagggccttgcgcttgcgaggcaagtgctctaccactgagctaaatctccaacccctgaaggcctctttctttctgcctctgatagtctatgacattcttttttctacaattcgtatcaggtgcacgagccttatcccatttgtaggtttctaggcaagttgaccgttagctatttttccctctgaagatttgattcgagttgcagacttggctagacaagcaggggtaggttatggtagtttatttaacagactgccaccaggagtccagtgtttcttgttcctctgtagttgtacctaagctgactccaagtacatttagtatgaaaaataatcaacaaattttattccttctatcaacattggctagctttgtttcagggcactaaaagaaactactatatggagaaagaattgatattgcccccaacgttcaacaacccaatagtttatccagctgtcatgcctggttcagtgtctactgactatgcgccctcttattactgcatgcagtaattcaactggaaatagtaataataataatagaaataaaatctagactccattggatctctctgaatatgggaatatctaacttaagaagctttgagatttcagttgtgttaaaggcttttattaaaaagctgatgctcttctgtaaaagttactaatatatctgtaagactattacagtattgctatttatatccatccag

SEQ ID NO: 3774 - DNA, 1729 bp, Rattus norvegicus
ggctcacaagcagctggccagttctggggaggcagctcagaggctctttctcaggcctctagctgggtctgtcctgtacttcaccagaggaaaaacgttcttgggagagcttgtcaggtgtggaacctcagccatggtggccttcttgttctgcaacctgctactggtggcctgtggctctgtcacctggaccatgtcagataccggagagtccggtgtcgacttagcagaccggcttgacctggttgagaagataggcgacacgcactccaaagacctggagatctggatggagctaggaaaacaacgggaggcggatgccagggagatgcacgcagtctgcagggtacagccctcagccatgctgcctcccgatcagccacagatcacaggcttggtcctcttccggcagctggggcccagctccagacttgaggcctccttcaatctggagggcttcccagccgagcagaacacctccaaccacgccatccacgtgcatgagttcggggacctgagccagggctgcgagtccaccggaccacactacaacccgctgggtgtgccgcacccacagcacccgggggacttcggcaacttcgtggtgcgcgatggccgcctttggaagcatcgaatgggcctggccacgtcactggccggaccgcactcgatcttgggccgcgctgtggtggtccacgctggcgaggacgacctgggtaaaggtggcaaccaggccagcgtgcagaacggcaacgcaggtcgccggctcgcctgctgcgtggtaggcaccagcaactcggaggcctgggagagccagacaaaggagcgcaagaagcggcggcgggagagcgagtgcaagaccacttaagcatcacccagggccgcctagcctagctgctgcgcgcatagatgcctccacacgcgccctctagacgcctccagtcatcctagaggtctctgggtgtcctagactgacgcttcccagacacctcaatcgcctctgtgcgccccacactcttccacataccccagacacctctgtatggctcagatgccttcaagaacctcctcggccacgtccacgagccccagatgttcccacgtgccctgggcactgttctcggagaccaggacacttttttgtaacctaggaatccttcacacctatgcactccacagaccaactccttcgtgctctaggtccacctcgaactactttatgccccaagacaatcccataagcccctagcatcccctttgaaacagtctttgagtttgctcccagagaattccccgcttacccccagaggtcgaatgtgcgcagataactctccttttactctgaggacatcccagtggaccttctagagaactcccttggggtgttctgaaatatcaccaccccacttccttctgcccccttttgttttctttctgtcccctagcacccgagacttctctcttccctagagacctcgtttgtcttccccttgttcctcctagggctctgggaccaccctgacacacacacacacacacacacacacacacacacacacacacacacacacacatccctaagattccatgttcctgatcacctcctgccgggcccctggttctgttttcatctgtttcccatatggtgcctgcaccccaaggagagcagctcctccgagagtatttgacaacctttatgctgctcattaaaaccacagcaattcaaaaa

SEQ ID NO: 3775 - DNA, 1309 bp, Rattus norvegicus
gaattccgttgctgtcgctagctctctctcttttttttttacagcttaatatttgtggtgcaatttgaagtgaactgaaccgggtgatttcacttctctcacaggagcatctggacagtacaccacttgtgatggagacttctatgcctgaatactatgacgtttttggtgatttccatggatttttaatggataaacggttcaccaaatattgggaagacgttgaaacattcttggcaaggccagatgaccttctcattgttacttatcctaaatctggcagcacatggattagtgaaattgtggatatgatctataaagaaggtgatgtggaaaaatgcaaggaggatgcactttttaacagaatacctgacctggagtgcagaaatgaagatctaataaacggaataaaacaactaaaagaaaaggaatcgcctagaatagtgaaaactcacctgccagctaagctccttccagcatcattttgggaaaagaattgcaagataatctatctttgccgaaatgccaaagatgtcgtcgtttcttattactactttttcctgatcatgaaaagttatccaaatcctaaatctttttctgaatttgtggagaaatttatggaagggcaagttccgtatggttcctggtatgatcatgtaaaatcttggtgggagaagagtaagaattcacgtgttttgtttatgttctatgaggacatgaaagaggatatccgaagagaagttgtgaagctgatagagttcctggagagagacccatcagcagagctagtagacagaatcattcaacatacatcattccaggagatgaagaacaatccatgcaccaattattcaatgctgccagagaccatgatagatctaaaagtatcgcctttcatgagaaagggaattgtaggagactggaagaaccacttccctgaagccctgagggagagatttgaggagcactaccagcagcaaatgaaggactgccctgtgaaatttagagcagagctctgagacaattccttgtgtctgaaattggagtagtctccaatttatccttcagtttttcttgttttgaattcagtagaagtagaagtcttttgaagactgagggtttaaattcattctggtttttttaatctaacttttatatcaatctagtttctgaatgttttgttggcaaaataacatttttcatatatacatatatatacatatatatatatatatatatatatatatatataacacaagcattgtcctctaatagtgttcaaagatttctaataaaaaaaccggaattc

SEQ ID NO: 3776 - DNA, 2260 bp, Rattus norvegicus
cggaggccggggccgcctcccgacgcccacctactagcttctccagctccatctttcccgagaagcggcagggacctcggcctccagcttaccgggcggatcgaagcagcggtcgggatggtactgctgggcttgctgcagtcaggcggctcggtgctcgggcaggcgatggagcaggtgacaggaggcaacctgctttccacgctgctcatcgcctgcgccttcacgcttagccttgtctacctgttccgcctcgcagtgggccacatggtccagctgcccgctggagcgaaaagtccgccatatatttactctccaattccgttccttggccacgcgatagcatttgggaaaagtccaattgagttcctggaaaatgcatatgagaagtacggacctgtgtttagctttaccatggtgggcaagactttcacttaccttttggggagtgacgcagccgccctgctcttcaacagtaagaacgaagacctgaatgcggaagaggtctacggtcggctgacaacgcccgtgtttgggaagggagttgcatacgacgtgccaaatgcagttttcctggaacagaagaaaatactaaaaagcggccttaacatagcccacttcaagcagtatgtttctatcattgaaaaagaagcgaaggagtactttaaaagttggggagaaagcggagaaagaaatgtgtttgaagcgctgtctgagctcataattttaacagctagccattgcttacatggaaaggaaattagaagtcagctcaacgagaaggtggctcagctgtacgcagacctggatggaggctttagccatgccgcctggctgttgccaggctggctgcccctgccgagtttcaggcgcagggacagagcccatcgagagatcaagaatattttctacaaggccatccagaaacgtaggctgtcaaaagaaccagccgaggacattcttcaaactttactggattctacatacaaggatgggcgtcctctgacggacgacgagatcgcagggatgctcatcggactgctgctggccggacagcacacatcctccaccaccagtgcctggatgggcttctttctggccagagataaaccacttcaagacaaatgctacttagaacagaaaacggtgtgcggggaggatctgcctcccttaacttatgagcagttgaaggatctgaatttacttgatagatgcataaaagaaacactaagactgaggcctcctataatgaccatgatgagaatggccaagacccctcagactgtggctgggtacaccattcctccaggacatcaggtgtgtgtttctccaactgtcaatcaaagactgaaagactcctgggtagaacgcttggacttcaatcctgaccgctacctacaggacaacccagcgtcgggagagaagtttgcctatgtgccgtttggagccgggcgccatcgttgtattggagaaaattttgcctatgttcaaattaagacaatttggtccactatgcttcgtttatatgaatttgacctcatcaatggatattttcccagtgtgaattatacaacaatgattcataccccagaaaacccagtaatccgttacaaacgaagatcaaaatgaagaaaggaacaaggagccagtgtggagacgggactgcaagctgcagcttggcagagaatgaagctttgacacagctttcatactgtactgttttttaagtgtgtggttctgaaagccagtttgattttaatgttttattaactcggtgatttttgtcagacctaatggcatttgaaacagttataatagttctgataggatttcagggaagccaagtttatgttagaaatcgtttaggggagcctcggtattcagagatgatacagaatatagcatccaggtaactaacttcagaagcacacgttgccgtagggagattccggcttggaactagtttgggaagttttaagcctggtcagatgctacagaggcaatgggtcattggtgtggttgggccacttctgtgcgtaaagatgtgagagggtgaaggataagttttctgcgaagctctagatggtgtgagtgccctttgtagtgttaactgagagcaccactccagcgagatggcagcaatcttggaccttatcttgataaccttatttcctaaaaataataaatactaaagagtacttatgttattggttccagaaaaatccaaaatcaaatccttgtggaatttttaattttaatt

SEQ ID NO: 3777 - DNA, 3545 bp, Rattus norvegicus
ggtctcccctttggaaattttcctgcttttgcaaaatgatgactatttctttgatttggggaattgccgtgttggtgagctgttgcatatggtttattgttggaataaggagaaggaaagctggtgaacctcctttggagaacgggttgattccgtacctgggctgtgctctgaaatttggatctaatcctcttgagttcctaagagctaatcaaaggaagcatggtcacgtttttacctgcaaactgatggggaaatatgtccatttcatcacaaactccctgtcataccacaaagtcttatgtcatggaaaatattttgactggaaaaaatttcattacactacttctgcgaaggcatttggacacagaagcattgacccaaatgatggaaataccacggaaaatataaacaacacttttaccaaaaccctccagggagatgctctgtgttcactttctgaagccatgatgcaaaacctccaatctgtcatgagacctcctggccttcctaaatcaaagagcaatgcctgggtcacggaagggatgtatgccttctgttaccgagtgatgtttgaagctggctatctaacactgtttggcagagatatttcaaagacagacacacaaaaagcacttattctaaacaaccttgacaacttcaaacaatttgaccaagtctttccggcactggtggcaggccttcctattcacttgttcaagaccgcacataaagctcgggaaaagctggctgagggattgaagcacaagaacctgtgtgtgagggaccaggtctctgaactgatccgtctacgtatgtttctcaatgacacgctctccacctttgacgacatggagaaggccaagacgcacctcgctattctctgggcatctcaagcaaacaccattcctgcaaccttttggagcttatttcaaatgatcaggagtcctgaagcaatgaaagcagcctctgaagaagtgagtggagctttacagagtgctggccaagagctcagctctggagggagtgccatttacttggatcaagtgcaactgaatgacctgccggtactagacagcatcatcaaggaggctctgaggctttccagtgcatccttgaatatccgcacagctaaggaggacttcactctccatcttgaggacggttcctataacatccgaaaagatgacatgatagctctttatccacagttaatgcacttggatcctgaaatctacccagaccctttgactttcaaatatgaccggtaccttgatgaaagcgggaaagcaaagaccaccttctacagtaatggaaacaagctgaagtgtttctacatgcccttcggatcaggcgcgacaatatgtcctggaagactctttgccgtccaagaaatcaagcagtttttgatcctgatgctctcctgctttgaactggagtttgtggagagccaagtcaagtgtccccctctagaccagtcccgggcaggcttgggaattttgccaccactacatgatattgagtttaaatataaactgaaacactgatacgtggttggaagaagcgaacactggatgatgtcacttggcggctgagagtcatcactaaacaggccttcgggaccaatgctcactgatgcgccctagcgactggattagtgggaagaactttgttctcgctgcccacattcctgggtgttcacatagctggggccagagcttcatcactttcagaaagcaatgtcttttgtatttattttcaaaatgaagatattccaattggcaggatatttttcctaaggaaattgctttatatttttatgaaaactaccaattaattatgaaagggcttgaaattcacgttttagtgaaattactgatttttcactagtaaggttcttcaggtgtgaaactgtattataaaaatgttgtaatgggtcacactgtgctttgcataaaggtaaaggaaactatgtttcagccttttctgtgtctatgagcttcgaaaataatcttactgttctagaaacactggggaggtttcgacatgctctcgctatattttattttactgttgctagaaattttcattccagttttcaactaccttatctttcccccattttgacatgcatgccaatgagaagagtattttttaggaattaacaaggcacctcccagaaccctaccctgagacttttaagcctttaatcccagcactcgagaagtagagccaggcagatctctgagtctgaggttattctggtctacatcagctccagacaagccaggactacagaatgggatcttgtctaaaaaatacagctaatctttatgtcataactgattatgaatcaacctaaaagataaattttcaatcaggactcagagaaaatgagcaattaaaaaacttagctctgaggtatgtggaattcattaagtacaagttgacattacatgttctttaaaaatagtttatgttttatctctaaatgccctgcagatgaagaataataatgaaaagttgaataatactgtttaaacactaagtgcaataatgctttggtaatgtactttaagagaatcattagccgtgccagttttactaaaatatatttatatgtaaattatatttatctttttcttataccataaatataaaaatattgcaacatttagtaattttaaaattatatacctttcagaaaatgatgtatgaatgtttgtatgttttttaactttgaacagaacatttaaattattcatctacggtgatttttatcttatttatttctttttgtctcattcatatcttgaagaaatccaaaaatatctgaaggaatcgctcactcaaatgtctccctatggttacagaaaaattcaataccatgtttttgtcctcggggactgaagcagggtgtcgtgggtgccgagcagaggctcctgctgcagcgagctttatccacgggactccttaaacttttaaaatcttatcactattatcatgcatttattacctaagtaggatatttccctttcctttttcatttcagccgagtcccttagcaacccaggctgactgggaccctccatgtagcttaagctgtgaactcactgtacttcctgttttcacttattttaggaagtaattttccctatcagaaattttaattgtttagatgatgtataagagtaacacaattctgttatatactaatctgtagtaaactaaatttgttcttagaacaagtttgatgactctcaaattgaatgtatccatacatctttccatggcttcttgaatgcccatttctcatacacagaatgatgggtttcacggtgatgtcttcctttcatgtctttattcttgtgcggtgatggttggcaaatgatacccatggagcaaggttactcttcctatttctgtgcagcctaagtgttaagaataatttttaaatacttggagggaaggcacattttgtgtcatatgtgaagtgacatgtgacacacagactagcaaatccttgagtaaaattttattgggat

SEQ ID NO: 3778 - DNA, 3418 bp, Rattus norvegicus
cccacgcgtccggtgagctgctcctaagaaagtaggcgaccgcgcgctcggccgcgcgggcagcctcgggacaatggggccccggcgcttgctgctcgtcgcggtcggcctcagcctgtgcggtcctttgctgtcttcccgcgttcctatgagacagccagaatctgagaggatgtatgctacgccgtatgctacgccaaacccccgctcattttttctcaggaatcccagtgaagatacatttgaacagttccccctaggggatgaggaggagaaaaatgaaagcataccgctcgagggcagggcagtctacttaaataaaagccgttttcctcccatgccgcctcctcccttcatctccgaggacgcctccggatatctgaccagcccctggctgacgctcttcataccctccgtgtacacgtttgtgttcatagtcagccttcccctgaacatcctggccatcgctgtgtttgtctttcggatgaaggtcaagaagccggccgtggtgtacatgctgcacctggccatggccgatgtcctcttcgtgtccgtgctccccttcaagatcagctactacttctccggcaccgattggcagttcgggtccggaatgtgtcgcttcgccaccgcagcgtgttattgtaacatgtacgcctccatcatgctcatgacagtcataagcattgaccggttcctggcagtggtgtaccccatccagtccctgtcctggcgcactctgggccgagccaacttcacctgcgtggtcatctgggtgatggccatcatgggggtggtgcccctcctcctcaaagagcagaccacccaggttccggggctcaacatcaccacctgccacgacgtcctcaacgagaccctgctgcatggcttttactcgtactatttctccgccttctccgccatcttctttcttgtgccgttgatcatttccacagtctgctacacgtccatcatccgatgcctcagctcctccgcggtggcgaaccggagcaagaagtcgcgggctttgttcctgtccgccgccgtgttctgcatcttcatcgtctgctttgggcccaccaacgtcctcctgattgtgcactacctgctcctctccgacagtcctggcacagagacggcctattttgcttacctcctctgcgtctgcgtgacgagcgtggctagctgcatcgaccccttgatttactactatgcctcctccgagtgccagaagcacctttacagcattttgtgctgcagagaaagctctgattccaacagttgcaacagcaccggccagctgatgcccagtaagatggatacctgctctagccacctgaataatagcatatacaaaaagctactagcttagggaaagggtggctggaaggttccatgaagaaaaggttggaaagtgaacagctggggaacccccatcagtccctggcaagaactgtattgacttcaacgccttaagaaaaccgccaacgtctgatttgcatgcatacttcttacaagtgctatcaagtgtatagattggataatcaccagcaaggtgatgggaacggagtcaaggtttccagtgttgcttagtgctgggatagtagttgagcgtcacctcttctatatctaggtgactttaacatacaggtggtgtgcacacacacagtggcagtgcagggtggattctgcgctttgacgctttcttgtttattccctggacagttgctatagaaataatctgattctctgacttaataaagtctgggttggtggatgctatgccctgggcagctgaagaccccagtgatagggaagaagcccatagtttagacttaagacagcttttgcctatgtgtctatatttatatattttcaaatatttgataggtaatgtttagtgatggaaggatgagacagtattacctgtgtaggggaaggtcttgaacaaccacagtttaagaattatcaaagcagttgaaaagccccgttttgatacgcaatttacttacaaaatacgtggaccaagactgagcataagactcgccaggaatgtaagaaacctttcaaagcagccaagcctgataactagacacagccatctgcatggaggcctctgagcatgaggtatatcataccccttcagctatgcctcccagagagcagagatgaggaccaccaggcccactccaccctgctaggggtctcatttgctgtgaactgattatgtcaattagaaattggcaagggaggggatgccatcttgggaggcagtaacacctgcacatctgacaatcggagaaaggtgtgtttacatccagcagctgtcccgcaagctggcccttgcacagacagacacacccatgtgccctggtcacactgttggatagtgggccgtagactgactgactgtcggagaatagctgagtcctgcccttactcaggcagcgcagagagctggcacgcggtcagctgtgacgtatgcgctgcaaaccatcgcacatagaagttgtcattagctggatgtcaccaagcatatgtcacacaagcacggcctatcagctaaaccgctttggatatctgagtctctgcttccggtaactatagattgggataaagacacaatacaagatgtatatttttaatacataagcccttcagtctacaataattagatgctattattacaaatgttttgttaaaaattactcagatcagcctggcattttgtcgcatgcctttaagcccagtaggtgggaggcagaggcagtcagatggtaaacaactttttttttttttgttctttttttcagagctggggaccgaacccaggaccttgtgcttgctcggcaagtgctctaccactgagctaaatccccaaccccggtaaacaacttttttaagaagcaagcaaacacactgaagtccagttttaagaaatatataggtcagtttggttaaaaataataataatgaaaggaaatttcattgattgaaattgattgcaatgtaggaaaattagcctgtatttctctcaagagttactgaagttgtttttaaagtcttttaatgccacagtgactaacaagcatataaaaatcttcatgcctttgacaaattaatttagaagttaatttaaaacatatccttttcctggttaaaaaaatatgttggcattttaagcagataagactagaaagtatttaagaaaacaaagtatttcccaatactgtagaatagcttccatgaaactcccctagttgtctggttaactcggttcctgtgttgatttatctaaatcattgactccctgtcctgtgctctgtgacttaacgtaactgttaccactgcacttgtgaactttcgtgtcattgttttgtgttcaccctctttttttaaaaaatatattaataaacta

SEQ ID NO: 3779 - DNA, 1663 bp, Rattus norvegicus
cctgggggtcgtgaagttccgagcggacgggtccacggaggttcatctggagaggtgggtcccctgcgaggtgaaaggcgccgctgcgacacacccccaccccccgcggtgcagtggttcagcccaataacttttcattcataaaaaagaccagactctgcgaggcgcgagtgagtcagaaccgcagccgccgacgcggaccctaccgaacatccagcccagggcatgtaccgagacttcggggaaccgggaccgagttccggggctggcagcgcgtacggtcgccccgcgcagccccagcaagcgcagacacagacagtccagcagcagaagttccaccttgtgccaagcatcaacgctgtcagtggcagccaggaattgcagtggatggtgcagcctcatttcctgggacccagcggctatccccgacctctgacctatccccagtacagtccccctcagccccgaccaggagtcatacgagccctagggccacctccaggggtgcgacgcaggccctgtgagcagatcagcccggaggaggaagagcgccgcagggtgagacgcgagcggaacaagctagcagctgctaagtgcagaaaccgaagaaaggaattgacagacttcctgcaggcggagaccgacaagttggaggatgagaaatcggggctgcagcgtgagatcgaagagctgcagaagcagaaggaacgccttgagctggtgctggaagcccatcgccccatctgcaaaatcccagaagaagacaagaaggacacaggtggtaccagcagcacgagtggggcgggtagcccaccgggcccctgccgcccagtgccttgtatctccctttctccaggacccgtacttgaaccggaagcactgcatacccccacgctcatgaccacaccctctctgactccttttactccgagtctggttttcacctatcctagcacaccagagccttgttcctcagcccatcgaaagagtagcagcagcagtggtgacccctcctccgaccccctaggttctcccacactcctggctttgtgaggcacccagccacaccccttgcaggtgctacccgttgtcatctcctttccctgttcatccagcaggcctggaccatacccatgccccaaaccagcaggtcttttatctctttcaagtagaacaaacatgttatgctttgatatagagccagcttgggggtccccaaagctgctcactgtttctctagagctggcctatcataatttgcatacagagaaaatatgtccctctgccagagtaagcctggcagctctgactttgtagatccccagtggtcctttgatgccttgcagaccactttcccacaccatgtcactttcttcatgttatccagcctactctaagcctagatagaaggtgccctttaactagcctagaacactaactcacacagcaccaacagccagcagcaccaggacaccctgtaggctcctcctgatcaggaggcaccaacagcttctgtgatgagctgagctgtactccctagctctgagaagcttttagctctggggtatccaagcctccacagcaagggcagctgctatttattttcctaaagagactatttttatacaaaccttccaaaatggaataaaaggcttgaagctct

SEQ ID NO: 3780 - DNA, 680 bp, Rattus norvegicus
gaggggcttgttctttcacctcagcggccgacctggaaaagcctagaaagtgctccccttttcttccgcctccggctacccgcatcggccgcctgcgcggagtcctggccaccaatcggcgcgcgcgctggagtggccgccttctctcacgctaaggggctgagtgcgcctgcgcgctgcgctgtcttttcacgtgtcctgagccggcccacgggagtctccttgcagcaggagtccgagtgcagagtccggagctgcggcggcgtaagtcatggctggacaagcttttaggaagtttcttccgctatttgacagagtattggttgaaaggagtgccgctgaaactgtgaccaaaggtggcattatgcttccagaaaagtctcaaggaaaagtattgcaagcaacggtcgtggctgtgggatcaggcgggaaaggaaagggtggagagattcagcctgtcagtgtgaaagttggagataaagttcttctcccagaacacggaggcaccaaagtagtactagacgacaaggattacttcttatttagagatggcgacattcttggaaagtatgtcgactgaaatcactgttgaaatggtgtcacatgaagctgcccattccactgatattctgaactatttcatcatgtaaataatttccatgcctcccttttataataaa

SEQ ID NO: 3781 - DNA, 2908 bp, Rattus norvegicus
ggtcaacggatctgtgattcagggtcagaagagaatgtgctttgccccactggccccagctccttgaggagaaggctgatcataagaacaaggagaccggagcttttccatcctctctaggggctgagactgcatgtagtgagtgggtctcgggggcactggctgttacttcttcctggatgtcgcaggtcacttcttaagagagcctgagatggagtttagaacacgggcttaggccccacctctatggaagagaaggggtgggcaactagaaccagtatgcagacctcagctaacccaaagcccaaagctgacatgcagttggggtgcccagcattcgtaccaaagtggaccaaccattatatgtggacacctgggaagggccaggtggctttctgcagctaagaccacacccagccactgatggcaagtgtcttcttaaacaggggcctaggtacctggcacggtggtacacccagcactttgggaggcagggggatcgctgtgagttcaagcccagcctagtctacacagacagtcccaggtcaactaagagtctatctcaaaacaaaataaaacgactctggataatgcttctcctttcttttaaatgtttttaggtctatttattttattttatgtgtctgaacgttctgcctgcaagtgtgtaatgcactatttgggtactggctccactggaactgggataagtgatgtgagccaccctgtgggtgctgggaatcaaacctaggacttctgcaagagcaactcaaccactgagccagttctccagccctgagatggtaagatattaagatggggcccagtggaagatcttccagtcactgagggcaagccttgaagggagcagtgagaccttggtctctcctggtgatctgttttcgatttctcagccgtcaaatgaagaggttgaggctcccatgtcttcctgccatggtttgtctgtgtctttattttgttttggttttgcttttgtttttttgtgtagcccaggctggcctggaactaggtctgtagaccaggctggcctggaactcacagacattctcctgcctctgcctcctgagttctgggattaaaagtttgcatcactgtcaccgtggcttaatgtgcatttcattttaaactgtattcaaatgcaaaatcaaggagctggggagatggcttaatggttaagtctgcacactgctcttgcagaattctgaattttgttcccagcacccacataggcctactcatgatcccctttaatgacagctcctggggatacaacatcctcttctggttgccaaggaaacctgtgtacacaaacatacacacaaataaaagttaaaatttaaagcaaaaactgttcccaaaatgtcttgctaccaccatgctggggactggacccaaggtctctcacacactaggcaggcagtctgctactgagctgcatgtagcattcttcccatgcagacctatgcaggcctgcagcccaaccctgaaatgcaacacgagatgcctagttgtatgtactaaaatgggccaccattacatgtggccaccaggaagggtatggccttaggacaaatggctctctgtagctgaggccgcctgttggccacgctcaagcagctgatggcctgtgttttctcaaacgggagtgtaggtacctagcatttgggaggcagaagcaaatagatcactgtgagttcaaggccagcctggtcctcatagcaagttctaatacagagttttaaagagttttaaagttatttattatatataagcacattgtagctctcttcagacacaccagaagagggcatcagatcccattacagatggttgtgagccaccatatggttgctgggatttgaactcagggcctttggtagagcagtcagtgctcctaaccactgagccatctctccagccctaatacagagttgtaagtgcaagtgtgatttttccttttattgtgatttttctttctttttactttattttggtctgtttgttgtgtttttgggtttgatttctactgatattttgttttacgggctagttagaagaagggctgagctgcactcagagattgaacaagatccttttccccatctaagctttagatccacgtaagggcttcctcacccacttgcgctatccaacctcattctgaggtattggatttctatgaaaaaacagctcttggctaggctgcacctctaccccctccaagtctctttatcctcttgtagcttaggcctccccttctaggctgtgtcccttttgagctcaggtcattagctgaggcggtgaccttgaccccagcccagaccctgcaaatgaagggcctgcttctaaacagtgtggaacagtttgacccaagagacctggctgtgaccagtcatgcagtcaccctcttagactgggccccaccatggcagtggacaaggcataaaaaggtcggtctgggctggagaaaccatcaccgacggtggatctcggactgaacaccaacgccatggcctgccccagtctcgcttgctgcctgcttggcctactggctctgacctccgcctgctacatccagaactgccccctgggcggcaagagggctgcgctagacctggatatgcgcaagtgtcttccctgcggacccggcggcaaagggcgctgcttcgggccgagcatctgctgcgcggacgagctgggctgcttcgtgggcaccgccgaggcgctgcgctgccaggaggagaactacctgccctcgccctgccagtctggccagaagccttgcggaagcggaggccgctgcgccaccgcgggcatctgctgtagcccggatggctgccgcaccgaccccgcctgcgaccctgagtctgccttctccgagcgctga

SEQ ID NO: 3782 - DNA, 1372 bp, Rattus norvegicus
ggacatacatcccaagggacagacaacatggcagcctgtgtgaagaccaataaatcccatgtcatcttcaagaaggtctcccgggacaagtcggtgaccatctacctggggaagagagactatatagatcacgtcagccaagtagagcctgtagatggtgttgtattggtggatcctgagctcgtgaaggggaagaaagtgtatgtcaccctgacctgcgccttccgctatggccaagaggacattgatgtgattggcctgaccttccgcagggacctgtatttctctcgggtccaggtatatcctcctgttggggccatgagtgccccaacccagctccagttgagcctgcgcaagaaactgggagataacacgtacccatttctgctcacgttccctgactacctaccctgctcagtgatgttgcagccagctccacaagatgtagggaagagctgtggggttgactttgaggttaaagcatttgccacagacatcagagatgctgaagaggacaagatccccaagaagagctctgtgcggttactgatccggaaggtgcagcatgccccacctgagatgggtccccagccctgtgctgaagcctcctggcagttcttcatgtctgacaagcccctgcacctctcagtctccctcagcaaagagatatattttcatggggagcccatccctgtgaccgtgactgtgaccaataacacggagaaggttgtgaagaagattaaagtgtcagtggaacaaatagccaatgtggttctctactcgagtgattattacgtcaagcctgtggcctcggaggaaacacaggaaaaagtgcagccaaacagcactttgaccaagacgctggtgctggtgcccctcctggctaacaacagagaaagaagaggcatcgcgctggatgggaagataaagcatgaggacacaaacctggcctccagcaccattatcaaggagggcatcgatcggaccgtcatgggcatcctggtgtcataccatatcaaggtgaagctcacggtgtcaggctttctaggagagctcacatccagtgaagtggctactgaggtgccgttccgtctgatgcacccccagcctgaggacccagcaaaagaaagtgtccaggatgaaaatctggtttttgaagagtttgctcgacaaaatctgaaagatactggagagaatacagaagggaagaaagatgaggatgcaggccaggatgagtgaagacttagccttgatcggtaggaaactgcttgtagtcctggttgccttgtgggaaacccctggtaacctttcagagttatgctaaatacgaaagctcgagcattctcccagaaataaagtctgctcgtctctt

SEQ ID NO: 3783 - DNA, 3226 bp, Rattus norvegicus
gaattcccgtccggcgggtccccgctcgtcgccccccccgggtgcggggcgggtccccccgcgggcgttgggaccggggtccggtgcggagagccattcgtcccgggaaacggggtgcggccggaaagggggccgccctctcgcccgtgcacgcttaacgcacgttcgtgtggaacctggcgctaaaccattcgtagacgacctgcttctgggtcggggtttcgtacgtagcagagcagctccctcgctgcgatcggaattccgggcccggagactcgaagaacgccatggcccccattggcctcaaggcggtggtcggagagaagatcatgcatgatgttatcaagaaggtgaagaagaagggcgagtggaaggtgctggtggtggaccagttaagcatgaggatgctgtcttcctgctgcaagatgacagacatcatgaccgaggggatcacaattgtggaggatatcaacaagcgccgagagccgctccccagcctagaggccgtgtacctcatcaccccgtctgagaagtctgtccactctctcatcagtgattttaaggacccgccgactgctaaatatcgggccgcacatgtgttcttcacagactcatgtccagatgccctgtttaacgagctggtaaaatctcgagcagccaaagtcatcaagacgctgacggaaatcaacattgcgtttctcccctatgagtcccaggtgtattccctggactccgctgactctttccaaagtttctacagccctcacaaggcacagatgaagaatcccatactggaacgcctggcagagcaaatcgccaccctgtgtgccaccctgaaggagtacccggctgtgcggtatcggggggagtacaaggacaatgccttgctggctcagctgatccaggacaagctggacgcttataaagctgatgacccgacaatgggggagggtcccgacaaggcacggtcccagctcctgatcctggatcgtggctttgaccccagctcccctgtgcttcatgaactgacgtttcaggctatgagttacgacctgctgcctattgaaaatgatgtttacaagtatgagaccagcggcattggagaggcgagggtgaaggaggtgctcctggatgaggacgatgacctgtggattgcactgcgacacaagcacatcgcagaggtgtcccaggaagtgacccggtctctgaaggacttttcctctagcaagaggatgaatactggagagaagaccaccatgcgggacctgtcccagatgctgaagaaaatgccccagtaccagaaggagctcagcaagtattcgactcacctgcaccttgctgaagactgtatgaagcattaccaaggcaccgtagacaaactctgccgcgtggagcaggacctggcgatgggcacagatgctgagggggaaaaaatcaaggaccccatgagagccattgtccccatcctgctggatgcaaatgtcagcacttatgacaaaattcgcatcatccttctctacatcttcctgaagaacggtatcactgaagaaaacctaaacaaactcatccagcacgcccagatccccccagaagacagtgagatcatcaccaacatggctcacctcggggtgcccatcgtcacggattccacactacgccgcagaagcaagccggagcggaaggagcgcatcagtgagcagacctaccagctctcacgatggaccccgatcattaaagacattatggaggacaccattgaagacaaactggatacaaagcactacccatacatctctacccgctcttccgcatccttcagcaccactgctgtgagtgcccgctatggacattggcacaagaataaggcccccggggagtaccgcagcggcccccgcctcattattttcatccttgggggcgtgagcctgaatgagatgcgctgtgcctacgaagtgacgcaggccaacggcaagtgggaagtgctcataggatccacgcacattctcaccccacagaaactgctggacacgctgaagaagctgaataaaacagacgaagaaataagcagttaaaatcagctgccctccaaaaccctggctcccttcccacaatgctctgcagctccccagtgcgacacctcggttactctgctgcctccccagccctgcacgccctggccaccctgttgccgcgctgagttcttctcctgtgcgatgacaccccatcttgtcctctgaaaagcaagagagtaatgtgttgttttttaaaaatgagtatcttctgtatgtatcccacagtaagttcacatgcaagctccacactgcagaagcatcagaactctggaccgagtggactctcccttatttatgaccccgtgacctgtatatagccctgtaccacgcgtgcacattgcttggatatggaaaggtagatgtgtaagtgtttctcagagcttgtttgggctcatttctgttcttgttggaatcataaggtctctgtccccaagatatgacatgctgaggaagtgatgtttttctctctagcccctgctcaccccgttctcatgcacagacactgagatgaggtgagcagacacctctggaggctggcgtggaatgagcctcctctttgcagctgtgggtggaggcttggcatatccacaggaagccagtctgagtgctagccagtgttgtctccagagcatgacactgcattccctgacctgtgtccacagtgctgtaacaagttaagtcctccagactaaatgagcatgcctagcagacttgggtcctccagagttaggtatgaccagcccagtccttcccgagccttctcgtgagcatagccgggatagaggtcaaaggtcaggagtgaactggaagatgtgagtttggcactctggtcaaagctaggcctgaggagggggccctgctgctcagtcagagtgtcctcagtttaagatacttcatcaatctttgtgtagtgtacattcatgtgtcattgtggttgtatgaaaacaatcattttttctttgtattaaagtcatcactgtataaaacatagctagctataaagcagaaattccagaagcagatgctggaaggatggtctccatcctcaggacgcagcagctccctgagcatgcgactcaccctgctgctgtagtcatgaaacatacagtggaagtcacaaaaatgtccccagcccagcccctgcccctcctccg

SEQ ID NO: 3784 - DNA, 564 bp, Rattus norvegicus
acagctgacatcatggcatttgatggcacttggaaagtagaccggaatgagaactatgaaaagttcatggagaaaatgggcattaacgtggtgaagaggaagcttggagctcatgacaacttgaaactgacgatcacacaggaaggaaataaattcacagtcaaagaatcaagcaacttccgaaacattgatgttgtgtttgaactcggcgtcgactttgcctatagtctagcagatggaacagaactcactgggacctggaccatggagggaaataaacttgttggaaaattcaaacgtgtagacaatggaaaggagctgattgctgtccgagagatttctggtaacgaactaatccaaacctacacatatgaaggagtggaggccaagcggatctttaagaaggaataggccagcttcttggagcctggcgcaatgcagaagggctagcttggtgtcggattcctttctccatctcgctgataatgcaggctcactcactgtgtcatgagcactgcttccaagccttgtcagagccaaagaagtaaaagttgattaggactt

SEQ ID NO: 3785 - DNA, 698 bp, Rattus norvegicus
ggaggaatccctgctccagcagctgcaaggtccaagaagaagaagaccccagcgaggaaaatgtgctggagacccctgtgccggttcctgtggctttggtcctatctgtcctatgttcaagctgtgcctatccacaaagtccaggatgacaccaaaaccctcatcaagaccattgtcaccaggatcaatgacatttcacacacgcagtcggtatccgccaggcagagggtcaccggtttggacttcattcccgggcttcaccccattctgagtttgtccaagatggaccagaccctggcagtctatcaacagatcctcaccagcttgccttcccaaaacgtgctgcagatagctcatgacctggagaacctgcgagacctcctccatctgctggccttctccaagagctgctccctgccgcagacccgtggcctgcagaagccagagagcctggatggcgtcctggaagcctcgctctactccacagaggtggtggctctgagcaggctgcagggctctctgcaggacattcttcaacagttggaccttagccctgaatgctgaagtttccaagaccaccgggctcccgaggatcatgttgagggaagaaaccttggctcccaggtatcctcaggagaagagagccatgtgttcacacccctcatccaggaccctgtccgtttctcctactcctctag

SEQ ID NO: 3786 - DNA, 2237 bp, Rattus norvegicus
gccagcttcctgaggtaccaaggaggaaggatggaggaaagaatgaacgtgctccacgactttgggatccagtcgactcgctacctccaagtgaattacgaagactcccaggactggtttgtcttggtgtctgtgatcgctgacctcaggaacgccttctatgtcctctttcccatctggttccacattcaagagactgtgggcatcaatctcctctgggtggcagtggttggagactggttcaacctcgtctttaagtggattctttttggacagcgcccgtattggtgggtcctggacactgactattacagcaacagctccgtgcctctgataaaacagttccccgtcacctgtgagactggaccagggagtccctcgggccatgccatgggcacagcaggtgtatactacgttatggttacttctactctcgctatctttcgtggaaagaaaaagtcaacgtatggattccggtgcttgaatgtcgtcttgtggttgggatactgggctgtgcagctgaacgtctgtctgtcccggatctaccttgcggctcactttccccatcaggtggtggctggagtcttgtcaggcattgctgtggctgaaactttcagccacatccggggcatctacaatgccagcctccagaggtactgtctcatcaccttcttcctgtttggtttcgcacttggattttacctgctgctaaaggggctaggggtggacctcctgtggactttggagaaggccaagagatggtgtgagcgccccgagtgggtccaccttgacactacaccctttgccagcctcttcaaaaacctggggaccctcttggggttggggctggccctcaactccagcatgtaccgcaagagctgcaaaggagaactgcgcaagtcgctcccattccgtttggcctgcatcgtggcctccttgggcctgctgcatctctttgactcgctgaagcccccgtcccagattgagtcgatcttctacatcttgtctttctgcaagagtgcgaccgtcccctttgcatctgtcagtcttatcccctactgcctagcccggctcctgggacagacacacaagaagtctttgtaaagcgttaagtctctgacacaagtcagcggccgtgcaaaggactaggagcaacccaagccttgtgcaacccagtgtggggccagaggtgttcacagccaccctggtagccctgtctttctttgccatcgtaaccaaaaaggtgaatttttaaaagctaacagggctgtttgaggaaagcgtgaatgctggaagatgtttccctgatgaatcacttccggtctcctgtccgacacagaagagaaagcccagactagagatcctgacagaatgctctcactgtgcagaatcctccaggccgagggtaaaagaaaagagcgttgtgcatttgctaggaagagaaggaaggatcgggaggagggggagtgtttggtggattgagcaaaccatatgcaagccatgtctacccggcttcagttatgcctgggtctttagatatgtaggacactctcaataatgatagaccagcccgtgtaatgagtagccagttagaggcgatcattctgctcccagatttttctctactgtacatgaaagtcacaccgtgtgcttgtattcctgaatggtaatggtgactgtcactcaggaaccaccaccttctctgtgacaccacagctttgcctcctcggcccaggtctgcgtgccataggactcatcactgcttccctgaccacgctgctggaccctgcattgctgaaccccatgctgctggaccctgtggtgtacggtgggcaattgtttgctggtgcttttgtagggttaagttaaactctgagatcttgggcaaaacggcaaggggagagtcaggattcctctctccaaaggtcactccgaagttacttttgattcctggagcagaaatgactccttcctctagcccaagccagccaagaactcattcttagaggcaaagcagcccaagcccgactgtgcctgtcctccagcctgggctggttttgcagagtgtgtcttcaagaagaaaaaatggtaaagctatttattcaaaatgcttgttttttgctatgaatgatgcctgtgtttccacccacgccaagcacttgttcctattgtcttgataagaaactacatgtgtgcagtattttattaaaacgacattttatttaaaaaaaaaaaaa

SEQ ID NO: 3787 - DNA, 1488 bp, Rattus norvegicus
aagtccacacccagtcctctctggaggaagaaaagggagcttctctgtctaccctcctagtccttggacaccgaagccagagaggactccggcggcaaaaggtgaccaggagcctccgggatgtctgagctggagaaggccatggttgccctcattgatgtcttccatcagtattcagggagagagggtgacaagcacaagctgaagaagtcagaactgaaggagctcatcaacaacgagctctctcacttcctggaggaaatcaaagagcaggaagtggtggacaaagtgatggagacgctggacgaagatggggatggggagtgtgacttccaggagtttatggccttcgtctccatggtgaccacagcctgtcatgagttctttgaacatgagtgagacaaaaaaaaaaaaaaaaaagtggctgagccgtttccccgtggcagacatgagggccacgagaggaggcacggcagaaggctcgtgggctggaaggagctgcgctctctagacgcatataactaattaggaagcttgatttgcttcagggatgaaactctgaccccgttcccaagggctgctttaagttagcacttcgtttctgctacactaggtattcctgtgagctgaatggtcccgggaactattgataagagtcactgagggacgaaatcaacactctgtgggtatagcactggttgtagaccaccatgctcctgtggaagggtcacctgtaagaatcaaggcagactaccaatagcacctccgttggacagctttcttaggtgtaatgtatgctgtccatgcatctacagacccacagctggatccactgccacccgaagaggttggctcgcccttacaactgcttgtcctctgtgcaaacgatgccccggaaagttagacctatcacccacaccctcccaccacccccaggccaaaaggacagcccacccaagtcccctcccccacagcgaatcgcggtttgttaccaagtacgtatttgacatcaacagttccaactggtggaacgattagatctcgcacactaagtattagcaccctaactcacgaccgagaatcaaaattctgctcagtagacgtctcctttcaggatgacaccattgtccccataggacacggacagaggagggcactggagagagtgtcaggtctttttctagctgtatcttcctctctccctctgctgcccataatgtgagtgaccctctagggtgagacttgcagggtgagctgctgaggaatgaagggccactgagatgtgtcctttagctgctgggtgtcatgtctgacctgctggtgcctagggcctgcttaacactcggcaaggctgcgagccgaggactgtgggaagccggacttgatgctttctaacctgcatatttgaatgccgaaggtcaaacaatccaagttacagataaataaaaaccgcattgcaagtattaaaaagccattctaggaaaattc

SEQ ID NO: 3788 - DNA, 1061 bp, Rattus norvegicus
ggccaggccaggccgcagttcagcgtctgcgcacgttcggccaccgttgccaccatgggggcatcggggcggctgctgcgcgccgtgatcatgggggccccgggctccggtaagggcactgggtcgtcacgcatcaccaaacacttcgagctgaagcacctctccagcggggacctgctccgccagaacatgctgcagggcacagaaatcgctgtgttggccaagagcttcattgaccaaggaaagctcatcccggatgatgacatgactcggctggccctccatgagctgaaaaaccttacccagtgtagctggctgttggacggatttccaaggacacttccacaggcagaagccctggatagagtttatcagatagacacagtgataaatctcaacgtgccctttgaggtcattaaactacgccttactgctcgctggattcatcctgccagtggccgagtttacaacattgaattcaaccctcccaagactgtgggcatcgatgacctaacgggagaacctctgattcagcgtgaggacgacaaaccagagacggtgatcaagagattgaaagcgtatgaagcccagacagagccggtcctgcagtattaccagaaaaaaggggtgttggaaacattctccggaacagaaaccaacaagatcaggccccacgtatactccttcctgcaaatgaaagttccagaaaccatccaaaaagcctctgttactccctgaggaaggcacttggcgggatgaagcagggcctcctccactcctcccctcgcctctgtatttcgaagctgttttcctaagacttctctgaaaattatgatttaagtcctaatggccttgcctaatgagtcagaaactaaggctgaccgtgtgtttatgtasgttgtccttccatggatgtgcaattgaaaacgtcagacatgttgaaacaaacaaactcagagcacaattaagagagcaactggtggggttggggatttagctcagtggtagagcgcttgcctaggaagtacaaggccctgggttcggtccccagctccgaaaaa

SEQ ID NO: 3789 - DNA, 602 bp, Rattus norvegicus
gctgcacgcagtgcccacctatgctcgccatgatgctcaacactacgctctctgcttgcttcctgagcctgctggccctcacctctgcctgctacttccagaactgcccaagaggaggcaagagggccacatccgacatggagctgagacagtgtctcccctgcggccctggcggcaaagggcgctgcttcgggccgagcatctgctgcgcggacgagctgggctgcttcctgggcaccgccgaggcgctgcgctgccaggaggagaactacctgccctcgccctgccagtctggccagaagccttgcggaagcggaggccgctgcgctgccgcgggcatctgctgcagcgatgagagctgcgtggccgagcccgagtgtcgagagggttttttccgcctcacccgcgctcgggagcagagcaacgccacgcagctggacgggccagcccgggagctgctgcttaggctggtacagctggctgggacacaagagtccgtggattctgccaagccccgggtctactgagccatcgccccccacgcctcccccctacagcatggaaaataaacttttaaaaaatgcaaaaaaaaaaaaaaaaaa

SEQ ID NO: 3790 - DNA, 1179 bp, Rattus norvegicus
cctcatgaaataaaaagctgaaaggaatttgaataaaaatttcctgcatctcatgccaagggggaaacaccagaatcaagtgttcgtcataactaaagacaccccttcatccaagaatgcaaagcacatccaataaaagcgctggatataacttcttttttctctctttcggccgtggggcgggagccgggacgcgaagtgctattggtacctgcagcttctttccccggaaggatggcgcaagccgggagaacagggtatgataaccgggagatcgtgatgaagtacatccattataagctgtcacagaggggctacgagtgggatactggagatgaagactccgcgcccctgagggctgcccccacccctggcatcttctccttccagcctgagagcaaccgaacgcccgctgtgcaccgagacacggctgccaggacgtcgcctctacggccccttgtcgccaacgctgggcctgcgctcagccctgtgccacctgtggtccacctgaccctccgccgggctggggatgacttctctcgtcgctaccgtcgcgactttgcagagatgtccagtcagctgcacctgacgcccttcaccgcgaggggacgctttgccacggtggtggaggaactcttcagggatggggtgaactgggggaggattgtggccttctttgagttcggtggggtcatgtgtgtggggagcgtcaacagggagatgtcacccctggtggacaacatcgctctgtggatgactgagtacctgaaccggcatctgcacacctggatccaggataacggaggctgggatgcctttgtggaactatatggccccagcatgcgacctctgtttgatttctcctggctgtctctgaagacgctgctcagcctggccctggtgggggcctgcatcactctgggtgcatacctgggccacaagtgaggtcagcagacctgccccaaacaaatatgaaaaggttcactaaagcagtagaaattaatatgcattatcaaggatggaccatgaaacaaagttgtgatttttttttaaagcagaacacacacacacacacacacacacacacacacacacacacacacacacacacattcaggcaaatggtcaaatcagctatttactgccaaagggaaatattatttattttttacattattt

SEQ ID NO: 3791 - DNA, 830 bp, Rattus norvegicus
agttgggagctgagtggagaagaagccacgattctcgctagacagtgaagcacagttgctgctatgtctgggaagccagtgcttcactacttcaatgcccggggcagaatggagtgcatccggtggctcctcgctgcagcaggagtggagtttgatgagaagtttatacaaagtccagaagacttggaaaagctaaagaaagacgggaatttgatgtttgaccaagtgcccatggtggagattgacgggatgaagctggcacagaccagagccattctcaactacatcgccaccaaatatgacctctatgggaaggacatgaaggagagagccctgattgacatgtacaccgaaggcattttagatctgactgaaatgattatgcaattggtaatatgtcccccagaccaaaaagaagccaagaccgccttggcaaaagacaggaccaaaaaccggtacttgcctgcctttgaaaaggtgttgaagagccatggccaagactaccttgtaggtaacaagctgacccgggtagacatccacctgctggaacttctcctctatgttgaagagtttgatgccagccttctgacctctttccctctgctgaaggccttcaagagcagaatcagcagcctccccaatgtgaagaagttcctgcagcctggcagtcagagaaagcttcccatggatgcaaaacaaatcgaagaagcaaggaagattttcaagttttagcggagctgcactgtccaatttctttatgttttgcaaaaaatgagaagcaattgttgatcctaggtatttttgaaataataaacacgaaaaaatactct

SEQ ID NO: 3792 - DNA, 1055 bp, Rattus norvegicus
gctgaagcaaattgagaagaccacagcgccagaaccatgcctatgatactgggatactggaacgtccgcgggctgacacacccgatccgcctgctcctggaatacacagactcaagctatgaggagaagagatacgccatgggcgacgctcccgactatgacagaagccagtggctgaatgagaagttcaaactgggcctggacttccccaatctgccctacttaattgatggatcgcgcaagattacccagagcaatgccataatgcgctaccttgcccgcaagcaccacctgtgtggagagacagaggaggagcggattcgtgcagacattgtggagaaccaggtcatggacaaccgcatgcagctcatcatgctttgttacaaccccgactttgagaagcagaagccagagttcttgaagaccatccctgagaagatgaagctctactctgagttcctgggcaagcgaccatggtttgcaggggacaaggtcacctatgtggatttccttgcttatgacattcttgaccagtaccacatttttgagcccaagtgcctggacgccttcccaaacctgaaggacttcctggcccgctttgagggcctgaagaagatctctgcctacatgaagagcagccgctacctctcaacacctatattttcgaagttggcccaatggagtaacaagtaggcccttgctacactggcactcacagggaggacctgtccacattggatcctgcaggcaccctggccttctgcactgtggttctctctccttcctgctcccttctccagctttgtcagccccatctcctcaacctcaccccagtcatgcccacatagtcttcattctccccactttctttcatagtggtccccttctttattgacaccttaacacaacctcacagtccttttctgtgatttgaggtctgccctgaactcagtctccctagacttaccccaaatgtaacactgtctcagtgccagcctgttcctggtgggggagctgccccaggcctgtctcatctttaataaagcctgaaacac

SEQ ID NO: 3793 - DNA, 4057 bp, Rattus norvegicus
aaaagagttgggagaagttgggagcggcgggggcgcgccccggggtgggcaccgggaaatcgtcgggagcgcgcgagggttccggaggatcaggggagacccggagacccccgggacacgaaatctagagctagcgggttatgcctccaccttgttgccctgaaagccgaagcgacagtgagaagggctaagatttggccatgagcagcgcccccaggcgccccgcctcgggcgcagattctttgcacacgccagagccagagagcctgagccccggaacacctgggttccctgagcaagaggaggaagatgaacttcgtaccttaggtgtggagcggttcgaggagatcctccaggaagctggatccagaggaggagaagagccaggccgcagctatggggaggaagactttgaataccaccgccagtcctcccaccatatccatcatccactctccacccacctgcctcctgacgcccgccgtcgcaagactccccagggcccaggacggaaacctcggaggcgccctggagcctctcccactggagagacccccactattgaggaaggggaggaagatgaggatgaagtcggtgaagctgaagggttcagagctcccccgcaacaaccatctcctgcctcttcaccctctgcagttcagttttttctccaagaggatgaaggtacagataggaaggcagagagaaccagcccatctccccctacacagacgccccaccaggaagcagctccccgggccagcaaaggggcacagacaggaactctggtggaggagatggtggccgtggccagcggcacggctggaggtgacgacggaggtgctgcagggcgccccctgaccaaagcccagcctggacatcgaagttacaaccttcaggagagaaggcgaattggcagtatgacaggggtggagcaggccctgctgcccagggtccctactgatgagagtgaggctcagacgctggccacagctgacctcgacctcatgaaaagtcaccggtttgaggacgttccgggggtacggcgacatttggtgaggaagaatgccaaagggtctacacaggctgcccgggaaggccgagagcctggccccacacctcgggcacgaccacgggccccccataagcctcatgaggtgttcgtagagctgaatgaattgcagttggacaaaaaccaggagcctcagtggcgggagacagcccggtggataaaatttgaggaggacgtggaagaggagactgagcgctggggcaagcctcacgtggcatcactgtccttccgcagcctcctggagctccgcaggacactggcccatggagctgtgctcttggacctcgatcagcagaccctgcctggggtggcccatcaggtggtcgagcagatggttatctctgaccagatcaaagcagaggacagagccaatgtgctacgagcccttctgctgaaacacagccacccaagtgatgagaaagaattctccttcccccggaacatctcagcgggctctctgggctctctcctggggcatcaccacgcccaggggactgagagtgatcctcacgtcactgagcctctcatcggtggtgttcctgagacccggctggaggtggatagagagcgtgagctgccgcccccagccccacctgcaggtattacccgctccaagtccaagcatgagctgaagctgctggagaagatccctgagaatgcagaggccacagtggtcctcgtgggctgtgtggagttcctctcccgccccaccatggcctttgtgcgcctgcgggaggctgtggaactggatgcagtactggaggtgcctgtgcctgtgcgcttcctcttcctgctgctggggcccagcagcgccaacatggactaccatgagattggccgatccatctccaccctcatgtctgacaagcaattccacgaggcagcctacctggcagatgaacgggatgacttgctgactgctatcaatgccttcctggactgcagtgttgtgctaccgccttctgaagtgcagggcgaggagctgctgcgttctgttgcccatttccagcgccagatgctaaagaagcgagaggagcagggccgcctgctgccccctggtgctgggctagagcccaagtctgcccaagataaggcactcctgcagatggtagaggtggcaggtgcagctgaagatgatccccttcggaggacaggccggccctttggggggctgatccgtgacgtgcggcggcgctacccgcactacctgagtgacttccgagatgcactagacccccagtgcctggctgctgtcattttcatctactttgccgccctgtcgcctgccatcacttttggggggctactgggggagaagacacaggacctgataggagtgtcagagctgatcatgtccacagcgctccagggagtgatcttctgcctgctgggcgcccagccactgctggtgatcggcttctcggggcctctgctggtcttcgaggaggccttcttctcgttctgcaagagcaaccagttggagtacttggtgggccgagtttggattggcttctggctggtgctcctggccctgctcatggtggctctggaggggagcttcctggtccgctttgtctcccgattcacccaggagatctttgccttcctcatatcactcatcttcatctatgagaccttctataagctgatcaagatctttcaggagcaccccctccatggctgctcagtctccaacgactcagaggcagacagcagcagtaacaatatgacttgggcagcaaccacactggcaccagacaacagcagtgcgtctgggcaggagaggccccggggccagcctaacactgccttgctatcactggtgctgatggccggcactttcttcatcgccttcttcctgcgcaaattcaagaacagccggttcttccctggccggatccggcgggtaattggggactttggggtgcccatcgcgatcctcatcatggtgcttgtggattacagtattgaggatacctacacccagaagctaagtgtgcccagtgggttctcagtgacagccccagacaagcggggctgggtcatcaacccccttggagagaagactcctttccctgtgtggatgatggtggccagcctgttgcctgccgttctggtgttcatcctcatcttcatggagacacagatcaccacgttgatcatctccaagaaagagcggatgcttcagaagggctctggcttccaccttgatctgttgctcattgtagccatgggtggcatctgtgccctctttggcctgccttggttggctgctgccactgtccgctctgtcactcatgccaatgcactcactgtcatgagcaaggctgtggcacctggtgacaaacccaagattcaggaagtcaaggagcagcgggtgaccgggctgctggtggccctgcttgtgggactctccatggtcattggggacctactgcggcagatccccctggctgtgctctttggcattttcttatacatgggagttacttcccttaatgggatccaattctacgagcggttgcacctgctactcatgccgcccaaacaccacccagatgttacctatgtcaagaaggttcggaccatgcggatgcacctgttcactgccttgcagctgctctgtctggccctgctttgggcggtcatgtccacagctgcttccctggccttccccttcatcctcatcctcacagtgcctttgcgcatggtggtacttacccggatcttcactgagcgagaaatgaaatgtctggatgctaatgaggcagagccagtgtttgatgagtgtgaaggtgtggacgagtacaacgagatgcccatgcctgtgtagctgctgtccagaggcatagcagagggactaaggggcaggggctggggggctggggagctggggctcccctcctcctgtccctcctcatttttatttaagtgaataatttaaagcccccttgtccccaccctgcagtaaagtgcttcaacccc

SEQ ID NO: 3794 - DNA, 650 bp, Rattus norvegicus
gttttgcaccttcgtttcctgcggcggcttctgtcgtctccttgctttttgctctcccaggttccgaggccgccgcgcgtctcccggggaagcatggcgatgaaggccgtgtgcgtgctgaagggcgacggtccggtgcagggcgtcattcacttcgagcagaaggcaagcggtgaaccagttgtggtgtcaggacagattacaggattaactgaaggcgagcatgggttccatgtccatcaatatggggacaatacacaaggctgtaccactgcaggacctcattttaatcctcactctaagaaacatggcggtccagcggatgaagagaggcatgttggagacctgggcaatgtggctgctggaaaggacggtgtggccaatgtgtccattgaagatcgtgtgatctcactctcaggagagcattccatcattggccgtactatggtggtccacgagaaacaagatgacttgggcaaaggtggaaatgaagaaagtacaaagactggaaatgctggaagccgcttggcttgtggtgtgattgggattgcccaataaacattccctatgtggtctgagtctcagactcatctgctgtcctgctaaactgtagaaaaaaaccaaaccattaaactgtaatcttaacagtt

SEQ ID NO: 3795 - DNA, 1492 bp, Rattus norvegicus
gagcagacgcgcggctgctagcgaacggccgtgttctgaggagagcagcggtcgtgggcgcctcagcaatgttgtgtcgggcggcgtgcagcgcgggcagaagactgggccccgcggccagtaccgcgggctcccggcacaagcacagcctccctgacctgccttacgactatggcgcgctggagccgcacattaacgcgcagatcatgcagctgcaccacagcaagcaccacgcgacctacgtgaacaatctgaacgtcaccgaggagaagtaccacgaggcgctggccaagggagatgttacaactcaggttgctcttcagcctgcactgaagttcaatggcgggggccatatcaatcacagcattttctggacaaacctgagccctaagggtggtggagaacccaaaggagagttgctggaggctatcaagcgtgactttgggtcttttgagaagtttaaggagaaactgacagctgtgtctgtgggagtccaaggttcaggctggggctggcttggcttcaataaggagcaaggtcgcttacagattgccgcctgctctaatcaggacccactgcaaggaaccacaggccttattccactgctggggattgatgtgtgggagcacgcttactatcttcagtataaaaacgtcagacctgactatctgaaagccatttggaatgtaatcaactgggagaatgttagccaaagatacatagtttgcaagaagtgaagcccttccgccagctgtgtgtcaggcccgtggtgggtgttttgtagtagtgtagagcattgcagcactgtggctgagctgttgtaatcttcattgatgcctatccacatatgtgtaagcatacagttatgataatttcttaattaaatgtattgttaggcactgtttgagaacagtacatacttggtgtgagctgctcttgattgaacattttcattagaggcttgaattgcttggacgctgtcactgtcatcataaggccatcaaagatattccatctctgtgttggggcctgtggggaggctgtaatcctgttctactgcagttaggaaaaaaatgagttaccccccccccccagaattgttgaataataaaatagagaactgaatagttctcttttgtgttaaaaattgctatttttcataagtaatcctttgtttagcggatatcacctagtggtctttatttatggccacagtttcacagaaacatcattttttcacttgaaacgtgtaactaggctaaggatggatggagtggtagacctttgcctgtcttatgtgaggccctgggctctacctcactactgaacaaatcaacagacccaagctaggctcctgactgacaactgttaattcggagaggagtgacattgtgcctctgggtttttttataggctgagatgcaaaaactgttaccttgtctattaaaaccgactgtgtattgtatgaaagtgctcaagatggacaaagtat

SEQ ID NO: 3796 - DNA, 2446 bp, Rattus norvegicus
ccaggagtgagcagctgctcccggttggccctgacggacagacaaaccgacagcctgacatcctagtccaccaactaaccagcctgtacctggctgcttccccctccccaggaacattgaccatgcgtcccctgtggctactcaccttgctgctggctctgagccaggccttgccctttgagcagaagggcttctgggacttcaccttggatgatgggctgctcatgatgaatgatgaggaggcttcaggctcagacaccacttcaggtgtccctgacctggactctctcacacctaccttcagtgccatgtgtccttttggctgccactgccacctgcgggttgttcagtgctctgacttgggtctgaagactgtgcccaaggagatctcacctgataccacactgctagacctgcagaacaatgacatctctgaactccgcaaggatgacttcaaaggcctccagcacctctatgctctggtcctggtaaacaataagatctccaagatccatgagaaggcctttagccctctgcggaagctgcagaaactctacatctccaagaaccacctggtggagattcctcccaacctgcccagctccctggtagagctacgaatccatgacaaccgtatccgcaaagtgcccaagggcgtgttcagtgggctccggaacatgaactgcattgagatgggtgggaatcccctggagaacagtggctttgaacccggagcctttgatggcctgaagctcaactacctgcgcatctcagaggccaagctcactggcatccccaaagatctccctgagaccctgaatgaacttcacttggaccacaacaaaatccaggctatcgagttggaggatctacttcgctactccaagctgtacaggctgggcttaggacacaatcagatccgaatgattgagaatgggagcctgagttttctgcctaccctgagggaacttcacttggacaacaacaagctgtcccgggtgcctgctggcctcccagatctcaaactcctccaggttgtctatctgcactccaacaacatcaccaaggtgggcatcaacgatttctgccccatgggctttggagtcaagagggcctactataatggcatcagcctcttcaacaaccctgtgccctactgggaagtgcagcctgccaccttccgctgcgtcactgaccgcctggccatccaatttggaaattataagaagtagaagcagtggtagccaccatggctcgttggtgagagtctctgaggaacatagccagttgttccacaggggaaggggaacaaagaagcaacacctttgttccccaatattaactcactgcccaccacagcttcctctggctcctaagcatgcacatatgcacatggcctggcctctcccattcccctcagcctttgagatttaacactcacccaccatgtccactcagagactccctataaatcttttttcttgctcatcctgaaactcagatgtttgtgggaagaatggacagagcacatggccacagttactgttccatccgggcatgtattcctcctcttccttacccatgtctgacttctagctctcctgggctctgctgctgcccttatcctctggtgatctctcttcaacaagttcactacctgtccatccaagccgccacctggctctactaactcctggatccttccctctctccaactctgttatgcttcctggcacttttcttccttctggggttatagatctgtccctgccatctctggacctggttcatatctttctgtctttgtctctttctgtatttctttgcctatatctctgtctgtctctatttctgtttctgtctctctgtctttatatctgcctctctctctctctctctctctctctctctctctctctctctctcacacacacacacacacacacacaaacacacaaacacaaacacacacacacacacacacacacacacacacacacacacacacacacacacaccgtcttctccaggctgctttctgtttcacaggtctctggccagtccctgcacaaacaaatatagggaaactattttcctgactgccctacctggcacttgatctcccatccctggaggaagctggaagctggaggcccagaatcctatccatattgtccaggaaagggtccatactctgttatcaagatgaggatcaggaagcttcctagcccctggagaggctcagcaggccaccagaggcccccaccccgaaccagtttgcattggcccctgccctctccccaagatggctaggtcccctccctcacccctgggtccctgctgtggcaggaggtggtggtcagttgtacccagcaggagggagtgctgcttatgaggtcagttgtctctcaattaaagaaacactgtgcaataaaaaaaaaaaaaa

SEQ ID NO: 3797 - DNA, 2158 bp, Rattus norvegicus
gtcgagctagaggctagagggagaacttggccacaggcggaccagacagatcagatcagggcaagaaggaacagaaccagtctgtctctctgtctctgtctctctgtctctgtgtgtgtgtgtgtctctctctgtctctctgtgtctctacacacacacacacacacacacacacacacacacacacacacacacacacacacacacaccacgtcctctgagaactcagctggctgcgaccgcgcacaccccgcccgggcgcgcgtcccaggctggtggagcgcagatccagatccccatagcggccgggtgttcccgagtctcaggtggcgcggaagggagaacccgcgcttgacaactcgtctgcgctcgcccagaccttccgccctcggaccggccggtgagcggagctgagcgggtgcggctgccacccagagcccacctgccgaccctcgcgtcgcggccccgcgccagctgtgccgggctcccggcgcccgctccgcagctggagcgccaccccggctctactacagtcccttccgtctccagagtgtcccggacgacggcgacccgaagtagcgcggcacgacagcgggacttgactatggctggggctcgcgggctgctgtgtctgtggctaggttgtttctgcctgaacctggcacagggacagagaccaaatttgcacctcccgggactccgcgggactgagtcaagcgaccgcatgacaggtggtggcccgagcccggacctgaggcctcacgacaaggtgtcagagcatatgctgtggctctatgacaggtacagcggcagcaacagagcccaggctacccggacaccgggctcgcagctcccgggtccccaacccctgcgtggcggtaacacggttcgtagcttcagagccgcagccgcaggaactcttcaaagaaagggcttgcacacttttaatctgacttctctaaccaagtctgagaacattttgtcagccacactgtatttctacattggagaattggtgaacaccagtgtgaactgtccagaatcccaaggttgttcccatgacagccagagacaacacatccagatagacctctctgcatggaccctccaatccaaccaaagccagctcttgggtcatctgtcagtagatacggccaaaccttatagagacagcatgtcttggctgtcaaaagacatcactcagctcttacggaaggccaagcaagacgaggagtttctcataggatttaacattacctccagagcacacgagcttcccaagaggatgctgcttttcccggaaccttatatcttggtgtatgccaacgatgccgccatttgtgagcctgaaagcgtggtatctagcctacagagacaccgcgatttcacagcaggaactgtgcccagactggatagccacgtcagagaagccctctctgttgagaggaggaagaagcgctctactgggatcttgttgccattgcagaacaacgagctccctggggccgagtatcagtacaaggaggctggagtgtgggaggagagaaagccttacaagagccttcagactcagcctcctgaaaagagccggagcaaaaagaaacagaggaaagggcctcatcaaaagggacagacactgcagtttgatgagcagacactgaagaaggcgaggcgaaagcagtggatcgagcctcggaactgtgcccgcaggtaccttaaagtggactttgccgatattggctggagcgaatggattatctcccccaagtcatttgatgcctactattgctccggagcctgccagttccccatgccaaagtctttgaagccatcaaatcacgccaccatccagagcatagtgagagccgtgggggtcgtctctgggattcctgagccctgctgtgttccggagaagatgtcctcgctcagcatcttgttctttgacgagaacaagaatgtggtcctcaaagtctatcctaacatgacagtagactcttgtgcttgtagataacctagcagagaacacactcaaacgctccattcaatcattaattgggttttatggacttttatttttgtcttttgcactgccaatgcattttgtcccaaaagatgttttatagcagaaagaaaatgaacaaagagatcgaagatttcc

SEQ ID NO: 3798 - DNA, 2681 bp, Rattus norvegicus
ggcacgagctttgggaccccctactggttggtaggcaggatggtgagctccttgcctctgggtagcggacacctgtgggccgcgtggatgcacaggggatccttgtggagtaagtgtactgggagccacctcacacctgatacaaaagccagtggtggagtgagtgctgctattttaagttgctgaatggaacctctaaggacaaggggaggggacagaggttaagcacatagtgagcctgaatgctgccagggctggccaggcactgcatccgtttactggggcacatcttcgcagggctgcctatgttcccctccttcccaggctggcatccccaccgcaggcttcctgaccacaggtgctggcctcgtgccccagggcgcctgtctgctgatgtgcccagctcctgcccaccatgccgccctacatctcggccttccaggctgcctacattggcatcgaggtgctcattgccttggtctctgtgcccggaaatgtactggtgatttgggctgtgaaggtgaaccaggcacttcgcgatgccaccttctgcttcatcgtgtcactggcggtagctgatgtggccgttggcgccctggtcatcccactggccatccttatcaacattgggccacagacctacttccacacctgcctcatggtggcctgccctgtcctcatcctcacccagagctccattctggctctgctcgccattgctgtggatcgatacctccgagtcaagatccctctccggtacaagacagtggtgacccagcggcgggcggcagtggccatagctggctgctggattctctcccttgtggtaggcctgacacccatgtttggctggaacaacctgagtgtggtagagcaagactggagagccaacggcagtgttggggagcccgtgatcaagtgtgagtttgagaaggttatcagcatggagtacatggtctacttcaacttcttcgtctgggtgctgccgccactgctcctcatggtcctcatctacctggaggtcttctacctgatccgtaagcagctcaacaaaaaggtgtcagcctcctccggtgacccccagaagtactacgggaaggagctgaagatcgccaagtcgctggccctcatcctcttcctctttgccctcagctggctgccgctgcatatcttgaactgtatcaccctcttctgccccacctgccagaaaaccagcattctgatctacatcgccatcttcctcacacacggcaactccgccatgaaccccatcgtctatgccttccggatccacaagttccgggtcacctttctgaagatttggaatgaccacttccgatgccagcctaagcctcccatcgatgaagacctcccagaggagaaagctgaggactagactctgccttgctccgtctagcccatgcccagcggctctctgttcaactcccacgtcctccctgtcccaccctgtcccactgtccctcctcagttttcccagctggggtgtaggctgtggacaccagggaggctctgaagagataccatggaatagggcccccctataaggagctagctgccctgtacttggggacccggaggaggcttggaggtggggcgggctatgatagggaactgggtgccctgagatgtgaggagagtcttgtgtgccccatccctggctgttctctgagctgttcagagagccagggttagaatattctggctcctacagtcaggcagggaggggagcctgctattatgtgttggtggcccgagggaccaacttcaagtgagaaagacagtcccttagaggtaaatggatagagagaggatatgtcctggctttgctgtctctcctcttctgtaggagaagacagtaaatcacagggaaggagactcagcccctcctccaaggattgtgtgcttggccatgcaggcgctgtggtacctgctttcctcacctgggcttatacttgggagaggcagaaagaatgggtccagggatcctctcacatttactttattcacatcctggcactcaaagtgggccacaaagtccttgggaataaaaatagtgcagaaggtgctggcttcagctagccagcagggagcagcactgagcccttcttgccctgaacttcctgggagtccccagtgtaatttactgtctggggcaccaagcttcaccaactctcagagcaggcctggactctccttccaaggcccaggagaagggatccctgggaaggacaacccttgggagcatgctgcctgagggggtaggaagggaaagcgtccaaggagatcccaggcgaacgtgggcacccttggtgtgaagtgtgacaggtcagaccagaccaaaggagactgctgtcttcagtgtgaggaagtgccttgctggcatttaaatatccaaaaaaatgctcctggaggtggatttagctcagaagctgtgttacaaatagagtgtaggcttttgggagggtctcagataggaccaatccctactctgctgagcctggatgtcttccttgtatggacggcaggcagaggagggtgacaggttctgagtgtgaatatcgactccaagtcttgattctgggctcttccctcagttggaagcaaggtgtccctggttctcaaggaggtccctatgtctaataaaagattgtgaaccccac

SEQ ID NO: 3799 - DNA, 2528 bp, Rattus norvegicus
ggagtgttcactgaagtcaacagtggttagaccaggaccatggaattcggtgtcttgctcctcctcactctcactgtgggcttcttgctattcttagtcagccaaagtcagccaaagacccatgggcacttgccaccaggacctcgtcccctgcccttcttggggaacctcttacagatgaacagaagaggctttctgaattctttcatgcagcttcaagaaaaatatggagatgtgttcacagtacacctgggaccaaggcccgtggtcatattgtgtgggacagacaccataagagaggctctggtggaccaagctgaagctttctctggtcggggaacagttgctgtgctccatccagttgtacagggatatggtgtgatctttgccactggggaacgttggaagacccttcggcgattctctctggtcaccatgaaagaattcggaatgggaaagcggagtgtagatgagaggataaaggaggaggcccagtgtttggtggaggagctgaagaaatacaagggagcccccctgaaccccaccttcctcttccaatccatcgcagcaaacaccatctgctccattgtctttggagagcgctttgactacaaagaccaccagttcctgcatctgctggatctagtctataagacatctgtccttatgggctccttgtccagccaggtgtttgagctttactctggcttcctgaaatactttcctggtgcccacaaacaaatcttcaaaaacctacaggaaatgctcaactacattggccatattgtggagaagcacagggcaaccttggaccccagtgctccacgagatttcatcgatacttaccttctgcgcatggagaaggagaagtccaaccatcacacagagttcaatcaccagaaccttgtgatctctgtgctctctctcttctttgctggcaccgagaccaccagcaccacgctccgttgcaccttcctgatcatgctcaagtacccccacgttgcagagaaagtccaaaaggagattgatcaggtgattggctcacaccggctaccaacccctgatgatcgtaccaaaatgccatatactgatgcagtcatccatgagattcagagatttgcagatctgaccccgattggtctaccacacagagtcaccaaagacaccgtgttccgagggtacctgcttcccaagaacactgaggtgtaccccatcctgagttcagctctccatgacccacggtactttgaacaaccagacactttcaatcctgagcacttcctggatgccaatggggcactgaagaagagtgaagcttttctgcccttctctacaggaaagcgcatttgtcttggagaaggcattgcccgaaatgaattgttcattttcttcaccgccatcctgcagaacttcactttggcaagccctgtggctcctgaggacattgacctcactcccattaacattggtgtaggcaaaataccctctccataccagataaacttcctgtcccgttgaataggttgagagagaagagtcaatggaatgacgtgtccccagtgccgtaccctatgaatggaatagtaaaacctaatgaagtggctttcttgttacatagacagagagacttctggaggccacagcttgttgtgagacacctctctcatgcttgttcacagccatagtccctacttgttaggaatctagactccaggatctgtgggaacagaccagagatggtttctcttgagttggctccattctaatcccatgtggtgtgttggggggtcatgtttgaggacccccttcgtagatgagtaacagaccctatgatggcatcacagtgctagtgagtagtggggaacaaaattatgctgtgagtctagaagagcaaccccctctcctgcttctgtttcaattcagatgaaattcatataacgaagctgacaaaatcttttaattttgtattctggccagaggctcatgtagttcacactgacctcaaaatcctatatacatccaaagatgtcttgaaatctcgatctcctgaccagtgctggcatcacagccacatggacgtatacccagattttaaagtgactatatcataatgtttatattttaatctcctttaatttatttgcaatattacaacttcactatctaattccaggtattttgtcacacttaaccaacaccaccaaaagccccaacctattcaaagatcaatccctcatcccctctctccataacctcccctgcactcaacacccaccgtgccacttttgtcacacttaaccaacaccaccaaaagccccaacctattcaaagatcaatccctcatcccctctctccataacctcccctgcactcaacacccaccgtgccacttttgtctgacttttgtgtcattggactgtcctgaattgtgtgtctcatagaaaaacaacgacatgatctttaatgctggctgacttttttgccacacccaacttctcaggcccctgactgtggcctgcacagtacag

SEQ ID NO: 3800 - DNA, 2063 bp, Rattus norvegicus
agcggacgctgtctgaggagtagagcctgcctgagagcgagtgtcccgtcggtcccggagcagcccagcccggcccagccctcacaggtcctctgtggtgcacacagcccacctcccagccatgcgctctctccttctgggcaccttatgcctcctggctgtggccctggcagccgaggtgaagaaacctgtagaggccgcagcccctggtactgcggagaagctgagttccaaggcgaccacactggcagagcgcagcacaggcctggccttcagcctgtatcaggcaatggccaaagatcaggcggtggagaatatcctcctgtcacccttggtggtggcctcatccctgggccttgtgtcactgggtggtaaagccaccacagcttcgcaggcgaaggcagtgttgagcgctgagaagctgcgggatgaggaggtgcacacggggctgggcgagctcgtgcgctccctcagtaactccactgcgcgcaatgtgacctggaaactgggcagccgcctgtacgggcccagctccgtgagcttcgccgatgacttcgtgcgcagcagtaagcaacactacaactgtgaacactccaagatcaacttccgagacaagcgcagcgcgctgcagtccatcaacgagtgggcctcgcagaccaccgacggcaagctgccagaggtcaccaaggatgtggagcgcacggatggggcactgctcgttaatgccatgttctttaagccgcactgggatgagaagttccaccataagatggtagacaaccgtggcttcatggtgacccgctcctacactgtgggtgttacgatgatgcaccggacaggcctctacaactactatgacgacgagaaggagaagctgcagctggtggagatgcccttggcccataagctctccagcctcatcatcctcatgccccaccacgtagaaccgctcgagcgcctggagaagttgctgaccaaggagcaactaaagacctggatggggaagatgcagaagaaggctgttgccatctccctgcccaagggagtggtggaggtgacccatgacctgcagaaacatctggccggactgggcctgactgaggccatcgacaagaacaaggcagacttatcgcgcatgtctggcaagaaggatctgtacctggccagtgtgttccacgccactgccttcgagtgggacacagagggcaacccctttgaccaggacatctacgggcgtgaggagctgcgcagccccaagctgttctatgccgaccaccccttcatcttcctggtgcgagataatcagagcggctccttgctgttcattggccgcctggtccggcccaagggagacaagatgcgagacgagttgtagagtccaagagtggtcgtggcgtggcatggcgggaagtagccagaggttcctgagacacatgggtgctattgtggggggagggggaggcaccaaccctggatagtccacgggtgggggggggttggcagtgcagatcggaattcccataggtctgagtaggtatttttagacaagagtccactccgttagacatggagcccagacactatgagaccaaattcaggggtgtcacagccattctagccctgccccacaagttttatatccaatctagcctcaacagtcaatcagtgttcatattcgtggccaagcattctgtctgtgagacaatcgagttgggtgggggtagggcggcctagcctctctgtcaccatgccctgagccctcggttttcctgttcacctctgattccctttaaccacaaaactaggagcctgtggtcccagaactgcccacccttaaaatcgattctttgccgcagcagtgggagttggggagaccatgcataggagggctccttggcatatccggccctagagccattacattacattgacaactcaactttgcttctgttttctccctttttgagtttttcaaggaatgggggtttggggaaggggaagcctttattgctttcaaaacaagaacagtttgtcaattttttttgaataaaccttttccaatg

SEQ ID NO: 3801 - DNA, 2305 bp, Rattus norvegicus
ctactggaaagcactgggaagagctgcaccggatagacatgaatgaggacaaagacaagagagactctatccagatgagtatgaagggatgccggacgaataacgggtttgtccaaaatgaagacatccaggagcaggacccagactccagggacactccacagtccaacgctgttagtatccctgctccagaggagcctcaactaaaggtggtgcggccctatgcagggatgcccaaggaggtgctgttccagttctctggccaggctcgctaccgggtgcctcgggagatcctcttctggctcaccgtggtctccgtgttcctgctcatcggagccaccatagccatcatcatcatctctccaaaatgccttgactggtggcaggcaggtcccatgtaccagatctacccgaggtcttttaaggacagtgacaaggatgggaatggagacctgaaaggtatccaagagaagctggactacatcactgctttaaatataaagaccatttggatcacttccttttataaatcacctttgaaagattttagatatgctgttgaagatttcaaagaaattgaccctattttcggaacaatgaaagattttgagaatttggttgctgcggtccatgacaaaggtttaaaattaataattgacttcataccaaaccacaccagtgacaaacatccttggttccaatcgagtaggacacggagcgggaaatacactgattattacatctggcacaactgtacccacgccaacggtgtaaccacccctcccaacaactggctgagcgtgtatggaaactccagctggcagtttgatgaagaacgaaagcaatgttattttcaccagtttttgaaagagcagccggatcttaatttccgaaatcctgctgttcaagaagaaataaaggaaataataaagttctggctctcaaagggtgttgatgggtttagtttcgatgcagttaaatttcttctggaagcaaaggacctgagaaatgaaatccaagtaaatacatcccaaattccggacacagtgacccgctactcagaactgtaccacgacttcaccactacccaggtgggaatgcatgaccttgtccgggacttccggcagaccatgaaccagttcagccgggagcctggcagataccggttcatggggacggaggtgtcagctgagagcaccgagaggaccatggtgtactatggcctgtcatttatccaggaagctgacttccctttcaacaagtacttagccacactagacactctttccgggcatactgtgtacgaagctatcacatcctggatggaaaacatgccggaaggaaaatggcccaactggatgattggcggaccagagacttctcggctgacttctcgagtagggagcgagtatgtcaatgccatgaacatgcttctgttcacactcccaggaacccccataacttactatggggaagaaatagggatgggagatatttccattacaaacctcaacgagcgctatgacactaacgcccttctctccaagtcaccgatgcagtgggacaatagttcaaatgcggggtttactgaggccaaccacacctggctccccacaaactctgactaccacacagtgaatgtggatgtccaaaaaacccagccgagctcagcactgaggctatatcaggatctgagtctactccatgccagagagctgcttctcagcagaggctggttttgccttttgagggacgacaatcactctgttgtgtacaccagggagctggatggcatagataaagtcttccttgtggttctgaattttggagaatcatcaactgtgctaaatctacaggaaactatttcagatgttcctacaaaactgagaataagattaagtaccaatccagcctccaaaggcagtgatgttgatacccatgccgtttctctggagaagggagaggggctcatcttggaacacagcatgaagactctcctccatcaccagaaagctttcagagacaaatgttttatttccaaccgtgcatgctactccagcgtgctggaccttctgtatagctcgtgctaggcagctctgtaagaggtggccaccctgcgtctggtatgcttgccatcacacatgcaagggcctcaggaatggcatcagttcttagatatttctgtagcacgaatgcattgttttaggtaagattctcaaatgtttggaaggacaataaaatgtttaaaagattacccccaaaaaaaaaaaaaaaaaaaaaaaaaaaaaaaaaaaaaaaaaaaaaa

SEQ ID NO: 3802 - DNA, 1176 bp, Rattus norvegicus
cggtcccggaagccggaacccgtagcttgtgggtctttggtctgaagaccatgaacgcggcggttggccttcggcgccgcgcgcgattgtcgcgcctcgtgtccttcagcgcgagccaccggctgcacagcccatctctgagtgctgaggagaacttgaaagtgtttgggaaatgcaacaatccgaatggccatgggcacaactataaagttgtggtgacaattcatggagagatcgatccggttacaggaatggttatgaatttgactgacctcaaagaatacatggaggaggccattatgaagccccttgatcacaagaacctggatctggatgtgccatactttgcagatgttgtaagcacgacagaaaatgtagctgtctatatctgggagaacctgcagagacttcttccagtgggagctctctataaagtaaaagtgtatgaaactgacaacaacattgtggtctacaaaggagaatagatcttaggtttaatattgtagaaaagctaatttcttttcttactagaaaaagctctttgtccttttaaagtacacagcagtcatcacctacccgtgtctccatgttgtgttctggtgtgcctgagcgttaaagggattgtgaggtctgtatgtaaatgcattaagaagcaaattcgaagtgcatcctgagtgtattcttggtgagaaagcaggggagaactgaggattgaagcccgggcctcacacatgtgaaacatatactctgctccgacatgcatcccagtccgccaaggccgtttagaggatctttacctagagatagagattgttttatcttcagctggagagacagctcagtggttaggagcactgactgcttctccagaggtcctgagttcaaatccaccagacggtggtggctcacaaccatctgtaatgggatccgatgctctcttctggtgtgtaggtgtacatacagacaaagcattcctacatttaagaaaatacataaataagtttcaaaaattatttcatctggggctggggatttagctcagtggtagagcgcttacctaggaagcgcaaggccctgggttcggtccccagctccgaaaaaaagaaccaaaaaaaaaaaaattatttcatctgagcaaaatgttttgatgtggaattatgtaaaggtaaaataaac

SEQ ID NO: 3803 - DNA, 2504 bp, Rattus norvegicus
ttaaaagtttggcgtgttgaaagtaagcattactcagctggcaatagagacagaaccaggggactggtgcttctgtggacttggccatttgcacagcacaagcagtgatggataactcctccgtctgttccccaaatgcaactttctgcgaaggtgattcctgcctagtaactgaaagcaacttcaatgccattctcagcacagtgatgagcaccgtgctcaccattcttctagccatggtgatgttttctatggggtgcaatgtggaaatcaacaagttcctaggacacataaagcggccatggggcatcttcgtgggcttcctctgtcagtttggaatcatgcctctcacaggatttatcctgtctgtggcctctggcatccttcctgtgcaggctgtggtggtgctaattatgggttgctgccctggaggaactggctccaatatcctggcctattggatagatggtgacatggacctcagtgttagcatgaccacttgctccacactgcttgctcttggaatgatgcccctttgcctcttcatctataccaagatgtgggttgactcaggaacgattgtgatcccctacgatagcattggcatttctctggttgcgcttgttattcctgtttccattggaatgtttgtaaatcacaaatggccccaaaaagcgaagattatacttaaaattggatccatcgcaggtgcaattctcattgtgctcatagctgtggttggaggaatactgtaccaaagtgcctggatcattgaacccaaactatggattataggaacaatatttcctatagctggctacagccttggtttcttcctggctagactagctggtcaaccctggtacaggtgccgaacagttgccttggaaactggaatgcagaacactcaactgtgttccaccattgtacaactctcctttagccctgaggatctcaaccttgtgttcaccttcccactcatctatactgttttccagctcgtctttgcagcaataatattaggaatgtatgtcacatacaagaaatgtcatggaaaaaatgatgctgagtttctagagaaaacagacaatgatatggaccccatgccatcattccaggagacaaacaagggatttcaaccagatgagaaatagacactaaggaggcaaaagaagaaagcttctggaacaacattcattaaacgaaaactaaaattatttcttttggtggaataatcagcagaaaaacaaatttaaaagttaaattcaaatttaaattattgggtttttttgtataaagggactagtgatccattcttttgtgtgacaaaggggtgtgtgtgtgtgtgtgtgtgtgtgtgtgtgtgtgtgcgcgcgcgcgcacgtgcgcgcgcacgtgcatgtgtgtttacaggagtcatttttctgtatccatggtcagattggtcacaagatattccttgattccaaattcacagaagcttaagcctcttttataaaaaggcaaagtgtttgtattaatctcctatatacttcaaatcaatattatcttactaaaatatttaacatgatgtaaatgttgtgtaaatagttgtccactgtattgtttagaaaatgattgttttatgtttagtacagatatcatttttcaatattttggccatagttaaaatcatagatgtcaaacatctttgggaggccaaagacatgtacatagaatgtatagatagatagatagatagatagatagatagatagatagatagatagatagatagatgatagacagacagaagataggcagacagagagatagctgattatcattaatatattatcagaaaacatctatagacctaacttgatataggtcaaacttgaaactttgtcatatgtaagctgaattcagagttaaatactttggtatgtaaaaatatagcatattactactgtaaaatgattttttcttgagtgcttatgattgtaagaagattgatgtgaatgaattttaattatgaattttaaatttttgcaacatatttacttgtgattttggactatactctggcaaatgtctatatttatattttagaaaagtagcttcaaatgacattctagaagtagaaatgagagaaagcattactaattaattcaataacaaattagaattggattaacttatctttttttttatccattcgcatacctctaggatccattgatactcattttatctttccagaaatagggctaattcaatacagtttaaatttgacaataatttttggaactctggagaggtttattcaaatatgacctgtatgaagcaggtccaaatgggccaatatgatagctattcagctcataggaggtgccataccagccaccacgagcaggaagatgtcagaagttacaaaggaaaaaaggtatcagtctagaaaatgacaatggagagacaaataatacaatgacaaataatacaatggagagacaaagaagcataaa

SEQ ID NO: 3804 - DNA, 2021 bp, Rattus norvegicus
ctgaaatctaagcctctagaaggactagaatctggatgtcttacctgcaaacatggacagatatgtacacagtcccatcttggagaacctgaatctttttagaagaaagaaggccaccttggctgggagtgtctggaggataccatgctttgcaaaagcagatgacctgctagcaactgaccatgctgaccactgtctggaactggactgagtcacagaaaggcgaatggcttcatcttataaaatgtctgaacaaagcacaatttctgagcacattttgcagaaaacatgtgatcacctgatcttgactgaccgttctggattaaaggcagaatcagcagcagaggaaatgaagcagactgccgagaaccaggggaatacagtgcactgggcagctctcctgatcttcgcggtaataatccccaccattggcgggaacatcctggttattctggctgtttcactggagaaaaggctgcagtacgctaccaactactttctaatgtccttggcggtggctgatttgctggttggattgtttgtgatgccgattgctctcttaacaatcatgtttgaggctacatggcccctcccactggccctgtgtcctgcctggttattccttgatgttctcttttcaactgcctccatcatgcatctctgtgccatttccctggatcgctatatagccatcaaaaagccaattcaggccaatcagtgcaattcccggactactgcattcgtcaagattacggtggtatggttaatttcaataggcatcgccatcccagtccctattaaaggaatagaggctgatgtggtcaacgcacacaacatcacctgtgagctgacaaaggaccgctttggcagtttcatgctctttgggtcactggctgctttctttgcacctctcaccatcatgatagtcacctactttctcaccattcacgctttgcggaagaaagcttacttggtcagaaacaggccacctcaacgcctaacacggtggactgtgtccacagttctccaaagggaagactcatccttttcatcaccagaaaagatggtgatgctggatggctctcacaaggataaaattctacctaactcaactgatgagacactgatgagaagaatgtcctcagcaggaaaaaaaccagcccagaccatttctaatgaacagagagcctcaaaggtccttggaattgtgtttctcttctttctgcttatgtggtgcccctttttcattacaaacgtaactttagctctgtgtgattcctgcaaccagactactctcaaaacactcctgcagatatttgtgtgggtaggctacgtttcctcgggagtgaatcctttgatctataccctcttcaataagacatttcgggaagcatttggcaggtacatcacctgcaattaccaggccacaaagtcagtaaaagtgcttagaaagtgttctagtacactctattttgggaattcaatggtagaaaactctaaatttttcacaaaacatggaattcgaaatgggatcaaccctgccatgtaccagagcccagtaaggctccgaagttcaaccattcagtcttcatccatcattctcctcaatacatttctcactgaaaacgatggtgacaaagtagaagaccaagtcagctacatatagtggaatggggcagccctcatctgactgagggaggggatgaggaggacgcaagcaaaccaaggaaaaggcaagagtgaagcactaaggttgtccagtttccttatctaaacaaactcaacgcacgggtatagtagttccgtatggctacaaacaaaagcattccctactctggtattcaaatggaacaaaattaaataagtggatatacttcagtctttaaaaagaaaagaaggggttggggatttagctcagtggtagagagtttgcctagtaagtgcaaggccctgggttcggttctcagctccagaaaaaaaaaaaataaaaaaaaaaaataaataaaaaaaaaaaaaaaaaa

SEQ ID NO: 3805 - DNA, 2011 bp, Rattus norvegicus
ggcacgaggcggcggcggcgcctggaggggaccagtgcggcggggagatgacggggacctaaagaggaacgaacaccgggagaggccgccaagtgcggcctgaggacaggcgcgcctgtcgactcagcgccaaacagggagagcccattacgtgactctgtcccgagggcctgggctcccagcccttgtactgcgcaaaactgggcggtgagagccggctgccggcgcgctgttgaactttgttttctctagagcgtggacctcggagccctccaggcagctgcttgccttgaaaaatgctggaggctgggcgggggcccaggcccgggaacctgttcttcctgtttcctgcctcagtcccagtagctggtccaggcctgtgcacatgcgagtgaagaactggaacggacgctgagcatccaagagcacctgctgcagcacctgctgtcacaccaagagcaggagctgatcgggtccagggcaatggcagcaggcctggactcctggaatagtaccatcaatggcacctgggagggggacgaactgggttacaaatgtcgcttcaacgaggacttcaagtatgtgctgctgcccgtgtcctatggcgtggtgtgcgtgctcgggctgtgcctgaacgtcgtggccctctacatcttcctgtgccgcctcaagacctggaacgcctccaccacctacatgtttcacctggcagtttctgactctctctacgcagcctccctgccgctgctggtttattactacgcccagggtgaccactggccatttagcacagtgctctgcaagctggtgcgtttccttttctacactaacctctactgcagcatcctcttcctcacctgcatcagcgtgcaccggtgcctgggggtcctgcgccctctgcactccctgagctggggccatgcccgctatgcccgccgagtggctgcggttgtgtgggtgctagtgctggcctgccaggcacccgtgctctactttgtcaccaccagcgtgagagggacccgaatcacctgccacgacacctcggcccgagagctctttagccattttgtggcttacagctctgtcatgctgggtctgctttttgctgtgcccttttccatcatcctggtctgttacgtgctcatggcccgacggctgctcaaaccggcttatgggaccacaggtctgcctcgggccaagcgcaagtctgtgcgcaccatcgccttagtactggccgtcttcgccctctgcttcctgcctttccacgtcacccgcaccctctattactccttccgatcacttgacctcagttgccacaccctcaacgccatcaacatggcgtataagatcacccggccactggccagcgccaacagttgccttgaccctgtgctctacttcctggcagggcagagactggtccgctttgcccgagatgccaagcccgccacagagcctacacccagcccacaggctcgtcgcaagctggggctgcacaggcctaacagaactgacactgtgaggaaagatttgtcgatcagcagtgatgactcaagaaggacagagtccacaccagctggaagtgagactaaggacattcgtctatagcagctcagtcaggtgtcagttcatgtaggggagagctgtaggggaccaaagcttgttcaaaggggctgatatcctctgatatgatatcaacggctctcatttggcagggactcaggatactcatcctgtggtcccaagagtgacaggaccccaaagtccccaatcatttgtatgtgtgagttggggaatcgtatctaaggcaacgccacctgactcccatgcaaacagctgccattcctgccaaggtacctaggccgagcttcagcctcttaaatccaagggagaagcaggcccagggagaacacagcagagtccagactagctacctggattagaagtagaatcgcggggttggggatttagctcagcggtagagcgccctgggttcagtccccagctccgg

SEQ ID NO: 3806 - DNA, 3427 bp, Rattus norvegicus
ggaggggaggaagatgccggctgagctgctgctgctgctgatagtcgccttcgccaaccccagctgccaggtgctgtcatcactgcgcatggctgcaatcctggacgaccagaccgtgtgtggccgtggtgagcgtctggccctggccctggcccgagagcagatcaatgggatcatcgaggtcccagccaaggcccgagtggaagtagacatctttgagctgcaacgggacagccagtacgagactacggacaccatgtgtcagatcctgcccaagggggttgtgtctgtcttgggaccctcctccagcccagcttctgcctccaccgtgagccatatctgtggggagaaggagattccccacatcaaggtaggccctgaggagacaccccgccttcagtacctccgctttgcatctgtcagcctgtatcccagtaatgaagatgtcagcctggcagtctcccggatcctcaagtcctttaactacccctccgctagcctcatctgcgccaaagctgagtgcctgctgcggttagaagaactggtgcgaggcttcctcatctccaaggagacactgtccgtgaggatgcttgatgacagccgggaccccacgccgctactcaaggagatccgagatgacaaagtgtccaccatcatcatcgatgccaacgcgtccatctcccaccttgtcctccgtaaggcttcggagctgggaatgacctcagcgttttacaagtacatcctcaccaccatggacttccccatcctgcatctggacggtatcgtagaggactcctccaacatcttgggcttttccatgttcaacacctcccatcccttctacccggagtttgtgcgcagcctcaacatgtcctggagggagaactgcgaagccagcacctaccctggccctgcgctgtcggcagccctgatgtttgatgccgtgcatgtggtggtaagcgctgtccgagagctgaaccggagccaggagattggtgtcaagccactggcttgcacttcggccaacatctggccccatgggaccagcctcatgaactacctgcgcatggtagagtatgacgggctgactgggcgggttgagttcaacagcaaagggcagaggaccaactacacactgcgcatcctggagaagtcccgccagggccaccgtgagataggggtgtggtactctaaccggaccctggccatgaatgctaccaccctggacatcaacctgtcacagactctagccaacaagactctggtggtcacaacaatcctggagaacccgtatgtcatgcgccggcccaacttccaggccctgtcagggaacgagcgctttgagggcttctgcgtggacatgcttcgggagctggccgagctgctgcgcttccggtatcgcctgcggttggtggaggacggactgtacggggcacctgagcccaatggttcctggacaggaatggttggcgagctcatcaaccggaaggcagacctggctgtggcagccttcaccatcaccgcggagagagagaaggtcatcgacttctccaagccattcatgaccctggggatcagcatcctctacagggtgcacatgggccgcaagcctggctacttctccttcctggaccctttctcccctgccgtgtggctcttcatgcttcttgcctacctggctgtcagctgtgtcttgtttctggctgccaggctgagcccttatgagtggtataaccctcacccgtgtcttcgggcgcgtccccatatcctggagaaccagtacacgctgggtaacagcctttggttccctgtgggtggcttcatgcagcagggctcggagatcatgccccgggcgctgtccacacgctgtgtcagcggagtctggtgggccttcaccttgatcatcatctcctcctacacggccaacctggctgccttcctcacggtgcagcgcatggaggtgccggtggagtctgcagacgacttggcggatcagaccaacattgagtacggcactatccacgctggctccaccatgaccttctttcagaactcacggtaccagacgtaccagcggatgtggaattacatgcagtcgaagcagcccagcgtgttcgtcaagagcacagaggaggggatcgcccgtgtcctcaactcacgttacgccttcctgctggagtccaccatgaacgagtaccacaggcgcctcaattgcaacctcacccagatcgggggcctcctcgacaccaagggctacggcatcggcatgccgctgggctccccattccgggatgagatcacgctggccatcctgcagctccaggagaacaacaggctggagatcctgaagcgcaagtggtgggagggcggccggtgccccaaggaggaggaccacagggccaaaggtttgggcatggagaacattggcggtatttttgtcgtgctgatctgtggcctcatcattgctgtcttcgtggcggtcatggaattcatctggtccacgcggaggtcagcggagtctgaggaggtgtcggtgtgccaggagatgctgcaggagctgcgccacgccgtgtcttgccgcaagacctcgcgttcccgccggcgccggcgccctggcggcccgagccgggccctgctgtcgctgcgcgcggtccgcgagatgcgactcagcggcggcaggctctactcggccggcgcgggcggggacgcgggcgcgcacgggggtccgcagcgcctcctgaacgaccccgggcctcctgggggaccccggccccaggctcccacgccctgcacgcacgtgcgcgtctgccaggagtgcaggcgcatccaggcgctgcgagcttcaggggccggggcgcccccgcgtggcctgggcactccggccgaggccaccagcccgcctcggccgcggcctggacccactggaccccgcgagctgactgagcatgaatgaccgtggacggggccgggcgtgcgccccgactgactgcagggacgcgatgcgccccaggcggacaggacgccgcgattttgccttcagtttctggtgaagtccaagcccggctccggagcaggcctgcgcctcctagtggactccagcgagggtgtcgcggacgcccgcattccatcccgcgccgcgggcgggaggagcgcagagaccgaggactcttaagggccgtggactgtgagggccgctcctggcgttggaaagcggtccgcggggaggaccccaacctgggactgcccagatgtcccaagacttgacacggctctccacacttctggaggtcgagagggcctctggacatgtgggtgtcccctggtgcccctctcttctttctctcttttttggggggagaaacctcagaatttctatgagacgcccccaggagagggtctcttgggcccctatatctccccctgccac

SEQ ID NO: 3807 - DNA, 2508 bp, Rattus norvegicus
gaattcggcacgagaaagaagccagatccagagagatagcctgtacttggaccagactgcagagcttaaaaacagcccagctcaggttcaggtacccaggtgaccactcagcacgttgatcctcgcctttggtaccacgtacacagacctctcggccggaatctccagggatgaccagcccctccccgcgcatccagataatttccaccgactctgcggtacgctcacctcagcgcattcagattgtaacagaccagcagacaggacaaaagctccagatagtcaccgcagtggacgcctctggatcctctaaacagcagttcatcctaaccagcccagatggagctggaactgggaaggtgatcctggcttctccagagacatccagtgccaagcagctcatattcaccacctcagacaaccttgtccctggcaggatccagatcgtcacggattctgcttctgtggagcgattgctggggaaggcagacgtccagcggccccaggtggtggagtactgtgtggtctgtggtgacaaagcctctggccgacactatggggctgtcagttgtgaaggttgcaaaggtttcttcaaaaggagtgtgaggaagaatctgacctatagctgtcgtagcagccaagactgcatcatcaacaagcaccaccgcaaccgctgccagttctgccggctgaagaagtgcctggagatgggcatgaagatggagtctgtacagagtgaacggaagccctttgatgtgcaacgggagaaaccaagcaattgtgctgcttccactgagaagatctatatccggaaagacctgagaagtcctctgatagccactcccacatttgtggcagacaaagatggatcaagacagactggtcttcttgatccagggatgcttgtgaacatccaacagcctttgatacgtgaggatggtacagttcttttggccacggattccaaggctgaaacaagccaaggagctctaggtacactggcaaatgtagtgacctctctggccaacctgagtgaatctttgaacaatggtgatgcttcagaaatgcagccagaggaccagtctgcaagtgaaattacacgggcatttgacaccctagcgaaagcacttaataccacagatagtgcttcacctccaagcctggcagatgggatagatgctagtggaggagggagtatccatgtcatcagcagagatcagtcaacacccatcattgaagtcgaaggccctctcctttcagacacacatgtcacatttaagcttacaatgcctagtcctatgccagagtacctcaatgtacattacatctgcgagtctgcatcccgcctgcttttcctctccatgcactgggcaaggtcaatcccagccttccaggcacttggacaggactgcaataccagcctggtacgggcctgctggaatgagctcttcactcttggcctggcccagtgtgcccaggtcatgagtctctccaccatcctggcagccattgtcaaccacttacagaacagcatccaggaagataagctttctggtgaccggataaagcaagtcatggagcacatctggaagctgcaggagttctgtaacagcatggcaaaactggatatagacggtcatgagtacgcataccttaaagctatagttctctttagtcccgatcatccaggtttgacaggcacaagccagattgagaaatttcaggagaaggcacagatggaattacaagactatgtgcagaaaacctactcagaagacacatacagattggccaggattcttgtccgcctgccagcactcaggcttatgagctccaatataacagaagaacttttttttactggtctcattggcaatgtttcaatagacagcataattccctacatcctaaagatggagacagcagaatataatggccagatcaccggagccagtctatagtgcacagccaacagctgccaacagtgggatgcctcctaggactgtgcaggtgcgagggaagggagtgtagcagtgtcttggtgtgcacaggtgttcagtgtgttagcactctctgtcatctcagacaatagcaactgaagatgagtagaactctttcctgccctaagaaacgttttcacaccttttggtgaagcagattttggaacaatcttttaattcaatttgtatttagaaattctcaaaggcaaaaaacaatactgaagttttataatgtcagagactagtattaaaagaacctaagaacagtatgtgtaaatacatttaaaaaaaaagtccttggaattaatagctactaattaccagggtaatgttagcacttgctaagcacttatcaaaccttaacatcttacctgtggacagggcaaatggaaactgcgctctttgtcaaatgctatgattctgtgacacaggagacaatcgtccacttatagcggccgcttctagctgtgtgcatgtagtgctgcctaatctgtgtggtctgcatgtg

SEQ ID NO: 3808 - DNA, 9136 bp, Rattus norvegicus
agagacggcagcagcgtcccgtccagttcgcctgccgcgctcgcttgtcgtctgcctccagatcccagacagagaagagccatggaggaggtggtgatagccggtatgtccgggaaattgcccgagtcagagaacctgcaggagttctgggccaacctcattggcggtgtggacatggtcacagacgatgacaggaggtggaaggctgggctctatgggttgcctaagcggtctggaaagctgaaggatctgtccaagttcgacgcctccttttttggggtccaccccaagcaggcacacacaatggacccgcagctccggctgctgctggaagtcagctatgaagctattgtggacggaggtatcaacccggcctcactccgaggaacaaacactggtgtctgggtgggtgtgagtggttccgaggcgtcggaggccctgagcagagatcctgagactcttctgggctacagcatggtgggctgccagagagcaatgatggccaaccggctctctttcttcttcgacttcaaaggacccagcattgccctggacacagcctgctcctctagcctactggcactacagaatgcctatcaggctatccgcagtggggagtgccctgctgccattgtgggcgggatcaacctgctgctaaagcctaacacctctgtgcagttcatgaagctaggcatgctcagccccgatggcacctgcagatcctttgatgattcagggaacgggtattgccgtgctgaggctgtcgtggcagttctgctgactaagaagtccttggctcggcgagtctatgccactattctgaatgccgggacgaacacagatggctgcaaggagcaaggcgtgacattcccctctggagaagcccaggaacaactcatccgttctctgtatcagccgggcggtgtggcccccgagtctcttgaatatattgaagcccatggcacgggcaccaaggtgggggacccccaggaactgaacggcattactcggtccctgtgtgctttccgccagagccctttgttaattggctccaccaaatccaacatgggacaccctgagcctgcctcggggcttgcagccctgaccaaggtgctgttatccctagaaaatggggtttgggcccccaacctgcatttccacaaccccaaccctgaaatcccagcacttcttgatgggcggctgcaggtggtcgataggcccctgcctgttcgtggtggcatcgtgggcatcaactcgtttggcttcggaggtgccaatgttcacgtcatcctccagcccaacacacagcaggccccagcacctgccccacatgctgccctaccgcatttgctgcatgccagtggacggaccatggaggcagtgcagggcctgctggaacagggccgccagcacagtcaggacttggcctttgtgagcatgctcaatgacattgcagcaacccctacagcagccatgcccttcagaggttacactgtgttaggtgttgagggccatgtccaggaagtgcagcaagtgcctgccagccagcgcccactctggttcatctgctcagggatgggcacacagtggcgtggaatggggctgagccttatgcgcctggacagtttccgtgagtccatcctgcgctctgatgaggctctgaagcccttgggagtcaaagtgtcagacctgctgctgagcactgatgagcacacctttgatgacatcgtgcattcctttgtgagcctcaccgccatccagattgccctcatcgacctgctgacgtctatggggctgaaacctgatggcatcattgggcactccttgggagaggttgcctgtggctatgcagatggctgtctctcccagagagaggctgtgcttgcagcctactggagaggccagtgcattaaggatgccaaccttccggctggatccatggcagctgttggtttgtcctgggaagaatgtaaacaacgctgccctcctggtgtggtgcctgcctgccacaactctgaggacactgtgaccatctctggacctcaggctgcagtgaatgaatttgtggagcagctaaagcaagagggcgtgtttgccaaggaggtgcgaacaggtggcctggccttccactcctacttcatggaaggaattgcccccacgctgctgcaggctctcaagaaggtgatccgggagccacggccacgctcagcacgctggctcagcacctctatccctgaggcccagtggcagagcagcctggcccgcacatcttctgctgagtacaacgtcaacaacctggtgagccctgtgctcttccaggaagcactgtggcacgtccccgagcacgccgtggtgctggagattgcaccccatgcactgttgcaggctgtcctgaagcgaggcgtgaagcctagctgcaccatcatccccttgatgaagagggaccataaagataacttggagttcttcctcaccaacctcggcaaggtgcacctcacaggcatcgacatcaaccctaatgccttgttcccacctgtggaattcccggttccccgagggactcctctcatctcccctcacatcaagtgggaccacagtcagacttgggatatcccagttgctgaagacttccccaacggttccagctcctcctcagctacagtctacaacattgacgccagttccgagtcatctgaccactacctggtcgaccactgcattgacggccgtgtcctcttccctggcactggctacctgtacctggtgtggaagacactggctcgaagcctgagcttgtccctagaagagacccctgtggtgtttgagaacgtgacatttcatcaggccaccatcctgcccaggacaggaaccgtgcctctggaggtgcggctgctagaggcctcacatgcatttgaggtgtctgacagtggcaacctgatagtgagcgggaaagtgtaccagtgggaagaccctgactccaagttattcgaccacccagaagtcccgatccccgccgagtccgagtctgtctcccgcttgacgcagggagaagtatacaaggagctgcggctacgtggctatgactatggccctcatttccagggcgtctatgaggccaccctcgaaggtgagcaaggcaagctgctctggaaagacaactgggtgaccttcatggacacaatgctgcagatatccatcctgggcttcagcaagcagagtctgcagctacccacccgtgtgactgccatctatattgaccctgcaacccacctgcagaaggtgtacatgctggagggagacactcaagtggctgacgtgaccacgagccgctgtctgggcgtgaccgtctctggtggtgtctacatttcgagactacagacaacagcaacctcacggcggcagcaggaacagctggtccccaccctggagaagtttgtcttcacaccccatgtggagcctgagtgcctgtctgagagtgctatcctgcagaaagagctgcagctgtgcaagggtctggcaaaggctctgcagaccaaggccacccagcaagggctgaagatgacagtgcctgggctagaggaccttccccagcatggactgcctcgactcttggctgctgcctgccagctgcagctcaacgggaacctgcaactggagttaggtgaggtactggctcgagagaggctcctgctgccagaagaccctctgatcagtggcctccttaactcccaggccctcaaggcctgcatagacacagccctggagaacctgtctactctcaagatgaaggtggtggaggtgctggctggagaaggccacttgtattcccacatctcagcactgctcaacacccagcctatgctgcaactggagtatacagccaccgaccggcacccccaggccctgaaggatgttcagaccaagctgcagcagcatgatgtagcacagggccagtgggacccttctggtcctgctcctaccaacctgggtgctcttgaccttgtggtgtgcaactgtgcgttagccaccctgggggatccagccctggccctggacaacatggtagctgccctcaaggatggtggtttcctgctaatgcacacagtgctcaaaggacatgcccttggggaaaccctggcctgcctcccttctgaggtgcagcctgggcccagcttcttaagccaggaagagtgggagagcctgttctcaaggaaggcactgcacctggtgggccttaaaaagtcattctacggtactgcgctgttcctgtgccgccgtctcagcccacaggacaagcccatcttcctgcctgtggaggatactagtttccagtgggtggactctctgaagagcattctggccacatcctcctcccagcctgtgtggctaacagccatgaactgccccacctcaggtgtggtaggcttggtgaactgtctccgaaaagagccgggtggacaccggattcggtgtatcctgctgtccaacctcagcagcacatctcacgtccccaagctggaccctggctcttcagagctacagaaggtgctagagagtgatctggtgatgaacgtgtacagggacggtgcctggggtgccttccgtcacttccagttagagcaggacaagcccgaggagcagacagcacatgcctttgtaaacgtccttacccgaggggaccttgcctccatccgctgggtctcttctcccctgaaacacatgcagccgccctcgagctcaggagcacagctctgcactgtctactatgcctcactgaacttccgagatatcatgctggccacgggcaagctgtcccctgatgccattccaggtaaatgggccagccgggactgcatgcttggcatggagttctcaggccgtgataagtgcggccggcgtgtgatggggctggtacccgcagaaggcctggccacctcagtcctgttatcacccgacttcctctgggatgtaccctctagctggaccctggaggaggcggcttctgtgcctgttgtctacaccaccgcctactactccttagtagtgcgtggtcgtattcagcacggggaaactgtgctcattcactcgggctccggtggtgtgggccaagcggccatttccattgcccttagcctgggctgccgagtcttcaccactgtgggctccgctgagaagcgagcttacctccaggccagattccctcagctggatgacaccagctttgctaactctcgagacacatcgtttgagcagcatgtgttactgcacacaggtggcaaaggggtggacctggtcctcaactccctggcagaagagaagctgcaggccagtgtgcggtgcttggctcagcatggccgcttcctagagatcggcaaatttgatctttctaacaaccaccctctgggcatggccatcttcttgaagaacgtcactttccatgggatcctgctggatgcactttttgagggggccaacgacagctggcgggaggtggcagagctgctgaaggccggcatccgtgatggggttgtgaagcctctcaagtgtacagtgtttcccaaggcccaggtggaggacgccttccgatacatggctcaaggaaaacatattggcaaagtccttgtccaggtacgggaggaggagcccgaggctatgctgccaggggctcagcccaccctgatttccgccatctccaagaccttctgcccagagcataagagttacatcatcactggtggcctaggtggctttggcctggaactggcccggtggcttgtgcttcgtggggcccaaaggcttgtactaacttcccgatctggaatccgcacaggctaccaagccaagcacgttcgggagtggaggcgccagggcatccatgtgctagtgtcgacaagcaatgtcagttcactggagggggcccgtgctctcatcgctgaagccacaaagcttgggcccgttggaggtgtcttcaacctggccatggttttaagggatgccatgctggagaaccagactccagaactcttccaggatgtcaacaagcccaagtacaatggcaccctgaaccttgacagggcgacccgggaagcctgtcctgagctggactactttgtggccttctcctctgtaagctgcgggcgtggtaatgctggccaatccaactatggcttcgccaactctaccatggagcgtatttgcgaacagcgccggcacgatggcctcccaggtcttgccgtgcaatggggtgccattggtgacgtgggcattatcttggaagcgatgggtaccaatgacacagtcgttggcggcacactgccacagcgcatctcctcctgcatggaggtgctggacctcttcctgaatcagccccacgcagtcctgagcagttttgtgctggttgagaagaaagctgtggcccatggtgatggtgaagcccagagggatctggtgaaagcagtggcacacatcctaggcatccgcgacctcgcagggattaacctggacagctcgctggcagacctcggcctggactcgctcatgggtgtggaagtgcgccagatcctggaacgtgaacatgatctggtgctacccattcgtgaagtacggcaactcacactgcggaagcttcaggaaatgtcctccaaggctggctcagacactgagttggcagcccccaagtccaagaatgatacatccctgaagcaggcccagctgaatctgagtatcctgctggtgaaccctgagggccctaccttaacacgactcaactcagtgcagagctctgagcggcctctgttcctggtgcaccccattgaaggttccatcactgtgttccacagcctggctgccaagctcagtgtgcccacctacggtctgcagtgcacccaagcggcccccctggacagcattccaaacctggctgcctactacattgattgcatcaagcaggtgcagcctgaggggccccaccgagtggctgggtattcttttggagcttgtgtagccttcgagatgtgctcccagctgcaggcccagcagggcccagcccccgcccacaacaacctcttcttgtttgatggctcacacacctacgtattggcgtacacccagagctaccgggcaaagctgaccccaggctgtgaggctgaggctgaagctgaagccatatgcttcttcattaagcagtttgttgatgcagagcatagcaaggtgctagaggccctgctaccactgaagagcctggaggaccgggttgctgctgctgtggacctcatcactagaagccaccagagcctggaccgccgtgacctgagctttgctgccgtgtccttctactacaagcttcgagccgccgaccagtataaacccaaggccaagtaccacggcaatgtgatcctgctgcgggccaagacaggtggcacctacggcgaggacttgggtgccgattacaacctgtcccaggtgtgtgatgggaaggtgtctgtgcacatcattgagggtgaccatcgtacgctgctggagggcaggggcctggagtctatcatcaacatcatccacagctccctggctgagcctcgagtgagtgtacgggagggctagacctgcctaccatgaagccacgacccacaccggccaccagagatgctccgatccccatcacaccctgagtgcagggactggggagggtcctgctggtgggaccccctcaccccagtggcccagcaccaccccctcccctggtggctgctacaaacaggaccatcacatgtgtcccagccacttagtggggttcccagagccactgacttggaggcaccctggtctgtgaagagtcagtggaggccagcaagagccaaactgagccttttctgccaagtgacatttgtcacactggttgtttctccattaaattctcatatttattgcattgctgggaaagaccgcccaccccagggttaactcattccagaacccctaaagtgggaaaagccatgtggggaaggctgctggctggagcccctttttgtcttagccctgtacccgctcactgcagggcagggtatggagagggctggttcccggggaacgaggaccccagcagacactgtagcccatggcccttggtccccagcactcccggctgcacccatgatgcagggcctaccagactctgcggaccgcaccgggcactcactgtatttgttttccaagattcaaattgctgcttgggttttgaatttactgcagctgtcagtgtaaagaaacatgtctgaactgtgtcctttttacaccaacctggtaaaaatgctcttgatgctgtcccgttgccacaattaaactgcacgtgagctctggcttccgttcagtctctttccagtcccagacctgagtccccagagcctccacagctcttacagtgagaatcaaattggcccactccttggaaggcgtggcattctgtcagagtaaaaggaaagtagagtgtgctgattcacgttcagcgtgtggggctggctagagaccttggcactgtagtgaacagaatgtgtccacctttaagtcaccctgaaggcatcaccatagctacagcctcacccaggggtagagaatagtactgtctacttgttgactacctggcagttggtgccagcccctatagaggaaaacagcagtgtgtggccactgtgagaagcatatccctggaaacaggtgaccagagcagagggctaatgcctacctgagtcacacaaaactgaccaggcttgagtgtccagaagagtctatcagaaggccacagcattcagtcctatccacagagagcagcagactaagttgtctccttgccagcttagaaaactgcagtgctggggtacaggtagggtgttcaggaggtccgggccccagtgattagtctaagactgaagcatctggttggctgtggtcccacctagaaaattcttaaagctcttgtcatgtacttcctgggaaggacctaccctgtctcaataatgtctctagctcgttggagtctactgactcaaacatttataaagtgtcctagaaaggcctgactcccctacaaggctgtgtgatccttcaaactcacatatgtgagccaataaaaccttgagactct

SEQ ID NO: 3809 - DNA, 436 bp, Rattus norvegicus
actttattttggactgtggtacggccaacaagaccactctgtatgcaaaagcccaacatggctgtaactggagatgaaactgatgaggagactgaccttgccccaagtcacatggctgctgccacaggtgacatgccaacttaccagatccgagctcctactactgctttgccacaaggtgtggtgatggctgcctcaccaggaagcctgcacagtccccagcaactagcagaagaagcaactcgcaagcgggagctgaggctgatgaaaaacagggaagctgctaaagaatgtcgacgtcgaaagaaagagtatgtcaagtgtcttgagagtcgagtcgcagtgctggaagttcagaacaagaagcttatagaggagcttgaaactttgaaagacatttgctctcccaaaacagattagtagaaatatttaacta

SEQ ID NO: 3810 - DNA, 1139 bp, Rattus norvegicus
agatttgaaccgccaccatgtcgagcaaaaaagcaaagaccaagaccaccaaaaagcgccctcagcgcgcaacgtccaacgtgttcgccatgtttgaccagtcccagatccaggagttcaaagaggccttcaacatgatcgaccagaaccgggacggcttcattgacaaggaggacctacacgacatgctcgcgtctctggggaagaaccccaccgacgcctacctggacgccatgatgaacgaggccccgggccgcatcaatttcaccatgttcctcaccatgtttggagagaagctgaacggcaccgacccagaggacgtcatcagaaacgccttcgcttgcttcgatgaggaagccacaggcaccatccaggaggattacctgagggagctgctgaccaccatgggtgaccgcttcacagatgaggaagtggatgagctgtacagggaggcccccatcgacaaaaagggcaatttcaactacatcgagttcacgcgcatcctcaagcacggagcgaaagacaaagatgactgaagaggctgcagctgacattcctgttgagtttccttattcacttcatgtctcagacacagcccccataggacctactgtgtgccactttgtgtccctcagacaccccctcccataggcctactgtgtgccgcttagtccctcagacaccccctcccataggcctactgtgtgccacttagtccctcagacaccccctcccataggcctactgtgtgccatttgtccctcagacaccccctcccataggacctactgtgtaccacttggtttctcagacagccccacccccaaacccccctaaggacctactgcgggccacttagtttcacagcctttcctttttttaatgtatttattccagaccctttctgccacttagcatgtgtataatcagactggaatggggacaatgttgtaattgtactgaaaatgagatgcaaataaaaaaatcaaccaatgtgaaagcccaggaaaatatatcggcatttctggttttgctggatttttttacatttttatataataaaaatgttattttgaaataaagattatgctgactcaaggtggagtataaaacaaaaaaaaaaaaaaaaaaaaaaaaaa

SEQ ID NO: 3811 - DNA, 333 bp, Rattus norvegicus
atggccctgtggatgcgcttcctgcccctgctggccctgctcgtcctctgggagcccaagcctgcccaggcttttgtcaaacagcacctttgtggtcctcacctggtggaggctctgtacctggtgtgtggggaacgtggtttcttctacacacccaagtcccgtcgtgaagtggaggacccgcaagtgccacaactggagctgggtggaggcccggaggccggggatcttcagaccttggcactggaggttgcccggcagaagcgtggcattgtggatcagtgctgcaccagcatctgctccctctaccaactggagaactactgcaactga

SEQ ID NO: 3812 - DNA, 333 bp, Rattus norvegicus
atggccctgtggatccgcttcctgcccctgctggccctgctcatcctctgggagccccgccctgcccaggcttttgtcaaacagcacctttgtggttctcacttggtggaagctctctacctggtgtgtggggagcgtggattcttctacacacccatgtcccgccgcgaagtggaggacccacaagtggcacaactggagctgggtggaggcccgggggccggtgaccttcagaccttggcactggaggtggcccggcagaagcgcggcatcgtggatcagtgctgcaccagcatctgctctctctaccaactggagaactactgcaactag

SEQ ID NO: 3813 - DNA, 700 bp, Rattus norvegicus
ggtctacggagaccggatccgaggtgccgccgccggacgggactctaagatgaagttatgggatgtcgtggctgtctgcctggtgttgctccacaccgcgtctgccttcccgctgcccgccggtaagaggcttctcgaagcgcccgccgaagaccactccctcggccaccgccgcgtgcccttcgcgctgaccagtgactccaatatgcccgaagattatcctgaccagtttgatgacgtcatggattttattcaagccaccatcaaaagactgaaaaggtcaccagataaacaagcggcggcacttcctcgaagagagaggaaccggcaagctgcagctgccagcccagagaattccagagggaaaggtcgcagaggccagaggggcaaaaatcgggggtgcgtcttaactgcaatacacttaaatgtcactgacttgggtttgggctacgaaaccaaggaggaactgatctttcgatattgtagcggttcctgtgaagcggccgagacaatgtacgacaaaatactaaaaaatctgtctcgaagtagaaggctaacaagtgacaaggtaggccaggcatgttgcaggccggtcgccttcgacgacgacctgtcgtttttagacgacagcctggtttaccatatcctaagaaagcattccgctaaacggtgtggatgtatctgaccctggctccagaga

SEQ ID NO: 3814 - DNA, 6469 bp, Rattus norvegicus
cggcccgccaggcagctccggccgtgcgcgcacgccgagccgccggagcccgggccgacccgtgccggagcagcatgcggagcccgcagccgctgctcctctggacacctcagcctgaggcctctccgtgagttacggggacaccatcccccaccagggcggaggctggaggccactgccaagcatggcgcccacctggagacccagcgtggtgtctgtggtgggtcctgtggggctcttccttgtactgctggccagagggtgcttggctgaagagccacccagatttatcagagagcccaaggatcagattggtgtgtcaggaggcgtggcctccttcgtgtgccaggccacaggtgaccctaagccacgggtgacctggaacaagaagggcaagaaagtgaactcacagcgctttgagaccattgactttgacgagagctcgggggccgtgctgaggatccagccacttcggacaccccgggatgagaacgtgtacgagtgtgtggcccagaactcggtgggggagatcacagttcatgcgaagctcaccgtcctgcgagaggaccagctgcctcctggcttccccaacattgacatgggcccccagttgaaggttgtagagcgcacacgcacagccaccatgctctgtgctgccagcggaaaccctgaccctgagatcacctggttcaaggacttcctgcctgtggaccccagtgccagcaatgggcggatcaagcagcttcggtcaggtgccctgcagattgagagcagcgaggagacagaccagggcaagtacgagtgtgtggccaccaacagcgctggggtgcgctactcatcacctgccaacctctacgtgcgagtccgccgtgtggccccccgcttctccatcctgcccatgagccacgagatcatgcccggtgggaatgtgaatatcacttgtgtggctgtgggctcacccatgccctacgtgaagtggatgcagggggcagaggacctgacgcctgaggatgacatgcccgtgggtcggaatgtcctcgaactcacggatgtcaaagactcagccaactatacttgtgtggccatgtccagcctgggagtgatcgaggccgttgctcagatcactgtaaaatctctccccaaagcccctgggactcccgtggtgacggagaacactgctaccagtatcactgtcacatgggactcaggcaatcctgaccctgtgtcctactacgtaattgagtataaatccaaaagccaggatgggccgtatcagatcaaagaagacatcaccaccacgcgctacagcatcggcggcctgagccccaactctgagtatgagatctgggtgtcagctgtcaactccatcggccagggcccccccagtgagtcggtggtgacccgcacaggcgagcaggcaccagccagtgctcccaggaatgttcaggcgcgcatgctcagtgccaccaccatgattgtgcagtgggaggagcccgtggagcccaatggcctgatccgtggctaccgcgtctactacaccatggagcccgagcatccggtgggcaactggcagaagcacaatgtggacgacagtcttctgaccactgtgggcagcctgctagaggatgagacctacactgtgagagtgctcgccttcacatcggtgggcgatgggccactgtcagaccccatccaggtcaagacccagcagggagtgcccggccagcccatgaacttgcgggctgaggccaagtcagagaccagcattgggctctcgtggagtgcaccacggcaggagagtgtcattaagtatgaactgctcttccgggagggcgaccgaggccgagaggtggggcgaaccttcgacccaaccacagcctttgtggtggaggacctcaagcccaatacggagtacgcgttccggctggcggctcgctcgccgcagggcctgggcgccttcaccgcggttgtgtgccagcgcacactgcaggccaaaccgtcagccccccctcaagacgttaagtgcaccagcttgcgctccacggccatattgatccttctggaagctttggagaaatggacggagtaccgtgtcaccgccgtggcttacacagaggtgggaccagggcccgagagctcgcccgtggtcgtccgcaccgatgaggacgtgcccagcgcgcccccgcggaaggtggaggcggaggcgctcaacgccacggctatccgagtgctgtggcgctcgcccacgcccggcaggcagcacgggcagatccgcggctaccaggtccactatgtgcgcatggagggcaccgaggcccgcgggccaccgcgcatcaaggacatcatgctggcggatgcccaggaaatggtgatcacaaacctccagcctgagactgcttactctatcacagtagccgcgtataccatgaaaggcgatggcgctcgcagcaaaccgaaggtggtggtgaccaagggagcagtgctgggccgccccaccctgtcggtgcagcagacccccgagggcagcctgctggcgcgctgggagccccccgcggacgcggctgaggacccagtgcttggctaccgcctgcagtttgggcgcgaagacgcggccccggccacgttggaactggcggcgtgggagcggcggttcgcggcgcctgcacacaagggcgccacctatgtgtttcggctggcggcgcggggccgcgcggggctgggcgaggaggcctcggcggcgctgagcatccctgaggacgctccgcgtggcttcccgcagatcctgggccccgcgggcaacgtgtccgcgggctccgtaatactgcgctggctgccacccgtgcccgccgagggcaacggcgccatcatcaagtacacggtgtccgtgcgggaggccggcaccccagggcccgcgacagagaccgaactggcggcggcggcccagccgggggccgagacagcgctcacactacaggggctgcggccggagacggcctacgagctgcgcgtgcgcgcgcacacgcgtcggggccccggccccttctcacccccgctgcgatacaggcttgcgcgggacccagtctcccccaagaacttcaaggtgaagatgatcatgaaaacttcagtgctgctaagctgggagttccctgacaactataactcacccacgccctacaagatccagtacaatggactcacactggacgtggatggccgcactaccaagaagctgatcacgcacctcaagccacacaccttctataacttcgtgctcaccaaccgtggcagcagcctgggaggcctgcagcagacggtcaccgccaggaccgccttcaacatgctcagtggcaagcctagtgtcgccccaaagcctgacaacgatggttccattgtggtctacctgcctgatggccagagtcccgtgacagtgcagaactacttcattgtgatggtcccacttcggaagtctcgtggtggccagttccctatcctactaggtagtccagaggacatggatctggaggagctcatccaggacctctcccggctgcagaggcgcagcctgcgccactcaagacagctggaggtgcctcggccttacatcgccgctcggttctccatcctgccagctgtcttccatcctgggaaccagaagcaatatggtggctttgacaacaggggcttggagccaggccaccgttatgtcctctttgtacttgctgtgctgcagaagaatgagcctacatttgcagccagtcccttctcagaccccttccaactggacaacccagacccgcagcccattgtggatggcgaggagggcctcatctgggtgatcgggcccgtgctggccgtggtcttcatcatctgcatcgtaattgccatcctgctgtacaagaacaagcctgacagcaaacgcaaggactcagagccccgcaccaaatgcttattgaacaatgcagacctcgccccccatcaccccaaggaccctgtggaaatgcgacgtatcaacttccagacgccaggtatgctcagccacccgcccattcccatcacagacatggctgaacacatggagagactcaaagccaacgacagcctcaagctctcccaggagtatgagtccatcgaccctggccagcagttcacttgggaacattcgaacctggaggccaacaagccaaagaaccgatacgccaatgtcatcgcctatgaccattcacgagtcatcctgcagcctttagaaggcatcatgggtagtgattacatcaatgccaactatgtggacggctatcggcggcagaacgcatacatcgccacgcaggggcccctgcctgagacctttggggacttctggcggatggtgtgggagcagcggtcagccactgtggtcatgatgacacggctggaggagaaatcacgggtcaaatgtgaccagtactggcctaaccgaggcaccgagacatacggcttcatccaggtcaccctactagatactatggagctggccaccttctgtgtcaggaccttttctctacacaagaatggctctagtgagaagcgtgaggtacgacattttcagttcacagcatggcctgaccacggggtacccgagtaccccacacccttcctggcgtttctgcgcagagtcaagacctgcaacccgcctgacgctggcccagttgtggtccactgcagcgcgggtgtggggcgtactggctgcttcattgtaattgatgccatgttggagcgcatcagaacagagaagacggtggatgtgtacggacacgtgacactcatgcggtcacagcgcaactacatggtgcagacagaggatcagtatagcttcatccacgaggcactgctggaggctgtgggctgtggcaataccgaggtccccgcgcgcagcctctacacctatatccagaagctggcccaggtggagcctggcgagcatgtcacaggaatggagcttgagttcaagaggcttgccagctccaaggcacacacttcgagattcatcactgccagcctgccttgcaacaagtttaagaaccgcctggtgaacatcctgccgtacgagagctcgcgtgtctgcctgcagcccattcgtggtgtcgagggctctgactacatcaatgccagcttcatcgacggctacagacagcagaaagcctacattgcaacgcagggtccactggcagagaccacagaggacttctggcgtgccctgtgggagaacaactccactattgtggtaatgctcaccaagctccgcgagatgggccgggagaagtgccaccagtactggccagctgaacgctctgcccgctaccagtactttgtggttgacccgatggcagagtataacatgccacagtacattctgcgtgagtttaaggtcacagatgcccgggatggccagtcccggaccgtccgacagttccagttcacggactggccagagcagggtgcacccaagtcaggggaaggcttcattgacttcatcggccaagtgcataagaccaaggagcagtttggccaggatggccccatctcggtgcactgtagtgctggagtgggcaggaccggagtattcatcactctgagcatcgtgctggagcgaatgcgctacgagggggtggtggacattttccagacagtgaaggtgcttcggacccagcggcctgccatggtgcagacagaggatgagtaccagttctgcttccaggcggcgttggaatacctgggcagctttgatcattatgcaacataagccatggccccgcccaacacctcgacccagctccaagtgccctgaatgtgagcccagccctcggtgctgggtgggaggcggcccagggaggaaacctcctctccctggagacaggcactgccttctgaagggcacattcctcattcccttctgactccaaaacgaggttccagggtggggggtagggtggagagtagaggagccactgctcccatagctggggtcacaagggacagaactctgctcccacacttccctgcctgcggaattccgaaaacaattctatttccaaagctacagaagagcacacagtctgacttgtaggtgggtgactgatgagaatgctgttatggtatcagacgtgtagtgtattgctaggaataagcctgtgaggatttgtactatgaggcatactcctagtagagaaccgaagtttcatcatgatgagatgtttgatgtggggtggggtgttgagggggttttttttgttcaagccaaaggtaactttattgattcatgaatctggaaagttcaagtacaggttttattccagaaaagaactgattctgagcacagtgtagtcagtgctccatcactctgggttgcccaaaaaaaagacttgcacaatgattccagttgacatgcaacatggacagaaacatttcacaaagccacacccatatatgaaggagg

SEQ ID NO: 3815 - DNA, 1832 bp, Rattus norvegicus
ctggtggggcctgatagagctggcagggttggctgggaggggcgtgtaggctgacacaggacactccaaccccccaaccccaagacctgtaaagctactgtcctactcatcactgggcagaactgaggcaccatgcacgggggccagggacctcagctcctcttgctgctgctggctacctgcctgggggcccagagccgcaaccaagaggagcggctgcttgcggacctgatgcgcaactacgacccccatctgcggccggctgagcgtgactcagatgtggttaatgtcagcctgaagcttaccttaaccaacctcatctcccttaatgagcgagaggaggccctcacgactaatgtctggatagaaatgcaatggtgcgactatcgcctacgctgggacccgaaagactacgaaggcctgtggatattgagggtgccatctaccatggtctggcagcccgatatcgtgctgggaaacaatgtggacggtgtcttcgaggtggcgctctactgcaatgtgctcgtgtcccctgatggttgtatctactggctgccgcctgccatcttccgctcctcctgctccatctctgtcacctacttccccttcgattggcagaactgctccctcgtcttccagtcccagacttacagcaccagcgagatcaacttgcagctgagccaggaggatgggcaagccattgagtggatcttcattgaccccgaggctttcacagagaatggggaatgggccatccggcatcgaccagccaaaatgctactggatcctgtgactccagcagaggaggcaggccaccagaaggtggtgttctacctgctcatccaacgcaagcccctcttctatgtcatcaacatcatcgtcccctgtgtgctcatctcctcagttgcgatcctcatctacttccttcctgccaaggcgggcggccagaagtgcacagtggccaccaacgtgctcctggcccagaccgtcttccttttcctcgtggctaagaaggtgcctgagacctcccaggcagtgccgctcatcagcaagtacctgaccttcctcatggtggtgaccatcctcatcgttgtgaactctgtggtcgtgctcaatgtgtccttgaggtccccacacacacactccatggcccggggggtccgcaaggtgtttttgaggctcctgccccagctgttacggatgcatgtgcatcctcgggctcctgctgctgtccaggatgcccggctgcgactccagaatggctcttcctcagggtggcccatcatgactcgagaggaaggggacctctgtttgcctcgaagcgaactcctctttaggcaaaggcagcgcaatggattggtgcaggcagtactggagaagttagagaatggtccagaaatgaggcagagccaggagttctgtggcagcctgaagcaagcctccccggccatccaggcctgtgtggatgcctgtaacctcatggcgcgtgcccgacaccagcaaagtcactttgacagtgggaatgaggagtggttgctggtgggccgagtgctggaccgagtctgtttcctagccatgctctccctcttcatctgcggcactgctggcatcttcctcatggcccactacaaccaggtgcctgacctgccattccctggagacccccgcccctacttgcctttgccagactgagccaaccaatcactcctgcgccctggagtcagccatgtgggtcatgctgtttatggagctgtattctctgttgatcctgatgggctcctggggagcaatcattcttgggagaagatagaggaataaaggaataggaataa

SEQ ID NO: 3816 - DNA, 4301 bp, Rattus norvegicus
ggcacgagaagtcggaccctcccaccctgctcacaccctccaagtggtccacggagttccgagactttctgaagatagccttggataagaacccagaaacccggcccagtgctgcgcagctgctgcagcatcccttcgtcagtacagtcaccagtaataaggcccttcgggagctggtggctgaggcgaaggctgaggtgatggaggagatcgaggacggcaaggaggacggcagggaggacggcagggaggatgggaaagaggaggattgagacgagaaggatgctgtgagtgctgttccgcccccagtcaaccacactcaggactcctctgccaatggaactcagccaagcctcaactctgacaagcttctccaggattcttctacccccctgcctcccagccagcctcaggagcctgtgaacgggccctgtaaccaaccctcaggggatggatccccccagaacaccagccctgcagatgaggtctccaagaatgacaatggcttaaaggtacctgttcccctccggaagtcccggccattgtccgtggatgccagaattcaggtgaccgaagagaaacaaatcactgaccaggctgagaaccccagttctgcagccagcaaacccccgaaggtcaaccagagccgacctaacagcagcgccctggagactttgggtgtcgagactctggccaatggaggcctggagctccctggctctgtaactccaaaccattctaagagggcgtcggactgtagcaacctgtctacctcagagagcatggactacggcacctccttgtctgctgacctgtcattgaacaaagagacgggctcattgtctctcaagggctcaaaactgcacaacaagaccctgaagaggacccgccggtttgtggtggacggtgtggaggtgagcatcaccacctccaagatcatcagcgaagacgagaagaaagacgaggagatgaggtttctcaggcgccaggaactccgagagcttcggctcctgcagaaagaagagcatcggaaccagacgcagctgagcaccaagcacgagctgcagctggagcagatgcacagacgatttgaacaagaaatcaacgccaagaagaaattctatgacgtggagctagagaacctggagcggcagcagaagcagcaggtggagaagatggagcaggaccacagcgtgcgtcgcagagaggaggccaagcggatccgcctggagcaggatcgagactacgccaggttccaagagcagctcaagcagatgaagaaggaggtgaagaatgaggttgagaaactgccccggcaacagcggaaggagagcatgaagcagaagatggaggagcacgcacagaagaaacaactgctggaccgagactttgtagccaagcagaaggaagacctggagctggccatgaagaagctcacggcagaaaacaggcgtgagatctgtgacaaggaacgtgattgccttaacaagaagcaggagctcctccgagaccgagaggcagccctgtgggagatggaggagcaccagttacaggagagacatcagctggtgaagcagcagcttaaggaccagtacttcctgcagcggcatgacctgctgcgcaagcacgagaaggagcgggagcagatgcagcgctacaaccagcgtatgatggagcagctgaaggtcagacagcagcaggagaaggcgcggctacccaagatccagaggagtgacggcaagacccgcatggccatgtacaagaagagcctgcacatcaatggtgcgggcagtgcctccgagcagcgggagaaggtcaagcagttctcccagcaggaagagaagaggcagaaggcggagaggctgcagcagcagcagaaacacgagaaccagatgcgagacatggtggcacagtgcgagagcaacatgaacgagctgcagcagctgcagaatgaaaagtgtcatctgttagtggagcatgaaacccagaagctgaaggccctggacgagagccataaccagagcctgaaggaatggcgagacaagcttcggccacgcaaaaaggccctggaagaggatttgaaccagaagaagcgggaacaggaaatgttcttcagactaagtgaggaggcagagaccagacccaccacacccaacagagccagcaagttcttcccctacagctctggggatgcttcctaacacacacatgcctgggctgcggtgcggcagtacagccaccagggccaccaaccctctacaaacaagtgactcaggacctcttcctcttgcttctgtgccagctccaactacccagcaccccagttgcccacagcaccaccccagtgcttctgatggatgacctcatcccaactcagattcccatcacctggaagtgacctgggctgttggggtccgggaccgagcgggatgggcgtacccctcctgtttgccaaaacaccagctctactgtctgtgggcacaagcgctactgatgacatcaccacgaacccatccttattgtgatccttgtggttttttcttctccttcagtaattcctcacagtgttggaaaacatccctcagagccattttgcttctcagcagccagctctcaggggtgtccccattaccctgcttcgcacagctgactttgtgctcgatgagacgctgtgtatgtgggggtagggagtggggaaagggaggccagaaatgttcattctgctggtttctgacattttatgccatctcattttgcctctccctgtcacacacacacacacacacacacacacacacacacacacacacacacacacaatgcaaacacacaacttggccctcctgaacctgatcgtaggacacggagtacagagcatgtcaggtggagcagctgctggggcatgctgagtgctggccccaaagcccagagaaggcacaggctgtactgcagcctgcctgccactcgtttggctgcacacaggatcctgtgttcaggggtaaactcccctccacacttgtcttctgctgcctagcgcatgccaatctcgcccttgcccagttgttggcaagtactggggaaggctcctgacctttgacctttgccccagtcctgcactggagtcccactgtacatttccactaagccggacagtcctttggacttctctgtttaggaagagatgcttcccacccctgggaacagccgaagctcaggaaaatgccaagcctcgtgcctgggcctttgggttgctcaggtagcctcccaagatgctgcgccccataggctaccatgcccagaaaagcagctggtcggcccagccggcgttcgctgatagcgccttagggctcagttaaagcacaggtaaatggctggctgctttgtataccctccttttagacagcatcaccccagggattaggatgggatgggtgggggcggggcacccaggcagtggagtctgggagtggctgagacctcagcagtatttccccatcactgccccatgctgagacaaccttctaggacgtttcctcagatgctgactgggtgcttgggaggggagtgggctagtaaaacaaaataggaaaacaggtcttgggactcccagatcttgtgtgcagtaaggaagttcacagagccccaggaaggcgatagttctcagggtagcgagcgtcagcttgctttcaggccgcacaccgaggagtcttgaggaacagttgacttctttcttactggtgcatgggggctgggaaacacaagttgtcagagtgcagctgtgggactcagagatgggaagtgggcaaggccacgccctgcagggctctaccattgtttacaatgtacttggctgcattcgggggtggggggaacttgacagtggctattaggcaaaatgccggttttgtggttcaggtaacagtctttgaccactccctgacgtcattcgtactgtcctcctccttgttgcttccacacttagtcccacctgagctctggtacctctgctgtgccttttttgagtggggtctagccttgtcttccagcctcataatttaacctaagtgcaatgcctgccaccgacaaaggcccgtgaagtattcctcatgtcctgtgctaacgttttctgtataggaacaggcagaaatgtctttagcaccgcggatataactaacttatatttcccttcacgaaggatagaagtaacgggtgtgtcatttccaacggtcatgtataatttttgtaaactgttctctgcaaacaaaaaaaatgtaaatatgcttctaataaaataataaggt

SEQ ID NO: 3817 - DNA, 1201 bp, Rattus norvegicus
cgccaccaccccgccatgctcagagccaagatgctcgggagaggcccctacaagcccttagccatcctcaggcacatgggacctctctgtgccacaaggccacagcactggcgcttccagcattcctacgcagagaaacacagcaactgtgcccggcaccctctctggactggcccagtgtcctcaccgggaggcacccagcagtctcccattaatatccagtggacggatagtgtctatgacccgaagctggcaccgctcagggtctcctatgatgctgcgtcctgcagatacctctggaacactggttacttcttccaggtggagtttgacgattcctgtgaggagtcagggatcagtggtgggcctctgggaaaccactacaggctgaagcagtttcacttccactggggagcaacagatgaatggggctctgagcacatggtggacggccatgcctacccggctgagctccatttggttcactggaattccatgaaatatgaaaattacaagaaagccaccacgggggagaatggactggcggtgattggagtgtttctgaagctcggggcccatcacgaggccctgcagaggctggtggacatcttgccggaagtaagacacaaggacacacaggtgaccatggggccctttgacccttcttgcctgctgcctgcctgccgggattactggacctaccctggctccctcaccaccccaccactggctgagtcagtcacctggattgtgcacaagatgcccattgaggtgtccccgagccagctgtccacattccgtacactcttgttctccgggcgaggtgaggacgaggaggtgatggtgaacaacttccgcccgctccaaccactcaggggccgcaacgttcgctcctccttccaggtccccagggtgggaacaaagtcttgatctcaggatgaggtctgtaaggataggcagagcggatggaaaagggggtgcgcatttccagggtgcgacgcctggattaaaaaaaaaatggctgcagagatggctcaggggttaagagcactgactgctcttccagaggtcctgagttcagttcccagtaaccacatggtggctcacaaccatctgtaatgggatccgatgccctcttctggtgtgtctgaagagagcgacactgcactcatatgcattaaattaataaatctttaaaaaa

SEQ ID NO: 3818 - DNA, 1944 bp, Rattus norvegicus
gggcagggcggggggtgtgtgcacgctcgagctttcgggccacagccaccgccgcgcgagctagaagcgccctagcccggcaagctggctcacccgctggccgcccagcacagcccgctggcccctctcctgcagcccatctggcggagggcggcggcggtggcggaggcaggaggatggcttcagaactggcaatgaacaattccgacctgcccaccagtcccctggccatggaatatgttaatgacttcgatctgatgaagtttgaagtgaaaaaggaaccggtggagaccgaccgcatcatcagccagtgcggccgtctcatcgccgggggctcgctgtcctccacccccatgagcacgccctgcagctcggtgcccccgtcccccagcttctcggcgcccagcccggcctcgggcagcgaacagaaggcgcacctggaagactactactggatgaccggctacccgcagcagctcaacccggaggcgctgggcttcagcccggaggacgcagtcgaggcgctcatcagcaatagccaccagctccagggtggcttcgatggctatgcgcggggcgcgcagcagctggccgcggcagcgggggccggcgccggcgcctccctgggcggcagcggcgaggagatgggccccgccgccgccgtggtgtccgccgtgatcgccgcggccgccgcgcagagcggcggggcacctcactaccatcaccaccaccaccacgccacggggcaccaccaccacccgacggccggcgccccgggagccgcgggtagcgcgtccgcctctgcgagcggcgcgggtggcgcgggcggcggtggcccggccagcgccgggggcggcggcggcggcggcggcgggggcacggcgggggcggggggcgccctgcacccgcaccatgccgcgggaggcctgcacttcgacgaccgcttctcggacgagcagttggtgaccatgtcggtgcgtgagctgaaccggcagctgcgcggggtcagcaaggaggaggtgatccgactgaagcagaagaggcggaccctgaaaaaccgcggctatgcccagtcctgccgcttcaagagggtgcagcagagacacgtcctggagtcggagaagaaccagctgctgcagcaggtcgaccacctcaagcaggagatctccaggctggtgcgcgaaagggacgcctacaaggagaaatacgagaagttggtgagcagcgggttccgagaaaactgctcgagcagcgacaacccttcctctcccgaatttttcatgtgagtgtgacacgcgatcccagctagccaccttgttaaatgctccgtgggggtccggctcctgagtgggcttgccagtttgcagggccacgctcgccaccacctcgccccctcccctggcgagtttgctccccttggccctgcacgcacacacacacacacacacacacacacacacacacacacacacacacacacacacacatacacacacacacacacacagcaagcttgtggtggtggtggtggctcttttgagttggggagggaaagggtatctggctcatggattgccaacctgaattcccctgtaacttgctagcttggttgttttggtcttttttattattattattactctttttacaccgcctaccccacacataccctggacttgcacaagggtcaaagatctgagcaggatacttcatgtaggacataactcacctttgaacccggccatcaagcgcctgtatattttttttcttcttcttctttagttcatgagctggtgttcattctctgtgtgtgtgtttttttattttgtttggattttcttttttcttctttgtttttgtttattattactaatttttttggagcttgctgtgtttcccagcctctgccctccctccctctgcaccatgttcttgagataaaag

SEQ ID NO: 3819 - DNA, 2116 bp, Rattus norvegicus
gccaccggcacgctggcgaggccaccggccctggagcaccagtccgccgctgggcgtcgatgatctacaggccagggtagctctactggggcccaggcaagctctctcagacgccaggagggccagcacgagccagactgggaagctgcgagcccgagagctactgcggagcgccaaacaccccctaaacctgctgcgctcccgggcgcccggctgggtaaaggacagcttctgggagctagagaacacagagaagcgagtgctcgtggaaaagcaagatgtcacgatagacccttggccccagagtccactgaggtgagaggaagatctctgggctgcttggttctaggcggactgaagagcagccatggagttgacctctgagcagttcaatgggagccaagtgtggataccttctccctttgacctcaacggctcactggggccaagcaatggctccaaccagacagagccatactacgacatgacaagcaacgcggtcctcacgttcatctacttcgtggtgtgcgtggtggggctgtgcggcaacacgctcgtcatctacgtcatcctccgctacgccaagatgaaaaccatcaccaacatttacatcctcaacctggccatcgcagatgaactcttcatgctggggctgcccttcttggccatgcaggtggcgctggtccactggccttttggcaaggccatctgccgggtggtcatgactgtggacggtatcaaccagttcaccagtatcttctgcttgacggtcatgagcatcgaccgttacctggccgtggtccaccccattaagtcagccaaatggaggcgaccccggacagccaagatgatcaacgtggctgtgtggggtgtgtccctgcttgtcattttgcccatcatgatatacgctggcctccggagcaaccagtggggtaggagcagctgcaccatcaactggccgggcgaatccggggcatggtacacgggtttcattatctatgccttcatcctggggttcctggtacccctaaccatcatctgtctctgctacctgttcatcatcatcaaggtgaagtcctctgggatccgagtggggtcgtccaagaggaaaaagtcagagaaaaaggtgacccgaatggtatccatcgtggtggctgtcttcatcttctgctggctccccttctatatcttcaatgtctcgtccgtgtctgtggccatcagccccacccctgccctgaaaggcatgtttgactttgtggttatcctcacctacgccaacagctgcgccaaccccatcctgtacgccttcttgtccgacaacttcaagaagagcttccagaatgttctttgcttggtcaaggtgagtggtgcggaggatggggagcggagcgacagtaagcaggacaaatcccggctgaatgagaccacggagacccagaggaccctcctcaatggagacctccaaaccagtatctgaaacaacccgggaacgcaacgtgcacacgcactagccaagccccgcctcctggcagtgcgagccccattcacccgcttcctgcctcccctacccatcacacccggcttttctagagcagagcggatttgagtctggcttgtccgaaagtatacccctctggtcacatctacccctaaagtgaacgttttcgtgcaggcagacaattcaaagactggagaagaggacacgatggcctgggtgtgacccggtggaaagcagctacccggcagaaaccggaaaaaccaaaactaaaatcaaagttccgcgcgtgtacgtgtgcttgcccgctatgtaatctcgtgatctgatatttccgtttgtacatcacctccccacccccaccccggtctctgcggagccagtatacacgtgtcctgtgtttgtaaacccaagtagctagttcatgtgcgtctagtataggtggacatttaccacagcgctgaacctgacgacaaggactcaccatgtcagagtcaatctaatctaagcttccagcatccctcttgcatgggcctttcccagacccaggaggagcatgagcagtatgttcatataataatacatttttgtaaaaagaaaaaaaaaaaaaaaaaaaaaaaa

SEQ ID NO: 3820 - DNA, 1854 bp, Rattus norvegicus
ggagacataaattgccgactgtgctgagaagttgccagttgccaagtttgctgtgcttgctccctccgctcgccttgaaagcccgggcactctctgtcgctgggactcttgctcaccgcttgccagcctcctcagagctcttctcggctgggcctgtggcttcgaagtttttttgttttttcatcttttcacaacccacaaaaaccactagctgctgaggctccaacgagatcaagatgtggaccgcgccagtgttgctctgggttttggggagcgtttggttctgggactcagcgcagggaggggccatcggtgcgctagaagatgatcttgtgaccccgggtccaggagatgacatggtgaacccaggtctagaagacagaatagaaaccacggacactacaggagaactggataagtcaactgccaaggcgcctctggtaccaacacagcctcccattgaggaactgccgacctcaggaacctccgaccacgatcacaaagaacatgagagtacgaccactgtcaaagcggtgaccagccactccacggacaagaaaacaactcaccccaatagagataacgcaggcggtgaaacgcagaccacagataagaaagatggcttggctgtagtgaccctggtcggaatcataattggcgtcttgttagccattggcttcattggagggatcatcattgtggttatgaggaagatttctggaaggttctcgccctaaagagccaaacagaactggttgttctcccaacacatctgaaaataagagagcttccaccttgccctgttccccatccctcttcctgtggaggaagatgacccatggaatgcccacccacccctctcacagccatggtgacccctccacttgccagcagtaccaaaggaaagatacgggacaagccactggcccctcgaaccatctgcgtttggaaatcaaattttttaatataaatgttatgattgaggaccacatgcatagaaaaatggtgcaaaaaccgagacagtatcatcagctttatcaactgtaaccatgggttggttcttccgggccagtcccagtctgttaagaggcaaaagaatttggaaaatgttacctcacagaggcacgggtctttttgcagttgccaacctgcaaatgcagttgatgcatacatattccagcctagtggggtctgaatcagtgcattgaaagtataaacccaaaatcaggcgtgataggcagcccctcagggagcttcattataccttttcagaagcatccactgccttcagttcccggaagataccttgctttttacaagcctccaaaccctctctaagcctcagatgactcaatgacccagaggtctgtctactccactccccctggtgatggaaagcccaagttgaggaaccatgtcctcacctccctaggcctcaagccttcagatcaaccgcttctttctggacgatggagacctcatcccagatgctcagaaagtttgttggatgtcacaaaatgccagagcctcagccgctgtcgaaccaagaacgaaactcagtccttaagtggaagtgactcctgtgcctgctttaggctaggaaatgagaccaaccagtttctagcacctgccttctgcttcccaggaaagacggagaaaaaaataatcttgtatgttcttaactgcttctaggtggtggatggaaaggtttgatgttaatttccggtcttcgtgacataccacatcttcccatgaggactcggtgttgctggcacaagagctgtagtgtcttggttacctgtgttggtactcaatacagtgtagacatcttttcaaataaaatatgattgtgtg

SEQ ID NO: 3821 - DNA, 1977 bp, Rattus norvegicus
gtcctcctctgggacagggaaggatgtcacagctgagcctctcctggctgggactggggcctgaggtggccttcccatggcagaccctgctactgtttggagcctcctggatcctggcccaaattctgacccagatctacgctgcctataggaactttcgtcgcctccgtggcttccctcagccccccaaacggaactggcttatgggtcatgtgggcatggtcactcctacagagcagggcttgaaggaattgactcggttggtgggtacctacccccaaggctttttgatgtggattgggccaatggtccccgttattactctgtgccactctgacatcgtccgatctatcctcaatgcctcagctgccgttgcgctcaaggatgtgatattctacaccatcctcaagccttggctgggggatgggctcctggtgagtgctggtgacaagtggagccgccaccgccgcatgctgacacctgccttccacttcaacatcctgaaaccctatgtgaagattttcaacgacagcaccaacatcatgcacgccaagtggaaacggttgatttcagaaggcagttcccgtctggacatgtttgagcacgtcagcctcatgactctggacagtctgcagaaatgtgtcttcagctttgacagcaactgccaggagaagtccagtgaatatattgctgccatcctggagctcagtgccctagtggccaaaaggcaccagcagcctttgctgttcatggacctgctgtacaatctcacccctgatgggatgcgcttccataaggcctgcaacctggtgcatgaattcactgatgccgtcatccgggagcggcgccgcaccctcccagatcagggtttggatgagtttctcaagtctaaggccaagtccaagactttggatttcattgatgtgctgctcctgaccaaggatgaagatggaaaggagctgtcggatgaggacatcagagcagaggccgacaccttcatgtttgagggccatgacaccacagccagtgggctctcctggattctatacaacctggcgaacgacccagagtaccaggagcgctgccggcaggaagttcaggagcttctgagggaccgagatcctgaggagattgaatgggacgacctggcccagctgcccttcctgaccatgtgcatcaaggagagtctgcggctgcaccccccagtcacggtcatctcccgatgctgcacccaggacattctgctcccagatggcaggaccattcccaaaggtatcatctgccttatcagtatctttggaattcatcacaacccgtctgtgtggccggaccctgaggtctacaaccccttccgctttgaccctgaaaacatcaaagacagctcacctctggcatttattcccttctcggcggggcccaggaactgcataggtcagactttcgccatgagcgagatgaaggtggcgctggcactaacactgctgcgcttccgactcctaccggacgacaaggaaccgcgcaggcagccagagctgatcctgcgtgccgagggcggactgtggctgcgggtggagccgctgacggcgggcgcgcagtgacctcacagttggtctggagcacccccaccatcctacctctgaggatcccagaatgaacagaactgtcacccataccagaatcttacggagggccagcagggggcgctgtgaatccagtgagtgggtgagagaggccagttagtgtctgagccaaagacctttgacttcgtctaactgatcgccagcctttatcataaggtgcattcttctccaaccaacctggactattctctggacaataggaagccaaagaaacgtctgagcaagagaccagaatgaaacgcaaatttgagctcttattctcgcagcaaatcccttattcagctccatttccattattttgacctacattcaaatcatctaataaatacattctctc

SEQ ID NO: 3822 - DNA, 1603 bp, Rattus norvegicus
cacctcctacagctgccacaagcagctctcttcccccaccatgagagctgtccctctgcacctcgtcgggacagcaagcctcacccttggcttcttgctcctgctatctctccgcctggacccaggccaagccaaggagttgaagtttgtgacattggtgttccggcatggagaccgaggtcccatcgagacctttcctaatgaccccattaaggaatcctcgtggccacaaggatttggccaactcaccaagtggggcatgggacagcactacgaactcggaagttatataaggagaagatacgggagattcttgaacaactcctataaacatgaccaggtttatatccgaagcacagatgttgacaggactctgatgagcgctatgacaaacctcgcagccctgtttccccctgaggggatcagcatctggaatcccagactgctctggcagcccatcccagtgcacaccgtgtctctctctgaggatcggttgctatacctgcctttcagggactgtcctcgctttcaagaactcaagagtgagactttaaaatctgaggagttcctgaagaggcttcaaccatataaaagcttcatagacaccttgccatcgctgtcgggattcgaggaccaggatctttttgaaatctggagtaggctttacgaccctttatattgcgagagtgttcacaatttcaccttccgcacctgggccacagaggacgccatgactaagttgaaggagttgtcagaattatctctgttatctctttatggaattcacaagcagaaagagaaatctagactccaggggggcgtcctggtcaatgaaattctcaagaacatgaagcttgcaactcaaccacagaaggccaggaagttgatcatgtattctgcatatgacactactgtgagtggcctgcagatggcgctagagctttataatggacttctacctccctacgcttcctgccacataatggaattgtaccaggataatggggggaccttcgtggagatgtactaccggaatgagacccagaacgagccctacccactcacgctgccgggctgtacccacagctgccctctggagaagtttgcagagctactggaccccgtgatcccccaggactgggccacagagtgtatgggcacaagcaaccaccaagcgtcgctgtaaaagaacaaccagttgccagtgtaatcaggaaaagagttaggtcaaacttgtgggtctgccggggatccatgattagcacaaagaactctattgctgaaggattcgaagattttgcttgagcgggtgagtaaagctgccctgggaatgtctgatgtaaaaacaggtttcagacgaagcctaccaagttagcgtgcaagcatgaaaaagaagacacttatcccaggctaatgggcaaaggacctgattcacctgacaacaacgctcacctgttcccctgccttctctcacgaggcaaaaagatgagacaggaggacacctggaggagttttccatacccagcctagaacgatcagattttatatgtatgtcaaaagacgctgggtagcagaactgaataataaaagcctcttggtgtcc

SEQ ID NO: 3823 - DNA, 657 bp, Rattus norvegicus
atggctatgatactgggatattggaacgttcgcggacttactcaccccatccgcctgctcctggaatacacagattcaaactatgaggagaagagatacgtcatgggggatgcccccaactttgacagaagccagtggctgagtgagaaattcaatcttggcctggacattcccaatttgccctacttaattgatgggtcacacaaggtcacccagagcaatgccatcctgcgctaccttggccggaagcacaacctgtgtggggagacagaggaggagaggattcgtgtggacactttggagaaccaggtcatggacacccgcatacatctcatgatagtttgctgcagtcctgactttgagaagcagaagccagagttcttgaagtccatcccggagaagatgaaaatctattcagagttcctgggcaagcgaccatggtttgcaggggacaaggtcacctatgtggatttccttgcttatgacattcttgaccagtaccgtatgtttgagcccgagtgcctggacgccttcccaaacctgaaggacttcctggcccgcttcgagggcctgaagaagatctctgcttacatgaagagtagcagctttctcccaagacctgtgtttactaagataccgcagtggggcactgattag

SEQ ID NO: 3824 - DNA, 1407 bp, Rattus norvegicus
gaattccccggaggacctgatgcctctggccacggcctacggccacgctctggagcagtatgaaggggagagctggcgcgagagcgcgcgctacctggaggcggcgctgcggctgcatcggctgctgcgcgacagtgaggccttctgccacgccaactgcagcggccccgccacctcgcagccccggcccgctcccggccccgacggcgacaacgagggtgatggcgaggattgggcgcgcgagctgcggctcttcggccacgtcctggagcgtgccgcctgtttgcggcgctgcaagcggactctgcccgccttccaagtcccctacccgtcgcggcagctactgcgcgacttccagaaccgcctgccctaccagtacctgcactacgcgcacttcaaggcgaaccgactagagaaggcggtggctgcagcctacaccttcctccagaggaaccccaagcacgagctgaccgccaagtatctcaactactacaggggaatgctggatatcggagatgagtccctcactgatctggaggcccagccctacgaggctgtgttccttcaggctgtgaagctctacaacagcggggactttcgcagcagcacagaacacatggagcgggccttggctgattatatgaccgtctttgctcggtgtctagctggctgtgaaggggcccacgagcaggtagacttcaaggacttctacccagccatagcagatctcttcgcagaatccctgcagtgcaaggtggattgtgaagccaatctcacccccaacgtaggtggcttctttgtggacaagttcgtggccaccatgtatcactacctgcagtttgcctactacaaattgaacgatgtgcaccaggctgcccgcagcgctgctagctacatgctctttgaccccaaggacagtgtcatgcagcagaacctggtatattaccgcttccaccgggctcgctggggccttgaagaggaggacttccagccccgggaggaagctgtgctctaccacaaccagacctctgaacttcgggagttgctagacttcacacacatgtaccttcagtcagatgatgagatggaactggaggagacggaatcacttccggagcctgaaaaacctctgtctgatgccgagttcgaaggcgagggcgactatgaggagggcctctatgcggactggtgcaggagccggatgccaagggtgatgaggatgaggctgagccagagcctgaactggcctaagacagtgacatggtgcactcttcaagctcaggacacctggctgggggcaggaactatttattaaaacttaaaatcggggttggggatttagctcagtggtagagcacttgcctagcaaccacaaggccctgggttcggtccctagctccggaattc

SEQ ID NO: 3825 - DNA, 1182 bp, Rattus norvegicus
gttcccgggtcgtgctccgcgctcactgcagccaccttcgccgcccaccgtctcctccaacgcggactccggcagctttctcgccagagtcctcgaaactcgactaattccttacgcgtacgaccagaccaccggcgtgccccaccatgtcagacgcggcagtggacaccagctccgagatcaccaccaaggacttgaaggagaagaaggaagttgtggaggaggcagagaatggaagagacgcacctgccaatgggaacgctcaaaatgaggaaaatggggagcaggaggctgacaatgaggtagatgaagaagaggaagaaggtggggaggaagaggaggaggaggaagaaggtgatggtgaggaagaagatggagatgaagatgaggaagctgaggctcctacgggcaagcgggtagctgaggatgatgaggatgatgatgttgagaccaagaagcagaagaagactgatgaggatgactagacagcaaaaggaaaagctaaccttacgcaccgtgacctattcaccctccacttcccgtctcagaatttaaacgtggtcaccttcgagtagagaagcaggcccccgcccgcccactgcgcgagtgccacccaccaatgacatgcgctcttcaccaccccaccaaaaccacaacatgaattggcaacatgggaggagaaaagaaccagaacttcccaggccctgctttttttcttaaaaatactttaaaaggaaaatttgtttgtattttttatttacattttatatttttgtacatattgttaggggtcagccatttttaatgataacgggtgaccaaaccagccttcagagcgttttctgtcctacttcagactttacttgtggtgtgaccatgttcattatactctcaaaggagaaaaaaaaccttgtaaaaaaaacaaaaacaacaacaaaaaaacaatcttattctgagcattccagtaactttttttgtgtatgtacctagctgtactataagtagttggtttgtatgagatggttaaaaaggccaaagataaaaagattttttttcctttttttttgtctatgaagttgctgtttatttttttggcctgtttgatgtatgtgtgaaacaatgtccaacaataaaccggaattttattttgctgagttgttccaaaaaaaaaaaaaggaatcc

SEQ ID NO: 3826 - DNA, 1591 bp, Rattus norvegicus
ggaaagaaactgaagcctttctcggagcctgtctgggctgctcccactctcagaatctaccgaccatgaagcttatgctcggcttgttgctgttgcctttgacactggtgcatgcctctcccgccacaccagaaccctgtgagctggaccaggacgaggaaagtgtccgctgctactgcaacttctcagatccgcagcccaattggtccagcgcttttctatgcgcgggggcggaagacgtggagttctacggcggcggtcgcagcctggagtaccttctaaagcgtgtggacacggaagcaaatctggggcagtacactgatattatcaggtctctgcccttgaagaggcttactgtgcggtccgcgcgggttcctactcagattctattcggaaccctgcgtgtgctcggatattctggcctccgggaactgactcttgaaaacctcgaggtaaccggcaccgcgctttcgccgcttctggatgccaccggacccgatctcaacaccttgagcctccgcaacgtgtcgtgggcaacaacggatacctggctcgcagaactgcagcagtggctaaagcctggactcaaggtactaagtattgcccaagcacactcactcaacttttcttgcaaacaggtcggcgtcttccctgcccttgccaccttagatctgtctgacaaccctgagttgggcgagaaaggactgatctcggccctctgtccgcacaaattcccgaccctccaagttttagcgctgcgcaacgcggggatggagacgaccagcggcgtgtgctctgcgctggccgcagcaagagtgccactgcaggcactggatctcagtcacaattcactgcgggatactgctggcactccgagctgtgactggcccagtcagctaaactcgctcaatctatctttcactgggctggagcacgtacctaaagggctgccagccaagcttagcgtgcttgatctcagttacaacaggctggataggaaacctaggccagaggagctgcctgaagtggggagcctgtcacttacaggaaatccctttttgcactctgaatcccagtcggaggcgtataactctggcgtagtcatagccacagctctttcacccggatcagcgggcttgtcaggaactttggctttgctcctaggacatcgcctctttgtttaaggaacgtttgcatcttcctggtttctgagggtcctggtcaacaaatcctctgctttaaatttattaaaatcttaatccacaatgtaaggaaggacaatcaagatggctcaatgggtaaaagccaccaagcttgactcctgattttgatcctcgggatccacaccaaaggaaagaactctctcctgaaagttgtccatcggtgctcacaaataaatatatttttttttccggagctgaggaccgaacccagggccttgcgctcactaggcaagcgctctaccactgagctaaatccccaaccccacaaataaatatttttaaaaaaaaaaaaaaaaaaaaaaaaaaaaaaaaaaaaaaaaaaaaaaaaaaaaaaaaaaaaaaaaaaaaaaaaaaaaaaaaaaaaaaaa

SEQ ID NO: 3827 - DNA, 2070 bp, Rattus norvegicus
ctgagttctgagcgtctacagcgaaagtgctgggctttggaaaggagacctgggctccgaatcctctcagggccttggacgtctctgacccaaaacaatccaaggttcttatttgaagaccaccatcccagaagcacattctcgagttgaaaagttggagtggtgttcgaaatgaatctgattgggccctcccatttacaagccacggacgagtttgctctttctgaaaacttatttggagtgctaacagagcacgcggcaggtcctctggggcagaatctggacttggaatcgtactccccatacaacaatgtgcagtttcctcaagttcagccacagatctcctcctcgtcctattattccaacctgggtttctacccgcaacaaccggaagactggtactctcctggactctatgaactcaggcgaatgcccactgagagtgtgtaccagggagagactgaggtatccgagatgcctgtgacaaagaagccgcgaatggccgcctcatcggcgggaagaataaaaggggatgagctgtgtgtggtctgcggagacagggcctctgggtaccattacaacgcgctcacctgcgagggctgcaaaggtttcttccgaagaagcatcaccaaaaacgccgtgtacaagtgtaagaacgggggcaactgcgtgatggatatgtacatgcgtcggaagtgccaggattgccggctaaggaagtgcagagagatgggaatgttggctgaatgtttgttaactgaaattcagtgtaaatctaaacggctaaggaaaaatgtgaagcagcatgcggatcagacagtgaatgaggacagcgaagggcgtgacttgcggcaagtgacctccacgaccaagctatgcagggagaaaactgaactcactgtagaccagcagaccctcctggattatattatggactcatacagcaaacagagaatgccacaggagatcacaaataaaatcttaaaagaagaatttagtgcagaagaaaattttctcatattaacagaaatggctaccagtcacgtacagattctcgtagaattcacaaaaagacttccagggtttcagacactggaccacgaagaccagattgctttgctcaaagggtccgcagtcgaggccatgttccttcgttcagcggagattttcaataagaaacttcctgccggacacgcagacctgttggaagaaagaattcgaaagagcggcatctccgatgagtacataaccccgatgtttagtttctataaaagtgtcggggagctgaaaatgacccaggaagagtacgctctgctcacagcaattgtcatcctctctccagacagacaatacataaaggatagagaggcagtggagaagcttcaggagcctctgctcgatgtcctacaaaaactctgcaagatctaccagcccgagaaccctcagcatttcgcctgcctcctgggtcgcctgacagaactccggacattcaaccatcaccacgctgagatgctgatgtcttggagggtgaatgaccacaagttcaccccgctcctctgtgagatctgggatgtgcagtgaaggacacggggagaggctagctccttgtcctcctcagagcagcaacctggtattggacttcccttcttttcatttgtaccaggtctcactcaagaatctcaatgaatatttatgtggcaattatacaattcccacaactgtaaatacaggctccatagaattgcttcccctacactgtattttacaaggcttcgggaaaccccactgacacgccctttttgcctcattaaatcaattgttacttcaattttgtcaactgagctagggaccgcctcgttttatcctccatgcggcaacattatatatatatatattttatcaaatagctgttttctcttccttttttttttttttttttttcggagctggggactgaacccagggccttgcgcttgctaggcaagcgctctaccactgagctaaatccccaacccctattaaatagctgttttcaactgagacaataaactgaacgtaatgccaagagaa

SEQ ID NO: 3828 - DNA, 1665 bp, Rattus norvegicus
gttggcggctatacagagttcagggtggcgaccccgagagaagagcccgcaaaggaaagccccagaggcgggcaggcgggtggccggcgcggagccggccctgccacgcagtgacccggggcgcacgggcggagcccctgatcccaagtccggtcctagagcgcggtgctccggccggggatgagctccccgccacccgcccgcaagggcttttaccgccaggaggtgaccaaaacggcctgggaggtgcgcgccgtgtaccaggacctgcagcccgttggctctggtgcctatggtgcagtgtgctctgcagtagacagccgcactggcaacaaggtggccatcaagaagttgtaccggcccttccagtcggagctgtttgccaagcgcgcctacagagagttgcgcctcctcaaacacatgcgccacgagaacgtcattgggctgctggatgtgttcactcccgatgagactctggatgacttcacagacttctacctggtgatgccattcatgggcactgacctgggcaagctcatgaagcacgagactctgagtgaagacagaatccagtttcttgtgtatcagatgctgaaggggctgaagtatatccacgctgccggcgtcatccacagggacttgaaacctggaaacctggctgtgaacgaggactgtgagctgaagatcctagattttggccttgccaggcaggcggacagtgagatgacaggatatgtggtaacccggtggtatcgggcaccagaggtcatcttgaattggatgcgttacacacagacagtggacatttggtctgttggctgcatcatggcagagatgattactggaaagatcctgttcaaaggcaatgaccacctggaccagctgaaggagatcatgaaagtcacagggacaccccctcctgagtttgtacagaagctacagagtgctgaggccaagaactacatggaaggcctccctgagttggaaaagaaggattttgcttctgtcctgaccaatgcaagccctcaggccgtgaatctcctggaaaagatgctggtgttggatgcggaacagcgggtgacagcagctgaggcattagcccacccatactttgagtcccttcgggacactgaggatgagcccaaggcccagaaatatgatgactcctttgatgacgtagaccgcacccttgaggaatggaagcgtgttacgtataaggaagtgctcagcttcaagcctcccaggcagctaggagccagagttccaaaggagacagctctgtgaagacctccgggtggtttggggggtatcctaaggaggctgtctgggagcttcgcagacaccttggcttcccttctccggaagaggaatcctggttggcaccagtgcctggtgcttttatcccaagtcatccacctggaaaggctgtgtagaccccttgaatcacgaaccctccatctccaagccagttcttcagattttgagcgcccgagatgaccctggcagaacatctaagctttttttttttcttttttctttttttcggagctggggaccgaacccagggccttgcgcttgctaggcaagcgctctactactgagctaaatccccaaccccacatctaagctttctgtccaagacccctacccaacatgggactagcc

SEQ ID NO: 3829 - DNA, 2764 bp, Rattus norvegicus
gaagatggcgggccggactatgcaagctgcgagatgccctactgatgaattgtctctaagcaactgtgcagttgtgaacgaaaaggattaccagtctggccagcatgtgatggtgaggacgtcccccaaccacaagtacatatttacgctgcggacccatccgtccgtggttcccggatgcatcgcgttcagcttaccccagcgaaaatgggctggactttctattgggcaggacatagaagtcgccttgtattcgtttgacaaagccaagcagtgcatcggcacaatgaccatcgagatcgacttcctgcagaaaaagaacatcgactccaacccttacgacaccgacaagatggctgccgagttcatccagcagttcaaccaccaggccttctcagtgggacagcagcttgtctttagcttcaatgataagctctttggattgctggtgaaggacatcgaagccatggatcccagcatcctgaagggagagcctgcgtcaggtaaaaggcagaagattgaagtaggactggtcgttggaaacagtcaagttgcatttgaaaaagcagaaaactcatcactcaatcttattggcaaggctaaaaccaaggaaaatcgccagtctatcatcaatcccgactggaactttgagaaaatggggatcggcggtctggataaggagttttcagatattttccgacgagcatttgcttctcgggtgttccctccggagatcgtggaacaaatgggttgcaaacatgttaaaggcatcctgttatacggaccccctggttgtggtaagactctcttggctcgacagattggcaagatgctgaatgcaagagagcccaaggtggtcaatgggccggaaatccttaacaaatatgtgggagaatcagaggccaacatccgcaagctctttgctgatgcagaagaggagcagagacggctcggtgccaacagcggcctgcacatcatcatctttgatgaaatcgacgccatctgcaagcagagagggagcatggccggcagcaccggggtgcacgacactgtggtcaaccagctgctgtccaagatcgatggcgtcgagcagctgaacaacatcctcgttattggaatgaccaatcgaccagatttgattgatgaggctctccttcgacctggaagactggaagttaagatggagataggcttaccagatgagaagggccgactgcagatccttcacatccacacagcaaggatgcgagggcaccagctactgtctgcggatgtggacatcaaggaactggctgtggagactaagaatttcagtggcgccgagctggagggcctggtgcgagcagcgcagtccacagccatgaacagacacataaaggccagcacaaaagtggaagtagacatggagaaggcagagagcctgcaggtgacaagaggggacttcctcgcttccctggagaatgatatcaaaccggcattcggcacaaaccaagaggactatgcaagttacattatgaatggaatcatcaagtggggtgaccccgtgacccgagtcctcgacgacggagagctgctggtccagcagactaaaaacagtgaccgcacaccgctggttagcgtccttctggaaggccctcctcacagcgggaagactgccctcgctgcaaagattgccgaggaatcaaacttccccttcatcaagatctgctcccccgataagatgattgggttctctgagacagccaagtgtcaggccatgaagaagatctttgatgatgcttacaaatctcagctcagttgtgtggtcgtggatgacattgagaggttgctcgattacgtccccatcggcccccggttctccaacctggtgttacaagctctgctcgtgttactgaaaaaggcacctcctcagggccgcaagcttctcatcatcgggaccaccagccgcaaagatgtcctgcaggaaatggagatgctcaacgccttcagcaccaccatccacgtgcccaacatcgccacaggagagcagctgctggaagctctggagcttttgggcaacttcaaagataaggaacgcaccacaattgctcagcaagtcaaagggaagaaagtctggataggaatcaagaagttactaatgttgattgagatgtccctgcagatggaccctgagtaccgtgtgaggaaattcttggccctcatgagagaagaaggcgctagtcccctggactttgactgaaaactggactgtttacaacagtgaccaagggaaacgaccaaggtgatgatggcctgggatcgtcactcctcatactcaagacactggactaagtgaagtgtccacctccctctccacactcactctgcatgactagtgcagtaaactgcctcgtgcttccgagatgtcctatgttcctggactgctgtgcttccctaccatgctggctaagatgattcccgcttacgtgggaggcacgccacgcctgtgcaccctgcccacacctcgctccccgccacgcccacccttggaaaacacttgacctacccgaaggtaggcttctacacgtgaccaagagcaaagatagaggaggttccaagggattcgcttagcactccccgtgttaacaaccatgtggcccacagaatgggttattatctttgcctaaagaagcaggatttttaatatctacgatgctattctcaatcattttcagagatatttccaagttgcaatcaggagaacttttctaatcggaagtcagat

SEQ ID NO: 3830 - DNA, 195 bp, Rattus norvegicus
atgcggtttttgaagtcagcaaaaccagaaatcaaattactatcatcttatgctgctggaagcttaaagagaggggattccacactgcatcgatccagtcgacaggcgagtcacaggatagcggaccctggcgacaacgaatgtaagttcctgggctgctgtcttttactgctgtgggattttctttctgcttaa

SEQ ID NO: 3831 - DNA, 2175 bp, Rattus norvegicus
gcagaaatgcttcgactacccacagtccttcgccagatgagaccagtgtctcgggcactggctcctcatctcactcgggcctatgccaaagatgtaaaatttggtgcggatgctcgagccttaatgcttcaaggtgtagaccttttagccgatgctgtagctgttacaatggggccaaagggaagaacagtgattattgaacagagttggggaagtcccaaagtaacaaaagatggggtcactgttgcaaagtcaattgatttaaaggataaatacaaaaatatcggagctaagcttgttcaggatgttgccaataacacaaatgaagaggctggggatggcaccaccactgccactgttctggcacggtctattgccaaggagggctttgagaagatcagcaaaggggctaatccagtggaaatccggagaggtgtgatgttggctgttgatgctgtaattgctgaacttaagaaacaatctaaacctgtgacaacccctgaagaaattgctcaggttgctacaatttctgcaaacggagacaaagacattgggaacatcatttctgatgcaatgaagaaggttggaagaaagggtgtcatcacagtgaaggatggaaaaaccctgaatgatgagctagaaattattgaaggcatgaagtttgatagaggatatatttccccatattttattaacacatcaaaaggtcaaaaatgtgaattccaagatgcctatgttttgttgagtgaaaagaaaatttctagtgttcagtccattgtacctgctcttgaaattgccaatgctcaccggaagcccttggtcataattgctgaagatgttgatggagaagctcttagcacactggttttgaacaggctaaaagttggtcttcaggttgtagcagtcaaagctccagggtttggggacaacaggaagaaccagcttaaagatatggctatcgctactggtggtgcggtgtttggagaagagggtttgaatctaaatcttgaagatgttcaagctcatgatttagggaaagttggagaggtcatcgtcaccaaagatgatgccatgcttttgaaaggaaaaggtgacaaagctcacattgaaaaacgtattcaagaaatcactgagcagctagacatcaccactagtgaatatgagaaggaaaagctgaacgagcgacttgctaaactctcagatggagtagccgtgttgaaggttggagggacaagtgatgttgaagtgaatgagaagaaagacagagttacagatgctctcaatgctacaagagcagctgttgaagaaggcattgttctaggagggggctgtgctctacttcggtgcatcccagccttggattcattaaagcctgctaatgaagatcagaagataggtatagaaattattaaaagagcacttaaaattcctgcaatgacgattgctaagaatgcaggtgttgaaggatctttgatagttgaaaaaattctgcagagttcctcagaggttggctatgatgccatgcttggagattttgtgaacatggtggaaaagggaatcattgatccaacaaaggttgtaagaactgctttactggatgctgctggggtggcccccctgctaactacagccgaagctgtagtgacagaaattcctaaagaagagaaggaccctggaatgggtgcaatgggtggaatgggagggggtatgggaggtggcatgttctaactcctagaatagtgctttgcccttatcaatgaactgtggcaggaagctcaaggcaggttcctcaccaataacttcagagaagtcacctgaagaaaatgactgaagagaaggctggctgatcactgtaaccatcagttactggtttcctttgacaatacataatggtttactgctgtcattgtccatgcctacagataatttattttgtatttttgaataaagacatttgtacattcctgatgctgggtgcaagagccagtgtcctgctttcaacttaaatcactgaggcatctctactgttctgttagcatcaggactgtagcgctgtgtcaccacatgagaagttcagaagcagcctttctgtggagggtgagaatgattgtgtacagagtagagaagtatccaattatgtgacaacctttgtgtaataaaattttgtttaaagtt

SEQ ID NO: 3832 - DNA, 1617 bp, Rattus norvegicus
gcgctgtaagaagcaacacctcctcctcgcctccgccatccacccggcagccgcgaagcagcaaccatgcgtgagtgtatctccatccacgtcggccaggctggtgtccagatcggcaatgcctgctgggagctctactgcctggaacatggcatccagcctgatggccagatgccaagcgacaagaccattgggggaggagatgactccttcaacaccttcttcagtgagacaggagctggcaagcacgtgccccgggcggtgttcgtagacctggaacccacagttattgatgaagttcgcactggcacctaccgccagctcttccacccagagcagctcatcacaggcaaggaagatgctgccaataactatgcccgtggccactacaccattggcaaggagatcattgaccttgtcttggacagaattcgcaagctggctgaccagtgcacgggtctccagggcttcttggttttccacagctttggtgggggaactggctctgggttcacctccctgctgatggagaggctctctgtcgactacggaaagaagtccaagctggagttctccatttacccagccccccaggtttccactgctgtggttgagccctacaattccatcctcaccacccacaccaccctggagcactctgattgtgccttcatggtagacaatgaggccatctatgacatctgtcgtagaaacctcgacattgagcgcccaacctacactaacttaaacaggttgataggtcaaattgtgtcttccatcactgcttccctcagatttgatggggccctgaatgttgatctgacagaattccagaccaacctggtgccctaccctcgcatccacttccctctggccacttatgcccctgtcatctctgctgagaaagcctaccatgaacagctttctgtagcagagatcaccaatgcctgctttgagccagccaaccagatggtgaaatgtgaccctcgccatggtaaatacatggcttgctgcctgctgtaccgtggtgatgtggtccccaaagatgtcaatgctgccattgccaccatcaagaccaagcgtaccatccagtttgtggactggtgccccactggcttcaaggttggcattaattaccagcctcccactgtggtccctggtggcgacctggccaaggtccagagagctgtgtgtatgctgagcaacaccacagccattgctgaggcctgggctcgcctggatcacaagtttgatctgatgtatgccaagcgtgcctttgtgcactggtacgtgggtgagggcatggaggagggagagttctctgaggcccgtgaggacatggctgccctagagaaggattatgaggaggttggtgtggattctgtggagggtgagggtgaggaagaaggagaggaatactaaattaaatgtcacaaggtgctgctttcacagggatgtttattctggtccaacatagaaagttgtgggctgatcagttaatttgtatgtggcaatgtgtgctttcatacagttactgactttaagtgtgaatgatttgtcagagacccgagccgtccacttcactgatgggttttaaataaaatactccctgtctta

SEQ ID NO: 3833 - DNA, 1999 bp, Rattus norvegicus
agccctaaccgcctaagtccccgggccatggcggcgattgtggcggcgctgcgcggatccagcgggcgcttccggccgcagacacgggttttaacacgcgggacgcggggcgcggcgggcgcggcgagcgcagcgggagggcagcagaacttcgatctcttggtgatcggtgggggatccggtggcctagcttgtgccaaggaagcggctcagctgggaaggaaggtggctgtggctgactatgtggaaccctctccccgaggcaccaaatggggccttggtggcacctgtgtcaacgtgggctgcatacccaagaagctgatgcatcaggccgcactgctggggggcatgatcagagatgctcagcactacggctgggaggtggcccagcctgtccagcacaactggaaggcaatggccgaagccgtgcaaaaccatgtgaagtccttgaactggggtcatcgtgtccaactgcaggacaggaaagtcaagtactttaacatcaaagccagctttgtcaacgagcacacagttcacggtgtcgacaaagccgggaaggtgactcagctttcagccaagcacatagtcatcgctacaggaggacggccgaagtaccccacacaggtcaaaggagccctggaacacggaatcacaagtgatgacatcttctggctgaaggagtcccctgggaaaacgttggtggttggagccagttatgtggccctggagtgtgccggcttcctcactggtattggcctggataccacggtcatgatgcgcagcgtgcccctccgaggctttgaccagcaaatggcgtctttggtcacagagcacatggagtctcatggcacccggttcctgaaaggctgtgtcccctccctcatcagaaaactcccgactaaccaactgcaggtcacttgggaggatctcgcttctggcaaggaggacgtgggcacctttgacactgtcctgtgggccatagggcgagttccagagaccagaaatttgaatctggagaaggctggcgttaataccaaccctaagaatcagaagatcattgtggatgcccaggaggccacctctgtcccccacatctatgccattggagatgttgctgaggggcggcctgagctgacacccacagctatcaaggcaggaaagcttctggctcagcggctctttgggaaatcctcaaccttaatgaattacagcaacgtccccacaactgtctttacaccactggagtatggctgtgtgggactgtctgaggaggaggctgtggctctccacggccaggagcatatagaggtttaccatgcatattacaagcccctagagttcacagtggcagatcgggatgcatcacagtgctacataaagatggtatgcatgagggagcccccacaactggtactgggcctgcacttccttggccccaacgctggagaagtcacacaaggatttgctcttgggatccagtgtggggcttcatacgcacaggtgatgcagacagtagggatccaccccacctgctctgaggaggtggttaagctgcacatctccaagcgctctggcctggatcctactgtgaccggctgctgaggttaagttaccatccctgctgagctaaggatacacactgtgcctgccatgtgcccagtacaaggctctcagacacctggacctagctattgtcatgggagccactgtgccagcatgattccaggcacatggtgaagctacctagaacaggactggaaggccttgctgcctcgcagagatctgagaagatgtggatggagcattgtgtatctgaatagatggtgtgtgtcctgcagggatgactgccccctctaacctctggccagccttcacacactgccagtgtcagatgatgacggcctgtgcagaaacccccacgtgggctgccaggtttgaacccctggcatttctggagtgctaataaagagcgtgttttagtaaaaaaaaaaaaaaaaaa

SEQ ID NO: 3834 - DNA, 2547 bp, Rattus norvegicus
cggtcttgccttaagaataaatagataaggggttggggatttagctcagtggtagagcgcttgcctcgtaagcgcaaggccctgggttcagtcctcagctccgcgccggccggagagactagacgctttcctttctttttcaccccctcttttctttcgttcttttttttttttttccccctcctctcatgtattcacttccgggtccggtgccgcttccggatgctcgaggccgaaggatgtttgacctccggataagcgaggcgccgccgtgcattcattcccggttgcatcggtggccacagccgcggcccggacggcgactccgctctcagcggcggcagtaaggaggagccggcggcggcgcgctgagccagtagacgcgggcccgtccttccctcgctcgcgccttccttcctcggcctcgttcatcttcagcggccggcggcggggatgtgccggcgctgacgggcggacgcgcgccgggccgagccgctgcccgcggccgcgcctctgagctctctatcggcaccagcttatatcaccgagaagataattgtaaaggcataccttgttgagaacataactgagaggttgtacggatgggatgaacacgcgtcagttgcctgcctgtctgctggagtttggatgctagcgttgctcatagggaactgctgcctagggatgcacctgctctacagtaccccatttcatcgtgcttgtctcgattaaagaattcaaagtggagtaccgcaaacttgatatggataataaaaagaaagacaaggacaaatcagatgacagaatggcacggcccagtggtcggtcagggcacagcactcgaggaactgggtcttcttcatctggagttttaatggttggacctaactttagagttgggaaaaaaattggatgtggcaattttggagaattacgattagggaaaaatttatatacaaatgaatatgtggcgattaaactggagcccatgaaatccagagcaccacagctgcatttggaatacagattctataagcagttaggatctggagatggtatacctcaagtttactattttggcccttgtggtaaatacaacgctatggtgctggaactgctgggacctagtttggaagatttgtttgacctctgtgatagaacattttctcttaaaaccgttctcatgatagctatacagctgatttctcgcatggagtatgtccactcaaagaacttgatatacagagatgtgaagcccgagaatttcttaataggacggccaggaaacaaagcccagcaagtcattcacatcatagattttggtttggcaaaggaatatattgatccagagacaaagaaacatataccatacagagaacacaaaagccttactggaacagccagatacatgagcataaacacacatctaggaaaagaacagagcagaagagacgatttagaagctttaggacatatgttcatgtatttcctgagaggcagtcttccttggcaaggcctaaaggcagatacattaaaagagagatatcagaaaattggagacacaaaacgagccacaccgatagaagtgctgtgtgaaaacttcccagaagaaatggcaacatatcttcgttacgtacgaaggctagatttttttgaaaagccagactatgattacttaagaaagctttttactgacttgtttgatcgcaaagggtatatgtttgattatgaatatgactggattggtaaacagttgcctactcctgtaggtgcagttcagcaagacccggctctgtcatcgaacagagaagcacaccaacacagagacaagatacagcagtctaaaaaccagtcggcagaccacagggcagcttgggactcccagcaggcaaatccccaccatttgagagctcaccttgcagcagacagacatggtggctcggtacaggttgtaagttctacaaatggagagctaaacacggatgaccccacggcgggacggtcaaatgcacccattacagcccctacggaagtagaagtgatggatgaaaccaagtgctgctgctttttcaaacgaaggaaaaggaaaaccatacaacgtcacaagtgactggacacagacagagcctggggagttacttacatgtttatatgctgtctcgtgattaaaatcatctctagagtgaccacatatattttcaaggactcactcttgaaacaaaaaagtcatactttcatatttcattttgtggttgtcttatattcattcccccaccccggaattccttagacccttctgcccctgctagcgcttccaccagctctcctccgctccccgctcctgcagcccagcctccttgtgtgcaagaactgtcagggagatctgctggcagttccagtccggaagccggagaagactctgatcatgaggatggaaactattgccctcctgtcaagcgcgagcggacatcatctctaacgcattcagaggagaagagcagcggcttccggctgaagcccccaacgcttatccacgctgctgttccg

SEQ ID NO: 3835 - DNA, 1600 bp, Rattus norvegicus
gggaggggggcggggaccacggcgacgacgcgggggacggcggggccccgcggggagaggggagggcgggcccgggcggaaaggagggggtctccccggacgtgggaggggggcggcggcgcctcgtccagccgcggcgcgcgcccagccccgcctacagaccccagccggccactccagctctacacccgtctcccagccagaggtgctgcatgaggggccgcaggggcgatcgcatgaccatcaacatccaggagcacatggccatcaacgtgtgccctggacccatcaggcccatccgccagatctccgactacttccctcgcagggggccaggaccagagggtggcggcggcggcaggggcttcggggaagccccagctcatctggcccctctggctctggccccccctgcggctctccttggggccactacacccgacgatggagctgaggtagacagctacgactcggatgataccactgccctgggcacgctggaatttgaccttctctatgatcaggcttcctgcatgctgcactgtagaatcctcagggccaagggcctcaagcccatggatttcaacggcctggctgacccctatgtaaagctgcacctcctgccaggagcctgcaaggccaataagctaaaaaccaagacacagaggaacacactgaacccagtgtggaacgaggagctgacgtacagtggaatcacagatgacgacatcacccacaaggtgctcaggatctcggtctgtgatgaggacaagctgagtcacaatgaatttattggggagatccgagtgcccctccgccgcctcaagccttcacagaagaagcattttaacatctgccttgagcgtcaggtcccgcttccttcgccctcttcaatgtctgcggcgctgaggggcatatcctgttacctgaaggagctagagcaggcagagcagggacctgggctgttggaagagcgcgggcgcatcctgctgagcctcagctacagctctcggcggcatgggctgctggtgggcattgttcgctgtgctcacctggctgcaatggatgttaacggctactctgacccttatgtgaagacgtacttgagaccagacgtggataagaaatccaagcataagacgtgtgtaaagaagaagacgctgaacccggaatttaatgaggaattcttttatgagatggaactctccactctggctaccaagaccctggaagtcacagtctgggactacgacattggcaaatccaatgacttcataggtggtgtgtctctggggccaggagcccggggagaggcccagaaacactggagagactgtctacatcagccggacacagcagtggagcgctggcataccctgaccagcgagctgcccccagcagcaggggcgttgccgttggcctgaacagactgcagctgcccagcacaggccctctgcggccgggtccagtacccaaccttcgcacgagtgtgttgcacgtttacatgggtgggacgccctgccccacactacctgtcttatttttgtgagtttctgtgaccgtgggtctatcttcttgtgagggattgtggagagctata

SEQ ID NO: 3836 - DNA, 4620 bp, Rattus norvegicus
taagctctgtcctcctgtcctcctgtcatcctgtcctcctgtccttccatcatgaagaagaatagagaggctcagctgtgccttttttcagctcttcttgccttcctgccctttgcttccttgctcaatggaaactcgaagtatatggtgctggtcccttcccagctctacaccgagacccctgagaaaatctgcctgcatctataccatctgaatgagacagtgactgtgacagcttccttgatatctcaaaggggaacgagaaaactgttcgatgagcttgtggttgacaaggacttgttccactgtctttccttcactatccctagattgccctcttctgaagaggaggagtcactcgacatcaacattgaaggggcaaagcataaattcagcgaaaggcgtgtggtgcttgtgaagaacaaagaaagtgttgtctttgtccagactgataagcccgtgtacaagccaggacagtcagttaaatttcgggttgtctctatggataaaaatctacaccccctgaatgagttgtttcctctggcttacattgaggatccgaaaatgaaccgaattatgcagtggcaggacattaagacagagaatgggcttaagcaattgtccttcagcctgtcagcagagcccattcagggcccctacaagatagtgattctcaaacagtcaggagtgaaggaagagcattccttcaccgtcatggaattcgtgcttcccagatttggtgtcgatgtgaaggtcccaaacgccatctctgtgtacgatgaaataatcaatgtgactgcctgtgcgatatatacctatgggaagcctgttccaggacatgtaaagataagtctttgccatggaaatccttcctttagctctgagacaaagtctgcatgcaaagaagaggactccgagctagacaacaacggctgcagcacacaagaagtgaacatcactgagttccaattaaaggaaaattacctcaaaatgcaccaggctttccatgtgaatgcaactgttacagaagaagggacagggtcagagttcagtggatctggaagaattgaagtcgaaagaaccagaaacaaattcctatttctgaaagcagactcacacttcagacacgggatcccattctttgtgaaaatccgcctagtggatatcaagggagatcctatcccaaatgagcaggtcttcatcaaagcacaagaagctggctacaccaatgctactaccactgatcagcatggcttggcaaagttctccatagataccagcagcatctcaggctattccctcaatatcaaagtctaccacaaggaggaaagttcatgtatccattcctcttgcacagcagaaagacacgcagaggaacatcatacggcctatgctgtttactccctcagcaagagctacatctaccttgacacagaagctggcgtcttgccctgcaaccagatccacacagttcaggcgcattttattctgaaggggcaggtcttgggagtgctgccacagattgttttccactacctggtcatggcccagggcagcatcctccagactggaaaccacactcatcaagtggagccaggagtatctcaagtacaaggcaacttcgccttggagatccctgtggagttcagcatggttcccgtggctaaaatgctcatctacaccatcttgcctgatggagaagtgattgcagattctgtaacgtttcaagttgaaaaatgtcttcgcaacaaagtgcacctgagcttcagcccatcccaaagtcttccagcctcacaaacccatatgcgggttacagcttctcctcagtccctctgtggcctgagagctgtggaccaaagcgtgctgctgctgaagcctgaggctgagctctccccttccttgatatatgatctaccaggtatgcaagacagcaacttcattccaagttcttatcatccatttgaagacgaatatgattgtttgatgtaccaaccaagagacactgaagagctcacatactcagtaccatatggacgagagaaggatgtctacagatatgtgagggacatgggtttaacagcattcaccaacttgaagatcaaacatcctacatattgttatgaaatgaacatggttgtactatcagcacctgctgtggaatctgaactttcaccaagagggggagagtttgaaatgatgcccttgggagtaaataaaagtccactacctaaagagccaccacgtaaagatccaccacctaaagatccagttattgagaccattaggaattattttcctgaaacctggatctgggatttagtcacagtaaactcctcaggagtgactgaagtggaaatgacagtccctgacaccatcactgagtggaaggctggagccctctgcctgtctaatgacactggtcttggcctctcttctgtggcaactctccaagccttccagcccttctttgtggagctcacaatgccctactctgtgatccgtggagaagccttcatgctcaaggccacagtgatgaactacctccctacaagcttgccgatggctgtgcagctggaagcttctcctgatttcacagctgtcccagtgggaaatgaccaagattcttattgccttggtgccaatgggaggcacacctcatcctggttggtaactcccaaatctttagggaatgtgaatttctctgtgtctgtggaagcacaacagtccccagagctctgtggttctcaggtagccacagtgcctgaaaccgggagaaaggacacagtagtcaaagtcttgatagttgagcctgaaggaatcaagaaagagcataccttcagctcacttctctgcgcatcagatgctgagctgtcagaaacattgtctctgctgcttccaccaacagtagtgaaagattcagccagagcacatttctctgtgatgggtgatatcttgagttcagccataaaaaacacacaaaatcttatccaaatgccctatggctgtggggagcagaacatggtcctttttgctccaaacatctatgttctgaaatatctgaatgaaactcaacagctgacagagaagatcaagtccaaggcccttggttacctcagagctggttatcagagagaactgaactacaaacacaaagatggctcctacagtgcttttggggatcacaatggccagggtcaaggaaacacttggctcacagcctttgtgctcaagtcttttgcccaagctcgagccttcatcttcatcgacgaatcacacatcaccgacgccttcacctggctctccaagcagcagaaggacagtggctgcttcaggagctccggatcactgttcaacaatgccatgaaggggggagtcgatgatgaaatcaccctctctgcctatataaccatggcccttctggaaagttcactcccagacacggatcctgttgtctccaaagccctgggctgcctagaggcatcttgggagaccatagagcaaggaagaaatggcagctttgtgtacaccaagacactgatggcctatgctttcgctcttgcgggaaaccaggaaaagagaaacgaaatcctgaaatcccttgataaggaagctataagggaagacaactccatccactgggaaagacctcagaaacccacaaaatcagagggttatctgtacacaccccaggcttcctctgctgaagtagagatgagtgcctatgtcgtcttagctcgcctcactgcccagccagccccatcccctgaggacctggctttgtcaatgggcaccatcaagtggctcacaaagcagcagaattcccatggcggcttctcctccacacaggacactgtggtggcccttgatgctctgtccaaatacggagcagctactttttccaaaagccagaaaactcctttggtgaccattcaatcttcagggtcattttcccaaaagttccaagtagacaacagtaatcgcctgttactgcagcaggtctcattaccagacattcctgggaactataccgtcagtgtgtcaggggaaggatgtgtgtatgctcagaccacgctgagatacaacatgcccttggagaagcagcagcctgcatttgctctaaaggtgcagacagtacccctgacttgtaacaaccccaaaggccagaacagcttccagatctcactagaaatcagttacacggggagccgtccagcctccaacatggtgattgctgatgtgaagatgctctctggcttcatcccattgaaaccaacagtgaagaagcttgaaagattagagcacgtaagcagaacagaagtgaccaccaacaacgtcctgttatatttggaccaggtaaccaatcagacactgtccttctccttcatcattcaacaagacatcccagtaaagaacctgcagcctgccattgtgaaagtgtatgactactatgagacagatgaagtggcttttgctgaatacagcagcccctgcagctcagacaaacaaaatgtttgaaactcatatctgtggacaaggcattgctggaatccccaaaccagagaactttcaaggtggtgatttgtgtttgtctctgaaatacaaatactgaacaatcttggt

SEQ ID NO: 3837 - DNA, 6111 bp, Rattus norvegicus
gtggacggggcgggcccagctgtgtttgagtgctccgcggtcctgggagccagagacctggaggaagcgagctgggtagacggctttctccgctcgcggaagggtgtgagaggagtgtgtgggggtcggcagctagaggtgtgtgcagtcagccaccggcgaggagctgagacagtcgccgcagctttccgagccgcatccgcttcccgcccggggcagctccggctggaggggtgaagcggcggctggagtggccgtgcttttgtgtcctggatccgggtaccctccctcccctggtgcagcccgaggcaagtccatcgaggtgatcactcctcgacgccgctcggaaatcctgggcatcccccctgcgccccgagcggctgatacccaggtgaggcacctgaggtgtcaggacctgcccggggcgcggggtgtccggaagccaggcgggagccccggctgctttttggcaatcgattctcatctgtgaccctccccgagctgttttctatcgaatctcatctgtgatcctcccccggctgctcttcccaggacaactccggtgcaaaggcttggctcatgctcgacggcgaggggagaaaaaaagctgagggacaatggatgcaaaggcccgaaattgtttgcttcaacataaagaagctctggaaaaggacatcaaaacatcctacatcatggatcacatgatcagtaatggcgtcttaacagtagtagaggaggaaaaggtcaaaagtcaggccactcaatatcaacgagcagctgctttaattaaaatgatacttaataaagacaattatgcctacatttcattctacaacgctctactacacgagggctataaagaccttgctggacttctgcatagcggccttcctcttgtgtcttcttccagcggcaaggacacagacggtggaaacacttcatttgtaaggacagtgctgtgtgaaggtggagtgccacagaggccagtcatctttgtcactaggaagaagctggtcagtgcgattcagcagaagctctggaaactgaatggggagccagggtgggtcaccatctatggaatggcaggctgtggcaagtctgtattagctgcggaagctgttcgcgaccatgccctcctagaaggttgtttttcagggggcgtacactgggtttccatcggaaaacaagacaagtccgggcttctaatgaagctgcagaatctttgcacgcggttgggtcaagaagagagtttctctcagaggctcccgcttaacattgaggaggccaaagaccgtctccgtgttctgatgctgcgaaaacacccaaggtctctgttgatcttggatgacgtttgggatccttgggtgttaaaggcttttgacaaccagtgtcagattcttcttaccaccagagataagagtgttaccgattcagtaatgggtcctaagtatgttatccctgtggagagtggtctagggaaagagaagggacttgaaatcttgtcactttttgttaatatgaagaaagaagatctgccagtggaggctcacagtattataaaggagtgcaaaggctctcctctcgtcgtgtctttagttggtgcgcttttacgggattttcccaatcgctgggcatactacctcaggcagcttcagaataagcagtttaagagaataaggaaatcttcatcttatgactacgaggctctggatgaagccatgtccataagtgtggagatgctcagagaagacatcaaggactactacacagacctctccatccttcagaaggatgtcaaggtgcctacgaaggtgctgtgtgttctctgggacttggaaacggaagaagttgaagacatcttgcaggagttcgttaataagtctctcttattctgtaatcggaatgggaagtcattttgttattatttacacgatcttcaagtagatttccttacagagaagaatcgaagtcagctccaggatctgcacaggaagatggtcactcaatttcagaggtatcaccagccgcatacgctgtctccaggtcaggaggactgcatgtactggtacaacttcctggcctatcatatggccagtgccggtatgcacaaagaactttgtgctttaatgttttccctggattggattaaagcaaaaacagaacttgtcggccctgcgcatctgattcatgagttcgtggaatataggcatatactggatgaaaaggattgtgcagtctgtgagaattttcaggagtttttatctttaaacggacaccttcttggacgacagccatttcctaacattgtgcaactgggcctctgtgaaccagagacttccgaagtttatcaacaagcaaagctgcaggccaagcaggaggtggataccgggcggctttacctggaatggatcaacaaaaaaaccatcaagaatctgtcccgcttagtcgttcgcccccatacagacgccgtgtaccatgcgtgtttttctcaggatggtcagagaatagcttcttgtggagctgataaaaccttgcaggtgtttaaagccgagacaggagagaaacttcttgacattaaagctcatgaagatgaggtgctttgctgtgcgttctcctcagatgacagttacatagcaacctgctcagtggataagaaagttaagatttgggattctgggactgggaagctagtgcacacctacgaagaacactcagagcaggtcaattgctgccatttcaccaataagagcaaccaccttcttttggccaccgggtcaaatgactccttccttaagctctgggatttgaatcaaaaagaatgccgaaataccatgttcggtcacacgaactcagtcacccactgcaggttctcaccagacgatgagctcttggcgagttgctcagccgacgggactttaaagctttgggatgtgagatcagcaaacgagaagaaaagcattaatgtgaagcgcttcttcctgagttcagaagacccaccagaggacgtggaggtgatcgtgaaatgttgctcctggtctgcagatggcgacagaataatagtggcagcaaaaaacaaagtcctccttcttgatattcatactagtggcctgctgactgagatccacacaggtcatcacagcaccatccagtactgtgacttctccccctacgaccatttggcagtgattgccctgtctcagtactgtgtggagttgtggaacatagactcccgggtaaaggtggctgactgcaggggacatttaagttgggtccacggtgtgatgttttctcctgatggctcctcgttcttgacagcttctgatgaccaaacaataagggtctgggagacaagaaaggtgtgcaagaactctgccattgtgttaaagcaggaaatagatgtcgtgtttcaagaaaacgaaatgatggtccttgcagttgacaacataagaggcctacaactcattgctggaaaaacaggccagattgattacctgcctgaagcccaagtgagttgctgctgcctaagtccacatcttgagtacgttgcatttggagatgaagagggagccattaagattatagaacttccaaacaacagagttttcagctctgggattgggcacaagaaagctgtacggcacatccagttcacagctgatgggaagacactgatttcaagttctgaagactctgtgattcaggtgtggaattggcagacagaggagtatgtatttctgcaagcccatcaggaaacagtaaaggacttcagactcctgagagattcacgattgctttcctggtcattcgatggaacggtgaaggtgtggaatgtcattaccggaagaattgaaagagactttacttgtcatcagggcacagtgctttcctgtgctatctcttctgatgccaccaagttttcatctacctcagctgataagaccgccaagatctggagttttgaactcccttcccctcttcatgagctgaagggccataacagctgtgtccgctgctctgccttctcgctggatggcatcctgttagcaactggagatgacaatggagaaatcaggatatggaatgtctcagatggccagcttcttcatttgtgtgctccgatttccatagaagaaggaacggctacccacggaggctgggtgactgatgtttgcttctctcctgacagaaaaatgcttgtctctgccggaggataccttaagtggtggaatgttgttactggggagtcctcacagaccttctacaccaatggaacaaacctcaagaaaatacatgtgtcccctgacttcagaacatatgtgaccgttgataatcttggtattttatatattttacaggttttagagtaaagtgactgagccttaatgtagctcagccccttaattttaaattgaaaaaaaattgaaactgtgcatcaactttcgataaagctgtgaattgtactgcagtattgcaaacattgtttacagccggatcaataatgcatatagtataatagtatatctccacaaacacacaggcttttactgttttttaaatacaatcattgttattaacagtttgtcctcaacatgcaaatgaatgtaaatatgtaccttgttaggctatgggtaaactctttgatgcattcagattggttggcaaaattaatgccaattgtttgaaggattctatatgttgaagctgtcattatgcaggctatgccgcagggtgatagtggtcagtatggtgggtgggttttttgacccatgcttaccccaggggtctggctttccaaatcagtcaattgtgttgcgtcttcacactctttaaatttgctttaaggtattgcatcctggtgcacagtctgcggcatgatttctgataacccagttctttctctgagcgagtcatgtgttagagagatctctctgtaccacaaggtagctgtgcatttggctggactctggccctcagagtctttgaactgggcaccaccctgcactcccttagttgttttgtttggtctttaaagagaggctatcttggcatcaatatgtagaccaggttagccttgaactcagagatcagcctgcctctgcctcctgagttctgggattgaaggtatgggccaccactgcctttctctctcagttttatacttactactttactaagcttgacctcttttaacctcttctccatagctaggtgttagtaagccagtgaaatagtaccacacattcccctttgatcccttgtatgtcatcaccaaggccgtactctttatgactttcaagagtcacagaaaaccctccccccatacacccatgtctccctgggaaatgagagctcattgcgttatgcagtgattttgatcctcctgcatcagactcctaagtatctgggagaggtgtcttttgatgcagaaaaaaaccaaaccaaaacaaaactgtgcaacaccactaccaagtttttttttttaaacctccttttagggtctttaattgaagcttgtttaatcactgtcccctgaaatattactaagggcaacagagataaattagtagtagatgtagtttttatataaataaaaaaatcaaatatcttcattttgcaataggaattaatgtgtcttagcaatagtagtcgataggaagctgtttgtgtggtcgtgcatattgccagctgtggtgtgggcagagggaaggaagcacaagtgtgttttagagtttacttctctatggtgctgaagattgaaaccagggccttgcacacactagacaagccctctaccacccggctgcactcctggcccttaggtggatttcagattagatattcccagggcgttttcaggagctgtaaatagagtgaacaaaatcttgtatagagttcaggaagtttgttcttttctaaccttttttgttaggttgaggaaccactttacctacttactgtgatataagccaatgtgattagtggaaatcttaattttataaaataaatattagaagaagtatgtcggggttggggatttagctcagtggtagagcgcttgcctaggaagcgcaaggccctgggttcggtccccagctccgaaaaaaaagaacc

SEQ ID NO: 3838 - DNA, 2652 bp, Rattus norvegicus
gccgaacatggctgagaagcagaagcacgacgggcgtgtgaagatcggacactacgtgctgggggacaccctgggcgtcggcaccttcggcaaagtgaagattggagaacatcaattgacaggccataaagtggcagttaagatcttaaatagacagaagattcgcagtttagatgttgttggaaaaataaaacgagaaattcaaaatcttaaactctttcgtcatcctcatattatcaaactctaccaagtgatcagcactccaacagacttttttatggtaatggaatatgtgtctggaggtgaattgttcgactacatctgtaaacacgggagggttgaagaggtggaagctcgccggctcttccagcagattctgtctgccgtggactactgtcacaggcacatggttgtccacagggacctgaagccagagaacgtgttgctggacgcccagatgaatgctaagatagctgacttcggactctctaatatgatgtcagatggtgaatttctacgaactagctgtggatcgccaaattatgcagcaccggaggtcatctcaggaaggctgtatgcgggtcctgaggttgatatctggagctgtggtgttatcctgtatgcccttctctgtggcaccctcccgttcgacgatgagcacgtgcctacgctctttaagaagatccgagggggtgtgttctacatcccggagtatctcaaccgttctattgccactctgctgatgcacatgctgcaggtggaccccttgaagcgagcaactatcaaagacatacgagagcatgaatggtttaaacaggatttgcccagttacctctttcctgaagacccctcctatgatgctaacgtcattgatgatgaggctgtgaaagaagtatgtgaaaaatttgagtgtacagaatcagaagtgatgaacagtttatacagtggtgaccctcaagaccagctcgcagtggcttatcatctcatcattgacaatcggagaataatgaaccaagccagtgagttctacctcgcctccagtcctccaacgggttccttcatggacgatatggccatgcacattccccccggcctgaaaccacatcctgaaaggatgccacctctcatagcagacagccccaaagcacgctgtccactggatgcactcaacacaactaagcccaaatctttagctgtgaaaaaagccaagtggcaccttgggatccgaagccagagcaaaccatacgacattatggcggaggtgtaccgagctatgaagcagctggactttgaatggaaggtagtgaatgcataccatcttcgagtaagaagaaaaaacccagtgactggcaattacgtgaaaatgagcttacagctttacctggttgacaatcggagctatcttctagactttaaaagcatcgatgatgaggtggtggagcagaggtctggttcttcaacacctcagcgctcctgttctgctgccggcctccacagacctcggtcaagtgtcgattccagcacagccgagaaccattcactgtctggctctctcactggttctttgactggcagcactttgtcctccgcttccccgcgcctgggcagtcataccatggatttttttgaaatgtgcgccagtcttatcactgctttagcccgttgataacccaccaccggtctctgtctttctgttaccgcactgtgaaatcacatacactcttcaaattattaccgcactctcgggtaccacaggctctgcaatagaagttatgtgaacattcccaggtgacatgcagtgctgctggaaacacagaaatctggccttctgtttacttttagaactctgtaactctgctgtgcctatgataggtatcaatagctaggaacggctgagtgctggtgaagcttgttaacttacacccgtgaattcactacacatggtgagcacacctcactgatgaacccgctgatctcggggtggttcggtgggaccgccttccttcacgtttagttcatgtaaatcctgtttgcctcctaaatttccataggtgtcaggctgtctaggcactcttggacaagaagattcagaaatagagtaactgtcagtgaaatattatttaaatgtagaaatccgaaaatcctgtccccttaaatatcagaaaccaaaagtcttttttaatactttctgcaaatactgcctagtattagccatacagactgtgtttctgataataggagcccagtctcctagcttcctgacatttgtgcaaggcccctagttaaatcccactaccacaaagcaatataaaaccatgcaaagttagtgcatagttaaaggaaacaggcagataccaacagtctcttaaaaggaaatctattctttgatctcatttgtgtttatgagactgggtagctgggggcttgggggcgggctgggagtcacagcccttgggcatctttgctaatccacttgaactttgttattgatgccgagtcctctctcttcctcagtagccactgtctttgctcattgcttttcccttttttaactcctttagatcaaaaccttgctttggccatagggtctttaaatactttcaaagcttgatctgctgtgaccttcactgttgaacctgattggacagggaa

SEQ ID NO: 3839 - DNA, 1815 bp, Rattus norvegicus
ataagtctggctatttctctccaggcacggagtgttggggtgtgccatctcccctttgggaccaccttgggttgccctcttagcaaagttggccttaccaaggagcagtcatcttggattatataatttgaatgagccaaggaccgaagtgagggcagcacaaacaactcagcaacaatgtcttcagaggtggagacctcggagggcgtcgatgagtcagagaacaactctacggcaccagaaaaggaaaaccataccaaaatggcagacctttctgagctcctgaaggaagggaccaaggaagcacatgaccgggcagaaaatacccagtttgtcaaagacttcttgaaaggaaacattaagaaggagctatttaagctggccaccactgcactttacttcacatactcagcccttgaggaggaaatggatcgcaacaaggaccacccagccttcgcccccttatatttccccacggaactacaccggaaggaagcactgatcaaggacatggagtatttctttggtgaaaactgggaggagcaggtgaagtgctccgaggctgcccagaagtatgtggatcggattcactacgtaggacagaatgagccagagctgctggtggcccatgcttacactcgttacatgggggacctttcgggaggccaggtgctgaagaaggtggctcagcgggcactaaaactccccagcactggggaagggacccagttctacctgttcgagcatgtggacaatgcccagcaattcaagcagttctaccgcgccaggatgaatgccttggacctgagtatgaagaccaaagagaggattgtggaggaggccaacaaagcctttgaatataatatgcagatattcagtgaactggaccaggctggctccatgctaacaaaagaaaccctggaggatgggctcccagtacatgatgggaaaggagatgtacgtaaatgccccttttatgctgctcagccagacaaaggtaccctgggaggcagcaactgccccttccggacagccatggctgtgctgaggaagcctagcctgcagctcattctggctgccagtgtggccttggtagctggactcttggcctggtactacatgtgaaggacctgtcatgttgtttgcatcctatcccaagtgacctcttccatccccatctccacctctgcccaaaactaccacctcaggtgacttttctaatgctgggtttgagaaaacaagcaaccaataaaagccagacactagcacctctgcctgccagcatcttctctgccaaccaggtacataccagacagcggctgtcgctctgttaacagccagtgcccgactgcagttcagtcatggacttctcatctggcagtgctccaggacgtttgccatttgggaggcctgggtacactgttttcttagcagtacttggaatagtcattgccatgctgggagtgagctgcccacacccaggttttgtggaaaacggtcatgccagctgatgggtcagttttccaggccttttggagtagaagctgtgtattcctgcctcaaagcctacagagcttatcctgcataaccaggatctccccaagaagtcttgttagcctggtctgtctccactgactacacctgccacagcactctaaaaacaaactccacacactcccctccttcctgggacagtacagagtcctcagaaacagtggcatgttgcataccaatggacatcctctttgatgacactccttgcccacttcctagcaccttctatttccttgtattcatgctaaacaccataaaaga

SEQ ID NO: 3840 - DNA, 1849 bp, Rattus norvegicus
tgcagccagagtgccagggagtgggacaggctgctggaggccacaccagcgtccacagcccatggagctcaccgctgtcctcctgctgctgggcctctgctccgctggcactgttctgggctccgaacatgagactcgtctggtggcaaagctctttaaagactacagcagtgtggtccggccagtaggggaccaccgtgagattgtacaggtcactgtgggactgcaactgatccagcttatcaacgtggatgaagtaaatcagattgtgacaaccaacgttcgtctgaaacagcaatgggttgattacaacttgaaatggaatccagatgactatggaggagtgaaaaaaattcacatcccctcggaaaagatctggcggccggacgttgttctctataacaatgcagatggagactttgccattgtcaaattcaccaaggtgctcctggactacaccggtcacatcacctggacccctccagccatctttaaaagctactgtgagatcattgtcacccactttcccttcgatgagcagaactgcagcatgaagctgggcacttggacctatgacggctctgtggtggccatcaatccggaaagtgaccagcccgacctgagtaacttcatggagagcggagagtgggtgatcaaggaagcccggggctggaagcactgggtgttttactcctgctgccccaacaccccttatctggacatcacctaccacttcgtcatgcagcgtctgcctctctacttcattgtcaacgtcatcattccctgcctgctcttctccttcttaaccagtctggtgttctacctgcccacagactcaggggagaagatgacgctgagcatctctgtcttactgtccctgactgtgttccttctcgtcattgtggagctgatcccttccacctctagcgctgtacccctgatcgggaagtacatgttgtttaccatggtctttgtcattgcgtccataataatcaccgtcattgtcatcaacacacaccaccgttcgcccagcacccacatcatgcccgagtgggtgcggaaggtttttatcgacactatcccaaacatcatgtttttctccacaatgaaaagaccatccagagataaacaagaaaaaaggattttcacagaagacatagatatctctgacatctctgggaagccggggcctccacctatgggctttcattctccactgatcaagcaccctgaggtgaaaagcgccattgagggtgtgaagtacattgcagagaccatgaagtcagaccaggagtctaacaatgcgtctgaggagtggaagtatgtcgccatggtgatggaccacatcctcctcggagtctttatgctggtgtgtctcatcgggacgctggctgtgtttgcaggtcggctcattgagctacatcaacaaggatgagcagaagctgaactaagcctccctctgccccagctgcagccaccaccaggaaagatagaagagaggaaggcctgtctacttgaatcctttcgcgcttaccaagcacacagtgtgctacatgtcctgttaatgatagtggtctctgctcacactgctatgtccttaaagtatctcccctttgcttctgcttttaacaccatgggtctccttaaagagggaaccctttgtagtaaataaaagtgagtcctcgggctggagagatggctcagcggttaagagcacccgactgctcttccagaggtcatgagttcaattcccagcaacacatggtggctcacaaccatctataaagagatctgatgccctcttctggtgtatctgaagacagctacagtgtacttatatataataaaa

SEQ ID NO: 3841 - DNA, 1450 bp, Rattus norvegicus
cggggactggatgatgctgtcccgctggagaggattcgtggcttgagtcctgttccacccgatcaccggggtggccgaggcggtaccagcgctgcgctctctcagctcctgccacattccctgagttaacatatgagagattggtatagaaatggctggcattttgtctggataaatcacacaaccctcccagaaagtgatcaccaggtcaagtggatttcgaatagtgtctgagaccaactcaacccagaaaaacaaaatggcccttaactcttctgctgaagatggtatcaaaagaatccaagatgactgccccaaggctggcaggcacagttacatatttgtcatgatccctaccctctacagcatcatctttgtggtgggaatatttggaaacagcttggtggtgattgtcatttacttttacatgaagctgaagactgtggccagcgtctttcttctcaatctcgccttggctgacttatgctttttgctgacttgtcccctgtgggcagtctataccgctatggagtaccgctggcccttcggcaatcacctatgtaagatcgcttcggccagcgtgacgttcaacctctacgccagtgtgttccttctcacgtgtctcagcatcgaccgctacctggccatcgtccacccaatgaagtctcgccttcgccgcacgatgctggtggccaaagtcacctgcatcatcatctggctgatggctggcttggccagtttgccagctgtcatccaccgaaatgtatacttcatcgagaacaccaatatcacagtgtgcgcgtttcattatgagtctcggaattcgacgctccccatagggctgggccttaccaagaatattctgggcttcttgttccctttccttatcattctcaccagctatacccttatttggaaagctctaaagaaggcttatgaaattcaaaagaacaaaccaagaaacgatgacatctttaggataattatggcgattgtgcttttcttcttcttttcctgggtcccccaccaaatattcactttcctggatgtgctgattcagctgggcgtcatccatgactgtaaaatttctgacatcgtggacactgccatgcccatcaccatctgcatagcgtattttaacaactgcctgaaccctctgttctacggctttctggggaagaaatttaaaaagtatttcctccagctcctgaaatatattcccccaaaggccaagtcccactcaagcctgtctacgaaaatgagcacgctttcttaccggccttcggataacatgagctcatcggccaaaaagcctgcgtcttgttttgaggtggagtgacaggttcaaagcacactggcaatgtaatgccctgacagaagccagggagcctctgactaaatggcttacgaccaaaggaccattcaccctgcctcaggatctaagcagaaa

SEQ ID NO: 3842 - DNA, 2100 bp, Rattus norvegicus
aattcggcacgagcagagctcacgttgcattgaagacgaaacctcggggaggtctggagctgtctttccttccctccctacccggcggctcctccactcttgctacctgcagggatcagcggacagcatcctctgaagaagacaaggttccttaactaagcaccactgacttgctggccccggcgcccagcaaccccccaccactaccatggccgaggacgcagacatgcgtaatgaactggaggagatgcagaggagggctgaccagctggctgatgagtccctggaaagcacccgtcgcatgctgcagctggtcgaagagagtaaagatgctggcatcaggactttggttatgttggatgagcaaggcgaacaactggaacgcattgaggaagggatggaccaaatcaataaggatatgaaagaagcagaaaagaatttgacggacctaggaaaattctgcgggctttgtgtgtgtccctgtaacaagcttaaatccagtgatgcttacaaaaaagcctggggcaataatcaggatggagtagtggccagccagcctgcccgtgtggtggatgaacgggagcagatggccatcagtggtggcttcatccgcagggtaacaaacgatgcccgggaaaatgaaatggatgaaaacctagagcaggtgagcggcatcatcggaaacctccgtcatatggccctagacatgggcaatgagattgacacccagaatcgccagattgacaggatcatggagaaggctgactccaacaaaaccagaattgatgaagccaaccaacgtgcaacaaagatgctgggaagtggttaaatctgcccttctgctgtgctctcctccaatgttgttggacaagagagaagagagctccttcatgcttctctcatggtattacctagtaagacttacacacacacacacacacacacacacacacacacacacacacacacacacacacacagagtcagtcacccccattgtaaatgtcctgtgtggtttgtcagcttcccaatgataccatgtgtcttttgttttctccggctctctttctttccaaaggttgtacatagtggtcatctggtgactctatttcctgacttaagatcttgggtctctctcttttttcctttttcttttctcagtggcgtttgctgaatgacaacaatttaggaatgctcaatgtactgttgatttttctcaatacacagtattgttcttgtaaaactgtgacattccacagagctactaccacagtcctttcttagggtgtcaggctctgaatctctccaaatgtgctgtctttggttcctcatggctattctttgtctttatgatttcataattagacaatgtgaaattacataacaggcattgcactaaaagtgatgtgatttatgcatttatgcatgagaactaaatagacttttagattcctacttaaacaaaaactttccatgacagtagcatactgacaagaaaacacacacaacagcaacaataacaaagcaacaactacgcatgctcagtattgggacactgtcaagattaagtcataccagcaaaacctgcagctgtgtcaccttcttctgtcaacatacagactgatcataatcatcccttctttacacacacacacacacacacacacacacacacacacacaaatggatttaacacaccattaatcatttctagcaaaatatatgtttggctgaaactatgtgaaatgggtgtaatatagggtttgtcgaatgcttttgaaagctctgttttggagacaatactcttgtggaaaacgtgaagatcttctaagtctggctcttgttgatcaccatctccctgtggtttgtcatcagtacaactctttgttgcttaatctagagctatgcacaaccaaattgctgagatgtttagatgctgataaagaaacctttaaaaaattatataaatgaatgaaatatagataaactgtgagataaatatcattacagcatgtatattaaatccctcctgtctcctctgttggtttgtgaagtgatttgacattttgtagctagtttaaaattattaaaaattataga

SEQ ID NO: 3843 - DNA, 2156 bp, Rattus norvegicus
gcacgagacacacagcctttccagcgccacgctgtggatggggagcggccaccaggcttgaaagaagcccagagctggcgactgcacacggtcgattttaaatagtgtcagagagcaattcacctcaccaaaggagacatgatccttaactcctctactgaagatggaattaaaagaatccaagatgactgccccaaggctggcaggcacaattacatatttgtcatgatccctactctctatagcatcatctttatggtgggaatatttggaaacagcttggtggtgattgtcatttacttttacatgaagctaaagactgtggccagtgtttttcttctgaatcttgccctggctgatttatgctttttgttgactttgccactgtgggcagtctataccgctatggaataccgatggcccttcggcaaccacctatgtaagatcgcttctgccagcgtcagtttcaatctctatgccagtgtgtttctgctcacgtgtctcagcatcgatcgctacctggccattgtccacccaatgaagtctcgcctccgccgcacgatgctggtagccaaagtcacctgcatcatcatctggctaatggctggcttggccagtttgccagccgtcatctaccgaaacgtatatttcatcgagaacaccaatatcacagtttgcgcttttcattatgaatctcagaactcaacactccccattggactgggtctaacaaagaacattctgggcttcgtgttccctttccttatcattctcaccagctatactcttatttggaaagccctaaagaaggcttataaaattcagaagaacacgccaagaaatgatgacatctttaggataattatggcgattgtgcttttcttcttcttttcctgggttccccaccaaatattcacttttctggatgtgctcattcagctgggcattatccgtgactgtgaaattgctgacattgtggacaccgctatgcccatcaccatctgcatagcttattttaacaattgcctgaatcctctgttttatggctttctggggaaaaaatttaaaaaatatttcctccagcttctgaaatacattcccccaacggccaagtcacatgcaggcttgtcaacaaaaatgagcactctttcctaccgcccttcagataacatgagttcatctgccaaaaagtctgcatctttttttgaagtggagtgagagggttcaaagcctgcaagtgaagtgatttcctgacagcagaagccagaggaccatttgggctaagcagctcactcactaccgaaggagtgttcaacctccagcaatcctttcagggttgaagcagagaaagcactcagtgtacacattttcaaaagtgggaaacaaaagcttttttcccctttaaaacaaattggagcaaagccactgttaaaagcctttttttgttgactgaataactgctttaaggacaatgtcagaaattgagtggctgtatggatttgggagttagggaggaggtgtactagcagaaacgtaatgtctccagtcccctctcaattctgttacttttgatttccacttgaaggtatttagaagctattaaatctgtagacaatcaaaaggagatgggaggtcaagagtttctaagggtccaggaagctacccatctgtttagttactagtgactatgacaccattgttcctgacacaacacagttaagacttgctagacagtagtcatcaagtttcaaaatgctttgtgaagttcagccagtgtcttaagaattcagagccatgtgccaaaacagtaccacagaacagcttgtctgaataatgtcttactgtagttgcaaagccaaactgcttgtcaagctgtgattctgtcccagatagttgtgtcttcctagttggatcagtttaatttcatatctaagaaatgtataatttcatatctaagaaatgtatatgaaatgtatatgaaatgtataatttcatatctaagaaatgttaagcagatttatcataaagtatgttttatggttctaaaaatgtatattttatatatgttatgtatatctatatctctaagctgttgtttgattgaagttgtagcaaagttgtatttatcttgaaataaaaatttatcataatataaa

SEQ ID NO: 3844 - DNA, 3202 bp, Rattus norvegicus
agacacctccccgacgccctcccagaagccttccccagaagaagtgtcccccctgagctgcccccccaccccaaggaggccgcccccgcccctcctcgccatgggcccggggggaccctgtaccccagtggggtggccgctgcctcttctgctggtgatggcggctggggtggctccggtgtgggcctctcactcccctcatctcccgcggcctcacccgagggtccccccgcacccctcctcagaacggcgtgcagtatacatcggggcgctgtttcccatgagcgggggctggccggggggccaggcctgccagcccgcggtggagatggcgctggaggacgttaacagccgcagagacatcctgccggactacgagctcaagcttatccaccacgacagcaagtgtgacccagggcaagccaccaagtacttgtacgaactactctacaatgaccccatcaagatcattctcatgcctggctgtagttctgtctccacacttgtagctgaggctgcccggatgtggaaccttattgtgctctcatatggctccagttcaccagccttgtcaaaccgacagcggtttcccacgttcttccggacgcatccatccgccacactccacaatcccacccgggtgaaactcttcgaaaagtggggctggaagaagatcgctaccatccaacagaccaccgaggtcttcacctcaacgctggatgacctggaggagcgagtgaaagaggctgggatcgagatcactttccgacagagtttcttctcggatccagctgtgcctgttaaaaacctgaagcgtcaagatgctcgaatcatcgtgggacttttctatgagacggaagcccggaaagttttttgtgaggtctataaggaaaggctctttgggaagaagtacgtctggttcctcatcgggtggtatgctgacaactggttcaagacctatgacccgtcaatcaattgtacagtggaagaaatgaccgaggcggtggagggccacatcaccacggagattgtcatgctgaaccctgccaacacccgaagcatttccaacatgacgtcacaggaatttgtggagaaactaaccaagcggctgaaaagacaccccgaggagactggaggcttccaggaggcaccactggcctatgatgctatctgggccttggctttggccttgaacaagacgtctggaggaggtggtcgttccggcgtgcgcctggaggactttaactacaacaaccagaccattacagaccagatctaccgggccatgaactcctcctcctttgagggcgtttctggccatgtggtctttgatgccagcggctcccggatggcatggacacttatcgagcagctacagggcggcagctacaagaagatcggctactacgacagcaccaaggatgatctttcctggtccaaaacggacaagtggattggagggtctcccccagctgaccagaccttggtcatcaagacattccgtttcctgtctcagaaactctttatctccgtctcagttctctccagcctgggcattgttcttgctgttgtctgtctgtcctttaacatctacaactcccacgttcgttatatccagaactcccagcccaacctgaacaatctgactgctgtgggctgctcactggcactggctgctgtcttccctctcgggctggatggttaccacatagggagaagccagttcccgtttgtctgccaggcccgcctttggctcttgggcttgggctttagtctgggctatggctctatgttcaccaagatctggtgggtccacacagtcttcacgaagaaggaggagaagaaggagtggaggaagaccctagagccctggaaactctatgccactgtgggcctgctggtgggcatggatgtcctgactcttgccatctggcagattgtggaccccttgcaccgaaccattgagacttttgccaaggaggaaccaaaggaagacatcgatgtctccattctgccccagttggagcactgcagctccaagaagatgaatacgtggcttggcattttctatggttacaaggggctgctgctgctgctgggaatctttcttgcttacgaaaccaagagcgtgtccactgaaaagatcaatgaccacagggccgtgggcatggctatctacaatgtcgcggtcctgtgtctcatcactgctcctgtgaccatgatcctttccagtcagcaggacgcagcctttgcctttgcctctctggccatcgtgttctcttcctacatcactctggttgtgctctttgtgcccaagatgcgcaggctgatcacccgaggggaatggcagtctgaaacgcaggacaccatgaaaacaggatcatccaccaacaacaacgaggaagagaagtcccgactgttggagaaggaaaaccgagaactggaaaagatcatcgctgaggtgtgcggtgacaaacaaccggggccccccgtgtctgagggtgggttgcccgtagtggggccttcgatagaggtttgagtgttggtggttcacagagggtctcggcctgcagaggaaccggagagggagaggggaagggttgagtttcagtcccgtcagcccgaggagagggaggggggttctgcagacttcagcccacctgaggcaaaagagcagtcactggcagtagttagggggaggccattgtgagacattggttgcccacagtgttactgtgtccgggctgtagttagggaccgtgcagtgctgggtgggggcgggaaatggcctttccacttgtctgatgcaatcttcatttattccttttttttttttttttaaatcactgattttctccatctattctctcggtgccattacgttctgtgggcttcctttgttctcccctgattcacattttaatttcctttctcactcgtacatctcgtttcatcgtctccccccccctccctccttccattccacatcgccctcctcccacactcccgattgtgtttcttcctccagaaagaggagcgcgtctctgaactgcgccatcagctccagtctcggcagcaactccgctcacggcgccaccccccaacacccccagatccctctggaggccttcccaggggaccctctgagccccctgaccggcttagctgtgatgggagtcgagtacatttgctttacaagtga

SEQ ID NO: 3845 - DNA, 2938 bp, Rattus norvegicus
tggcagttgccagagtacaggggggtaacgggggagtgccgcagagacaccagtgtgtgcctagaaagcacagctgctttccgcaaagcggcgacacttcatgacccgcaggtaggtctctgccttgtgcaggtccttcttgaagcaggagagcagcccatagtttttgagcagagcgtcatcgtgcgcatgttggcgtcaaacttgtcataggtttgcttgaggatctgcccaatacgggggctgccgtcttccagctcctgcatcagagcctggatgccctcttccaggtccttcagtttctcatagacgcggtccgaggtaccaaacatcaggctgttggtaaagatcctgctgagaaactgcacgggccccagccatgactggatgagcagcagcgagaagcgaagcaattccatgtcagttctctgctgggcctcctccttgccggtgggggctgggatggtctctgagaagcagaacgcagcctgggcattctgaatggaatagcgctgtccctcgggaatgtaggcacgctcgaactctttgtaggtgtcagcagccagctggtgcaggtgctgggctcggagcacagcattggcaaacagactggacaagggcatggcagggaaagcaccagccaagcaacagcgctttgcgttcagttacgataaaaacatcagcagtaacagagactcgactcttgaagcccgtccttggagaaatatggctaacaatgcgtctcttgagcaggaccaaaatcactgctcagccatcaacaacagcatccccctgacacagggcaagctcccgactctaaccttatctggaaagatccgagtgacggtgactttcttccttttcctactctctactgccttcaatgcctctttcttggtaaagctgcagaggtggacccagaagaggaagaaaggaaaaaagctctcaaggatgaaggtgcttttaaagcatttgaccttagccaacctccttgagactctaatcgtcatgccgctggatgggatgtggaacatcactgttcagtggtatgctggagagttcctttgcaaagttctcagctatctgaagctcttctctatgtatgccccagccttcatgatggtggtgattagcctggatcgctccctggccgtcactcagcccttagctgtccaaagcaagagcaagcttgaacggtctatgaccagcctggcctggattctcagcattgtctttgcgggaccacagttatatatcttcaggatgatctacctagccgacggctctgggccagcagttttctcgcaatgtgtgacccactgcagctttccgcaatggtggcatgaagccttctacaactttttcaccttcagctgcctgttcatcatccctcttctcatcatgctaatctgcaatgccaaaatcatcttcgccctcacacgagtccttcatcaggacccacgcaaactacagctgaatcaatccaagaataatatcccaagagcacggctgagaactctaaagatgacagtggcatttgccacctcctttgtcatctgctggactccctactacgtcctaggaatctggtactggtttgatccggaaatgttaaacagggtgtcagagccagtcaatcacttcttctttctctttgcttttctaaacccgtgcttcgacccacttatatatgggtatttctctttgtaattgggagactacccaagcacttgtgctgaaacccatatacgggataacttatgtcaccggttgagaataagctcaaagcttgcaacatacctatgtgcaagcaaggcagggtttgggctcaggttagcagccttgtccatatacagagtttgttgttagcgcttcggaagaccttccaaaataactgaaatctgtccttaatcataagcttctaaactagcctcagccttgtctcatgttttattgcatcccatttgggattctttacttcctccttacataataatgtatagatactttaaatgactacatcctaaggtaaaaagtaccaaaaagtaagaccgggaaagcccaacatattcacaacatcagcttagtttggggaggttggtttttttttctcaaagggggctgagcatctataacaccccatcccaacacctagagcccacagagagcagaatcgctgcccatagatcatcagcaaaaccagatgctgctccaagacctaaagcccagagacagaaggatccctgtccagaggttagcaggaaatactggctgacactatcccagcctaaggcacagagatattacgctccctcactgcccataggtcagcagcagtagcagctgatgttatctatcccagcctagagcacagacagaagagaatcactgtccatgggtcaaattttaactgcaatgactgaaagacttaattttctattttactttaaaagcctttctgattcttattcagcaacaaatccaccagcccaccaggattatttacatgatacaaattaatcccatttacatgctacattgcgacacatccctacatagtgggggtatttaaaagggataggttttttttcatgggctgttagaatatttcacagactatacaacatgtggggtttatgtcaactgactgccatgaatagtgttttaatataattcagaaaatgcctataataattatcttgcaagcataatatacaatccactttaacaatatggtggaacgtttgtctatcttatcttgccgagtcatgccccacagataaatgaggaaagtcaataaaaacagtaagcaaatatataaacaaaaagaggggctttgatgtattaaaggagctcaaggcaggaagccatacaatttcccctatatagaccaacagcacagaatattagggaggagaataataaaactggcggccgc

SEQ ID NO: 3846 - DNA, 3231 bp, Rattus norvegicus
cgggtggaccccagggcactgccacgacctcagggtgacacgcggagcccgggagcgcaaggatggaggcacgattggtctggggagtgctcgtcggacctctcagggttctctgcgtcctgtgctgcctgctgggccaggtggaccccagggcactgccacgacctcagggtgacacgcggagcccgggagcgcaaggatggaggcacgattggtctggggagtgctcgtcggacctctcagggttctctgcgtcctgtgctgcctgctgggcgggtggaccccagggcactgccacgacctcagggtgacacagcgagcccgggagcgcaaggatgggaggcacgattggtctggggagtgctcgtcggacctctcagggttctctgcgtcctgtgctgcctgcttgggcgggtggaccccagggcactgccacgacctcagggtgacacgcggagcccgggagcgcaaggatggaggcacgattggtctggggagtgctcgtcggacctctcagggttctctgcgtcctgtgctgcctgctgggccacgccatcgctgcaccatcgcccatcatcaagttccccggcgatgtcgcccctaaaacagacaaagagttggcagtgcaatacctgaatactttctatggctgccccaaggagagttgcaacctctttgtgctgaaagataccctcaagaagatgcagaagttctttgggctgccccagacaggtgaccttgaccagaacaccatcgagaccatgcggaagccaagatgtggcaacccagatgtggccaactacaacttcttcccccgcaagcccaagtgggacaagaaccagatcacatacaggatcattggttacacacctgacctggaccctgaaaccgtggatgatgcttttgctcgggccttaaaagtatggagcgacgtcactccgctgcgcttttctcgaatccatgatggggaggctgacatcatgatcaactttggacgctgggagcatggagatggatacccgtttgatggcaaggatggactcctggcacatgcctttgccccgggcactggtgttgggggagattctcactttgatgatgatgagctgtggaccctgggagaaggacaagtggtccgcgtaaagtatgggaacgctgatggcgagtactgcaagttccccttcctgttcaacggtcgggaatacagcagctgtacagacactggtcgcagtgatggcttcctctggtgctccactacatacaactttgagaaggatggcaagtatggcttctgcccccatgaagccttgtttaccatgggtggcaatgctgatggacagccctgcaagtttccgttccgcttccagggcacctcctacaacagctgtaccaccgagggccgcaccgacggctaccgctggtgtggcaccaccgaggactatgaccgggataagaaatatggattctgccccgagaccgctatgtccactgtgggtggaaattcagaaggtgccccatgtgtcttccccttcactttcctgggcaacaagtatgagagctgcaccagcgccggccgcaacgatggcaaggtgtggtgtgcaaccacaaccaactacgatgatgaccggaagtggggcttctgtcctgaccaaggatatagcctattcctcgtggcagcccatgagttcggccatgccatggggctggaacactctcaggaccctggagctctgatggcccctatctacacctacaccaagaacttccgattatcccatgatgacatcaaggggatccaggagctctatgggccctcccctgatgctgatactgacactggtactggccccacaccgacattgggacctgtcactccggagatctgcaaacaggacattgtctttgatggcatcgctcagatccgtggtgagatcttcttcttcaaggaccggtttatttggcggacagtgacaccacgtgacaagcccacaggtcccttgctggtggccacattctggcctgagctcccagaaaagattgacgctgtgtatgaggccccacaggaggagaaggctgtgttcttcgcagggaatgagtactgggtctattctgccagcactctggagcgaggataccccaagccactgaccagcctggggttgccccctgatgtccagcaagtagatgctgcctttaactggagtaagaacaagaagacatacatctttgcaggagacaagttctggagatacaatgaagtgaagaagaaaatggacccgggtttccctaagctcatcgcagactcctggaatgccatccctgataacctggatgctgtcgtggacctgcagggcggtggtcatagctacttcttcaagggtgcttattacctgaagctggagaaccaaagtctcaagagcgtgaagtttggaagcatcaaatcagactggctgggctgctgagctggccctgttcccacgggccctatcatcttcatcgctgcacaccaggtgaaggatgtgaagcagcctggcggctctgtcctcctctgtagttaaccagccttctccttcacctggtgacttcagatttaagagggtggcttctttttgtgcccaaagaaaggtgctgactgtaccctcctgggtgctgcttctccttcctgcccaccctaggggatgcttggatatgtgcaatgcagccctactctgggctgccctggtgctccactcttctggttcttcaacatctatgaccttttattggcttcagcactctcagagttaatagagactggcttaggagggcactggtggccctgttaacagcctggcatggggcagtggggtacaggtgtgccaaggtggaaatcagagacacctggtttcaccctttctgatgcccagatacctgcaccaccttaactgttgctttgtatgccccttcgctcgtttccttcaaccttttcagttttccactccactgcatttcctgcccaaaggactcgggttgtctgacatcgctgcatgatgcatctcagcccgcctagtgatggttcccctcctcactctgtgcagtcatgcccagtcacttcctccactggatggaggagaaccaagtcagtggcgtggaaaactgaaaaggttgaaggaaacgagcgaagggcatacaaaagcaacagttaaggtggtgcaggtatctgggcagcagaaagggtgaaaccaggtggca

SEQ ID NO: 3847 - DNA, 710 bp, Rattus norvegicus
cttttccggttcccgcagccgcagccatgagcagcaaagtttcacgcgacaccctctacgaggcggtgcgggaagtcctgcacgggaaccagcgtaagcgccgcaagtttctggagacggtggagctgcagatcagcctgaagaactacgaccctcagaaggacaaacgcttctcgggcaccgtcaggcttaagtccacccctcgccccaagttctccgtgtgcgtcctgggggaccagcagcactgtgatgaagccaaggccgtggatatcccccacatggacatcgaggcgctcaagaagcttaacaagaacaagaagttggtcaaaaagctggccaagaagtatgatgcctttttggcctccgagtctctgatcaagcaaatcccacgtatcctgggcccaggcctaaacaaggcgggcaagttcccctccctgctgacacacaatgaaaacatggtggccaaagtggatgaggtgaaatccacaatcaagttccagatgaagaaggtgctgtgtctggccgttgccgtcggccacgtgaagatgaccgatgacgagctagtctacaacatccacctggctgtcaacttcttggtgtccttactcaagaaaaactggcagaacgtccgggctctgtacatcaagagcaccatgggcaagccccagcgtctgtattaggacgctccaataaacctcgttgctgccttc

SEQ ID NO: 3848 - DNA, 618 bp, Rattus norvegicus
atgtccagcatgaatcccgaatatgattatttattcaagttactcctgattggcgactctggggttggaaagtcttgccttctccttaggtttgcggatgacacgtatacggaaagctacatcagcacgattggtgtggatttcaagatacggactatagagctagacgggaaaacaatcaagcttcagatatgggacacagcaggccaggaacggtttcgaacaatcacctccagttattacagaggagcccatggaatcatagttgtgtatgatgtgacagaccaggagtccttcaataacgtgaaacagtggctgcaggagatcgatcgctacgccagcgaaaatgtcaacaagttgttggtagggaacaaatgtgacctgaccacaaagaaagtagtagactacacaacagccaaggaatttgcagattcccttggaattccatttttggaaaccagtgctaagaacgaaaagaatgtagaacagtctttcatgaccatggcagcggagattaaaaagcggatgggtcctggagcaacagctggaggtgcggagaagtccaatgttaaaatccagagcactccagtcaagcagtcaggtggaggctgctgctaa

SEQ ID NO: 3849 - DNA, 366 bp, Rattus norvegicus
ttccggtctctttggcctcgccggtagaagcaagatgacgaaaggaacgtcatcctttggaaagcgtcgcaataagacgcacacgctgtgccgccgctgtggctccaaggcctaccaccttcagaagtcgacctgtggcaaatgtggctaccctgccaagcgcaagagaaagtataactggagtgccaaggctaagaggcgaaacactaccgggactggtcggatgaggcacctaaagatcgtctaccgaagattcagacatggattccgtgaaggaacaacacctaaacccaagagggcagctgttgcagcatccagttcatcttgaggatttcaatcggtcataaaataaatcttctggtttca

SEQ ID NO: 3850 - DNA, 4566 bp, Rattus norvegicus
ccagcttgcgtccatggccaccgctgcgaccgaggagcctttccctttccatggtcttctaccaaagaaagagactggggcctcctccttcctgtgccgctacccggagtatgacggacgcggggtgctcatcgccgtcctggacacaggggttgatcccggggccccgggcatgcaggtcacgactgatgggaaaccaaaaatcattgatatcattgatacaacaggaagtggtgatgtgaatactgctacagaagtagaaccaaaagatggcgaaatcactggtctttctggaagagtgcttaagattcctgcaaactggacaaatccttcaggaaaatatcatattggcattaaaaatggttatgacttctatccaaaggctctcaaggaaaggatacagaaagaacggaaggaaaaaatctgggatccaattcacagagttgcgcttgcagaagcttgtagaaaacaagaagaatttgatattgccaataatggctcttcccaagccaataaactaatcaaggaagagttgcagagtcaagtggaattacttaattcttttgagaaaaagtatagtgatccaggccctgtgtatgactgcttggtgtggcatgatggtgagacctggagagcctgtgttgattcgaatgaaaatggggacttgggtaaatctactgtattgagaaactacaaagaggctcaagaatatggttcttttggcacagctgagatgctgaattactctgttaatatttatgatgatggaaacctgctctccattgtgaccagtggaggagctcatggaacccatgtagcgagtatagctgctgggcattttccagaagagcctgaacggaatggagttgctcctggtgctcaaattctatccattaagattggtgatacaaggctaagcaccatggaaacaggcacaggcctcatcagagctatgatagaagttataaatcataagtgtgatcttgtcaactacagttatggagaagcaactcattggccaaattctgggagaatttgtgaagtaattaatgaagcagtatggaaacataatacaatttatgtttcaagtgctggaaataatggtccatgcctttctacagtgggttgtccaggaggaactacttccagcgtgataggtgttggagcttatgtttctcctgatatgatggttgcagagtattcactgagagagaaactacctgcaaatcaatatacatggtcttctagaggcccaagtgctgatggggcccttggtgtgagcatcagtgcaccaggaggtgctattgcttctgtgcctaactggacattgagggggactcagctaatgaatgggacatcaatgtcttcccccaatgcctgtggtggcattgccctggtactttcagggctgaaagcaaataatgttgactatactgttcactcagtcagaagagctctagaaaacactgcaataaaagctgacaatatagaagtatttgcccaaggacatggaattattcaggttgacaaagcttatgactacctcattcagaatacatcatttgctaacagattaggttttacagttacagttggaaataaccgtggcatctacctccgagatcctgttcaggtggctgctccttcagatcatggtgttggcattgagcctgtatttccagagaacacagaaaactctgaaaaaatatccttccagcttcatttagctttaacttcaaattcatcttgggttcaatgtcccagccatttggaactcatgaatcaatgtcggcacataaacatacgtgtggaccccaggggcttaagagaagggttacattatacagaggtatgtgggtatgatatagcatcccccaatgcaggtcctttattcagagttccaatcactgcagttatagcagcaaaagtaaatgaatcatcacattatgatctagcctttacagatgtacattttaaacctggtcagattcgaagacattttgttgaggttcctgagggggcaacttgggctgaagttaccgtgtgttcgtgttcttctgaggtatcagcaaaatttgttcttcatgcagtacagcttgtgaagcagagagcatatcgaagtcatgaattttataagttttgttcccttccagaaaaaggaacactcattgaagcctttcctgttctgggtgggaaagcaattgaattttgtattgctcgttggtgggcaagtctcagtgatgtcaatattgattataccatatcattccatggcatagtgtgtactgcaccacagttaaacattcatgcatctgaaggaatcaatcgttttgatgtccagtcctctttaaaatatgaagatctggctccttgcataactttgaagagctgggtgcaaacactacgcccagtaaatgcaaaaaccagacctttaggatcaagagatgttttgccaaataatcgccagctttatgagatggtcctgacatacagctttcatcagcccaagagcggagaagtaacacctagttgtccactcctttgtgaattattatatgagtcagaatttgacagtcagttgtggattatttttgaccagaacaaaagacagatgggctcaggcgatgcctatccacatcagtattctttgaaattggagaaaggagattatacgattcgattacagattcgtcatgagcaaatcagtgatttggatcgtctcaaagatcttccgtttattgtttcgcataggttgtctaataccttgagcttagatattcatgaaaatcatagccttgcacttctaggaaagaagaaatcaagcagtttgacattaccacccaaatataatcagccattctttgttacttccttacctgatgataaaatacctaagggggcaggacccggatgctaccttgcaggctccttgacattgtcaaagactgagcttggaaagaaagctgatgtgatccctgttcattactatctaatacctccaccaacaaagactaagaatggcagcaaagataaagaaaaggattcagaaaaagagaaagatttgaaagaagagtttactgaagctttacgagatcttaaaattcagtggatgaccaagctggattctactgacatttacaatgaattgaaagaaacatatcctgcttaccttcctttgtatgttgcacgtcttcatcaattagatgctgaaaaggagcggatgaaaagacttaatgaaattgttgatgctgccaatgctgttatttctcacatcgatcagaccgctctcgctgtttacattgccatgaagactgaccccaggcctgatgcagctactataaaaaatgatatggacaagcagaaatctaccctggtagatgccctctgcaggaaaggatgtgctctggcagaccaccttcttcatgcacagccccacgatggggcagcagctggagatgcagaagcaaaagaagaggaaggagaaagtaccttggaatctctatcagaaacctattgggaaactacaaagtggacagatctttttgacactaaggttttgacatttgcatacaagcatgcattagtaaataagatgtacgggagaggccttaagtttgcaaccaaactcgtagaagaaaaaccaacaaaagaaaactggaaaaattgtattcaactgatgaaattactcggatggacccattgtgcgtcttttactgaaaactggctccccatcatgtatcctcctgattattgtgtattctaaaatgggaaccaaaacgttaaatttcgaaagcagaaaattttatagtgaacaaatatatgaacaaatgtgtggcatttctagtctaactaatgcatgtcttcatccactatcgaatactgatcattaaaactctatgtatttatcagagaactcaatggtgtgtggcttcatacatgtaatgtagacagacctctgacatcatgctgctttcctgctgcctcccacacttggctagggagggcagagcctgcctgccagccccaacctgggtggatgcagctgctcactgcaggagaggttttcatctcttaatttttaactgtaaaacgtcatccagtttttattttataaatcaaaaaggttaaaacatgctaaatttttccaattatatagaggccttaaaaatgctacattgggtgtagctaaattatttatttgactaaaaattacgagaacataatttccagacttctaaaaataaattcaattaatgggtatggtggggaggtataaatacatggcaactgggaaaagaaacgtgttaatgtaatcttcactccggagtcacaacaagcaagttgtttttacagcatcctcaagtacacagcatcagaataagttaaaatttcatgtgttggtgccagacagttgaatctatctggttttgtaaagatatacacagtatgtttataacattgaaatcatgtaaaatacatgaataaatgtgcaaaacaacaggcacagcacaccatatgcactctgatacctgttttttataaataaaagtaaatattgaagctaaa

SEQ ID NO: 3851 - DNA, 1208 bp, Rattus norvegicus
cgttcagaccccagcaccatgcccatgacactgggttactgggacatccgtgggctagcgcatgccatccgcctgctcctggaatacacagactcgagctatgaggagaagagatacaccatgggagacgctcccgactttgacagaagccagtggctgaatgagaagttcaaactgggcctggacttccccaatctgccctacttaattgatgggtcacacaagatcacccagagcaatgccatcctgcgctatcttggccgcaagcacaacctgtgtggggagacagaagaggagaggattcgtgtggacattctggagaatcagctcatggacaaccgcatggtgctggcgagactttgctataaccctgactttgagaagctgaagccagggtacctggagcaactgcctggaatgatgcggctttactccgagttcctgggcaagcggccatggtttgcaggggacaagatcacctttgtggatttcattgcttacgatgttcttgagaggaaccaagtgtttgaggccacgtgcctggacgcgttcccaaacctgaaggatttcatagcgcgctttgagggcctgaagaagatctccgactacatgaagtccagccgcttcctcccaagacctctgttcacaaagatggctatttggggcagcaagtaggaccctgacagggtggctttaggagaaagataccaaatctcctgggtttgccaagagccctaaggagcgggcaggattcctgagccccagagccatgttttcttccttccttccattccagtccccaagccttaccagctctcattttttggtcatcaattcctgccaaacacaggctcttaaaagccctagcaactcctttccattagcaaaatagccttctaaagttaaagtgccccgcccccacccctcgagctcatgtgattggatagttggctcccaacatgtgattattttgggcaggtgcaggctccccggcagatggggtctatctggagacagtagattgctagcagctttgaccaccgtagccaagcccctcttcttgctgtttcctgagactagctatgagcaaggtgtgctgtgtccccagcacttgtcactgcctctgtaacccgctcctaccgctctttcttcctgctgctgtgagctgtacctcctgaccacaaaccagaataaatcattctcccctt

SEQ ID NO: 3852 - DNA, 2227 bp, Rattus norvegicus
tccatgctgtcccgaaagggcattatccctgaggaatatgtgctgacccggctggcagaggaccctacagagcccaggtaccgtactcgggagaggagggcccgcttcgtgtccaagaaaggcaactgcaacgtcgcccacaagaacatccgagagcagggccgcttcctgcaagatgtgttcaccacgctggtggacctcaagtggccccacacgctgctcattttcaccatgtccttcctgtgcagctggctgctcttcgccatggtctggtggctcatcgcctttgcccacggtgacttggcccccggagagggcaccaatgtgccctgcgtcacaagcatccactccttttcgtctgccttccttttctccatcgaggtccaggtgaccattggtttcggcgggcgcatggtgacagaggaatgtcccctggccatccttattctgatcgtgcagaatatcgtagggctaatgatcaacgccatcatgctgggctgcatcttcatgaaaacggcacaggcccatcggcgggcagaaaccctcatcttcagcaagcatgccgtgatcaccccgcgacatggccgcctgtgcttcatgcttcgcgtaggggacctccgaaaaagcatgatcattagcgccaccattcatatgcaggtggtgcgcaagaccaccagcccggagggcgaggttgtgcctctccaccaggtggacatccccatggagaacggtgtgggtggtaacagcatctttctggtggccccactcatcatctaccacgtcatcgactccaacagcccgctctacgacctggctcctagtgacctgcaccaccaccaggacctggagatcattgtcatcttggaaggtgtggtagaaaccacaggcattaccacccaggcccgcacctcctatctggctgacgagattctgtgggggcagcgttttgtccccatcgtggccgaggaggatggccgctattctgtggactactccaaattcgggaacaccgttaaagtgcccacaccactctgcacagcccgccagcttgatgaggaccgcagcctgctggatgccctgaccctcgcctcgtcgcgagggcccctgcgcaagcgcagtgtggctgtggcaaaggccaagcccaagtttagcatctctccggattccttgtcctgagttgcggtccctcaggcccccactcacttaggtgggcacatggaaagtgaagtacggtatgtagagtgccggggtgcgagcccctcggccagatgagggtctggcgtgggacaagaccctccttggctcagcctccccgccgctgtgtgcctggggtgttacaagatacttgtcactatgctatttctggccccagcaggagcctgtaccgggttatttttgttcctgctcctcccgggctcagctcaggactggcttaccctatgtccctgcccaacgatggggaggctatagaaggttcaggggtcctaaagctaaggtctggaaggaagccagtcttggtcctccacgattcatcctgccacaagcaggcaggtaattgggcaaaagcagcccccaagttgggagcctattgctgtttctgtagccactaagaaatgcctggccaggccccagccctgttcgtgccacgctaaagaatcctgccagccagggaggaggtgggtgtcagagcgtgggagctgaggggcccacacagccacgacaggataagtttacctaggctctcctccatatggccggcttatgagagaaagggggacaagaaggaggcaaatgattggagaccttgatggtcccgttcagacgcgtgtctctgtcctctacccttgactccagccttctgcagagagagtggggactgctgccctgttttgtcccccggagaggctgggaagtggggcattgggcaaacactgagatacctggctgagaggccgaaaagggtcctgtgagtgccatacaagatctacttcaggcaaaactctgctcttggctccccatgggcagctgtcactttgtctgggggacactggtgggtagcaatgccttgtctaggttgtcagaaaaagaaatattggaaagttcaccctggtgagggaaagggaggtctccaaggcaaaaggcccttgggcttgacctgagcccggactctcagagcagtgtagtgtcctcgcccagaaccccactggcccgtcgtcaataaagcctc

SEQ ID NO: 3853 - DNA, 1178 bp, Rattus norvegicus
acattaaccaactgtttagcaactcaggcatgactttgcatttttcttctaatctttcatagaaatttctggccactggacactgtgggagcagcttttaccttattggactatctccccttaagtgggaagggcttagtcaaatgcagtaaagagctataaaacaccgagaactcttgatgtgttgtgaaacttagagggagcagctttttaacaagagaactcaagcaattgctgccatgccggggaagccagtccttcactacttcgatggcagggggagaatggagcccatccggtggctcctggctgcagctggagtagagtttgaagaacaatttctgaaaactcgggatgacctggccaggctaaggaatgatgggagtttgatgttccagcaagtgcccatggtggagattgatgggatgaagctggtgcagaccagagccattctcaactacattgccaccaaatacaacctctatgggaaggacatgaaggagagagccctcatcgacatgtatgcagaaggagtggcggatctggatgaaatagttctccattacccttacattccccctggggagaaagaggcaagtcttgccaaaatcaaggacaaagcaaggaaccgttactttcctgcctttgaaaaggtgttgaagagccatggacaagattatctcgttggcaataggctgagcagggctgatgtttacctagttcaagttctctaccatgtggaagagctggaccccagcgctttggccaacttccctctgctgaaggccctgagaaccagagtcagcaacctccccacagtgaagaagtttcttcagcctggcagccagaggaagccattagaggatgagaaatgtgtagaatctgcagttaagatcttcagttaattcaggcatctatggatacactgtacccacaaagccagccttcgaaagctttgcaacaatcgcatattttgactaaatgttgaccctacttattgggaggccaacacgttttctaatgcttctgtgttaattcatatagacatgactgatgaggaattgctgggatgctatttggttgtagttaaaatttgaaatcatgatcacttcctcagatattactttgaatctcaataaaaacttcgcaagctttttaaaaaaaaaaaaaaaaaaaaa

SEQ ID NO: 3854 - DNA, 4563 bp, Rattus norvegicus
gcctgctctccggcggagctgcgtgaggccaggccggcccccggcccccccttccggccgcccccgcctcctggcccacgcccgcccgcgctcggcccgccagcgcctccatccgggctggcggccccgcgtcgacgccgtccgccacctcgctgctaactcccgtgcagggcgccgtcggcggggcctcgctccgtcgggcctgcggatctccccaccgcctcctcctctatctacctcaacaccccattcctgcttcgccagaggaggcggtccccaccgcaggcagtccggcttgcaggtcgccggcgttgtcatcccccgcgctccccctcccagccctccccggcgcgcagcccggcagctcctctcttttcgctgcagtcccgagcagccgcggcgccgccacgcctgacccccccacaagaagccggggcttacgacggctgagggctccgtcggccctaaccgagctgggtgcccgtggccggggtgacgcctccattcctcccccctcaacaccgtcctcgatccttcgaagttgcatcctttcctctgcttagagtgcgccccccctcgcgcactcgcttacccgccacctttcctaggctcccctcctgccccctccccgttcctcctcgcctcagactccctccccctcacgtccgccctctgccttcgcctacccaagtggattaattatacgctttctgtttctctccgtgctgtcctctcccgctgtgagcctacccgcctctcgctgtcctctctccctctctccctctctgtgtcccccccctttcacgttcactctgtctctctcactatctctgccccccaactatccttgatacaacagctgacctcatttcccgatacctttcccccccccgaaaatacagtatctggcccgccccagccctaagataccctaaagaagcagaagagacgcccccctccccatcaaaaaaagccatctccccgttctgtcccgtcgcacattcggcctctgcgacttggacagagcggcgctggcagaggagtgcccggcagaagggccttcgcccgctgttcggtttgcatacccgcagcagggagatgggcggcagcgtcgccggcttccaggtaccaatggggatcccagtggggaagtcgatgttggtgcttctcatctctttggccttcgccttgtgctgcatcgctgcttaccgccccagcgagactctgtgcggaggggagcttgttgacacgcttcagtttgtctgttcggaccgcggcttctacttcagcaggccttcaagccgtgccaaccgtcgcagccgtggcatcgtggaagagtgctgcttccgcagctgcgacttggccctcctggagacatactgtgccacccccgccaagtccgagagggacgtgtctacctctcaggccgtacttccggacgacttccccagataccccgtgggcaagttcttcaaattcgacacctggagacagtccgcgggacgcctgcgcagaggcctgcctgccctcctgcgtgcccgccggggtcgcatgcttgccaaagagctcgaagcgttcagagaggccaagcgccaccgtcccctgatcgtgttaccacccaaagaccccgcccacgggggagcctcttcggagatgtccagcaaccatcagtgaaccaaattatgtggtaattctgcaatgtagtaccatcagtctgtgacctcctcttgagcagggacagctccatcatgtcccacactaaggtctctctgctccacttcccttcccaggtttctccccacccacccccatgccccgcctccccacatcaggctgctccccttgccccacaccatcgggcaaggggatcccagcaactcttcaaaaccaaatttgattggctctaaacaacccaattggcaccctccaaattatatatgaacattaaaaaaaaactttaaagcatatagtccctttacaacaaattggcttaagaaactccataactgataatctaaaaattaaataaccaaagaaattaattggctaaaaacatactaaaaattaattggcttaaaaacaattggcaaaaatcaaataatttggcccgcccccccccccttcatcttctttccatttagatctttagtcaaattggctcagacttggatctcagaacccaagaagaaaggaaggggacccaaaattttgcaggtagcatgtcattgcttcagtgctctctccttgtcactagtcacttttagcataatctggctgtgaacaacaatagccgcccaaactctttcttcactggtcattccatcacaaatgtcacccatgtcaccaaggggctgggtgaaggaacccaaggagaggaacagaacatgaaaactgaaaatagaacctaattggcacaagcccccagtcccaaaaatctcacttttcatacctactctaaaaagcacatgattatacccacacgtacatgcacacacacatgcacacaggcatgcatacacacacacacacacacacacacactattagatgagaacattgaaatggctgagcaacttcgattggaaccacattgcccaatccaaggcccatcttaaattccctgagcagtttgcatggtttgagctcctctctgaatccatctagtttctgctgccagtgtagagtcagtttggccagataaggagatggcactgccaagtgatacatgctacccgagtagcctgacccctaggtgtgctcctgggaggaaagatctgggggacaacccctaccccaagcacacctatgggccatctctgtcaatctcctggggagcccccactttttaggggctccccaggagactcacactgatgtggggagtgtgggaagtctggcggttggaggggtgggtggggggcagtgggggctgggtggggggaaactatgggtaggaagtggtcccagagaggtcttaggtggaacagtcaggaggaggcacaggtcaacttgcagaattactgaagaatcaggaccccaaattttctgtcaattgatctattcccctctttttatgtctggggcaggttttttccttttttttttttaatccctccttagcttttaatgcgctcataatcccattccctatgtaacgggggcagcgatcaagtaatgaatgcatcaagccatcaataccagcgagagccagtaacaccggctagagccatcaacaccggcttccaccatgtcctgctcccaaccatttatcaaccttttttttttttttatctgtctctatcgcttggcctgagttgggagtggagtctctgtggggtgctggccacgcacccacagagaaataaaaggaattgagaaggccgctacctggcctgacttctggggacagtggctggtccccagaagttctgaggagtggagggggcgtggggcagtgtcccctcaggtgttaggaaggtgctcggaggccacaaagatggggccccagctggccctgccagttgggggggaaggggatgtagatgtaagactagagaggttccatcaggcgggagcaagtggctgccttctgagcacttgggggaggtcctccccgtgcccctcagtgtcatcttgcccactcctcagcaccccatcttaccctcaggaggtctggagctctacagacctcctgggggcaaggtggggtgaggcctggagctggggaagcgaggaggctttaaagccttcagagccaggagaactgtgtacatggggttgtctgggccctggggcccgagggtctggtgagccgtagcagccactccacggtgcctaggactgcggcggggaacagggcggctggaggtttacctcacccccacttctgcttccagtgcagtccccctgcccaacagtcctactagtaatctagaggcctgaggcttctgggcccaggtgacaggactggcaccaccctgggggcggtgtgtgtcagccagccatggcacagagggttctcagcaagtgcctaaagaatgggccatttggaacattggacagaaactcaaagagtaaattgttataattggagaatatgaattggcctggtacccaaaatatctcgaggcaccctaaattacctgcccatttgactggacatccacccagtgttaatatgcctcgtgggatgggtgttttcaggggcatttgctgaccatcctctgtgtccccagatttgcagttctccccatcataggtcaccctgatgcaggcacctccctggcctcccatgcctagtgtggccctccatcttgttttgtctcttccctactgtcttcggtgggatcccctcttgggtcccccaatttgtcatcctgtgaagacttcccacgcgtcgaatgccatatgtcacctgtgccactgcccatgtcatccagcagtggccccgggtatttgccccaactcagtccttttaacatgcattttctggcaaaatccaaagcttgggttttgtttttaacctgttaacgcttgcaaacctaataaagcattcaaaatact

SEQ ID NO: 3855 - DNA, 1593 bp, Rattus norvegicus
atgcccagaaagtggatttctgctctgttcctgctacagataagttactgtttcaaatctgggcactgtgggaaggtgttggtgtggccgatggactttagtcactggatgaatataaaaataatccttgatgaacttgtacagaggggccatgaggtcactgttctgaaaccttcggcttacttttttcttgatccgaaaaaatcgtctgaccttaagtttgaaattttttctacatctatcagtaaagatgagctgcaaaatcatttcataaaacttttggatgtgtggacttatgagttgccaagagatacatgtttgtcatattctcctatccttcaaaatctagtttatgaattttcttatttttatctaagtatttgtaaagacgctgtttcaaacaagcagctcatgacaaaactacaggaatccaagtttgatgttcttttcgcagatcctgtggcttcctgtggggatctgatagctgaactgctccacattccttttctgtacagtcttagcttctctccaggccacaaacttgaaaagtccattggaaaatttatactccctccatcttatgtgcctgtaattttgtcgggactggctggcaaaatgacattcatagacagggtaaaaaatatgatatgtatgctttatttcgacttttggttcgagagacttagacacaaggaatgggacacgttttacagtgagattttgggaaggcccaccaccgtagatgagacaatgagcaaagtagaaatatggcttattagatcctattgggatttgaaatttccccacccaacattaccaaatgttgactatattggaggactccattgcaaacctgctaaacccttgcctaaggatatggaagaatttgtccagagctctggagagcacggtgtggtggtgttttctctggggtcaatggtcagcaacatgacagaagaaaaggccaacgcaattgcatgggcccttgcccagattccacaaaaggttctttggaaatttgatggcaaaaccccagcaacattaggacccaataccagagtctacaagtggctcccgcagaatgacctcctgggtcacccaaaaaccaaagcctttgtaactcatggtggagccaatggcctctatgaggcaatctatcatggaatccctatgattggcattcctctgtttggagatcaacctgataatattgcccacatggtggccaaaggagcagctgtttcattgaatatcaggacaatgtcaaagttagattttctcagtgcactggaggaagtcatagacaatccgttctataaaaaaaatgttatgttgttgtcaaccattcaccatgaccagcctatgaagcccctggacagagctgtcttctggattgagtttatcatgcgccacaaaggggccaagcacctgagaccacttggacataaccttccctggtaccagtaccactctctggatgtgattggattcctgctcacctgttttgcagtcattgcagctcttactgtaaaatgtctcttgttcatgtaccgattctttgtaaagaaggaaaagaaaatgaagaatgagtag

SEQ ID NO: 3856 - DNA, 1714 bp, Rattus norvegicus
atggatccatttgtggtcttggtgctcagtctgtcctttctgcttctcctgtatctatggagaccaagccctgggagagggaagcttcctcctggccctactcctctcccaatttttggaaattttcttcagatagatatgaaggacatccgtcaatcaatatccaatttttctaaaacctatggccctgtgttcactttgtatttcggctcacagcctactgtggtattgcatggctatgaggcagtgaaagaagccctcattgattatggggaagagttctctggaaggggaagaatgccagtttttgaaaaggctactaaaggactgggcattagttttagccgtggaaatgtatggagagccacaagacatttcacagtcaataccctgaggagtttgggcatggggaaacggaccattgagatcaaagtgcaagaggaagcagagtggctagtgatggaactgaagaaaaccaaaggctcaccctgtgatcccaaattcatcataggatgtgctccctgcaatgtcatctgctccattatcttccagaatcgtttcgattataaagataaggattttcttagcttgatagaaaacgtgaatgagtacattaaaattgtgagcactcctgcatttcaggttttcaacgcattccctattcttctggattattgtccaggaaatcataagacacattcaaaacattttgctgctattaagagttaccttttgaagaaaataaaagaacatgaagaatcgttggatgtttcaaatcctcgggacttcattgattacttcctaattcaaagatgtcaggaaaatggcaatcagcagatgaactatacacaagaacatctggcaatcctggtgactaatttgtttattggtggaacagagacatcaagcttaacgctgagatttgcacttttgctcttgatgaagtacccacacatcacagataaagtccaggaagagattggccaagtgattgggagacaccgcagcccctgtatgttggacaggatccacatgccctacacaaatgccatgattcatgaggttcagagatatattgaccttgccccaaatggtttgttgcatgaagtgacctgtgacactaaattcagagactacttcatacccaagggaacagcagtactaacatcacttacatcagtgctgcatgcacgtaaggaattccccaacccagagatgtttgacccaggtcactttctagatgagaatggaaactttaagaaaagtgactacttcatgcctttctcagcaggaaaacggaaatgtgtgggagagggccttgccagtatggagctgtttttgttcctgaccaccattttacagaatttcaaactgaaatctctgtctgatccaaaggacatcgatataaactcaatacgttctgagttttcatcaattcctccaactttccagctgtgcttcattcctgtctaatgaagacctaaaagcagaaatgaagatgaggaaacattctattgtgatgtcttctgacatcacccacagaaatttctatttacaactgtcctagaaataccactatgtactttcttcttcccacagcttatgtcttctaattgcccaaagataacaattctacattatacagtttctgaagttaatgtaaaagattctgagaaaaaaaagtcaattcaaataaaaaaaagttctaatgtga

SEQ ID NO: 3857 - DNA, 1788 bp, Rattus norvegicus
gcgcctcgccccgcccggggccgcagacggccagcagcgacagacagccgagcctcgcggggccgtcccagcccgaggaccccgggcctgcgacccccgcggctcgcatcccactttctaagacctctaagaggacgcgccggcctcttcgcggccaccgcgcgcgttccagggctccggaggtgacaggcacaatgctttgggtcctggtggggactgttctccctgtcatgttgctggctgccccaccacccatcaacaagctggccctgtttccggacaagagtgcctggtgcgaagccaagaacatcacgcagattgtgggccacagcggctgtgaggccaagtctatccagaacagggcgtgcctaggacaatgcttcagttacagcgtccccaacaccttcccgcagtccacagagtccctggtgcactgtgactcctgcatgccggcccagtccatgtgggagattgtgaccttggagtgccccggccacgaggaggtgcccagggtggacaagctggttgagaagattgtacactgcagctgccaagcctgcggcaaggaacccagtcatgagggcctgaacgtctacatgcagggtgaagatgggccaggctcccagccaggatcgcactcccactcccatccccaccctgggtgccagacccctgaacctgaagaacctcctggagcccctcaagttgaggaagagggggctgaggactgagggcccccaactcttcctcccctcttgtcccctgtggaatgtctggtcccaccctccagggaagagggaggggagaggcagaggcccccctccccctctggcactagatggacttggaatgttgcctggttgccatggagatctgaagggaggggctggagccaagctgcacgatttaatatatgcaagatgaggggaggaagcagacatctttgggacttttcttttggaaggtgaagtgtggtctttcctttcagccttctggagaggagccctctggatagagaggaagcaggttgagctgctgaggatgactgagatcctcagatagggcaggcccaggtcaggacccagacaacggatggggcaggatccccagtgacgggcagagggtgggtatcatgtcagcatcccctttgcaggaggatctaggtaggaagacagctggcagaagtcggaaactccagccccataggtttccctaaaggcctcccctcatgtaaccccttcaatggagtggcttaggagtcaggctggggcaggaccctgctgactcaggtgccagagtgtcactgaagaagaaagaagatccctctcccccacaccctgtccctccctccagagatcttagctctttgctctccccaagttctggactcttctgaaaacagctgcaaccggtcctgccgtccttggggctggtctttctgaaagaggtgacagtttatccccatcacctgggaccgtagtggacaggaggcccctgcctagggcccctgctgacctcagctttctctagctccttattctatccactccttcttcccagctgcactttaaccttagggcagggcaggtggcgaggaagggccctctgtctccttatctgctggcaccattgtgtccagggggttgccagctcaccccctccctgggggtgccccagcccatggctgtttgacgagagccttagagcttgtaactagtagccatctcccctgaacctgagtgtttccatgaataaaatgccttcaacgcctctacaaaaaaaaaaaaa

SEQ ID NO: 3858 - DNA, 3212 bp, Rattus norvegicus
ggttagacatgccacgcttgctctagaagcctgagctcagggtagacgaccatttcaaaagaaatatttatcaacagtgattgcagacgttcccatcacaaccactgttcagtcatggaccacactcagcagtcaaggaaagctgcagaggcccaaccttcacgatcaaagcaaacaaggttctgcgatggattcaagctatttttggcagccctctccttcagctacatatgcaaagcactaggtggagttgttatgaagagttccatcacccaaatcgaaagaagattcgacataccatcttccatttctggtttgattgatggaggctttgaaattgggaatttattagttattgtatttgtgagttactttggatccaaactacacaggccaaagctgattggaattggctgcttcatcatgggcattgggagcattttgacagcgttgccacatttcttcatgggatattacaagtatgcaaaagaaaacgacattggctctctaggcaactctacattgacctgtttcatcaatcaaatgacatcacccactggaccttcacctgagatagtggagaaaggttgtgaaaaggggttaaagtcacacatgtggatttatgtcttgatggggaacatgcttcgtgggataggggaaacaccaatagtgcccctgggaatttcctaccttgatgactttgcaaaagaagggcacacttccatgcacctaggtactctgcatactatagcaatgattggaccaatccttggctttatcatgtcatctgtgtttgctaagatatatgtagacgttggatatgtagacctgaacagtgtccgaataactcctaatgatgctcgttgggttggtgcctggtggctcagcttcattgtgaatggactattatgcattacttcttccatacccttcttttttctgcccaaaattccaaagaggtcacaggaggaaaggaaaaattcagtatctcttcatgcacccaaaacagatgaggagaagaaacacatgactaatttaacaaagcaagaggaacaagatccttccaacatgactggttttctaaggtctctgagaagcatccttaccaatgaaatatatgttatattcttgatactgacgttactacaagtcagcggcttcattggctcctttacttacctgttcaagttcatagagcagcagttcggccggacagcatctcaggccaacttcttgttaggaattataaccatacctactatggcaactgcaatgtttttaggaggatatattgttaaaaaattcaaattgacatcggttggaatcgccaagtttgtatttttcacctcctcagtggcctatgcgtttcagttcttatattttcctctactctgtgaaaacaagccatttgctggcctaaccttgacctacgatggaatgaacccagtggactctcacatagatgtaccactttcttattgtaactcggactgcagttgtgataaaaatcaatgggaacccatctgtggggaaaatggagtcacttacatttcaccttgtctggcaggatgcaaatcttttcgtggtgataagaagccgaataacacagagttctatgactgcagttgtatcagcaactctggaaacaactcagcacatttgggtgaatgcccaagatacaaatgcaaaaccaactattacttttatataattcttcaagtcactgtgtcctttttcactgcaatgggaagcccatctttaatcttgattctgatgaagagcgtccaacctgaattgaaatcacttgcaatgggtttccattcactgattattcgagcactaggagggattctagctccaatctattatggggcattcattgacagaacgtgtattaagtggtctgtcaccagctgtggaaaacgtggtgcatgtaggctatataactccagattatttggattctcctacttgggtttgaacttagctttaaaaactccaccactttttttatatgttgtattaatttatttcacaaagagaaaatataaaagaaatgataacaagacattggaaaatggaagacagttcacagatgaaggaaacccagattctgtaaataaaaatggatactattgtgtaccttatgatgaacaaagcaatgaaacacctctttaaggaaagagaaagatacatctgttgctgtgttttcaaatacccccggggttctttcactgaaatttttcatactttatatgtaatagagaatttataaccctatgcatttataattaaacaaattgcaaatcaaaagaaataagagaacccttgttagggtatagctgtgcatttgtagctaaagatttggagatatataaacaggtattcgcttaagcatttataactcaataaaatagagaatggggcaaggatggacaaaggggaaagggactgtgaaaaattgttgtctttaaaaatcaaaatttgaatcgtactattcatgccagaagcttctgtgataggtgacttcatgatgtggcatattctggtatccccggtaagtcaaatatatatatatatatatatatatatatatatatatatatatatatatatttttttttttttttggagctggggaccgaacccagagccttgcgcttgctaggcaagtgctctaccactgagttaaatccccaaccctaagtcatatatttttaattattaattttaaattgtgtttaatgacatatccatcttctttgtacatactgtacagaatattgagaataaaacagagacgtttaggatgtgagatatctctgtctatctctatctctacccctagcttcacctccttctctgtctccatctccctatctatctatctatctatctatctatctatctatctatcatctatctatccatctatgtatctgtctatctattatctatctatctatctatctatctatctatctatctatctatctatctatctacaatctccccaaatatctaaaattaagatagagtgaatgagacagatatctgtagacactgtattttcttgtgtgatcagatctagtgtggtggatgatagaagttgaacttgctttattgctatgtgttaaaatattttgtttgcattaaaatggcctattgaaatgcttttctgttcctataataaaataacctgatgaaaaagt

SEQ ID NO: 3859 - DNA, 4050 bp, Rattus norvegicus
ctgaagctggcttttgcgtttttctacacgtacactaattttatggaatagttaaagtgctatattctccgcgcaaccttttcaaattccaaatgtttgaacgttttggtgtcagcgcgagtgaaatcattttaccgacaagaactaactgaattgtctgcctcgttgagttgcctccggaaaagatctcgggggtggaaaagcaactgcaaaataacagacggagaaaattccttggaagttatttctgtagcataagagcagaaacttaagagcaagttttcattgggcaaaatgggggaacaacctatcttcagcactcgagctcatgtcttccagatcgacccaaacacaaagaagaactgggtacccaccagcaagcatgcagttactgtgtcttatttctatgacagcacaaggaatgtgtataggataatcagtctagacggctcaaaggcaataataaatagcaccatcactccaaacatgacatttactaaaacatctcaaaagtttggccaatgggctgatagccgggcaaacactgtttatggactgggattctcctctgagcatcatctctcaaaatttgcagaaaagtttcaggaatttaaagaagctgctcggctggcaaaggagaagtcgcaggagaagatggaactgaccagtaccccttcacaggaatcagcaggaggagatcttcagtctcctttaacaccagaaagtatcaatgggacagatgatgagagaacacccgatgtgacacagaactcagagccaagggctgagccagctcagaatgcattgccattttcacatagtgccggggatcgaacccagggcctctctcatgctagttcagccatcagcaaacactgggaggctgaactagccacgctcaaggggaacaatgccaagctcaccgcagcgctgctggagtccactgccaacgtgaagcagtggaagcaacagctggctgcctaccaggaggaggcagagcggctgcacaagcgggtcacggagctggaatgtgttagtagtcaagcaaacgcggtgcacagccacaagacagagctgagtcagacagtgcaggagctggaagagaccctaaaagtaaaggaagaggaaatagaaagattaaaacaagaaattgataacgccagagaacttcaagaacagagggactctttgactcagaaactacaggaagttgagattcgaaataaagacctggaggggcagctgtcggagctggagcagcgcctggagaagagccagagcgagcaggacgctttccgcagtaacctgaagactctcctagagattctggacgggaaaatatttgaactaacagaattgcgggataatttggccaagctactagaatgcagctaaagaaagtgaaatttcagtgccaatagatgaagagatactgtctgtcttcgtaggactgtttgggctctgtaccaagattgcacaaaattttttgaatatcattcctccagaaggagggtgttttgaaaattggaattgtatatttcagtataaattttagaatttagcttatagctagttgggggaaaaaagacatgaaaaacttgaaccacaaattacctccatgtacattggccatagttaaccagaaagttataagtagacacttaatgcaatcttttcccctgatagtagccaatgggagaattaacaatgtctgggtcccttctcctttttctgttcaacacagtgaagattatctgctttttaaatttatttacgatatctacagctgtgttttgtgtaaaaacttagtaatggaagccctgtctttgttgttatctgaataatttctcaggatatttttttgctgctgagaaagggccattaccaattaatccttgccaggagttggggagctatgtctctaattggaatcactataactgggtgtctggagttcttcccttttcgtactgagagtgttctcactctagtgactcctctggtacactccgtgttctccaatcttgtctgttgtactttacttttccatattgactccatgtatttatgagaagatattatctcccattttattatacattttgaagccaactaaacaaaggcagctgagtccttcagatatttttctttttaaatttatagtaaatttgacacagaactgaaattcagcagtccgtctttgacggtttagtctagcaatgttaaggatatttagagaaaatatgcagttacgtttatttatatatttggcaagaaattttttctggatgatcaatgcttttcaatttatgataaataatggttagggggcgctgtttattatagataattttaaggtatatagctgttttcaaggaggtccacttccgtctagcagccaagcagaggactgtatctaaatcgtgatcgtggcagatgggtcttcatagaaaccatgtctttattcaaacttcatagggcaatattttgaactgttacctaggcatttcaaaacaggaaataccgtcaacagactcttctccaagagcaggttttactgttgttttgatgtaattttaagacatttagcaaacatgcatttctttatatgatacatttctttcacaaaacaatttaaaagtaagccacgtgctgtctgctctgcccgggtaggaattgcatcagaatacatatatcttgctgtacaatgcctgtgatattgaagagggttcttttcatgtatgcttgagtatctaactctggagtcaatgaatgcactgacttttttttttgttcgtaccccaaatgattgaattgttaagtacaaattaagcagattaactcattttttcactcataaacagattcttagtactagttttgttttatatttatgtgtatgtatgtaaatacatacatattaatttatattagagtgaaaaataaattgtttgtttctaacattagtttctacagtaaggtgtctctgaaacatgtgtgtcagacacttagccaccatgcattctatgtgctaccccatcatgccagtcacctccatcgacgttagggtattttccttacctgtctattataaagagaataacttaggtacacatgctcagagccgagatatttctctgataaatcaggtaataaaatctatttgatgggtagaattttgaaaacagacatgattttatctatgagtttctgaatatcaaagaacaccaggttttcatttaaatagaggtctaacactagggatcagggaatttagttatgaagagtttaaaaaaaaaatctaaaaaagtaaaaaaaaaacagtataagctgttgataaggtaagcaaattattttaatgatgtaataaaatatttttaaattttggcatagtgatcatttaatgggaaaatactcaccaaaatgtctccacttgaattgtactgataatgtgaggcatatgtgtaactcaatatatacatatacctatatgtatatacagaaattatttttaatattttcctactgctgtgaaatttaaaattggaaaattttgtgagtgttttccatgtccaatagagcctaactgtttcttttttagtaacttaacaatctcttgagggctgcacctataaagtcccagcttgtcagtagacatgtacagtgtttgggataaggtggacacagtgcacatatgagtaagaccttcctgactattttaaacatcactcacatgaggagagcctctatgctataggttgtgtgcctactgtagcttttccatcgctgtattatatagacatttgcatattaaaatttgattttcccagagataaatattatatagtgtatctatatttagatcaaactgtggtaacatgttgatgagatcatagcgttggggaatgtagcctgaacgtgtggactcgcagagaccccgagggagagcaggggtcaatcccatctgtgtataagttattataactatgaaatcttgtacaaaagcaaaaactggaaaaaaaaacaaaaatacagtttttattttgaaat

SEQ ID NO: 3860 - DNA, 2169 bp, Rattus norvegicus
tgaggaggtgagccagctgcaggctacccttgcagagcaacgatggagaaagaggatcaagagaagacagggaagctgaccctggtccttgccctggcaactttcctagctgcctttggctcctccttccagtatgggtacaacgtggctgctgtcaactcgccctcagagttcatgcagcagttctacaatgacacctactacgacagaaacaaggagaacattgagtccttcaccctgacgctgctgtggtccctgactgtctccatgttcccctttggaggttttataggatctctcatggttggattcttggtgaataacttgggcagaaaaggggccttactgttcaacaacatattctccatcctgccggccatcttgatggggtgcagcaaaattgccaaatcctttgagataataattgcttccagacttctggttggaatatgtgcaggtatatcttccaacgtggtccccatgtacttaggggagctagcccccaaaaacctgcgaggggctcttggagtggttcctcagctcttcatcactgtgggcatccttgtggcccagctgtttggccttcggagtgtcttggcaagcgaggaaggctggccaatcctcctgggtctgactggagtccctgccggcctgcagctcctcttgctgcccttctttcctgagagcccccgctacctgctgattcagaagaaaaatgaatcagctgctgagaaagcccttcagacccttcgaggttggaaagatgtggacatggagatggaggaaatccggaaggaggatgaggctgagaaggcggcaggcttcatctctgtgtggaagctgttccgcatgcagtccctccgctggcaactcatctccacgatcgtcctcatgaccggccagcagctgtcaggagtgaacgcgatttactactacgctgaccagatctacctcagcgcaggggtgaaaagcaacgacgtccaatatgtgacggctgggactggggccgtcaacgtgttcatgaccatggtcacggtttttgtggtagagctttggggacgtcggaatcttctcctcatcggcttctccacctgcctcacagcttgcatagtgctgacggtcgcactggcactgcagaacaccatctcctggatgccctatgtcagcatcgtctgtgtcattgtctacgtcataggacacgccgtggggcccagtcccatccctgccctgttcatcaccgagatcttcctgcaatcctctcgaccatccgcctacatgatcggaggcagcgtccactggctctctaacttcatcgtgggcctcatcttcccgttcattcaagtgggccttggtccttacagcttcatcatctttgcgattatatgtctcctcacctccatctacatcttcatggtcgtcccagagaccaagggcaggacgtttgtcgagatcaaccagatttttgccaagaagaacaaggtatcggacgtatatccggagaaggaggaaaaggagcttaatgacctcccacctgctacccgggagcagtagcagagccaggccaccaggcagtatggccagtctgcatgggcctcctgtctagactttggttctgggttcttagtgtctgtgacactgggagggacacgagcctggcggggaatggcagccctccactcagtggggacacctgacgggctttcgtgcttccgtgctgtccctaaccatagaggccagtcacgggctcttggtcacacacaaagccatacctggcctttgctgggttgactgtggcgagggtcttgtaacattgcttttctaacaaaaacagttgccgagagacaagacgtgacggtcctattttttttttaactttttttttctattcttttttttttttttttttcggagctggggattgaacccagggccttgcgcttgctaggcaagcgctctaccactgagccaaatcccttgtgtggctcctcccatgggcgtggagagaccactggcatctgctggtgattgatgtggtcctctttttctgacccagccatgtcacaaagctgaggaacaggccacttggggagacacacggagcgtgaattatcaactgtcaacgacagtattctgtttagccaataaaacagatctgatcacttcttaaaa

SEQ ID NO: 3861 - DNA, 3513 bp, Rattus norvegicus
gtgcagccaccctcgcctgcctcgctcttccttccttcgctcgcaccatggctgatcagctgactgaagaacagattgctgaattcaaggaagctttctccctatttgataaagatggggacggcaccatcacaacaaaggagctggggactgtcatgcggtcactgggtcagaacccaacagaggctgaactgcaggatatgatcaacgaggtggatgccgacgggaatggcaccattgacttcccagagttcttgactatgatggctagaaaaatgaaagacacagatagcgaagaagaaatccgtgaggcattccgagtctttgacaaggatggcaatggctacatcagtgcggcagaactgcgccacgtcatgacaaacctcggggaaaagctaacagatgaagaagtagacgaaatgatcagagaagcagatattgatggagacggacaggtcaactatgaagaattcgtacagatgatgactgcaaaatgaagacctactttcaactactttccccctctagaagaatcaaattgaaatcttttacttacctcttacaaaaaaaaaaaagaaaaaagaaaaaagttcatttcttcattctgtttgtatctagcaaaactgaatgtcaaaagtaccttctgtccacacacaaaatctgcatgtattggttggtggtcctgccccctaaagatcaagccccctacatgagttttacagtataaatactcgtactaccttataaggaagcacttagtggactccttcaagttccatttgctaatgattaacacactgtctgggctggccagtttctcatgcatgcagcttggtgattgagcacagtcaggcctttgtattaaaactgaaaaatggaaaaaacaaattcaaactctcagatggcttctagttcaatctgttcagataaatgtcagcagccagtttaccgcaaacaaacatttaaaattggtttacctcaggatgatgtgcaggaaacgggtgaaggctaaactttgagacacagccctagatgtaggacagtcctcttcaagtgccccaatcccatggtgacagtgacaccctggtggcgagcccgagtgtgatggttcaccgctgtgcacattgcattggagtgaagtgaacaaggctgtcaccaaatcacacacgttttaataagaaatgtttactaagggagcatctttggactctctgttttaaaaccttgtgaaccatgactcggagccagcagagtaggctgtgtctgtggacttgagcacaccatcaacattgctgttcaggaaattataatttacgtccattccaagttgtaaatgctagtcttttattttttttttccaataaaaagaccattaacttaaaagtggtgttaaatggtttgtaaagctgagcttggaagggggacaaggccgttggaggggaggtcagcggacatagaaacacccaacgtccagtacaagctggatttcccgcccaggttctctagcatcaacccctgaaaccagacagattctttgtcatctacgaccatgtaagtctagttattcaaatctgcgcgcatgcgcaaatcatggtgaattgatacttggagtagagccctagtgaaggaaggcctcaagcattcagtaaggatgtcttggctgtgctgctgctgacctgttgaagtacatgaggccatctgtgcaggagacatgatttagtgtgtgtgtaatcctatactcactgtgtatggtgaagcaggccagtcaaagacactacctttgattcagtttaatttatggttatacttaactttagccttttttattatttaagttcactgctttttctccccctaagtagagttaatgcttaacactgtcttgaaagcaaaacaatatcccagaatgaattttgtgtcttaattacgaacctgtaaccaaaacgtacatgtgctggtactggtcccttagcccaaggcactgggctatttaaaaagtcccccttaagaagtgtgttgcatttaaaacaagggccttgtacatttttcagggtgttaactggctgtatctgattaataaggagtgttggcttccaaattcgggggtggcagggagctggcaggcttgtagcaaggcaatgagaagcccttggcaaccacacgggtgcactcggggtaacctacagacccctggttgctccttctcctgctccctgtctttctggcgttttgtagctccttagaattttttttctttctgccaggaggataggtcagagcagtagagaggaagacattgcctgagcgcttctgctcatctttggactgggtggttggcagacaggtcgatgggtggtaaattgacttcagtatcggactcagtaggtattcccttttggtagagaggactgagggctccaggtgtgaagtgaatggccgtggatatgttgtgtaagaggattaagtcgcccagtcgatgacccagtctcaggcttgtggtctgttacctcttggtagtttcaaagggggtcggaggtggctttttaaaaacaatttaccccctatctttaaccatttaccaagtctgtagaagctgggtagacaatattttagcagctccgtagcctgtcctaaaaggttaccttctaaacaggattcttgtgtggccagggatcctgcatgggaactggaaacccctaacccccggggggtgggaagcaggagtttggaactgtaggaggcagagtccccccacctcctcagccttctggcatccaggggcacaagcagcccagggcttggtgttggcagtctgagttcgtgaggtagaaagagtggggtgtcaaggcagtacccctgaagttggatagtactttcctgtaaactgtccctcacttataactactctataaatatatgcatatatttatataaatatatatatataagtgactggttagctggcatcctgctttagcctgagacttgccctaagaaactgctgagcccttggtaaacgtctacacagtaagtttttctgtctgttggggggagctgttgaacaaggcagacatcttgatagttcagatgggctttaatgtactgttgccagggaaggctttttctggttttttgacaaatttttagcacacttcaattggtgtctcgagcaactttaacacattgaagatgaggtattgtacatatttttatattctctttataagtgcatgtctccaacttgtaaccaatattgtacggaatggctgtccagtaggcctagtgtttctgtcacacgagagggatagcatgtaccattcacccctcagcatcctgggagcttcttcttgaatgaagactgtaaatttggtcaagtcaactcttagttcggtttccttaccatttgaatgattgactgtgtgtcctgcgtgtatttctcttttggcagcgaccagagttacactgatgtgtctcaaccgacccactcggctggcaaccacctatttattttct

SEQ ID NO: 3862 - DNA, 2455 bp, Rattus norvegicus
agagaagcagagaagcagagcaagcggcgcgttcccgaacctcgggcaagaccagcctctcccagagcatccccaccgcgaacgcacccttctccagagcataccccagcggaggccacccttccccagagcatccccgccgccaagcgcaaccttccagaagcagaccgcagcgacatggccaagaaaacagcgatcggcatcgacctgggcaccacctactcgtgcgtgggcgtgttccagcacggcaaggtggagatcatcgccaacgaccagggcaaccgcacgacccccagctacgtggccttcaccgacaccgagcggctcatcggggacgccgccaagaaccaggtggcgctgaacccgcagaacaccgtgttcgacgcgaagcggctgatcggccgcaagttcggcgacccggtggtgcagtcggacatgaagcactggcccttccaggtggtgaacgacggcgacaagcccaaggtgcaggtgaactacaagggcgagaaccggtcgttctacccggaggagatctcgtccatggtgctgaccaagatgaaggagatcgccgaggcgtacctgggccacccggtgaccaacgcggtgatcaccgtgcccgcctacttcaacgactcgcagcggcaggccaccaaggacgcgggcgtgatcgcgggtctgaacgtgctgcggatcatcaacgagcccacggcggccgccatcgcctatgggctggaccggaccggcaagggcgagcgcaacgtgctcatcttcgacctggggggcggcacgttcgacgtgtccatcctgacgatcgacgacggcatcttcgaggtgaaggccacggcgggcgacaccgacctgggcggggaggacttcgacaaccggctggtgagccacttcgtggaggagttcaagaggaagcacaagaaggacatcagccagaacaagcgcgcggtgcggcgcctgcgcacggcgtgcgagagggccaagaggacgctgtcgtccagcacccaggccagcctggagatcgactctctgttcgagggcatcgacttctacacgtccatcacgcgggcgcggttcgaggagctgtgctcggacctgttccgcggcacgctggagcccgtggagaaggccctgcgcgacgccaagctggacaaggcgcagatccacgacctggtgctggtgggcggctcgacgcgcatccccaaggtgcagaagctgctgcaggacttcttcaacgggcgcgacctgaacaagagcatcaatccggacgaggcggtggcctacggggcggcggtgcaggcggccatcctgatgggggacaagtcggagaacgtgcaggacctgctgctgctggacgtggcgccgctgtcgctgggtctggagaccgcgggcggcgtgatgacggcgctcatcaagcgcaactccaccatccccaccaagcagacgcagaccttcaccacctactcggacaaccagcccggggtgctgatccaggtgtacgagggcgagagggccatgacgcgcgacaacaacctgctggggcgcttcgagttgagcggcatcccgccggctcccaggggcgtgccccagatcgaggtgaccttcgacatcgacgccaacggcatcctgaacgtcacggccacggacaagagcaccggcaaggccaacaagatcaccatcaccaacgacaagggccgcctgagcaaggaggagatcgagcgcatggtgcaggaggccgagcgctacaaggcggaggacgaggtgcagcgcgagagggtggctgccaagaatgcgctcgagtcctacgccttcaatatgaagagcgccgtggaggacgagggtctcaagggcaagatcagcgaggctgacaagaagaaggtgctggacaagtgccaggaggtcatctcctggctggactctaacacgctggctgagaaagaggagttcgtgcacaagcgggaggagctggagcgggtgtgcaacccgatcatcagcgggctgtatcagggtgcgggtgctcccggggctgggggcttcggggcccaggcgcccaagggaggctctgggtcggggcccaccatcgaggaggtggattagaggcttttctggctctcagggtgttggctagagacagactcttgatggctgctggtgcacgattcttatcaagttactccttctctccggagttcagtttaaagttacagccttttatacggtaattgatttgagtttgttacattttgtatgctcgtgggttttttatatattcaaattaaggttgcatgttctttgcgtttaatctaagtagctgtgtaaaaatggtgtttccttcctgcgaacacctcagcactgccaccctgtgtacagttttttccttgcatccctacaaactgagaaaaaaagttatcttttgtaacttaaacattcaaaataaaatgttacaagt

SEQ ID NO: 3863 - DNA, 1846 bp, Rattus norvegicus
cggatgcctgggaagtggatttctgctctgctcctgctgcaaataagtttctgctttaaatctgggaactgcggaaaggtgttggtatggccgatggaatatagtcactggatgaatataaagataatactagaggaacttgtacagaagggccatgaagtcactgttctgagaccttcagcttctgtctttcttgatcccaaggaaacttctcaccttaaatttgtaacttttcctacatctttcagtagtcatgacctggaaaatttttttacaaggtttgtgagtgtatggacttatgagttgccaagagacacatgtttgtcatattttctttatctacaagatacgattgatgaatattctgactactgtctgactgtttgtaaagaagcagtttcaaacaaacagttcatgacaaaactacaggaatccaaatttgatgtcgttttctcagatgccattggtccctgtggagagctgatagctgaactgctccagattccttttctgtacagtcttcgcttctctcctggctacacaattgaaaagtacattggaggagttctattccctccttcctatgtacccatgattttttcaggattagctggccaaatgacattcatagagagggtacacaatatgatatgtatgctttattttgacttttggttccaaacatttagagagaagaaatgggatccattttacagcaaaactttaggaaggcccaccacattagctgagataatgggcaaagcagaaatgtggctcattagatcctactgggatttggagtttccccacccaatatcgccaaatgttgactacattggaggactccactgcaaacctgctaaacccttgcccaaggatattgaagacttcgtccagagctctggagagcatggtgtggtggtgttttctctggggtcaatggtcaggaacatgacagaagaaaaggccaacatcattgcatgggcccttgcccagattccacaaaaggttctttggagatttgacggcaaaaaacccaccaccttaggacccaataccagactctacaagtggcttccccaaaatgatcttcttggtcatccaaaaaccaaagcctttgtaacgcatggtggagccaatggcatctatgaggcgatccatcatggaatccctatgattggcattcccttatttggagagcaacatgataacattgcccacatggtggccaaaggagcagccgccacagtaaatttcaggacaatgtcaaagtcagatttgctcaatgcactggaggaagacatagacaatcctttttataaaaagaatgctatgtggttgtcaaccattcaccatgaccagcctacgaagccactggacagagctgtcttctggattgagtttgtcatgcgccacaaaggggccttgcacctgagatcacttggacataaccttccctggtacctgtaccactctctggatgtgattggattcctactttcctgtgtggcagtcactgtagtccttgctctaaagtgctttttatttgtttatcgattctttgtaaagaaggaaaagaaaacaaagaatgagtagagctcaatgataatgcatcacatgaatgaaatttgttcatcattttaagttatgaaccaccttctaaaaattcattaataactttacagaagcatattgtaattttgtatcatgtaaaaagacatataattctgaggcttctgatatgtgatcaaagaatcccatcatttattttaattttcaaactattcaatgtaaaacaatttgcctgtgtagaaaaatatataaataaagatttaattgaaaaaaa

SEQ ID NO: 3864 - DNA, 1474 bp, Rattus norvegicus
tggctggcagttgaggcttctgcaagtccagggactgtagtggagatgccgggtgccgcggcgaagggctcggagttgtccgagaggatcgagagcttcgtggaaactctgaagcgaggtggcgggcggcgcacgtcggaggacatggctcgggagaccctggggctgctgcgccggctcatcacggaccaccactggaacaacgccggggacctaatggatttgatccgcagagagggtaggaggatgacagccgctcaccctcctgagaccaccgtgggaaacatggtgcggagagtcctcaaaatcatacgggaggagtatggcagactgcatgggcgcagtgatgagagcgatcagcaggagtccctgcacaaactcttgacatccggaggcctgagcgaggatttcagcttccattatgccccacttaagtccaacatcattgaggcgattaatgagctgctagtggaactggaaggcacaacggagaacattgcagcccaagctctggagcacatccactccaacgaggtgatcatgaccattggcttctctaggacagtcgaggctttccttagagaggcagcccagaagaggaagttccatgtcattgctgcagagtgtgctcctttctgccagggacatgaaatggccgtcaatttgtccgaagcaggtatcgagacaactgtcatgaccgatgctgccatttttgctgttatgtcaagagtcaacaaggtgatcattggtacgaagactatcctggccaatggttccctgagggctgtggcaggaactcacactctggcactggcagccaaacaccactccacgcctctcatcgtctgcgcacccatgttcaagctctctcctcagttccccagtgaagaagattcatttcacaagtttgtggctcctgaagaagtccttcctttcacagaaggagacattctggagaaggtcagtgtccactgtcctgtgtttgactacgtgccccctgacctcattaccctctttatctccaacattggtgggaatgcaccgtcctacgtctaccgcctgatgagcgagctctaccatcctgacgaccatgtcctctgacacggcctgtcctatgcggaaccagcttagacccggagtggagtggagacacagtgttgctgctgcagtggggactggagagtcagcctgaaccctcagtgcctgtcacctgccttcctactcatgcccagtgaggagtggtccaggactgctcctgccttctgggcttatctgagcagcaggccttgcttccctggcattttggggccactttgtgactaggctgtgtttgtttcaggaacttcaacctcctggctctgtggtgtgttacacatacataccataactacttttgctgggtcggtgtttgctcagaaatgccttccagaccttttcctaatctgtgtcaataaaagctactggaagctcaaaa

SEQ ID NO: 3865 - DNA, 777 bp, Rattus norvegicus
ttgatgctgcacctcctggccagtctcggattgttggaggatataaatgtgagaagaattcccaaccctggcaagtggctatcatcaatgaatacctatgcgggggtgtcctgatagacccgagctgggtgatcacggctgcccactgctatagcaactattaccatgttttgttgggtcgaaacaacctatttgaagatgaaccctttgctcagtaccggtttgtcaaccaaagcttccctcaccctgactacaagccatttctcatgaggaaccacacccgacaacgtggagacgactacagcaatgacctgatgctgctccacctcagcgagcctgctgacatcacagatggggtgaaggtcattgatctgcccacggaggagcccaaggtggggagcacctgccttgcctcgggctggggcagcaccaaacccctgaattgggaattacctgatgatctccagtgtgtgaacatccacctactgtctaatgagaagtgcatcgaagcctacgaacagaaggtgacagatctcatgctgtgtgcaggagagatggatggacgcaaagacacttgcaagggtgactcaggaggccccctcatctgtgatggtgtgcttcaaggcatcacatcgtggggcaatgtcccatgtgctgaaccctataacccaggtgtctacactaaacttattaagttcacctcctggataaaagaagttatgaaggaaaacccctgagtgtcacactgtgccctgatctcaataaaacccaccatgc

SEQ ID NO: 3866 - DNA, 1886 bp, Rattus norvegicus
cggcggcccgtctttgctctccaactgtcacttactttcttgagtgtgccttctttcaggatgtagaactctttgtccactccataggactcctgtaactttgtgggggcttgtctggggatctgaggatcaacacacacacatacacacacactcacgcacgcacgcatacacacacgtgtgtatagttcatgcactcgggtttgaaagatctctgcttaaagtcggtgtaactgactaaagacggctagggagggatcggggaagcctcgatcatccggtaccccaagcgacatcacaaagtaagggtctcttcccagccgtgattatcataaccgtctcccccagtcagctcccttttattgtctattggtgactgagaagattaggggacctaatctttggggaccagtggcttttgatctcccatagataaatggtgagtcgaaccagagcaggggtttatacccccaccccaaagccaacccttccccaagaaaaggttacattccagggcaggaaaacctccttccacccccagcatgtcgagtcaacctcctggtccccgtgatattcgggtgacctttgtcatgtagcccctcccacagacactcctcgaggtgcaaagggacgtgtgtgactaagctatcctccactggggagtcttctgggttagttttgtgcctttgtgacaagaggcacagcgtttcttccctatgtgaaaagagcacaggacgggccatctctaaagcatttctggtgcagacagctcaacctttgaccgaggtgagaagggagagaggcctaagacacagctggcgtgtctttccctctgtgcaaaagtactaagttagaaagaaacttatcgcatcttggtccctgagaagactgggttcaaagaggagtctgggggtaaccactgcccagcatcaccagccacagcatggcatacccgtaggaggggaccagaaagctggcaggcaggcaagatgctcaagaggcctccttggaagccagccatagccacacagcctccagcactcagcaccagaagtttccagttcttggctgcgtatctgctgtttgaatcaattcacccacgctgtctctcccctcttcccaccagccccccaaccttgcctctggaacagcatcaatattcatatcctaaatttaaacggcacagagagctgactccacatttcctgcccaacagacccatattctttctagatcagatccaattgtggctgcccagtgggtccccagggtaccactcaatggggccctgtatgcaggcccggtggttgtccagctcctccctaatcttggcccctattggcagtcgcagtctcagcctgcagcggactgcgccaagtccacacccagtcctctctggaggaagaaaagggagcttctctgtctaccctcctagtcctcggacaccgaagccagagaggactccggcggcaaaaggtgaccaggaggtgagaaagaatcactggcaggacccaagaaaaaccgcttctttctctctttgcagggtgagggggttaaggggataggatgggaatcgagccttgaaaccttttagaaaacccttgggaacgtttggccgcattccaaggcttccgatgaggctgcctttcttgtttccttgtgacggttgttgacatctgtgctgccatggaattgtgtctgtccctgttttcgtgaagccagagatcccttgggtcattttttcaagattcagaatgactactgatgttttcagagatggcatctagggcttcttctctacgtcctaagggaaggattttctttcttggaatagagtcaccccaaatccccaaccacagcgctccctttctcctggtagcttttcc

SEQ ID NO: 3867 - DNA, 1469 bp, Rattus norvegicus
ggacggcgttccccacccttaccgttggttggctgtccatgttcacaggggctgttggattcttcatttcctgtaccgggatcgtttctgacgcaaatcaaaccagcctagcacttttaatagcactctgacggctccggtttaatcgtctcctctctctctctctctcttaggaaatcaaagagcaggaagtggtggacaaagtgatggagacgctggacgaagatggggatggggagtgtgacttccaggagtttatggccttcgtctccatggtgaccacagcctgtcatgagttctttgaacatgagtgagacaaaaaaaaaaaaaaaaagtggctgagccgtttccccgtggcagacatgagggccacgagaggaggcacggcagaaggctcgtgggctggaaggagctgcgctctctagacgcatataactaattaggaagcttgatttgcttcagggatgaaactctgaccccgttcccaagggctgctttaagttagcacttcgtttctgctacactaggtattcctgtgagctgaatggtcccgggaactattgataagagtcactgagggacgaaatcaacactctgtgggtatagcactggttgtagaccaccatgctcctgtggaagggtcacctgtaagaatcaaggcagactaccaatagcacctccgttggacagctttcttaggtgtaatgtatgctgtccatgcatctacagacccacagctggatccactgccacccgaagaggttggctcgcccttacaactgcttgtcctctgtgcaaacgatgccccggaaagttagacctatcacccacaccctcccaccacccccaggccaaaaggacagcccacccaagtcccctcccccacagcgaatcgcggtttgttaccaagtacgtatttgacatcaacgattccaactggtggaacgattagatctcgcacactaagtattagcaccctaactcacgaccgagaatcaaaattctgctcagtagacgtctcctttcaggatgacaccattgtccccataggacacggacagaggagggcactggagagagtgtcaggtctttttctagctgtatcttcctctctccctctgctgcccataatgtgagtgaccctctagggtgagacttgcagggtgagctgctgaggaatgaagggccactgagatgtgtcctttagctgctgggtgtcatgtctgacctgctggtgcctagggcctgcttaacactcggcaaggctgcgagccgaggactgtgggaagccggacttgatgctttctaacctgcatatttgaatgccgaaggtcaaacaatccaagttacagataaataaaaaccgcattgcaagtattaaaaagccattctaggaaaattccaattgcccccacccacccccttttttagtacgttatttattattattatttttcctcggcgtcgag

SEQ ID NO: 3868 - DNA, 1399 bp, Rattus norvegicus
acacggctctcagaaagccttggctggaccagatgggcgggaggaggatgcctctctgggcactcttgttgctctggacctcttgtagcttcagtctcccgacagacacagccagctttggacgaatcttgctcaagaaaatgccctcggtccgggaaatcctggaggagcggggagtagacatgaccaggatcagtgctgaatggggtgaattcatcaagaagtcttcctttaccaatgttacctcccccgtggtcctcaccaactacttggatacccagtactatggtgagatcggcattggtaccccatcccagaccttcaaagtcatctttgacacgggttcagccaacctctgggtgccctccaccaagtgtggtcccctctacactgcctgtgagattcacaacctctatgactcctcggaatcctctagctacatggagaatgggactgaattcaccatccactatggatcagggaaggtcaaaggtttcctcagccaagatgtggtaactgtgggtggaatcattgtgacacagacctttggagaggtcaccgagctgcccctgatacccttcatgctggccaagtttgacggggttctgggcatgggcttccctgctcaggctgttgatggagtcatccctgtcttcgaccacattctctcccagagggtgctaaaggaggaagtgttttctgtctactacagcagggagtcccacctgctggggggcgaagtggtgctgggaggcagtgaccctcaacattaccagggcaactttcactacgtgagcatcagcaaggccggctcctggcagatcaccatgaagggggtctctgtggggcctgccaccttgttgtgtgaggagggctgtatggcagtggtggacactggcacatcctatatctcgggccctaccagctccctgcagttgatcatgcaagccctgggagtcaaagagaagagagcaaataattacgttgtgaactgtagccaggtacccaccctccccgacatctccttctacctgggaggcaggacctacactctcagcaacatggactatgtgcaaaagaatcccttcaggaacgatgacctgtgcatactggctctccaaggcctggacatcccaccacccactgggcctgtctgggtcctgggtgccaccttcatccgcaagttctatacagagttcgaccggcataacaatcgcatcgggttcgccttggcccgctaagctcctctgtcacccagtgaccctagttttaggccaagccaaagctggcgttcctgggggccattctgtctggctctgcccccaacatagggacactggacacagagcccttggatgagtgcttgtccctgcggctgcctgcactcacccttccctgc

SEQ ID NO: 3869 - DNA, 2924 bp, Rattus norvegicus
cccccgggctgcaggaattcggcacgagggaaactcgagggggacctaaaactggcccaagagtccacaatggacgtagaaaatgacaaacagcagctcgatgagaaactcaaaaagaaagagtttgaaatgagcaacctgcagagcaagatcgaggatgaacaggccctcggcatgcagctgcagaagaagatcaaggagttgcaggctcgcattgaggagctggaggaggaaatcgaggcagagcgggcctccagggccaaagcagagaagcagcgctctgacctctcccgggaactggaggagatcagcgagcggctggaagaagccggcggggccacttcagcccagatcgagatgaacaagaagagagaggccgagttccagaaaatgcgcagggacctggaggaggccaccctgcagcacgaagccacagcagccaccctgaggaagaagcacgcggacagcgtggctgagctcggggagcagatcgacaacctgcagcgggtgaagcagaagctggagaaggagaagagcgagatgaagatggagatcgacgacctcgctagcaacatggaggtcatttccaaatccaagggaaaccttgagaagatgtgccgcactctggaggaccaggtgagcgagctgaagaccaaggaggaggagcagcagcggctcatcaatgagctgaccgcgcagagggggcgtctgcagacagagtcaggtgaatattcacgccagctggatgaaaaggattcattagtttctcagctctccaggggcaaacaggcattcactcaacagattgaggagctgaagaggcagcttgaagaggaagtaaaggccaagagtgccctggctcatgctcttcagtcctcccgccatgactgtgaccttctgcgggaacagtatgaagaagaacaggaagccaaggctgaactgcagagggccatgtccaaggccaacagtgaagtggcccagtggaggacgaaatatgagacggatgccatccagcgcacggaagaactggaggaggccaagaagaagctggctcagcgtctgcaggatgctgaggagcacgtagaagccgtgaacgccaagtgtgcttccctggagaagacgaagcagaggctgcagaatgaggtggaggacctcatgattgatgtggagaggaccaacgctgcctgtgccgccctggacaagaagcagagaaacttcgacaagatcctggcagaatggaaacagaagtatgaggaaacgcatgctgaacttgaagcctcccagaaggagtcccgctctctcagcacagagttgttcaagattaagaatgcttatgaggaatctttagaccaacttgaaaccttgaaaagggaaaataagaatttgcaacaggagatctctgacctcactgaacagattgcagaaggagggaaacgtatccatgaactggaaaaaataaagaagcaaattgagcaagaaaaatccgagctccaggctgctttagaggaagcagaggcatctctggagcacgaggagggaaagatcctgcgcatccagctggagctgaaccaagtcaagtctgagatcgacaggaagattgctgagaaggatgaggaaattgaccagctgaagagaaaccacattcgagtcgtggagtccatgcagagcacgctggatgccgagatcaggagcaggaatgacgccatcaggatcaagaagaagatggagggagacctcaatgagatggaaatccagctgaaccactccaaccgcatggctgctgaggccctgagaaactacaggaacacccaaggcatcctcaaggacacccagttgcacctggatgacgctctccggggccaggaggacctgaaggagcagctggccatggtggagcgcagagccaacctgctgcaggctgagatcgaggagctgcgggccactctggagcagactgagaggagcaggaagattgcagagcaggagctgctggacgccagtgagcgcgtgcagctcctccacacccagaacaccagcctcatcaacaccaagaagaagctggagacagacatttcccagatccagggagagatggaggacatcgtccaggaagcccgcaatgcagaagagaaggccaagaaagccatcactgacgccgccatgatggcggaggagctgaagaaggagcaggacaccagcgcccatctggagcggatgaagaagaacctggagcagacggtgaaggacctgcagcaccgtctggacgaggctgagcagctggcgctgaagggcggcaagaagcagatccagaaactggaggccagggtccgtgaacttgaaggagaagttgaaaacgaacagaagcgcaatgttgaagctatcaagggtctgcgcaaacatgagagaagagtgaaagaactcacttaccaaactgaggaagaccgcaagaacgttctcaggctccaggaccttgtggacaaactgcaatcaaaggtcaaagcatacaagagacaagccgaggaagcggaggaacaatccaacgtcaacctggccaagttccgcaagatccagcacgagctggaggaagccgaggagcgggctgacatcgccgagtcccaggtcaacaagctgcgggtgaagagccgcgaggttcacaccaaaatcataagcgaagagtgatcgatccaaagcaggaaagtgaccaaagagatgagcaaaatgtgaagatctttgtcactccattttgtacttacgactttgggagataaaaaatttatctgccaaaaaaaaaaaaaaaaaaaaaaaaaaaaaaaaaaaaaaaaaaaaaaaaaaaaaaaaaaaaaaaaaaaaaaaaaaaaaaaaaaaaaaaaaaaaaaaaaaaaaaaaaaaaaaaaaaaaaaaaaaaactcgagggggggcccggt

SEQ ID NO: 3870 - DNA, 3315 bp, Rattus norvegicus
gagcagagttgggagagcagagcccaggctcgcagctcctctccgccaagctcaggcaccgtcctccccgcgccatcacagacccccggccgcccgctcagcaatgagggtcctgagcgtgcgctttcgggtgctactggcctgcctcgccctggtgctcccaaactcagagacaaacttcttgtcaaaagaacgagcttcacaagtcctggtgaggaagcgccgtgcaaataccttgctcgaagaaactaaaaagggcaaccttgaaagagagtgcattgaagaactctgcaataaggaggaagccagggaggtctttgaaaataatcccgaaacggattatttttatccaaaatatttaggttgtctgggcgcattccgagttggcgcattcagtgctgcgaggcagtcagctaatgcttaccctgacctcaggagctgtgtcaatgccatcccagaccaatgtgaccctatgccatgcaatgaagatgggtatctgagctgcaaagacggccaaggtgcttttacttgcatctgtaaaccaggctggcaaggagacaagtgtcagtttgatataaatgaatgcaaagatccctcaaatatcaatgggggctgtagccagacttgtgacaatactcctggaagttaccactgctcctgtaaaattggctttgctatgctcacaaataagaaagactgcaaagatgtggatgagtgctctctaaagccaagtgtctgtggcacagctgtgtgcaagaacattccaggagacttcgaatgtgaatgtcccaatggctacagatatgatccctcatcaaaatcttgtaaagatgtcgatgaatgctctgaaaacacctgtgcccaactgtgtgtcaattaccccggaggctactcttgttactgtgatgggaagaaaggattcaaacttgcccaagatcagaggagttgtgagggtattccagtgtgcctttccttggaccttgacaaaaattatgaattattatatttggcggaacagttcgcaggagttgtcttatatctgaaatttcgattgccagatatcaccaggttttcagctgaatttgattttcggacatatgattcagagggcatcatactgtatgcagaatctctcgatcactcaaattggctcctgattgcacttcgtgaagggaagattgaagttcagtttaagaatgagttttcaacccaaatcacaactggaggcaatgttattaacaatggtatatggaatatggtgtctgtggaagaattagacgacagtgttagcattaaaatagctaaggaggccgtgatgaatattaataaacttgggagtctttttaaacctaccgatggatttctggacaccaaaatatactttgcaggattacctcggaaggtggaaagtgcactcattaagccgattaatcctcgtctggatggatgtatacgaggctggaacttgatgaaacaaggagctttgggtgcaaaggaaatagttgaaggaaaacaaaataaacattgcttcctcactgtggagaagggctcctactaccctggttcaggaattgctcagttcagcatagactacaataatgtaactaatgcagagggttggcaaataaatgtgaccttgaatattcgcccgtccactggcactggagtcatgcttgctttagtttctggggacacagtgccctttgccttgtccttggtggattctggctctggaacttctcaggacattctggtatttgttgaaaattcagtagcagctcacttagaagccataactctgtgctcggaacagccatcccagctgaaatgtaacattaacagaaatggactggaactgtggaccccagttagaaaagacgtcatttactctaaagatctccaaaggcaactcgccatcttggacaaaacaatgaaaggaaccgtggccacttacctgggtggcgttccagatatttccttcagtgccacaccagtgaatgctttttacagcggctgcatggaagtgaacatcaacggggtacagttggatctggatgaagccatttccaaacataatgacattagagctcactcctgtccgtcagtgaggaaaatccagaagaacttctaaagtctgtttcctgggcttctaatctctcttttcatattgtaattatgctcttgttcatgtttccatcaccaaatggcagggtgacatgtgttatatgcaggtttaaatatgatgtggtactttggtccttcagatttttgttatataagtcgtatttttgaaaagtcttgtactcactgctgtctagaaattaaataacaaaacacatccggaattctaaatcagggtactcagtgacctgctaaagatctttaatggtagagagggacttcactggcgatgactgtcaactatgtgagcccgggaccccgaggaggtctctcggacatgcccggacaaaacccactgcggttggagtctcctgacagaacttcgaccttctggagaagtcctcaatatttgtacagtcagtgttgtcgacacaagaacgtagccgacaggcagaagaggagtcggtatccctgtggaaggggacagtcgacgtcctttcgtaacacagtgaacaccgtacggttgtccggcgtcaccccaaacctataataaaactgatctgtgcgatgaagtgtagagactcaaaacaaaccggtagataacctcccctattggcaatctttttcgagtgagattaggaatttactccactcacacggaacgtacactgtagtggacagaaatttatcctggagtgatacatcgtaaccgaccggacgtcaagtggtatatgcggtccaaccggaacttgagggtcgtctggggacgcagacagaggactcacaactctactgggtagacgtgggagtgtgggtcggaactggtagtggaaattgccaaaatacttatggtttataacgatgaaagaaagtgtacgattcaggtcttagtctggcgcaacaaccacaataacaaggaacaaacaaactcgttcataatttgagtcctgcggtggacacgatccacagtctttgtacctagaactgaagtaccattctcacaacctccgcgtctcatcgtcactgcgtcaaacaaaacgttggagcgtttgggtccgcagtatctctgtcactaactcgtgtctcttgacaaaaaggctgagtctgagtcgggggtgggagggaaaaagtaaccgactcgcgagaactcgtggtggacccaaaaaagaaagggaggcgataatgtaagtggag

SEQ ID NO: 3871 - DNA, 987 bp, Rattus norvegicus
gaattccctttcttcgaccccgctggaggtggagacccaattctttatcaacacctattctgattcttcggccacccagaagtgtacatcttaattcttccagggtttggaattatttcacatgtagttacctattactctggaaaaaaagaacccttcggatatataggtatggtatgagccataatatctattggcttcctaggatttattgtatgagcacatcacatattcacagtaggcctagatgtagacacccgagcctactttacatctgccactataattatcgcaattcctacaggcgtaaaagtattcagctgactcgctacactacatggaggaaatatcaaatgatcccccgccatattatgagccttagggtttatcttcttattcacagtagggggcctaacagggatcgtactatctaactcatcccttgacattgtacttcatgatacatactacgtagtagctcacttccactatgtcttatctataggagcagtattcgccatcatagcttgcttcgtccactgattcccactattctcaggctataccctaaatgacacatgagcaaaagcccactttgccattatatttgtaggtgtaaacataacattttttcctcaacacttcctaggattagcagggatacctcgtcgttactctgattatccagatgcttataccacatgaaatacagtctcctctataggctcattcatctcacttacggccgtccttgtaatgatcttcatgatttgagaagccttcgcatcaaaacgagaagtgctctcaatttcctactcttcaactaacctagaatgactgcatggatgccccccaccttaccacacattcgaagaaccttcctatgtaaaagttaaataagaaaggaaggattcgaaccccctacaactggtttcaagccaatttcataaccattatgtctttctcaataaaaaaaaaaaggaattc

SEQ ID NO: 3872 - DNA, 1274 bp, Rattus norvegicus
aagtcacatattaaccgatggatacactaaactggtttcctgcaacctgagggtggctcctgataggtaccaatttggaccatggaacagagtccaggaatgtttccgaccctgccctaaagaaggcagacacttctttagcagccgttgtccagaccccctcgtaggacagactgttagaacaggctgtgcttcatctctgtttagagaactcaagcaattgctgccatgccggggaagccagtccttcactacttcgatggcagggggagaatggagcccatccggtggctcctggctgcagctggagtagagtttgaagaaaattttctgaaaactcgggatgacctggccaggttaagaagtgatgggagtttgatgtttgaacaagtgcccatggtggagattgacgggatgaagctggtgcagaccaaagccattctcaactacattgccaccaaatacaacctctatgggaaggacatgaaggagagagccctcatcgacatgtatgcagaaggtgtggccgatctggagttgatggttctctattacccctacatgccccctggggagaaagaggcgagtcttgccaagatcaaggacaaagcaaggaaccgttacttccctgcctatgagaaggtgttgaagagccacggacaagattatctcgttggcaacaagctgagcagggctgatgtttccctggttgaacttctctaccatgtggaagagatggacccaggcattgtggacaacttccctctgctaaaggccctgagaaccagagtcagcaacctccccacagtgaagaagtttcttcagcctggcagccagaggaagccttttgatgatgagaaatgtgtagaatcagcgaagaagatcttcagttaattcagtcagctatggatacactgtacccacaaagccagcctcagaaagctctgcaacaatgaagtattttgactaaatgttgaccgtacttattgggagggtaacatgttttctaaggcttctgtgttaattcatatagacatgactcatgaggaattgctgggatgccatctagttgagttaaaacctcaatctcgatcacttcctcggatattttcttaatgttcaataaaacaaaacaagcttcttagacgctggagtatccaaacattgtcatgaaatagctgtcatatccttgtcaaacagcgtcacgtagaaaccctcgtgtcaaactctcttacgcaaaagtaatctttccttatggagagtgtcctttctct

SEQ ID NO: 3873 - DNA, 1790 bp, Rattus norvegicus
aattcaggcagatagtgaatggctatcgccaccagaagcacaagaagggaaggttatttcaggaacctctgatgctgcagatccccaagactgtggactggagagaaaagggttgtgtgactcctgtgaagaatcagggccagtgtggttcttgctgggcttttagcgcatcgggttgcctagaaggacagatgttccttaagactggcaaactgatctcactgagtgaacagaaccttgtggactgttctcacgatcaaggcaatcagggctgtaatggaggcctgatggattttgctttccagtacattaaggaaaatggaggtctggactcagaggagtcttatccctatgaagcaaaggatggatcttgtaaatacagagctgagtatgctgtggctaacgacacagggtttgtggatatccctcagcaagagaaagccctcatgaaggctgtagcgacggtggggcctatttctgttgccatggatgcaagccatccgtctctccagttctatagttcaggtatctactatgaacccaactgtagcagcaaggacctcgaccatggggttctggtggttggctatggttatgaaggaacagattcaaataaggataaatactggcttgtcaaaaacagctggggtaaagaatggggtatggatggctacatcaaaatagccaaagaccggaacaaccactgcggacttgccaccgcagccagctatcctatcgtgaattgatggacagcgataataaggacttacggacactacatccgaaggagttcatcttaaaactgaccaaacccgtctctgagtgagaccatggtacttgaatcgttcaggatccaagtcacgatttaaattctgttgacatttttacatgggttaaatgttaccactacttaaaactcctgttataaacagctttataatattggacacttaatgcttaattctgattctggaatatttgttttataaaagttgtataaaactttctttaccttttaaaaataaattttagctcagtgcatgtgtgtgtgtatgggttaggggaacttcctgtgtgaaatgtgttcacaaatgtttgagactaaagactgactgattccagatgtccggactgattcgggtgtcagtggtagacctggggaaaggtgacaggtgctctggatggagccttctgattttacctcagcgtcctgtcaggttaggtatgtgtaagtaaatctagcttatggggtaattgttttttctttatttgtgtgagtatgtgtgtgtggaggtcagagaacaactcatttctacagtgttgatcctagcgatcaaaatcaggttgtcaggctggaccacaggtgccttttactactgaggtatcttgccagccccactggttttaagtgacgtataattacatatgtttatgtagtacaatataatgtgttgtgatacgtgtatactatgaaatgatctgatagttcacctcaaatattttattactttgttgaacttttctagctgtttctaaaatacacagtatattatcattggacctgtcttgttaatgtagcccaggctggccttaagccataatcttccttctcagccttctgtgagctaagataaaaaaaaaaaatcatgtaatgttatacccagtctcaagtcttatatctggcaaaccttgacagtccagaagaactagagtaaattgtttgacagtcctctcaactttcctaattctgtgacctttcaatatagttcctcctgttgtgaccccaaaaa

SEQ ID NO: 3874 - DNA, 2848 bp, Rattus norvegicus
ggggatggagcgagcacagaattgaaagctttcttcagcctgcattttaaggagtgcgtgtgggaagctcagtaagctgatttatgataactgctttaaacactggcaactaaaagagtgtaaggattgggagtctctgacagttcaatatgaaggacaacttcagttttgctgccaccagcagaaacatcaccagcagtcttccttttgataatctcaacgcaactggcaccaatgagtccgcatttaactgctcacacaaaccggcagataagcatttggaagcaattcctgttctctactacatgatttttgtgattggttttgctgttaacattgttgtggtctcactgttttgttgtcaaaagggccctaaaaaggtgtccagcatttacatcttcaatctggctgtggctgacttactccttttggcaacccttcctctctgggcaacctattactcttatagatatgactggctctttggacctgtgatgtgcaaagtgtttggttcttttctgaccctgaacatgtttgcaagcattttttttattacgtgcatgagtgttgataggtaccaatcggttatctacccttttctgtctcagagaaggaatccctggcaagcatcttatgtagttccccttgtttggtgtatggcttgtctgtcctcattgccaacattttatttccgagatgtcagaaccattgaatacttaggtgtgaatgcttgtattatggctttcccacctgagaaatatgctcagtggtctgctgggattgccttaatgaaaaatattcttggctttatcattcctttaatattcatagcaacgtgttactttggaatcagaaaacatctgctgaagaccaatagctatgggaagaacagaattacccgtgaccaagtcttgaagatggcagctgctgttgtgttggcattcatcatttgctggcttcccttccatgttctgaccttcttggatgctctgacctggatgggtatcattaatagctgtgaagttatagcagtcattgacctggcacttccttttgccatcctcctgggattcaccaacagctgtgttaatcccttcctgtattgtttcgttggaaaccgcttccaacagaagctccgtagtgtgtttagagttcccattacttggctccaaggcaagagagagactatgtcttgccgaaaaagcagttctcttagagaaatggacacctttgtgtcttaaatctgttagtgggatgcatgtaatcagcctagcaatggtttggaggcccacacaaatgatctttaagtgacatcagtataatataattctttgctttttctaatctttatttactccccccagaacaggaaataagtataattataaacctttatactccaccagctttcagtgatagtgccttctttttctggtccgttggcaggagattgtcatatgtgagctttatctataatctagaagtatctgggggaattatctcgacttataattaaaaacaaattatgagtgatgatttgatgtctcggatttctccctggaaaatgctggcatttcttagtggagttttatgtccattttcatctgatatttttttctcttgaacaagggccaatttgaacttcttacactttccaaccatatgatagagcatgagaggtgggcactaaggttagcatgctatacccttctatatatgccataggttggtagtggcttattcagtctctaaatatataggttctccttttaaagaaattataagttgtgttccttttccatttcactcaagtatagctttttacttactatctaaaaccactgagtagatctagaatgtggtttaaatcacacttctctattagcttatccttgaagttatagagcgcacgctatttagtaaaacagaactaccctgaaaaagtattttattaaccacaaaactgaatatacacttggaaaacttttcatccattttgactattgtttcaagttttctattctcttctgatgatttttgaacacgacaacaaaacactgtattattagatgacataaaggtcactttttacatttttaaccttttgaacatggtgctttgatatattctatggtgacttgagtttaattattcatgcttttgttctgggctgcgtcccaaaatatctttttgaccctgaaaaagagaggattctttaattctttagctttataataaactgcacactggcataggaaaaggttatgtcagaatggaagtttgatgccttcttgggagcaaacagacccagagaaacggcaagtttggtgtccaacaaggaacttgtcagaacaaaggcccctggggagtattttgaatctgcatttctgggcacagttccagaatatataagagtctgtggaggtgatttaaatcaagcccaggtccacagagctcattctcaacacgagtacatctcttacattagaggaatataatcccggaaactgagtcacctaaagttcactcaaacttcacaataagtattaattcaaacgttcaaaatgccattctcttactgccccatattataccaggtcgcctgagacctttctggactgataatgacctctgaggtagatttaaagttttgggaacttaacatttctgtcagatttcaggcttttttggttgaagaatcctctcataccccttccttggaaaaccctgatttcatgtattcatattatgtgttactaagatcaagtagctaaatatataatcagttatgattttgtgttttaagtaattttacacaacatctcataaaaataaaatcattattggg

SEQ ID NO: 3875 - DNA, 282 bp, Rattus norvegicus
gaagctgcagtcacacaaagcccaagaaacaaggtgacagtaaaaggaggaaaggtgacattgagttgtaagcagaataataatcacaacaacatgtactggtatcggcaggacatggggcatggtctgaggctgatccattactcatatggtgctaacagtactgagaaaggagatgtccccaatgggtacaaggtctccagaccaaacaaagaaaatttcttcctcatgctggagtcggcttccccctctcagacatctgtgtacttctgtgccagcagt

SEQ ID NO: 3876 - DNA, 1497 bp, Rattus norvegicus
atggctctcagggtgacagcagatgtgtgggcaagaccctggcagtgcctgcacaggacgagggcactgggcagtacggcaacacaggcccccaagacactgaagccctttgaagccataccacaatactccaggaacaagtggctgaagatgatacagatcctgagggagcagagccaagagaacctacacctggagatgcaccaggccttccaggaactagggcccattttcaggcacagtgcagggggagcacagattgtgtctgtgatgctgcctgaggacgctgagaagctgcaccaggtggagagtatcctcccgcgtcggatgacgctggagtcgtgggtggcccacagagaactccgtggcctgagacgtggtgtgttcttgctaaatggggcagactggcgcttcaaccgactgcagctgaatccaaatatgctgtcaccaaaagccgttcaatcttttgtcccctttgtggatgtggtagcaagggactttgtggaaaacctgaagaagagaatgctggagaatgttcatggaagcatgtctatggacattcagtccaatgtgttcaactataccatggaagccagccattttgttatttccggagagcgactgggcctcacaggccatgacctgaaccctgagagcctgaagttcattcatgctctgcactcaatgttcaagtccaccacacagctcatgttcttacccaagaacttgactcgttggacaagcacccaggtgtggaaaggacactttgagtcctgggatatcatctctgagtatgtcacaaaatgtatcaagaatgtgtatcgcgaactggcagagggtcgccaacagtcctggagtgtcatatccgagatggtagcacagagtactctgtcaatggatgccatccatgccaactcaatggaacttattgctggaagtgttgacacgacagcaatctccttggtaatgaccctttttgagctggctcggaacccagatgttcagcaggccctgcggcaggagagcctggcagctgaggccagcatcgctgctaatccccagaaggccatgtcagacttgcccttgctgcgggctgcccttaaagagaccttgaggctctaccccattggtagctctttggagagaatcgtagactcagacctggtgcttcagaactatcatgtccctgctgggacgttggtcataatttatctgtactccatgggccgaaaccctgcagtgttcccaagacctgagcgctacatgcctcagcgctggctggagaggaaaaggagtttccagcatctggccttcggctttggggtgcgccagtgcctggggcggcgcctggcagaggtggaggtgttgctcctgcttcaccatatgctgaaaatcttccaagtcgagacactgaggcaagaggatgtgcagatggcctatcgctttgttttgatgcccaaccctagactcgtcctcactatccggcctgtgagctag

SEQ ID NO: 3877 - DNA, 3450 bp, Rattus norvegicus
gagctcaaaaccagcctgcactacactacataagaccctagctacaaaagccaggtatgacagttgcacattccagcacttgagaggtgaaggaaggatcaggagttcaaggccagtctcaactagatacctgagacctccatctcaattgaccttcctccacaaacatcaagtaaagcaagctcaactaaacagacctcacacctccttccagagcggtcttaagacaggacagcagggttggggatttagctcagtggtagagcgcttgcctagcaagcgcaggcactgggttcggtccccatctccgagggggaaaaaaaaaaaagacaggacagcagacttgggtgacagttggaatgattcctgccaggtaaatggtggtggtggtggtggtggtgatgatgatattataaataacccatatttataattcacagttttcagacacttttccgtttcttctttctaagtctcagcgcgagacctggcgtctacaggattgtttcgccttgttctgtggcttgggaaccttgactagtctggacggggcggggcgcacgtacaagccccaacctctgctaggtgcgtcaaggggaatcctcgctgcacctgggcgcggcaaggaaattgcaccatgtatgggcagctgcgtcagagggggcgtggccaccgcggatgctaggggacgccaagtcggtcgctttttcccagtagaggcggcttgccaccagaactgggggtcgtgaagttccgagcggacgggtccacggaggttcatctggagaggtgggtcccctgcgaggtgaaaggcgccgctgcgacacacccccaccccccgcggtgcagtggttcagcccaagaacttttcattcataaaaaagaccagactctgcgaggcgcgagtgagtcagaaccgcagccgccgacgcggaccctaccgaacatccagcccagggcatgtaccgagacttcggggaaccgggaccgagttccggggctggcagcgcgtacggtcgccccgcgcagccccagcaagcgcagacacagacagtccagcagcaggtgagtctggccgaatcccccgggggatctgagtttggacagcattggggatgctagagttagtctagtatgcccgggattaggactgggggtccctgagcagcagctaactctaatggtcgcgactgaggatcctgcacattctgcgtggtccgggaacccatgtaccgggtcgccaaggggaggcgcgcggcgggaagcgcgaagatctgctaattccccttctcgctccccctggctgactgtcaatctgcccctccatctcggttacggtctttaatttcctcatgtctgccccctaaatacgctgttcccccaaatacctgtcccatcccagactggacaggatcagaggactccatctccaattgatatctgggacctggagtctgggcacataggagactgggtccatgagaacccagtcgggacagcgaattcttagcagcctgtcgtcagtggctgttcgtgtgtcgctctaattgtccgtgtccctttacgcggtcaagtcctcatctttttgtgtgctgtatagatagagctcatgggccccaggcagtggctctgaggggttcctggagaccacgaagtgttgagacgtgcgcgggggtcatctgcccggcaactttcgcgctccatattctcggcactcgacgtctcccactgctggataggggcacttgtgaggttgcaggtgcccatttcctgtcgaggggccgcaagcacgtgtcgccaggggagggaagagctgcgtccgtttcgccgagtcacagcggccgagtcactgaggctgagtcaccctgggtgcccctcccttcctggccccaaacggcccctaggaccgacgacctgggagcgagagatgcccctggcaatgcttctaacccagaactggggggtcactgagctgctgcatcccccagtattgggctggggacataagatgtccaaacttgtctaggcatgtgaggtgcttcctggactgaaggggccccacacccttagctcacagaacttgaacccagttttctctcccaggacactcagcccccactcccactgccaccaccactcaatcccaacacatgcctcagatttctggaagaaaaagaacggaagaatgtcaggccccttatgggagacttttactctctttaccttatttcatggactcaaaaccccatcaattttgaaccttcaagtttttgaatcgacagtggggcatgcattgactcccagcattcaggaagcagaagcaggcagatctctggaagtttgaggccaatttattctacaaagtgagttccaggccagccagagctacataatagagagaccctgtctcaaaaccaaaataaaattcaaaattaaagagccgattaaactgatttctgagctaatgagagccggctttctcagcagcaatgaaatgttgaatgatattaataagaatgatattaagggaaactgaggcaacacaggctaaataatgtgcctcagtctcaaagccagccattggcccaagttgatgcttgaaacaagactcccaagttatggtgctgcacatctatagtctgggtgcctgggaagtggaggcagaagaattaagagtttaggtctgggggctggggatttagctcagtggtagagcgcttacctaggaagcgcaaggccctgggttcggtccccagctccgaaaaaaaaagaaccaaaaaaaaaaaaagagtttaggtctagggttggggatttagctcagtggtagagcgcttgcctagcaagagcaaggccctggtttcggtccccagctccgaaaaaaagaaaaaaaaaaaaaagagtttaggtctagcctaagctacatgattaccttccccccgacccccaacaacaaattctcttacttgattctcaaagttgccttgggagctcgaagctgaaagtatgttcgtcttcgaggatggtgtaggaatgagtgagcccctgccattttaggctcaaatctcagtttctacttattagctgtgggtctatgggcaactgttctcctgtctgaaaaggaggatatggcagctgtctgagtcactgtttgttcagtagttggaacagtattgaacagtccatacttgatttacaaaaaaagaacaaaactatctctgatggggaaacaggtagagagacatcttgtgaccggccctaagtcacacagctcctgaacaagtaagtgtctgattgacaaattgtggttccttgtggtctcccagaaccagtatccatactgatgttaagggagacagaagtccagcttctgtaccctggaagcccctcaattcacacagaccttatcattccctccttgtttctcagaagttccaccttgtgccaagcatc

SEQ ID NO: 3878 - DNA, 1686 bp, Rattus norvegicus
gatccaagaatgggtgccgtggctgcctgaaaggccagtgcggaaagacgaaagggtccagaacaggcaacagttttgcaggttagcttcacatcggaaatcacttttgtctgagcatccttttagagtgtctgtcttagggatgcctctgtagtggtctctccatgtggtaaccactctacctgtgggagtctttcttcggagtcctctgaatgtgccaacatcccctgtaggctctattctaaaggccccttctcactctctgtcttagggtcaagaggttatctgtctccaactttgatttatattgagacaggaatctccaccctccccacatactggttactgttcctggtagagaagtctagggctggcaaaggcacaattgaagtcagggctggctcaatcgggccatcttctctgccccataccctccctacctctggctaagggggtcggagtgtgctcagcacaagaacccatcgaccttccccgctactgtccatggttgacaaggtctagaaaggagctctccaaactcaagtccgcaacccacaaagtgtttggcctggacaccagggccacgggggtccaggaacggaagaaacatgcctactcatccccctcatttatgtccatccgtcatttatgtcccacataatcctgcaaggaccgttgcttgctttcctaaagtcacttcctgactaatctctgcctgagcccgcttggaaggagggacccgggagctgataaagaaaagaaggtctccaggctctctgcagagtcagaaagtgtaactcaccggggcaagaagatgggacgcagctaaccgatctggagcccttgaggctgaagtttttaagcaccagggaaaggagaaagccactcccaagtccaaagtgtcaagtttcctcctccgctgattcgagagagggagccgcccctgctgtactagccaccccaccacaggcctgcgactggacacagcttgatgaggagggatcataggtccttatctctcccaattatgagtgctactcgggagtctgtgttagaagggactgctgctgctgctgctgctgctgctgctgctgctgctgctgctgctgctgctgctgctgcttgaaaaaattaaaaacaaaacaaaaccaaatgtacttggggaaatcagcactgggaagccccttctgagaaattcgaggtccaaaggcacttggagagccccaaactaaagccccgtagtgggacccctattgaaattctccactgagttctaagacagaagcccctcttggagacgcacaggctaagcactcctgggcagaatccttccctttccctgctcagccggtaccgcagcacccagcaccacagcacccttcccacgacctccttctctttcacctccttcacgcaagattcggggaggtggtgcaagcaggagtggaaagaaacagcagacatccattccctcctgggagacagagggcgcctctgtccactcctggccctagcccttcgggtgtcgtttgtgaaggggtggagccgtcgggaggagggtcggcagtaaagacaggtctccccacactgctccggggccacatttgcagcgcgcccttctgtcaagaacctgctccgacgtcagccgaggccaaccgtgagtatcctaccctgcttagataatcg

SEQ ID NO: 3879 - DNA, 1539 bp, Rattus norvegicus
gggacagtgggtcccaatggctctagggtcctcctgtgtagctggggagataacaaaaaagggattcttttgaggcttccaacaggatataggacctggtgagcctttgtctctctgcatagggacagtgactgtgtccatcacagaggctgtttagggcatagaagtaggttactgccttgaacctctgacactaatcttttcccacaggacaagtttcccacgggctctcctcactgagcagtggttctccccctggaatcccagtgtgaggaccgagatggctctgagcctggagtctacaacaagctttcatatgctcaccgtgtccggaagcactgtgactgagctgcctggtgactccaacgtgtccctcaacagttcctggtccggcccaacagatcccagctccctgaaagaccttgtggccacgggtgtcatcggggcagtgctctcagccatgggtgtggtgggcatggtgggaaatgtatacactttggtggtcatgtgccggtttctgcgtgcctcggcctccatgtacgtctatgtggtcaacctagcgctggctgatctgctgtacctgctgagcattcccttcatcatagccacctacgtcactaaggactggcactttggagatgtgggctgcagagtcctctttagcctggacttcctgacaatgcacgccagcatcttcaccctgaccataatgagcagcgaacgctatgcagccgtactgaggcctctggacacagtccagcgctccaagggttaccgtaagctgctggtgctgggcacctggttgctggcactgctgctgaccctacccatgatgcttgccatccagctggtccgcaggggctctaagagcctctgcctgccagcctggggccctcgtgcccaccgtacttacctaacgttgctctttgggaccagcattgtggggcctggcttggtcattgggctgctctatgtccgtctggccagggcctactggctatctcagcaagcttctttcaagcagacacggcggctgcccaaccccagggtgctctacctcatccttggtatcgtccttctcttctgggcctgctttctacccttctggctgtggcagctgctggcccagtaccacgaggccatgccactgactcccgagactgcacgcattgtcaactacctgaccacctgcctcacttatggcaacagttgcatcaatcccttgctctacactctgctcaccaagaactatcgagagtacctacgtggccgccagcggtcactgggtagtagttgccacagcccagggagtcctggcagcttcctgcccagccgagtccacctccagcaggactcgggccgctcgctgtcctccagcagccaacaggccacagagaccctcatgctgtctccagtcccccgtaacggggcccttctctgagagtgcactgtgcaatcctggcataggaaaggacccaaaggcgtgcggctccggagcgcatttcccagaatcccctgctcaaacctaactggctcgtc

SEQ ID NO: 3880 - DNA, 2118 bp, Rattus norvegicus
tgagagaaggtggctgcttaagaccacccatactaagttagacagagcactgaacctggttgcttatttctccataaccaactctctgaagccaaacagccagagtgatcctgttggcttcagacaggggggtttccaggatgccacagttggacctgtcctggctgggactgaggctggagacatccttaccatggctgcttttgctgctgatcggagcttcctggctcttggtccgtgtcttgactcagacctatatcttctacagaacatatcaacatctttgtgatttccctcaaccacccaaatggaattggttcttgggtcacctgggcatgatcactcccactgagcaaggtctgaagcaggtaactaagctcgtggccacctacccccagggcttcatgacatggctgggtcctatcctccctatcatcactctgtgccaccctgacgtcattcgatctgttctcagtgcctcagcttcggttgccctaaaggaagtaatcttctacagctttctgaaaccctggttgggggatggactcctgttgagcgatggtgacaagtggagctgccaccgccgcatgctgacacctgccttccacttcaacatcctgaaaccctatgtgaagattttcaacgacagcaccaacatcatgcacgccaaatggcaggacctggcctcaggaggcagcgcccgtctggacatgtttaagaacatcagcctgatgaccttggacagtctgcagaaatgtgtcttcagttttgatagcaactgccaggagaagcccagtgagtatatttctgccatcttggagctcagtgccctagtggccaaacggtaccagcagctgcttctacacacagactcactctatcagctcacccataatggtcggcgcttccataaggcctgcaaattggtacacaacttcacagacgctgtcatccagggtcgacgacgcgctctccccagtcagcatgaggatgatatcctcaaggccaaggccaggtccaaaactctggatttcattgatgtgctgctgctgaccaaggatgaagatggaaaggagctgtcagatgaagacattagagctgaggctgacaccttcatgtttgaaggccatgacaccacagccagtgggctctcctggatcctgtacaaccttgcaaggcacccggaataccaggagcgctgccggcaggaggtgcgggagctgctgagggaccgagagtctacagagattgaatgggacgacctggcccagctgcccttcctgaccatgtgcatcaaggagagtctgcgactgcatcccccagtcacggtcatctcccgtcgttgtacccaagacatcgtgctcccagatggccgggtcatccctaaaggtgtcatctgcatcatcaatattttcgcgacccatcacaacccaactgtgtggcccgaccctgaggtctatgatcccttccgcttcgacccagagaatatcaaggacaggtcacctctggcttttattcccttctccgctgggcccaggaactgcataggacagacttttgccatgaacgagatgaaggtggcactggcgctgacgctgctgcgcttccgcgtcctgccggatgacaaggagccgcgccggaagccagagctgatcctgcgtgcggagggcggactgtggctgcgggtggagccactgagcacacagtgactacgtacatctggacgggtcccacccacccacatacctttgtagatgtcacctgtgcctgaggctccttgaataccagtagggggctctggaggacaacagggaaccagcagttgtggcagggagggagatggggttggtgcccaaattcctgacttcatctggccgttcgtgggcctctacactgtcctttagcctagttggacttactctcttgggcgacagagagctaaggtaagtgtctaagcaggctcgagctcacagaatcttttaaattgaggtacatttcctgccttgacctccattctaatctcaaaactctcatcctgggattctgaagtgtttctgtgaaaactaaaattttaggtttattaaacctaacaagtctgccaaaaaaaaaaaaaaaaaa

SEQ ID NO: 3881 - DNA, 2440 bp, Rattus norvegicus
gcagcagataaatgcgtttttgcaggagtggggagaaggtcttagaggacaggctgctcctgagataagcaggatgccgtggctaactgtgtctgggctggacctaggctctgtggtgacctcgacatggcatcttctgctgcttggagccgcttcttggattttggccagaattcttgcctggacttactcattctgtgagaactgctcccgcctcagatgtttccctcagtcccctaaaagaaactggtttttgggccacttgggcacgatccagagcaatgaggaaggcatgcggctggtgactgaaatgggccagactttccgagatatccatctctgttggctgggacccgtcatccctgtgctgaggcttgttgaccctgcatttgttgcccctctgctccaggccccagctttggtggccccaaaggacacgactttcttacgcttcctgaagccctggcttggagatggtctatttctgagttctggtgacaagtggagccgccatcgccgtctgctgacacctgccttccattttgacatcctgaagccctatgtgaagattttcaaccagagcgtgaacatcatgcacgccaagtggaagcatctatgcctggaaggcagtgcccgtctggaaatgtttgagaacatcagcctcatgaccctggacagtctgcagaaatgcctctttggctttgacagcaactgtcaggagtctcccagtgaatacatttctgccatattggaactgagttccctcatcataaaaaggtcacagcagctcttcctgtacctggacttcctgtattaccgcactgctgatggacggcgcttccgcaaggcctgtgacctggtgcacaacttcacggatgctgtcatcagggagagacgtcgacttctctccagccaaggcactgatgagttcttggagtccaagactaagtctaagtctaagactttggacttcatcgatgtactcttgttggctaaggatgaacatggaaaggagctgtcagatgaggacatccgggcagaggctgacaccttcatgtttggaggccatgacaccacagccagcgcactgtcctggatcctgtacaacctggcaaggcacccagaataccaggagcgctgccgtcaggaggtgtgggagctgctgagggaccgagagcctgaggagattgaatgggacgacctagcccagctgcccttcctgaccatgtgcatcaaggagagtctccggctgcaccccccagctatagacctcctgcgccgctgcacccaggacattgtgctacctgatggccgggtcatccctaaagggaacatctgtgtcatcagcatctttggtattcatcacaatccttcagtgtggccagaccctgaggtcttcgaccccttccgctttgactcagaaaatcgtcagaagaggtcacctctgtcttttattcccttctccgcagggcccaggaactgcataggacagactttcgctatgaacgagatgaaagtggtggtggcgctgacgctgctgcgcttccgtgtcctgccggatgacaaggagccgcgccggaagccagagataatcctgcgcgcggagggcgggctgtggctgcggatggagcccctgagcacagacactcagtaaccctgtgtaaactccccgtcactctcctctgcacaatgcagaaaaagcggagcctcaccaagagccagcagggggcgcggaaggacaacagaccctgggagcctgggcagggccgctgtctgagtccaagagcctttctaggtgacccacagggcccgcagactgatgagtgttgcacccaagctgaaggaaggcctttattcttttggccatagggaggcaccatagatgcttaggtttattggcagatttgaggcagttttcttcttttcttgtttttgagatagggtctcaaattttagtggatacagcaggctggcctttaacttgcagcaaatctctggcctgaccacccgagtggcaattagaaagtgcaccactgtgcctgtcgtattcgaaggtattttttattagaatgatgggaagtttcccaggagagaagtctgggagcccttcaaaatgatgttaaatgatgtccaaggcttgtgatgtctaagaccattgaggcagcttaaatttaaaatgacatcacattgcaggctccctgtgtggtgatgtcctttcaggttcccacttgttcttccttgggctggggaggtggcttagtggggagacaggaggatcccagggcctcagtggccaaccagtcctgctgaatcagagctccaggttgtaagagacactgtctcaggaaataaggtggatagtgatgactgaagacacctgaataaacctctggcctcctcaaaaaaaaaaaaaaaaaaaaaaaaaaaaaaaaaaaaaaaa

SEQ ID NO: 3882 - DNA, 1782 bp, Rattus norvegicus
gcgattggctggttcagcccagctcaacttcccgcacagcttccggcaagtcggaagccagggacaaaaagttttcaaagaagataggaggttgtggaggactcgctgctcatgagagaaggatgctacaactaagcctgtcccggctgggaatggggtccctgacagcctctccatggcatctactgctgctgggaggagcctcttggatactagcccgaattctggcctggatctataccttctatgacaactgctgccgccttcgttgcttccctcagccccctaaaccaagttggttttggggtcacttgaccttgatgaagaacaacgaggaaggcatgcagttcatagcacatctgggccgcaacttccgtgatatccacctctcttgggtgggacccgtgtacccgatcctgcgactcgtccaccctaacgtcattgctcccctgctccaagcctcagctgctgttgcacccaaggaaatgaccctctatggcttcctgaagccctggctgggggatgggctcctgatgagcgctggtgagaagtggaaccaccaccgacgcctgctgacacccgccttccactttgacatcctgaagtcctacgtgaagatttttaacaagagcgtgaacaccatgcatgccaagtggcagcgtctgactgccaagggcagtgcccgtctggacatgttcgagcacatcagcctgatgaccttggacagcctgcaaaaatgcatcttcagcttcgacagcaactgtcaggagtctaacagtgaatacatagctgcgatcctggaactcagctccctcatagtgaaacggcaacgccagcccttcctgtacctggacttcctgtattacctcactgctgatgggcggcgcttccgcaaggcctgcgacgtggtgcacaacttcacagatgctgtcatcagggagagacgcagcaccctcaatacccagggcgttgatgaattcctaaaggccagggctaagactaaaactttagactttattgatgttctcttgctggccaaggatgagcatgggaaggggctgtcggatgtggacatccgagcagaggctgacaccttcatgttcggaggtcatgacaccacggccagcgcactctcctggatcctgtacaacctggcaaggcacccggaataccaggagcgctgccggcaggaggtgcgggagctgctgagggaccgagagcctgaggagattgaatgggacgacctggcccagctgcccttcctaaccatgtgcatcaaggagagtctgcggctgcaccctccagtcttattaatctcccgctgctgttcccaggacattgtgctgccagatggccgggtcatccccaaagggaacatctgtgtcatcagcatctttggggttcaccacaatccttcagtgtggccagaccctgaggtctacaaccccttccgctttgacccagaaaacccacagaagaggtcacctctggcttttattcccttctcagcgggacccaggaactgcataggacagactttcgccatgagcgagataaaggtggcgctggcgctgacgctgctgcgcttctgcgtcctgccagatgacaaggagccgcgccggaagccggagctgatcctgcgtgcggagggcggactgtggctgcgggtggaaccgctgagcacagtgacctcacagctgccttgggacctcctcgcccaccctcctacctcttgagatctctgaataaagaattaaataagaaaaaaaaaaaaaaaaaaaa

SEQ ID NO: 3883 - DNA, 2477 bp, Rattus norvegicus
  misc_feature (1968)..(1968): n is a, c, g, or t
  misc_feature (2392)..(2392): n is a, c, g, or t
cgcggccgctgcaagatggcgcctctcaagaacgctccgagggatgccttggtgatggcacagatcctgaaggatatgggaatcacagattatgagccaagggttataaatcaaatgttggaatttgccttccgatatgtgactacaattctggatgatgcaaaaatttattcaagtcacgctaagaaacctactgtggatgcagatgatgtgagactggccatccagtgtcgggctgaccagtcttttacctctcctcctccaagagattttttactggatattgcaaggcagaagaatcaaacccctctgccgctgattaaaccatatgcaggacctagattgccacctgatagatactgcttaacagctccaaactataggctgaagtccttagttaaaaagggacctaaccaaggaagactagttcctagattaagtgtcggtgcggtcagtagcagacctactactcctactgtagcacccccacaagcagtatctgtcccaaataaggttgcaactccagtgtcagtgacaagccaaagatttgccgtgcagattccaacttctcagtccacgcctgccaaaccagctcctgcagcgacttcagtccaaaatgttctgattaatccttcaatgattgggtccacaaatattctcattaccaccaacatggtttcctcacagagcacagccactgactcaaacccactgaagaggaaacatgatgatgatgatgatgacgacgacgatgatgatgacaatgacactatgtaaggaataaagtctgttctgtatacattaaaattttcctgtgtttgggcccatatggtggactcaacagcttagatcttataagttttatcttagaaatgtagtaggaatatttttcacattagttacatcgggtaggttttgttacaatgaatatgttttctcagtaggcttcaggtatacaagcacttgcttctagacagcttcattaatgtcgagtcttaccatggcagctctatttttagaagcagtttctgctatgtgtcactgacagcggcacttggatttcagttcctggtctcctctatattaaaacaggactttcttttgatagtgaactattcacactgtcacttttttgaccaaatctctcagtttgggaaactttttttgtgaaacggtggatttagaagtgtgctaaatccattttagaatgtatttggactttggtcttttctaattccctatctggatcccatttgttttctgttcccacctctcatcgccttaagtcatttgccattgcacttaaatttaatagactgtgactagaatttgtaatatgccctagatgcctagccttctgcagtccccttgaacctgagtgtcggcatttactcttcttcactcggtaacagagcatttgggtgtcagcccttgcctttaactcctgttaagctcttctcaatgacaggcaggtttgcatcagttacatgcagttaccatgcattccaaattgctagcttcacagtctttcatgtttttaatttaagatataacttttaacctgccttgataagtaacttacactggacccagacaaaaccacttaagagcttggtttttaccccctgcattcattgatttcattcaggtcacctttctagcttgctgctaagggtgtcatacctaagaccaagcctgaggtggattttaatgattctcttttcctgtcaaaccaggaggggaaacagattagtgtcatctgaccccaattaggtgttccccacagaatttccgaaccatgtttccttttttttttttttctttttttttcagagctggggaccgaacccagcgctctactactgagctaaatccccacccccccctcccagccatgtttctatacaccttctcctactttgtttttatacatacctacatgactcattggaaacaacagcaaagctntccgtcagagtataaaaagtaccattttgattgtatgttgcacatagccaacattggaaaaactttctgaaaccttcatgaaacttagaatttatagccatggaacatcaaaaacttactaagtatcagcataggatgttgtttgacatgtgaaatagatcagtaacaagggagaaatattttgtgccagtttgaattatctaggaaggttagggaaagctgatctgatcaatatcataagagatgtgcagtatacaacacaatgtcaggacttgactgttctcagggaggcagaatatcagaaagcctaggttctagtattaagtttcatttacccccaatgtgaccttactttacccctgagccttgttctcactagtagtaggggaataacatctaccctgcctacctcacagagatgtgngggtttaactggtgtgtgtggaagatccagattgtaaaagccaaataattattaatgtatttgttccccccactattaaaaaaaa

SEQ ID NO: 3884 - DNA, 1532 bp, Rattus norvegicus
ctcagagaggccagtgtaggggaacgcaaattattcccccaccctacccccatccacagcttctctccttcttgatatagcccaaatgggtaacatgcaggagcgcccatcggagaccattgaccgggaacggaaacggctggtagaaacattgcaggctgactctgggttgctgctggacgcgctggtggcccggggcgtcctcactgggcctgagtatgaagccttggatgcgctgcctgatgcagagcgcagggtgcgccgcctactgctgttggtgcagagcaagggcgaggcagcctgccaggaactactgcgctgtgcccagcaaactgtgagcatgccagacccggcctgggattggcagcacgttgggcctggctaccgggaccgcagctatgaccctccatgcccaggccactggacgccagaggcacccagttcagggaccacatgtcctgggctgcccagagcttcagaggaagaggagatcggaggtcctgaggactctgaggcagtacagcctcgaacaccagaggagccagaactagaagctgaagctactaaaggggatgagccagacctggaacaagaaatggaaccagaaccagagccagaggtagaaccggagccagagccggagccggagccggagccggagccggagccggagccggagccggagccggagccagagcgagagcctgacttccaagaaggggatgagtctgaaggttgtgagaacacctaaaccctagcttgcaggcttgttagaaattgtggactgggaagtaggggttgatccccactccactgaccatcattttcatctctagattcttgaaggccagaatatccttacctgtccaaatctgattcaagctggataagatctggaaacctgccagaactggaccaagtcaatgcagcaagactccatttactgccaaatgagtaaactcgggagggttagcctggacctgattcttcacaactcaggctctttactcaagaatggtctgaatcccactgacctgagcaggcttgtgtgaaaaataccatcccccccaccaacagtattccactcccaaagtagcccaagctgtatttctagagatcttagattcaggcccctaaatcagaccctcttccactccctttttccccctcaggggccatttgggagcccaagtgggcaacacttctacaccatggaaacgactagacttaagagtatcaagcaagtgaaggtggctggctgtccatccacacacagagagaagtcttggagctcacagtcttgaaggggggacctgagagaaaactggagtagacagaagccacacgcatcattgtaactgctctttaattgtctggccttcctctgaactgggagctccgtgtggggtgtggggtctaaccagtcacagacatacacaaggagctctgtacattatctactaagcaaatgaataaaaacttcccagctgtgtttccaagctttcacagatggaaaaattaaataaaaagcc

SEQ ID NO: 3885 - DNA, 2746 bp, Rattus norvegicus
gctcctcacagctccccctccacctctgagtggatcctcctctgagtttctcttcttcctcagagctcctcctcctcccggtcctgcaaggctccagacttctcgacttggtttcagaaagcaccggtggctgtagtcgggattgagaggtgtttccaaagaaacccaaagagcagcagggcagccatgaggatgccgacggggtctgaactgtggcccatagccatattcacgatcatcttcctgcttctggtggacctgatgcacaggcgccagcgctggacttctcgctaccctccgggccctgtgccctggcctgtgctgggcaacctgctgcagatagacttccagaatatgccagcgggctttcaaaagctgagatgtcgctttggggacctgttcagcttacagctggcctttgagtcggtggttgtactgaatgggctgccagccctgcgagaggcactggtgaaatacagcgaggacaccgctgaccggccaccgctgcatttcaatgaccagtcgggctttggaccacgctctcaaggtgtggtcctcgcgaggtatggacctgcctggcgtcagcagcggcgcttctctgtgtccaccttccgtcactttggcctgggcaagaagtcactggagcagtgggtgacagaggaggccagatgcctctgtgctgccttcgctgaccatagtggattccctttcagccctaacactctactggacaaagcagtgtgtaacgtgatcgcgtccctcctctttgcctgccgctttgaatacaatgacccacgcttcatcaggctcctggacttgctgaaggacactcttgaggaggaatctggattcctgcccatgctcctgaatgtgttcccgatgctcctacacatcccagggcttcttggcaaggtattctctggaaagaaggccttcgttgccatgctggacgagctgctaactgaacacaaggtgacctgggaccctgcgcagccaccccgagatctgactgatgccttcctggctgaggtggagaaggccaaggggaatcctgagagcagcttcaatgatgagaacctgcgtgtggtggtggctgacctgttcatggcggggatggtgaccacctccaccacactgacctgggccctgctgttcatgatcctgcgtccagatgtgcagtgccgagtacaacaggaaatcgatgaggtcatagggcaggtgcggcgtccagagatggcagaccaggcacgaatgccgttcaccaatgctgtcatccatgaggtgcagcgctttgcagacattctccctcttggtgtgcctcacaagacttctcgtgacattgaagtgcagggcttccttatccctaaggggacgaccctcatcatcaacctgtcctcagtgctgaaggatgagactgtctgggagaagcccctccgcttccaccctgaacacttcctggatgcccagggcaactttgtgaagcatgaggccttcatgccattctcagcaggccgcagagcatgcctgggggagcccctggcccgcatggagctcttcctcttcttcacctgcctcctgcagcgcttcagcttctccgtgcccgctgggcagccccggcccagcaactatggcgtctttggtgctctgaccaccccgcgcccctaccagctctgtgcttcaccccgctaaggggaggcacagcatctcactcactgtgcttgctggggtcctagtgtgcaataaatggttttactctgaaccgaatcatccctgtgagctctccaggctgtaaggggcctgagcagccttcccgtggacatccgcacccctacttaatcttccttgaccatgtgccccaatggaagggctgctctactgacctccgaaatggcagccattcttgctttcacccctgccccctcttttcacccaaattgatgatgtttattcatagatgccaacatctggaaggagggccagaaaggactgctgtgaagggtcagtgtaagtcacacagatgagggaaggggcggtggaggtaatggtgggcagaattgtcccctttccacttgagatgtttctcccagacgcccccatttcagacccactacacaaccaaggctaactcctcagccagcatcatcacaacttcttatatgacgtcgcagagatgtagagaagtcggggaggctggaaatgacatgcaggttaagtgcccaaggttacctgttgggtaccacatgcttccctaaacggttttgtgggggtccagaagcaggttgcctcctaagcttctttgtcaccattaattccatgacccagcagggatactggtgtccaggcccatgcacagtaagaaagtgactctaaccagggatggaaggacccgcaagcttagtgttgacacagactcccagaccttagcacaactgactccatggtagaagtaccatttgggccataaaacttagcacgtagacagcagctcctctcataatgaaaacaaagacctaacccatcaaattctatcctgggaaggtctcttgaagcactcctcttggcttcttggcttctgtagttctcctagctaactgctcttgctaactgaagtatgtcaacccaggatatggttgttggtaaaagctcgccctgagaacagctcaggacgacattgaggtgacccagtgtagtcaccagccagctaataaagacctccttttggtttaaaaaaaaaaaaaaaaaaaaa

SEQ ID NO: 3886 - DNA, 2821 bp, Rattus norvegicus
ccgttgttgttgttgttttgttgtttgttttttgttttttgttttttttccggacctgaggaccgaacccagggcctttcatttgctaggcaagcactctaccactgagctaaatccccaaccccacactttcacttctaagaccagtctcattcttggtaattaaaataaccatggcaaccagaatatccactgtagcagtcagcacttcatttgtacgtaaccaaatgggaatccctcaatgtacatcgggtgacggtgtgagtcagtggaaagagcacgaagaagccctggtttgggcagtgctaagcacagtgcccagagtcttgcttatgctagcaaatgctgtgcccctgagtcacatgctcagaactgtcctgtcaacttgaacccatggggaatttaagagagcaaaacaaaatgttgcgtttgcaagctacagcaggttccacggaatccatcctagctcagcaaggcactgggcctctggtttttgtcttgtttccacacaaactctcgccctgggtgtaggcatgtgcagaaagggagggagggtctgcagatctaattgagctatccaagagacctgatttgagcatgttcttcctggctccttctgtcctccgtctctccctttataggactcttcccgtttccagaagaggagcccagacgacgacgaggctcgtctctcgcacatgtcagagccatgtctaaggatgaactgccacagtgtgcccttacagggaccagtgtcattcaaggacgtgactgtggacttcacccaggaggagtggcagcgattggaccctgcccagaaggccctctacagggacgtgatgctggaaaactactgtcatttcatctcggtgggatttcacataacaaaacctgacatgatccgcaagttggagcaaggagaggagctgtggacagagcgaatgttcccaagtcagagctatctggaagatgaagaggttttggtgaagttcagagactaccaagacaagcctcctacatcaattgtgatcatcaaccacaagaagctaattaaggagaggaacaatgtttatgagaaaacactaggcaataaccatattatttccaaaacactgtttgagtataaatctgatgggaaagttttgaaaaacatctcagacttcatcagtagagatataaaccctgtaatggggacgctgggtgacagcagtgagtgggaggaatcagtcctgacttcagagcaggagaaaactcatcctgtcccaactctctataaacaaatcggaaggaatctgagctccagcctggagctcgctcagcaccagaagacccagattccggagcagaggtttgaatgtgatgaatgtgacagctccttcctcatgacagaagtggcatttccacatgacagagctcacagaggggtcagggacttcaactgcagtaaagatgaaattgctttttttgagaagtcagaccttggtattcacccacataatcttatggaaaagaaatgttctacatacaacaaatatgggaaactcctttgcagaaagtcagtttttgttatgcaccccagatctcaggtggacgagaggcccttccagtgtccttactgtgggaacagttttagaaggaagtcctaccttatcgagcatcagaggatccacacaggtgagaagccctatatttgcagtcagtgcgggaaagctttccgtcagaagacggctctgacgctccatgaaaaaacacacacagacgggaagccctacctctgtgtggactgtgggaagtccttccgccagaaggccaccctcaccaggcaccacaaaacgcacacgggggagaaagcctacgaatgcactcagtgtggaagtgcctttggaaaaaagtcctacctcatcgaccatcagaggactcacacaggggagaaaccctatcagtgcgctgagtgtgggaaggcgtttatccagaagacaacgctcacagtgcaccagaggactcacacaggggagaagccctacatgtgcagcgagtgtgggaagtccttctgccagaagacgaccctgaccctccatcagcggatccacactggcgagaagccctacgtctgcagtgactgtgggaagtccttccgccagaaggctatcctcactgtgcactacagaatacacacaggggaaaagtccaacggctgtccccagtgtggtaaagccttcagtaggaagtcaaacctcatccgccaccagaaaactcacacgggagaaaaaccctatgaatgtcatgagtgtggaaaattctttagttgtaaatcgaacctcgtcgcccaccagaaaactcacaaggcagagacggtgagatttcaaagaaaaatggaactcaagagagctattaatgaagttgaaggaacaggaagataggtattcgagatcatctgtacgcattaaccacagacaagacatttaccctagtgaacagtcctgttaattccaaagatctaccccctaaacacgacactcatggaaatgttgtagaaaatgtctcagaattaatcaactgtaatctaaaccccgcaagaaagagattcggtgagtatgacgactatgggaagtcacacccgaattccatgcaagacgtgggacatcctgacgtcaaaccccacactcagatagcgagtgctgcagtcaccacgatgcacttgtgcagcctaaggagcctgtgactgcagcacaggcatctgagcataaggtctgcgagaagtagacagggaagctcagtgacactcagtagactgtacagagaagaaaagccatcgggaatt

SEQ ID NO: 3887 - DNA, 57 bp, Rattus norvegicus
ggctctgaacctgcctctggcccattgagtgttttcacatctttgaacaaagagaag

SEQ ID NO: 3888 - DNA, 3053 bp, Rattus norvegicus
ctggcgtctgcccgcccttgtttccgctgcatccagacttccccgggtggctggaggctctgtgtgcatccagaactttagatatacaaagggattactaggacctgcaagcacccgcagccgtggtgcgtactggtacgtgggatcccgttatgagaccctgagcccggagaagctgaggcaattgagtaaaggggtctcagaacgccgtggagagcaggcgccagccgggtggaccccagggcacagccagcgacctcagggtgacacgcggagcccgggagcgcaaggatggaggcacgattggtctggggagtgctcgtcggccctctgcgggttctctgcgtcctgtgctgcctgctgggccacgccatcgctgcaccgtcgcccatcatcaagttccccggcgatgtctcccccaaaacagacaaagagttggcagtgcaatacctgaacactttctatggctgccccaaggagagttgcaacctctttgtgctgaaggacaccctcaagaagatgcagaagttctttgggctgccccagacaggtgaccttgaccagaacaccatcgagaccatgcggaaaccaagatgtggcaacccagatgtggccaactacaacttctttccccgcaagcccaagtgggacaagaatcagatcacatacaggatcattggttacacacctgacctggaccctgagacagtggatgatgcctttgctcgggccttaaaagtatggagcgacgtaactccactacgcttttctcgaatccatgatggggaagctgacatcatgatcaactttggtcgatgggagcatggagatggatacccatttgacggcaaggacggactcctggcacatgcctttgccccgggcactggtgttgggggagattctcactttgatgacgatgagctgtggactctaggagaaggacaagtggtccgagtaaagtatgggaacgctgatggcgagtactgcaagttccccttcttgtttaatggtcgggaatacagcagctgcacagacactggccggagtgacggcttcctctggtgttccaccacgtacaactttgagaaggacggcaaatatggcttctgtccccacgaagccttgtttaccatgggtggcaatggagatggacagccctgcaagttcccgttccgcttccagggcacctcttacaacagctgtaccaccgagggccgtacagacggctaccgctggtgtggcaccaccgaggattatgaccgggataagaagtatggattctgcccagagactgctatgtccactgtgggtggaaattcagaaggtgccccatgtgtcttccccttcacttttctgggcaacaagtatgagagctgcaccagcgctggccgaagcgatggcaaggtgtggtgtgcaaccacaaccaactacgatgatgaccggaagtggggcttctgtcccgaccaaggatatagcctattccttgtggcagcccatgagttcggccatgccatggggctggaacactcacaggaccctggagctttgatggcccctatctacacctacaccaagaacttccgactatccaatgatgacatcaaggggatccaggagctctatgggccctcccctgatgctgatactgacactggtactggacccacgcctacactgggacctgtcactcccgagatctgcaagcaagacattgtctttgatggcattgctcagatccgtggtgagatcttcttcttcaaggatcggtttatttggcggacagtgacaccacgtgacaagcccacaggtcccttgctggtggccacattctggcctgagctcccggaaaagattgatgccgtgtacgaggccccacaggaagagaaggctgtgttcttcgcagggaatgagtactgggtctattctgccagcactttggaaagaggataccccaagccactgaccagcctgggtttaccccctgatgtccagcaagtagacgctgcctttaactggagtaagaacaagaagacatacatcttttctggggacaagttctggagatacaatgaagtaaagaagaaaatggaccccggtttcccgaagctcatcgcagactcctggaatgccatccctgataacctggatgcagtcgtggacctgcagggtggtggtcacagctatttcttcaagggtgcttattacctgaagttggagaaccaaagtctgaagagtgtgaagtttggaagcatcaaatcggactggctgggctgctgagctggccctgttctgacgggccgtacaatcttcactgcacaccgggcccaggaccctggggaaggacgtgaagaggcctggttaccctgtctcctgctctgtagttaatcagccttctccttcacctggtgatttcagatttaagagggtggcttcttttttgtgcccaaagaaaggtgctgaccgtatccctcccaggtgctactttctcccgcccacccaaggggatgcttggatattcacaatgcagccctcctttgggctgccctggtgctccacacttcaggttctccagcatgaatgatcttttgtgggttacagcacactcagagtcaacagagactgtcttaggagggcactggtggctcaacagcctggcacagggcagtgggatacaggtgtgccaaggtggaaaccagagacatctggtgtctcccttacggctgccctggcacttttactactttagctgtttgctttgtttgccctttgctgtttggttcaaccttttcagttttccaccacactgcatttttctcaccgaaggactccggttgtcggacatcactgcacgatgcatctggcctggcctatggatggctcccctcctcactttgtgtagaagcaactccagtcacttcctccactggttggaggagaaccaagtcatcggcttcctgctcagccttcttgcttctccctttaacagttccccatgggaaatggcaaaaagtataaataaaggcaccctttgagtggcaaaaaaaaaaaaa

SEQ ID NO: 3889 - DNA, 13894 bp, Rattus norvegicus
ctttgggtcacccaggaactgtatgaagttgcaattgagaaaatgcctttattagattggcccacaggagagctgatggtacagaatctgaatgatggatgtaggaagcatctctgggtcatgccacccctgggtaggtggcagtgggctgtgtaagaaagcaggctgagaagggtgcaagctgtaacagcctaggtccatgctctttgctttagcccctgcccatggtttcctgtaagtttccttgaagttgagataaactttcttctcagagtagctcttgctcagcagttatcacaggaatagaatataaactaagacagtacctaagtgtaagtccccattcatctatgtaataatgccaaattcatcctgaaagatcatttacctagaaatccattatttctcataactctttaactctgtagcttacttgaaggaaaagcaccttaaattaccagactgtccactcatttatattatttatttggaaatgtttgtaacagtacagtgaaactaaatttcagagacaatggctgtcagtttaggcatcatccgtttattataaaagggaggcatggaaattatttacatgatgaaatagttcagaatatcagtggaatgggcagcttcatgtgacaccatttcaacagtgatttcagtcgacatactttccaagaatgtcgccatctctaaataagaagtaatcctgtgaataaagagaccactgattaagatagtaataacaaatataaactgattttttttttggttcttttttttttttttcggagctggggaccgaacccagggccttgcacttcctaggcaagccctctaccactgagctaaatccccagcccctaaactgattttaaatcattagctttacttaccttgtcgtctagtactactttggtgcctccgtgttctgggagaagaactttatctccaactttcacactgacaggctgaatctctccaccctgatgaaaacagacacttgttagcaaagatgtatgtcttgttcactagatacacattaaagtttttgtttcagtatgtacaccaggagcctcctgcctcaggtttgtgttaattataggcattaatcacattaaaactgtaacttttaagtcactaaatttgtaaaagtgctcaaaccagtatctggcaggtacctaattagtggttaagcaatatagaccttacctacattaaatgtagaccttcataatatagcatcactgtagttactatatgacagagatgccttcagtgggcagctaaggttggctaactttttactgttaaatattaacacaccgtaagaccaagggaagggaagtaaagcaggtacttgttacactagacagcaaatggtcatgtatgacttcgaacaaatcgaaaaaattggcattacttttctccatttaatatacatttattgacttaatgtccttgttgtcaagacacagacttggtcagagactgaaggagaatgtccactcccccatactctagcggtttagttaagtgaagaacacccagagtagttcacctcctttctcaagtaggccaactaaaactcgaaatggtgtaggatgatttcagtgtctgggctaagccaacagtcaggctcctccacccatcaccgcacccttgcttttggggaacgggagtggggtgatggggtctatgtaaaaactgactggccattaattctggatccccctcactcagcactgtacctgtgctagaattagttttgtgccttattaaatacctcctccttcaattctgaaaagacccctgggtttatctacttgtatgactctttctgtctatttaaaatttgaagagtaggctacaaaataactacagaggtatttctttttttttttcagagctggggaccgaacccagggccttgcgcttgctaggcaaggcctctaccactgagctaaatccccaacccactacagaggtatttcattttgtgaggttttgttttactttgagatatggtctcgtcctgtacctcctgttggcctacaaggctctataatccacttgccttggcctccaaagaacctgggttagaggcatgaggcactatcaaggcaggcactttttaatctgtagtgtggggcactgctgaattagctcagtgggtaaagagacttgctatcaaagtatgggaacccaagttgccatcccaacactatagtaaaaaggatgtaacccccaacatgctcaggccagaaaccagactagttcaacacgactttaccccaaaagagtaaggtggagatggccctgcaacacatcatacagacatgtgcacatacagtcataccactcaaataccctctgcctttttacagtccctgtcattccttagaaatataaaacattctaaaattgttttcctgaatgcgaggttcttcgtgaattgaaatctaacttgaaattacttccaaaaaaaccttgccatttttaattaactttttaattaacaaaccaattcctcctccttcccacatcacataaaattctgtaccactctaggagctccgggttacacctttcctttcccgcctgatcccacagccacgaccgttgcttgcaatacttttccttgagacttttctggaagcataatgccacctttggtcacagtttcagcggcactcctttcaaccaatactctgtcaaatagcggaagaaacttcctaaaagcttgtccagcctgtggagagaaatgtgttcaaacagacagtaattaagttcgaagtgtcaggagacgagttaattaaataccactgcaaaccttaacattaatagtcgaaagccttccaaaatgaacagaaaacttaagtgtatctttagaatatagcccttcaatgttcactccatatagccagttgattttcatttccttgtctgttgtgagtgtgtgggggccgggggtcttcattcgctcatcagcaatcgcaaccttggtctttctccaaggtcaaatatttttcctttctcagatttttttttcaaactcgagtaacaggggagtggtgtcaatttttaagcccgatcttactctttctccaacataggactcattcacctaggctgtgccagggcaggtgggcttctgagtatgtacccgggcgcccgccccctgctccagacgcctgccgcacacgtgcgtgcagaaaagccgtggtggagaaagggtcggataggcctcgcttctgtagagcaacggaggtcgctggacactgagtgacccctgtcctgtcctgctagtcccaaagcgcacatggatccgtcggcctgccagccacgagcactcaccatgacttacgccgccgcagctccggactctgcactcggactcctgctgcaaggagactcccgtgggccggctcaggacacgtgaaaagacagcgcagcgcgcaggcgcactcagccccttagcgtgagagaaggcggccactccagcgcgcgcgccgattggtggccaggactccgcgcaggcggccgatgcgggtagccggaggcggaagaaaaggggagcactttctaggcttttccaggtcggccgctgaggtgaaagaacaagcccctcccggaaatgacgccacttgacctttcacccacgaaaagcgcggggccttccggaaggttctagaaccgagcgcggcccaggaaccagtgtacggcggcgggagagtgctgaggccacggggctgaggccgctcaggtaaggagggcggggccgcgcgcgtcgcatgcagattgcagggccggggcgtgggagaagtggggcgcgcgcgcgcgcacgcggggcgcggggcggggccggggagggaggggactcgggctcattgcggtgcgcgcccagtgctgggtccctcactcgccgcagacggcctgcctcgcctcgtgctcttccgccgccgccccgcaggtacgcggcctcggcgtgcacggcggcccggtgctcgtgggcctgcttgcagcgcggaccgagcacggagggctggggataagtctgtcagcgacgcgcaggctcggttcacttgttcaggcccagtagggccatactgctttcatcacgtgcggcgggcaccacgcgacctaggctaagcgcgggagcaagggcgggctagggtgggagcaacttgggccctgtggttccatctgcgcctggcgactgtagggctctatcggagggtggtcgcggtcctctagtcgctgtggccgcggtgatccggcgccttcactttgaccttgctcggggctcctggtcgagaagacacgtggggctcggcgcgtgcgctgagctagggcccttttctccggccttgcttgctgctgtgctactgtagctccgggtggatgctggcgggcacactctccttagagggttttgcaccgtcattagtacttctgtgattctctaggcacttgcatttagaacctgcctgcttacaccaactttttttttcagacacttttcggagtggatctgcttccaaggccgttttggcagtgaaagattaactcgagagggcaggagggggtggccatggggaggtggtttcgtgtgctttgtgctagtgctgtaggtcaggcatgggggcagcctccatgatcagttggttaacagattatgtcctgaatctgcagcgccgttagcagagaacagcagaactccaatctagccaccatattttgaagcaccgttggacaagtttgtagtgatactttttttctttccccagaaatgcttcgactacccacagtccttcgccagatgagaccagtgtctcgggcactggctcctcatctcactcgggcctatgccaaagatgtaaaatttggtgcggatgctcgagccttaatgcttcaaggtgtagaccttttagccgatgctgtagctgttacaatggggccaaaggtaccagtatacttatgtcgtgttaaagaatagtgttctgtagctgcaagacagcattttgtaatcgagttttgtgagtatctgatttgcatgtggtacaacttagtggtttggggggtgttatttaggtttgttagttggtcattctacgacggtgtccttactgctgcttcagtcgatttgggagacttctgtgcgttgtgatgtaatagtaacagctcaaggaagattttcaaaccagagtcatgactgtgtgcatgcttgcattaaattttggatcccatcccagtagttagagggtatatagaggggaaagtacaactccactctaataactcaagtgcatagctgtaatgtgagcgttcactgaacgctgaaatttccaacataaaaggcaaatgcactagtgtagaatcattactttaaaggtgtcgtatttttatatgcattttattctgcctgcatttatgtctctgccagggtgccaaggttctgggaactgacttccccctttggaagaggagcctgtactattaccaccaagcctgtctttacttaactttatgagctttgttgtttgggtcttttgtttgttttattcaagatgcatttctctggtagcctaggctgtcctggaactcaaagagatcatctacctgcttctgcaacacattgtcagactctttttacttgccctttgggaaaaactttgtggtctcccattcatctctacattgtacatacctcatgtttctgcaattatcacattgcaaagatttgtctagttttgggtttttgagtctcactagtttagtctggcttctaacgcccgtggcaaggctatcctcacatctccagcgtaggaattcagtattctactcacccagtgtgtttttattatgacaaggtctctaaccatagctggccaagtcagccttgaacttgagcactgctaagatcagaggctgggatcacacatttaagtggctgaatagggagctatagtactttgaggacatcattggatacagtgaggtcattttaaattgatactagactgaactgcataatcccagcattcaggaggctcaggcaggtggatctgaaagccatggatctaaagctataagagaaatcctgtcttgaaaaacaaaacaacaaaaagccctgcatctttaagtactgtttacatagctcaagacagaatagaagcttggttcaaatccaaaagttgccaataccgtcgttgccatatttgaagtttttattgagtgaaccagaagagcccatatttatcttactggctgatatttagtgaatgaattttaaagcaaaacatgtttttgataagcagggcattagtgagtggttcttgcctctggtcccagccttcaggaggcagaggcaagtagatctttgtgctttgtgagtttgaggacagccatggctgcacacagaagaaccctgtctcagaaaacaaagccagttcatagccaaactcaagtacaaacgatgtgaagaatgtcctgggatctgtgttttcttgttttataggtagcatctgttagttccagggaattcctgttgtgcctcagtcaaagttagactccagggcacatgagtagtgttcattttgtctatacacctaagatggttgattaacttggctttgaggttcgtgttgcaggattgttaacaatgacaacttcaaggattatctttaagggttgatattttttttttttgtcactatagggaagaacagtgattattgaacagagttggggaagtcccaaagtaacaaaagatggggtcactgttgcaaagtcaattgatttaaaggataaatacaaaaatatcggagctaagcttgttcaggatgttgccaataacacaaatgaagaggctggggatggcaccaccactgccactgttctggcaccgtctattgccaaggagggctttgagaagatcagcaaaggggctaatccagtggaaatccggagaggtaagagtttgtccttgatcctatgctgtaaagaattctacatcttcatctttgtcctttttgttgtagagtttgtgtatgttcttggtagagttgcccttccttacttatgtggatttccaagattgaactgaggccttcaggcttgtgggtccagtacttttactccctagacctatcttccacaccttgttttttaacttatttaatggaagtgaaaatacagggctttcggtatatccctggctgtcctggacacgcttggtaactttgtagacctggctagttagcttcaaatagatctgactgcttctcctttctgagtgctggggttaaatgtgggcactaccacccatgcccaaggccctgtagtattacttaacctttgatccatcccgtgagccctaagtagtgagaattctgaaactatcttttcttgttttgattaggtctcctttttagccttccctgacatggttccctatataatccatgcaggtctcaaatttttagccattctgtctcagtctcttgggtcctcggattacatgtgtgagccaccatgcaacatctaggtcaagcttttcaaaatgttggttttcagtctaaatgattgattgaatgcatactgttgtttggtgcagttgggagagtgctgacatgagaggttgcatgtgatcgttagaaggaatctgtaattcttagcggggaccatgataagcattgtagtaacatacattcttgaactaggtgtgatgttggctgttgatgctgtaattgctgaacttaagaaacaatctaaacctgtgacaacccctgaagaaattgctcaggtaaggattttatttcgtgttgaaaagaataattttgatcttttggttccaagaacaggatttgggtttgtctttgtagccatgactatcctggaattaaacgtatagatcaggctgaccttgaactcaaattcctctgcttccaaagtgcttgccccatcactgttagatcttactctttttagttttacggtgctgtaaataaaatttgtgttatttgtgaaaatattcttaggtgatatcaatgtaccctgtactatatgggttcaaacctagtccttgaagcatagttaacaagtgttttttatatgtatgtgcctgggtgttgtgtgggttgcaccatatgcatgcatgaacccataagaagaattaagagacagttgccagccactctggtgtaggtgctggcccgaacagtaagtcatcttaaccactgaggcatctctccacctctttagttttagtttattcttaatgtgtcagataatggaggaatgagggtgtagctccatttaaaactaacaactggccctcttgctctcttccttgctctgtccccttgctcctttccccttctctccagtcccctccccactccccacgtgctcatggtcggctctacctttcttctgcctttttctgtctttactacccatcctcatgccctaaataatcaattctattttaaaaaaaaaactattaactgtaaaataatcagtttagagtgtcaaaggagaagaaagttgaaaatattaatcttaccatttgattttgaagtaaattggttatttcaggttgctacaatttctgcaaacggagacaaagacattgggaacatcatttctgatgcaatgaagaaggttggaagaaagggtgtcatcacagtgaaggcaagcatgggatttgatatgttttgataatatcttcaatggggtgtctgtaacctattttccaaataaaaacttgaatctcttgtttgtgtcagtacaattcattcctttgtcttaacatctgtattgagtatatgctcactattagtctgaatatttgccccctacaatgagttcatctaacttaaataattagctctctgctagctgtaaatagaatggagcctctaatcctggctgtctgggaactctaggcttcaaccttagagagatggcatccctctgtcatctcttctttctgaagattaaaaaaggcatgggttcctgagctcaactttagttagtggcttgaatttttgtgggagtgcagttagaggacactgcagcatttccatgttgagtcccttatgcctgtgtcatctcttgctaatttggtatgtaatttcaaatgttggcttatgtttttgagacagggtctcattgtgtagtcatgtttttgagacagggtctcactgtatagatagtccaaattaggcttgtgtttcttttaagagattttttctatctatgagtgtttgtttgcacatgtatgtgcaccttggagtccagaagaaacagcagaatcctaggaactgagttgagaaccatcatgtaggtgcacaaaacccaattttattcaagaaaagcaaatggggctggaaagctggatggctcagtgattaagaacactggttgctcttccagagaccatgagttcaatctctagcaaccacatggtggctcacagcaacctaaaacgggatatagtgccctggtctggcacacaggtgtatatgctgataagagtatgtaaaatatataaaataagtatatctttagaaaaaaaagagaatagcaaatgttcttaacccttgagccatctttaggtttagctgaccaagttttgtttctttagtttaaataggatggaaaaaccctgaatgatgagctagaaattattgaaggcatgaagtttgatagaggatatatttccccatattttattaacacatcaaaaggtaagagcccatccacaagtgaaagtcgtcacaatatgctctaagctgctaacttactgtcagctgtgggtaatgggtatggctgatgcaataagtaaaaactgtgatgtttaaacattaatggtttggtaaatgaagaagaacatgagttactggtctcattgtggaagtaaattgttttactgctcattgtatttataggtcaaaaatgtgaattccaagatgcctatgttttgttgagtgaaaagaaaatttctagtgttcagtccattgtacctgctcttgaaattgccaatgctcaccggaagcccttggtcataattgctgaagatgttgatggagaagctcttagcacactggttttgaacaggtaatagataaattggattgggtttatatatttttagatagaaggtaatttctttcttttgcttttttgaaattccacattttgcttgtgtgtctcaaagctgtagtatatatgatgtagtgctctatgcattatgagtctatctctagctggtctcaaatgcacataattcttgagcctgtgcctcccacagcttcccagagaaaactatacatatgtcttttttttttttgtaagatttattatatataattacacaagggagcatcagatcttattacagatggttgtgagccaccatgtggttgctgggatttgaactcaggacctctggaagagcagtcagttttctcaaccaactgagccatctctccagctctacatatgtctttttttctttttttttctttctctccttttctctcctttttttcggagctggggattgaacccagggccttgcacttgctaggcaagtgctctaccactgagataaatccccaacccctcacacatgtctttttaacactggtgtgcttagcactaatgcccaactgtgtctggcaatgtaagagcagcatttctttaagaagggaatcaggttgaaacaaatttagatgagtagaggtccccatctcatcttttttaagaccagaagttgaaggaaaagagtagggtctgtacagtcatgtagacctagaacttaccagggactaaactagatgctttttcccaattccccctttggtttacatcttacgcagttaaatgtctttacaggctaaaagttggtcttcaggttgtagcagtcaaagctccagggtttggggacaacaggaagaaccagcttaaagatatggctatcgctactggtggtgcggtaagtaaaccttgtcatactgctttgctcagtgttgtttatgcttccagatcgtaaatacaatgtatacttcacaatagatgggctgtttctttctattggatatttggaacacgggttggattaaggtctcacttctaacttactgagcctggcctgagaatggacatgattaaaagttcttctcaaaatttaaaactaatttgtgtaagtgattttatttagactttgttctgatataccagtggaaaaatagcatttctttctctggatttttaagctttatgtatatgggtgtttgtctgcatgttttgtatgatgtatacataccagaaggcattttatccagttccatagcactacagttatagacagttgtaagctgccatatggatgctgggatttgaactcaggacacctgaaagagtagaatagctctccagtgcttgtgactgctgagacatctcactagccctgaaaagctgtttttcacaaaaatatttgtgactatagtaataaacctagtataatggaagccactaacagcacattgtttttataggtgtttggagaagagggtttgaatctaaatcttgaagatgttcaagctcatgatttaggaaaagttggagaggtcatcgtcaccaaagatgatgccatgcttttgaaaggaaaaggtgacaaagctcacattgaaaaacgtattcaagaaatcactgagcagctagacatcacaactagtgaatatgagaaggaaaagctgaacgagcgacttgctaaactctcagatggagtagctgtgttgaaggtaagactgacttgcaggtaaacattttaggctgagtctggtgatagtggttctttagtatttaccaatagtaactaagtgacctttccccaaatctttagtttttgttgctcgtttgttttggtttttgcatgtgctataaccaactttccatggggcacatgtaaagggacaactttcagcagttggtcatctacctttgcagtgatttttagaagcaagcaagccctttgacccacttgggtcatatccttaggccttctgagtcatcaataggcatctatcccctactggtattatgcatgagaccgaaaccattcttgtgctgtgtcatgcaaacagtctatcactgcccagtttcccagcttccttttctctttttctctgtgtagccctgactgtctcggaactcactctgttaactctgtagacaggattttcagtcctagaactcacttagtagaccaagctagctttgaactgaaaatcgctgcctttgcctcccaagtgctgggattaaaggggtgtgcacttctgcttggctagcatcctattctcacagggcagtacagcttgtgttgtaggaagttttgatagggggatacattataacctattactctagaattgcttccttctttgtttttgttttgaactctgctgtcacccaggcaggcctccgttggtataacccacctgccttaccctctcaagtgctggggtcgttactatgacactatacccagctcaggtctgccatccaggtggcttcaagtaatcattgactgggaagggtcggtactacctggaattttttatttaatctttaggttggagggacaagtgatgttgaagtgaatgagaagaaagacagagttacagatgctctcaatgctacaagagcagctgttgaagaaggcattgttctaggagggggctgtgctctacttcggtgcatcccagccttggattcattaaagcctgctaatgaagatcagaagataggtaaagattctttcaaatgagtttgtggccagagaggtaattagcaatgcaccacactttacaggggattgtttcacctatggtaggattggatgtctgattgcttactaaacttttatctttataattattttatgtgtgtgtgggagtgcattttgctctcatgtctcgtgtgctgtgtgtttgcagtattctgaggggctggaaagatggctcagtggttaagagcactgactgctcttccagaggtcctgagttcaattcccagcaaccacatggtggttcacagccatctgtgatgagatctgatgccctcttgtgtgtgtctgaagacagctgtagtgttgttatatataataagtaaatttgaaaaaaaaagaaatgcagtattctgagggccagatggggtcatcagatagcttggaactggagttacattggtgctaaggattaaaccaggtcctctgaaaaagaaaccattaaccattgagccatctttggttccccaaaaagggaaaacaaaagtaagttcatgaaaatgtgtttgctttgtaggtatagaaattattaaaagagcacttaaaattcctgcaatgacgattgctaagaatgcaggtgttgaaggatctttgatagttgaaaaaattctgcagagttcctcagaggttggctatgatgccatgcttggagattttgtgaacatggtggaaaagggaatcattgatccaacaaaggtaaataaatcagcatttctaaacaatgaatgacttgctctctggtgtatggttttctttaatttttttctttttttcggagctggggaccgaacccggggccttgcctagcaagcgctctaccactgagctaaatccccaacccctttctttaatttttaattgttttactaaatttttttctaggttgtaagaactgctttactggatgctgctggggtggcctccctgctaactacagccgaagctgtagtgacagaaattcctaaagaagagaaggaccctggaatgggtgcaatgggtggaatgggagggggtatgggaggtggcatgttctaactc

SEQ ID NO: 3890 - DNA, 2035 bp, Rattus norvegicus
agccgaatggcggagagcctgcgtctttttgactccatctgcaacaacaactggttcatcaacacctccctcatcctcttcctgaacaagaaggacctcctgtcggagaagattcggcgtatcccgctcagcgtctgcttccccgagtacaagggtcagaacacgtacgaggaagccgcggtctacatccagcgtcagttcgaggacctaaaccgaaacaaggagaccaaggagatctactcgcactttacctgtgccaccgacaccagtaacatccagtttgtcttcgacgcagtgacagatgtcatcatacagaacaatctcaagtacattggcctttgctgaggagccgggcgcagcctgcttgcctgcggtgaaaacccacggggtgtcacaccccacacctcatgctggagaggcccgacccaggggcaggaaacggggggagtggcttgaagagtgtgtccccacccccagcctctctcgcctccttggccccacgtctctgcaaacataaatatatttggatagattgctaggtaggtagacacacagacacacgcacacgcacacgcacacgcgcacgcacgtctggagacggcaacgctctccggcggtcaaggtttcctgaaattttcagaagctgctgtcacaatttcattctgaggccatcttgcccccccaccccccatccactctgagtcggcccccgctctgcatgggagggagggtccacgtttgactgccgaggaggggccggcggggctggggccagggccggccagctgtgcccattgcctgggagaaggccagctcaccacctgagctctggactggggaccaccactgaccaggagggagggccggggcagggactgtaccttcccgtctcagccactctgtgccacatttgtcctgtacctaggaccagaggaaataagtgactgttctcaccagacctctgactaccagtggcttttacaaaaacctaaaaagtgtgcagcaaaaaacctaacacaggctgaggagtggcactgtttatttcaaactaggccagctgggtttccagctcttcttctactggtctgatgttttataaatggaaacctggtttttcttctctggcacccttctttttttttttttttaatttttattttcggccaaatattatgtctcacggagggggaaaaaatacagacaatttcagatgtgatcggatattcttttttaaatgcgggttttcggaacacatttcatttcgggcgtccccttctgtgtctggtttgctgagtatagaagttgtcacctggacgattctgctcctcggctccaaagaatcctggggcaagtgtcccacaccagcctcatgggacatattatgtatataagcctctgcaatgttctcttgttcttggtgcccttttctgctttaaataaaatgtgatgtatttaaagaaggttctttacctaggagcgaatgaacaatagctaaatgtcctggtatttaaagtgtaaattatctatggctttgccaaaatgaaggaagggggggaggcgggcaagagatggcactcctcggtccccacacactccacgcctgacacgggctgggagctgctcagactcctgtgaaggcacagctagacttgtggcctgaaggaggccctgctgggactgtgcactccggcccttctagccccagggcccacagacgctggtcttgaaagagccttggctgtgtataaatgcaaagcccagctaccgagggaatggcaaccactggatccctggccaaatctctctcgaccctttgtttgctacccgtgtgtccgaggtcaatgtgcagacccgcagccaaggagctgggatgtttaacagagggagaagagctggggaaccgtataaaacatgaagattgtctactttaagaaataaaataccctgaacggagccaaactctgtccccgtgtgctgtgtgtggctcgtgtatggctgagctcagtgatgtctagagggccgctagagacgcctt

SEQ ID NO: 3891 - DNA, 7764 bp, Rattus norvegicus
ggatccctggagcttgccgtttagtcaacctagctgagttggtgagctccaggttcagtgagagaccttgtcccaacaataatgaggaggctgacatttctcagagttaaaaggccagtctggactacacggcattcgaggccagctggggttacataccccatcttcaaagaacaaacagtaagtggagagccagtgagatggttcaacttgtgaaggcacttgcaacgcctggtgctgagttttgtccctgggatctacaaggtagaaggagagaactcactcctgaaagttgccctctgacttctgcacataccatgatttgtgtgtacacacacacacacacacacacacacacacacacacacacgcctgaatataatatggtgttgagtgactgaagatgtccatatctatatttggactccacacaaatacgctatagttttctggaaactcctttttgaagccaaggttaagggagcaatcagaggtgtatctggtcaaactccatttctcatttccccgactgaagcccaaaaaattatgaggggattgaacacagaaccataggtaggtctgactctccaggtgccaccttttgtgtgccctccttttgatgtcttaactggttgtcctaacttctctctctctctctctctcttttttttttttttttttttttcctttttttcggagctggggaccgaagccagggccttgcgcttgctaggcaagagctctaccactgagctaaatccccaacccctgtcctaacgtctcaatagactccctaacaagtacgcctacgtgttccaactaggcttcttagcctgtatcctggccctgacacttcctagctgtgactttgggcaaaacaactccactctgtctcagtttgtttacctctgaaaaagggctggtaggtagtctttgtcccagggttgtgagacactaagtaaacacttatatagaaattaatttttgagacagcgtctctatgtaaccctgactgccctgaaactatgtagtccaggctggacacttggctggaggacttatttttagtacctgattagtatctcaaggtgcctagtggtagctgacatctgagtgtgttaaatgacaatgggcgttctatcttgtgttttccatgaattacttaattctaccaatcctcttagagacagttaccatgaggtgctaagaaacaggttcagagaagtcatgtgtccaagtccccatgggaagagaagaaagccatctttccaccccggggagatgactgcctaggtcccaatgctcaatttcctggtgggtggattgtttggggtcatagggtaaatggttgactttaggaagagcaaagcacaggatgggggtgggggtgggggagacagcagggttttgttttttgttttgtttttttttcttttttttttttttttggagctggggaccgaacccagggccttgtgcttgctaggcaagtgctctaccactgagctacatccccaaccccgagacagcagtttttaaaataaaagattaaggtaaataaaccagttggtgggaggtagtgagctctaaggtctgggcctagctatttgcttagtgtagtctgggtttgcccttggggtgaagtcacttgtgtaggagccaaagtgcaaaccatgctgagctttggcaagctctgggcttgcaggtagtgttttgtccctgctgaggcctccttttccctcttgaggtctcagcttagcttctcaggctcctctctataaacctgtttgggcataccaacttaatttgggctggctaggtcctttccctgcacagacattgtgtcggtggtagcactggactggaccttttgggacagatgatatttagagagggtagatgatgccatccctggatcagcaaagatatagaggcaggcatgcaatcctggcctcaggcttggctagagctgagtgtgggtgttaaggagactgtagatgttagccctagaaggacaaagaggtatatacaagattggtggtcctacaggatcagatgcatgtgtcacatgttgcatgtcccacaaagtcagagcctcaccaagctagacctgctatactctgagttgccacgtgccaactgtgtgtgcgaggcatgtggtcacatgtgctgggggctgcacgtgagagtgttagtgtctcctccccatcacgagcatgggggtggtggtgagtcacgggctcagccttcagcgccaactgtcatgttccttccccccccaaatttcacccccagccctgcgccacccacccccacttgaagatctgtgtcgattctctgttccatccccctggccttctgggctccctcagggagacagcagtattccttaagagagggtactctcagcctctgcccactttgtcaccccttcccactgcctcactgctcaggtgactagaagataagggcctcttctagcttctactcatcaccacaggtccccaggagttctctgggccacaaagaagaatccccaccctcctcccctcagcatcttcagcctctctttccagttccatttccaccagcttgctgtgcctgcttcagtgggcctctggtgtctgtgggtctcctgtacccatgggaccatctccattaggagacctctccttgctttctgggctctgtgtatgcttcctggttgccccttctgtgtatggctgactccctattctgaggaacctttctgtgtcttctaacctctgtctctggcctccccaccttcagacacctctgtgtcctatatgctgttctcttgtcctcatgtggcttgctttttatgtttggcttttccctgtccttggccttgggtagtttgtgggccttggcccacctctcgagggtcttgatggctgtctttctgtttctctgcattttttccatctctgtagtctctctccccatctctaggcccttccctctgttctccccactcagctccatgggctccagaaccctaggctgcctgggcagggcggtggcatggtgtggttggagggggtggccccgggggtgggcccttcatccaatgcagctcgctcttctcatcagcattctcctcgaagggccccccagccccgaccaatacgatctccccctcctctgctcccctccctccttgctccctgcttgcctccctcccttcctcctgcccgccctcctccctgcctccctcccttcatctctccccaccaccaccaccaccaccaccaccaccaccaccaccaccaccaccgcagccgccgccgccgccgccgccaccgccaccaccaccaccaccacaaccaccatcaccacaaccaccaccctacccactcccccacccccccgcgctccaggactcagcgcgggcggcgtcggcctaggaggggcgaaggagcggtggcggcagcggtagtagcggccgacagcaaggaggcaggccgggctggggacacggaaccgccagcggctgccgctcacaggggaccagagtccggcggccaggccctcccaccgcgagcgggccggccccgggacaccccaccctcctccgcctgcccgttccacctgcttctctccatcctctcctcccacctcatctctccacctcgtctgcccctcttcttgatctcaccagggctgccagttaccctgtcctctccagccccttcattgaccggcctctcttggcccccaagcatgcttttcccctggggactgagggcttgaggactcccggccctagcctcatccagggcagggccaagtctctggggggagggggggaagggggcggccccctcccccccggcaggccctcccctcccccacttcccccgatggccggctttcttttctccacccagtcctcacccccagtgccccccccaggccggcccggctaggggagggggcgggggccctttcctggggccggcttccccttcccccggctttgcttgtgccccccttcccttccgttttcaccttcctctcctcctttcctccctccttcccctccgtttgctccttccccctctcctctctccccttctctcctccattttctcctttccccttcctcccctcctggcccgccctttgcttttccacctgtccttccttccccgctgctggggagacaccgttttggattagttgggggccaccgccggcggcgggggagggggcccagtggactgccctctcccccggccccagcctcaccagcacccagcgtcggagcacctcctggttgtcgttcctcgggcctcgagggagcccagccctccgtcccaccaggatccgtaagtgtctgcagggcggggattgggctgggtcctgggtcctggaaggccaggctccctgcccggctgtccccccccccccccagtccctgctccctgtggatggcaaggaagctattcctcactgccttgtgccctccctgtcaacctctcattctccacgacctcttctccttttctcagccttacttctgggtacacacctcacacctgccctcagcccagctttccggggtgctgcgggctgactggctcccaaggtagccagctcacttcactggctcctggtttgttcctcccccaagcttgggtcccagacccacactggctcctgacttgtgtgttcctcacttgtgttggttctctctctctctctctctctctctctctctctctctctctctctctctctctctctctctctctctctctctctctcctttcactaagccttaccataggccctgtcccattgcacctcctgtctgtcttctggaaatgcctttctatcgtcaagtctgcatttctcctgtgtccggggcctgtccaactctgcccaacttctctgttcccggctgtgtctcgccgggctcagcgtctgtctctgatgagatgctagttctcatccagtcttcttcccactctgtctttccattctctcctgatcctctccacctccagccttcatctctcacccttccgcttccctcccccagaccccactgagggcccccaatcttccccatccacccttctctcctctgttctaacctggcgcttccgcccaccgcccagtctctccacttccgaaccacaccatcggccttttagcttccacccctcccagtacctatggactggggactctgggatcatctgtgccagctgctgtgggcatccagtttgactcagtttccctcctgactcatcccctctttagcctttgtggtcagtctccctgtgcacttcttcctcaagcctttttatcctccattctgccccctggcctcagcctctgtaggctgctatgcagctggtccctagctcacactctgtgtatctgtctcaggttgtctctgtcctcagagtttcatgtttctttctccgctccctgtcgttttgtttgttctgcttttggagatagggtttcctatagcccaggctagcctgggactcaccatggagctcaatctggctttgaactcctgaccctcccgcctctgcctactgatggtaggtatggcaggcatgtgtccctacaccctgttagccccttggttgttatacttgttgttagtcatcttctgtcggccccttgtcctttacatgtgtctccccttgctcatctctcctccaacctgtagggcctgacccactctcctcagctcccctctgtttcttgctctgtttctgtccatttgtatcagcctggcctgagtctcctggtctgtgagtcctggacctgcctgacatttcccctctgctcctgtggtacctctttgtttttgagacagggcctaactgtagtctagggattcactctgtaacataggctaccctcaagttcacagtgatccccttgcctccagagcaggaattacatcctggtgtgaatgtcttagtgtctgttctttccccccacctagctgtagtcaccactttcgggaaggggctatctttctgtgcatggccctctctgtgtttattcactccccataagccatttctgcactgtacctctgtcctttggttcccatctgtctgccacctgtgggtccctgcccttctgccctgcctccctctttttgtctgatccccatttgttccagatgtcccaggatgaacccctccacccccactcttccccttgagaactctcctctagctctcccagaattccttgctcctctgtcctggtcaagtctccacattagatctaaattgcagtctgcagccaccagtctgttgagcatgtcctcatatcccttaggctgtcctcatcaaaggctgaggagtgtggggacgactttctcaaggtcacccagtgaagtaggggcaagtatgggactgattaggcaccctttctccttgacctgaacttttcaggccagagaagtgcattctgagcctgggcttgtgactctggcctttctcgggagttctttccatggtgccaggtgggatgtcagaggacactagacacatgtcacagtgctctgggctccgcaagaaccctcttccattggaccatggtctacagccaggtccagggatccatgtgcacatctggcaaaacacatcctgcccagtagttacactgtcaaaggcctggagtgcccagaacaaacctggactccccgaggctggatctgtaaggagaagtcatgtaccacaccctagctcccccaaacagggtgcaggcagggtttcagcacccacctcttacaggcagtcttccagctttcctttcttcctaccagactctctggtctcttgagtcagcctgtgcctccctgtactctgtcttacgcttccagtagctcacccacaccccatgcactgacagcccctggtctggccttgccctgctcctccttctctggtgtgtgtcccttgtgtctacatcttccagtcccttccctgcctctctcccagtcctgtctccgatctccttcagctctccttccgtgtctctgtttttagcagtttctgacatccgtctgcgctttcacctctgcctgtttcccttccattcctgtattctgagtcccggcgtctttacttttgcggcctctcgtcagatactttttcttttccttccgttctctctcttctgtactctctctttaggttcttcgctatgttcctccctccctgactccctctcttgctccttcctcccttcctcccctcaccaagtttcccaattctgagattcttcacccttcagaccctgggtgcccaggcctctctcccatgggattgtgggaaccagggacgtcgggaaggtggcaagtgaggcttgggatgggttgcctagcaacactgcatcctctccagccagtttctgttgcctagtaacagctgcctgcccagagacagggcgggactggggtggtggtagcacttttcagtttcctgttggggtggggctggtccccaggatcactcctacttgaaatttctagtaatgcctgtcctttctgtggcctctgacctttccttgttccagagctcaggactaaatgagcttggtgtcccagtgaactgggcctttcagaactgtggcttcctccccagtgatgtctgggaggactgtgcttgccaccctacccagcggctttcctaagggatgctgccccctcacatcagccatctcccgtggggctggggggtctctccgcagggatcc

SEQ ID NO: 3892 - DNA, 3903 bp, Rattus norvegicus
aggaagcaagaaactaatcgtcttggcaacaaaacaaagagaatgaaagcacacaaacataacctcacatccaaatatgaatataaagggagcaataatcactattccttaatatctctcaatatcaatggcctcaactccccaataaaaagacatagattaacaaactggatacgcaatgaggaccctgcattctgctgcctacaggaaacacacctcagagacaaagacagacattacctcagagtgaaaggctggaaaacaactttccaagcaaatggtcagaagaagcaagctggagtagccattctaatatcaaataaaatcaatttccaactaaaagtcatcaaaaaagataaggaaggacacttcatattcatcaaaggaaaaatccaccaagatgaactctcaatcctaaatatctatgccccaaatacaagggcacctacatacgtaaaagaaaccttactaaagctcaaaacacacattgcacctcacacaataatagtgggagacttcaacaccccactctcatcaatggacagatcatggaaacagaaattaaacagtgatgtcgacagactaagagaagtcatgagccaaatggacttaacggatatttatagaacattctatcctaaagcaaaaggatataccttcttctcagctcctcatggtactttctccaaaattgaccatataattggtcaaaaaacgggcctcaacaggtacagaaagatagagataatcccatgcatgctatcggaccaccacggcctaaaactggtcttcaataacaataagggaagaatgcccacatatacgtggaaattgaacaatgctctactcaatgataacctggtcaaggaagaaataaagaaagaaattaaaaagtttttagaatttaatgaaaatgaagatacaacatactcaaacttatgggacacaatgaaagctgtgctaagaggaaaactcatagcgctgagtgcctgcagaaagaaacaggaaagagcatatgtcagcagcttgacaacacacctaaaagctctagaacaaaaagaagcaaatacgcccaggaggagtagaaggcaggaaataatcaaactcagagctgaaatcaaccaagtagaaacaaaaaggaccatagaaagaatcaacagaaccaaaagttggttctttgagaaaatcaacaagatagataaacccttagccagactaacgagaggacacagagagtgcgtccaaattaacaaaatcagaaatgaaaagggagacataactacagattcagaggaaattcaaaaaatcatcagatcttactataaaaacctatattcaacaaaatttgaaaatcttcaggaaatggacaatttcctagacagataccaggtatcgaagttaaatcaggaacagataaaccagttaaacaaccccataactcctaaggaaatagaagcagtcactaaaggtctcccaaccaaaaagagcccaggtccagacgggtttagtgcagaattctatcaaaccttcatagaagacctcataccaatattatccaaactattccacaaaattgaaacagatggagcactaccgaattccttctatgaagccacaattactcttatacctaaaccacacaaagacacgacaaagaaagagaacttcagaccaatttcccttatgaatatcaacgcaaaaatactcaataaaattctggcaaaccgaattcaagagcacatcaaaacaatcatccaccatgatcaagtaggcttcatcccaggcatgcagggatggtttaatatacggaaaaccatcaacgtgatccattatataaacaaactgaaagaacagaaccacatgatcatttcattagatgctgagaaagcatttgacaaaattcaacaccccttcatgataaaagtcctggaaagaataggaattcaaggcccatacctaaacatagtaaaagccatatacagcaaaccagttgctaacattaaactaaatggagagaaacttgaagcaatcccactaaaatcagggactagacaaggctgcccactctctccctacttattcaatatagttcttgaagttctagccagaccaatcagaaaacaaaaggagatcaaggggatacagatcggaaaagaagaggtcaaaatatcactatttgcagatgacatgatagtatatttaagtgatcccaaaagttccaccagagaacaactaaagctgataaacaacttcagcaaagtggctgggtataaaattaactcaaataaatcagttgccttcctctatacaaaagagaaacaagccgagaaagaaattagggaaacgacacccttcataatagacccaaataatataaagtacctcggtgtgactttaaccaagcaagtaaaagatctgtacaataagaacttcaagacactgaggaaagaaattgaagaagacctcagaagatggaaagatctcccatgctcatggattggcaggattaatatagtaaaaatggccattttaccaaaagcaatctacagattcaatgcaatccccatcaaaataccaatccaattcttcaaagagttagacagaacaatttgcaaattcatctggaataacaaaaaacccaggatagctaaagctatcctcaacaataaaaggacttcagggggaatcactatccctgaactcaagcagtattacagagcaatagtgataaaaactgcatggtattggtacagagacagacagatagaccaatggaatagaattgaagacccagaaatgaactcacacacctatggtcacttgatttttgacaaaggagccaaaaccatccaatggaaaaaagatagcattttcagcaaatggtgctggttcaactggagggcaacatgtagaagaatgcagatcgatccatgcttatcaccctgtacaaagcttaagtccaagtggatcaaggacctccacatcaaaccagacacactcaaactaatagaagaaaaactagggaagcatctggaacacatgggcactggaaaaaatttcctgaacaaaacaccaatggcttatgctctaagatcaagaattgacaaatgggatctcataaaactgcaaagcttctgtaaggcaaaggacactgtggttaggacaaaacggcaaccaacagattgggaaaagatctttaccaaccctacaacagatagaggccttatatccaaaatatacaaagaactcaagaagttagaccgcagggaaacaaataaccctattaaaaaatggggttcagagctaaacaaagaattcacagctgaggaatgccgaatggctgagaaacacctaaagaaatgttcaacatctttagtcataagggaaatgcaaatcaaaacaaccctgagatttcacctcacaccagtgagaatggctaagatcaaaaactcaggggacaacagatgctggcgaggatgtggagaaagaggaacactcctccattgttggtgggattgcaaactggtacaaccattctggaaatcagtctggaggatcctcagaaaattggacattgaactgcctgaggatccagctatacctctcttgggcatatacccaaaagatgccccaacatataaaaaagacacgtgctccactatgttcattgcagccttatttataatagccagaagctggaaagaacccagatgcccttcaacagaggaatggatacagaaaatgtggtacatctacacaatggaatattactcagctatcaaaaacaacgactttatgaaattcgtaggcaaatggctggaactggaaaatatcatcctgagtgagctaacccaaacacagaaagacatacatggtatgtactcactgatatgtggctattag

SEQ ID NO: 3893 - DNA, 74 bp, Rattus norvegicus
tgagttatctcaattgattgttcacagtcagttacagattgaactcctgttctacactttccccccttctcact

SEQ ID NO: 3894 - DNA, 216 bp, Rattus norvegicus
taagcttcaatagatgtggaggtgaaccaacacacacacacacacacacacacacacacacacacacacacatcacacacacaatcacacacacacaatccaagccgaattcttggcaggatatccatcacactggcggccgctcgagcatccatttagagggcccaattcaccctatagtgagtcgtatacatcactggccgtcgttttaccaac

SEQ ID NO: 3895 - DNA, 5798 bp, Rattus norvegicus
gtgctgtgcacatcgcgagcggctggggtttgcacttcgagatttcttctttataattttttttttttaatgtaagggagacagtggaattgctacccgtagaatttttattcaagtgcacgtcgcgttgggttgcacgctccacccccagggacctggtgtggtgaaatttgaacccaccgccttagcccaaaggccgagtaacctggctgcttgagtgtcgtggaagacgtgagcgaaatgatcagcgaactcattttttatcagactcgctgaagctggcttttgcgtttttctacacgtacactaattttatggaatagttaaagtgctatattctccgcgcaaccttttcaaattccaaatgtttgaacgttttggtgtcagcgcgagtgaaatcattttaccgacaagaactaactgaattgtctgcctcgttgagttgcctccggaaaagatctcgggggtggaaaagcaactgcaaaataacagacggagaaaattccttggaagttatttctgtagcataagagcagaaacttcagagcaagttttcattgggcaaaatgggggaacaacctatcttcagcactcgagctcatgtcttccagatcgacccaaacacaaagaagaactgggtacccaccagcaagcatgcagttactgtgtcttatttctatgacagcacaaggaatgtgtataggataatcagtctagacggctcaaaggcaataataaatagcaccatcactccaaacatgacatttactaaaacatctcaaaagtttggccaatgggctgatagccgggcaaacactgtttatggactgggattctcctctgagcatcatctctcaaaatttgcagaaaagtttcaggaatttaaagaagctgctcggctggcaaaggagaagtcgcaggagaagatggaactgaccagtaccccttcacaggaatcagcaggaggagatcttcagtctcctttaacaccagaaagtatcaatgggacagatgatgagagaacacccgatgtgacacagaactcagagccaagggctgagccagctcagaatgcattgccattttcacataggtacacattcaattcagcaatcatgattaaatgagatggataaatatgaagttcatttggtttcagaaactcttgagtgaaaaatcccaggtcagacttctttaattaattaattgtttgctgttgctcagattgactgaatatttccattatctgtgtagaaaaaggaacgttaattataggagaaactttttcaatggacaaaacattccattctatctatattttaaagatcccttttgctaaccagttttctgattttctacatgttacgtaagactaataacttgtgattaggatcaatggactcctgctccaaaggaaagccttgccacaggcccacagaggtgccacagaggacggggccaggcaggaacccgtcagcattgaaggttgtttttgtatgccaacaggaggaaagcttgagttgctgctgattcttaaaagaattctgtattctaaaagatacacatcatgttctaaatgcattttaaactagtgacattagttattgggcatactgtggtattactagactacaaagaggaatatgaagtggcaccattgaaagtatttttttaaaaagcctgtctaccttaacactaatttttacccttatttaaatgctttttactaaacagttttaggtaaaattaagaaaacagttttgttgactgcacatcttttagaaggaccaacttttagagaattacattctttgacagattaaaaattgcaaagtgagatatttcaaactcttaagtgagttttattgccgttggactgcattaatacggacatacgattaaacttagtagaccaacactgagggatctccttaccaggctgcagaacaaggaaattaagcaataaatgggacttgtgaatggaaggacactctactgctagtgctagtaattctgcataagatggtatacattttgaagaaagctgcttttaattacttttaataatgattttaattactctagtgcaagtgcttcctcgagctataaaggtagctgagcacagcagacctttactccctcagtctgacttctgtactcatattcatttagtgaacatagtcttttaacagaagaccacagttctttgatagcgttacaaaacttacgttatttaaacgttataaagaacgttattgtaggataaaatgttaaaaactgtgtcaaggacaggaagaattcctatctattaagtagtggtttccacccccacttaagactgaactgcactgaacggtaactgtatacttggtttgacacctcgactgagccatgcgcactgaatactgtgacattgaggagtaagaacttttaaatttaacatttaaagaagctacttgcagtttatgcaccgaaatttgtctaaatgttctccattttgctgaccccgttgtattcatactgctccccagagcctagagttgtcctcatcctgacttcctgtgcctgagtgtctgagaggagtcactttcactgtgaagacactgcttctgcgcctcgtagggaggacttgacagtgctcccgtagaaatcctacattatttcaacctcagagttacagtaaaggcaggttataaccagtctttcttattattttaagaatttccagccctagtgttttatgaaagtattcctgtgaatttgacaccttatgatcctatattcatctaattccttaatgaaataaaaatgtccatgtgaggtaggttatttacagcgattgcaggagacatggtgttcttcagagttcccaaaccaggatagtttcaaataggtttttcatggcttctgacgaagaagaccataaagttccctgcagtgtgtcagtgatgtgcaagctgaattagtgcgaagtgtcacactgtgaaagcacgtgcttttggcttattatgagaaaacgaaatctttaaattcagtttatgtgtcttaggtccagtttactttgatttgactactcagttcttctgaccccacctagtatgtatgtatatgtgtgtgtatgtgtgtgtatgtctgtatgtatatacatacatatacacacacattgtatacatatgctatatatacagtatgtgtatatatatactatatatgaatatatgaatatatatattcaattagttaatagtacatttaagccaaatatccaacataagcacactatgtaagtatctatctggaaagacctatatagaattgagatcaacatttcatgagttagaaacaaaggattttataattaatattacttaagtctaaagtacccatatatttaaattagatatgcaatttttccctcttggcaaagaaagacaaaaatcttgtgtttagagatgatgtagattgtcatttttgcctttccttcctgagtacttgttttaacaacaacaaaaaaagactagtttaagaaaagggattgtccagtatttttctgctttgttaagtctaattttactgttaaacagagagcagaatcactggagtactgggggggttttttgttgtttttttttttttcttttctgtttttttcggagctggggagcgaacccagggccttgcgctcactaggcaagcactctaccgctgagctaaatccccaacccctggagtatctgttttaaaagaaagccaggaccgttatgatggccatacccagggtacatagtgaaaacaacagagaccaagcaatgagagtgtgagagtaccaatccaccagtactgctgccggacatggcagctgcctgtgcttttctgaagagtcatagtgtatgctaagtctagaaccattacttagtaaagaggctatgacttttatttgggcctgacaattttagtggtgtggtcatagtctattctgtatttgtaagctttatttttaaattactgtgttgatttaggaacacaagaaatgtttttatttttaattatgagtgtatataaggttttcagatatgcacagactacaataatagactcccatggagataccacttcagccttaacagtcagggagaaggagcctcactttatcaccgcactcaccctgctctccactgatctgttgttactgcggtgtggaggttcacacgcatgcaggtcttcacacatgatgggtaggcccgcaccaagtgagcctctcccagccttgctgtttcgtttttttattttaatcttacatgtatgggtgttttgcatccaggcatgtcatgcctgtgtccacagaagccagaaagggtatcagattccctaaaactggagttctcgatgatcgtgagcgagccattgtgggtgctgggaactgaagctgggtcctctacaagagcagccagcgctcttaaccattgagccactatctgccctgtgtttgttttatttatttatttatttatttatttatttatttatttatttatttatttatttatttatttattggttctttttttttggactggggaccgaagccagggccttgcacttcctaggcaagcgctctaccactgagctaaatccccaaccccttgttttatttttaaagcaaacgagatacataatttcaaccatgataatttaagattatcttgaactcttaaggaaatgtatatactaagctattatagtttttattttccctaattcagtggcataataccttaccttgagtcgtttactactttctttggtttctaaaaactctactgctaaattacaatgtaaaaacatagggctcgtatatactgtagagtgctgtagatgtcctcgtcatcaactatgcaataacagtctgatcgacacatttcaggagcgatcactctttggtgtgcttctttaaatactttcagaagcttaggatgtgcaaagcaggaagaccgtgggtgtaaatgtttacttatttctttgagagtgttagtaagtcttttctaaattgcttttctcttcaaaattatcgttaacttaaatgataattatctttgaggttaaacagaagctcattgacaaactaaagtgactttttagggcattctttgagatcatagtcttatatctggggactaaaatgtcattagaccctaatagactaacttgtatgtttgtgtggggaaacgttttcctctctcattcaaggtaactgtttgctgcctgttgttacttgtgtagcattctagaaaatggctaggttttttataagatttaagacaatagaagtagttttatattattatagttctgttggaatgtgatcctgaaattattactgaaaattagaatttttatttcgctaatgacaaccttgactctcagagatgcagtgtaaattgatacctcatctttccgagagttcagagcacagggcggcagtatgtgaagctgcttttgcactgacgcattttgataagtttggctactgtaatggtaaaaggctcctcaggcactgactgcatttgggttcttccgatgggggatgatccgttctcgtggtgctgctggacttatgcattttggaggtactgcatgtatcttccacactgcttgacattttctctgatctgtgtgtttgcaccaactcattaaaagaaatatgcagaaatatcttctaattcgttgatcttcgctgtatgacagttataatattaaacacttgggttgatcaaaaaaaaaaaaaaaaaaaaaaaaaa

SEQ ID NO: 3896 - DNA, 2854 bp, Rattus norvegicus
gcacttctgtgtgctgacacatccttggagccttcagactgagccagactccaggctcctcgctgggcacaaggaggctcctgctagacacttcctgtggcagagaaaagaggtagtgagctggtgtttcaggatgtaagggcccggaggagcagagcgagctctctccactgcttgcccgccaccctgagagtgctggtcggtgtttccacaatccttgtggtgggtggccccccgtggaggggacctgtgagcaacggaggcatgccagggaagcccaagcacttgggtgtccccaacgggcgcatggtcctggctgtctctgatggagaactgaccagcacatcaggttcccaggcccagggtgagggcagaggcagctccctcagcatccacagcctccccagtggccccagcagccccttctccactgatgagcagcctgtggccagctgggcccagtcctttgagcggctgctgcaagacccacggggtctggcttacttcactgagttcctgaagaaggaattcagcgccgagaatgtaactttctggcaagcctgcgagcgtttccaacagatcccagccagcgacaccaaacagctagctcaggaggcccacaacatctaccatgagttcctgtccagccaggcactgagcccagtgaacatcgaccgacaggcctggcttagtgaggaggtgctggcccagcccaggcccgatatgttccgagcacagcagcttcagatcttcaatttgatgaagttcgacagctacgcgcgcttcgtcaaatccccgctgtaccaagagtgcctgctggccgaggccgagggacgccccctgcgggaacctggatcctcacacctcgggagcccggacactgcgaggaagaagccaaagctgaagcctggaaagtcactgccgctcggtgtggaagagttggggcagctgccgcttgctgagggccgccctctccgcaagtcctttcgtagagagatgccgggtggagctgtgaattcggccctgcgacgagagtctcagggatccctgaattcttccgcgagtctggacctgggcttccttgcctttgtgagcagcaaatccgagagccaccgaaagagccttggaagtggagagggtgagagcgaaagccggcccgggaagtactgctgcgtgtatctacctgatggcacggcctccttggccctggctcgacctggcctcaccatccgtgacatgctggcaggcatctgtgagaagagaggcctctctctacctgacattaaggtctacctggtgggcaaagaacagaaggccctggtcctggatcaggactgcaccgtgctggcagaccaggaagtgcgactggaaaacaggatcaccttccagctggagttggtcggcctggagcgtgtggtacggatctctgctaagcccaccaagcgtctgcaggaggcgctgcagcctatcttggccaagcacggcctgagcctggatcaggtggtcctacacaggccaggagagaagcagctagtggatttggagaatctagtgagctcagtggcttcacagacactggttttggacactcttccagatgcaaagacaagggaagccagcagcatacctccctgccgcagccagggatgcctccctagaacccagaccaaggacagtcaccttcctccactgtcctccagtttgtcggtagaagatgccagtggttctactgggaaacgacagacctgcgacattgaaggcctagtggagctgctgaatcgtgtgcagagcagcggggcccatgaccagaggggacttcttcgcaaagaggacctggtccttccagaatttctgcagcttccttcccaaagaccaggttctcaggaggctccaccatagactgaatcaactattcagcccagggagggcccttcagactccaccatccactcggtcctctgacacctgtgtaacaatccaggctgtctgcatggtgcctgggcaaaccaagcatgccacgggtctgtgctgcatgccctgtctgtaccaggagtgtctttggtccctttctgctgtgggcaggcccacagaaagggccaggaaggggtggctacttgttctctcataggtttacctaccaattcctcacagtaggccatcaaggggaggtgggccttgtcccttggcataagcatactgaacatgaagaggtgactttggcagtgtcagcctccttgacttgttctaggctttagcagggggcaggaaggaggggctggcccctccttaaagagttggtgtaagaaagacctgggtgtactactgggcaacccctccctccatccacagattttgctgtacatatggattttatggttggcttggggcagctgggtttgtcctggatgtatgatactgttataataataattattattattcagccacgaggtgtcttttttttgtctttttttttcggagctgggaaccgaacccagggccttgcgcttgttaggcaagcgctctaccactgagctaaatccccaaccccatgaggtgtctttcttgtatgccactctgccctgtgtagtctcactaccccactgcctctgtgccaggccaggaagttttggggaaccttagtgtatacctcctcacttcttgttttcagaatctctctccccaaggcataggatatagaaggcaggggggggggagcagaatggagagggagagagcgccaccccccaccccctactgttcttggccatcacccagctgctccacaatgtccatgggagatgaatgtatcctttttgtttctgttctgtttctgttggtgatacaatgtatc

SEQ ID NO: 3897 - DNA, 15165 bp, Rattus norvegicus
cctgaactcacaaacctcctgcgtcagcttccagagtgcttgtgagattacaggcatcagcaccacacccagtagaagaaaattctttttttggttttttttttttttttttggttttttttttacgttgtatgcatgcatgtcgttggttagttcatgtgatactagggcatgaacccagacatgcccaacaagcaacctacagatatgaactacattcctggtcccatggctccttgtcctcatggtgactgctgacttttcttgaacagctaagggctgcctttctaagacacgcacgcttttaggacaaatcacatctcccctctaatcaacctcccacagaaacagaggaatgtgtggcaccatgacgcacacgacagcttccgtgccacatttgagctccactgtaatcttagaggacagaggttgctggggactgactcttgttctgtaaggcaggcaggcatattcctgttctgtgggccacttcaaggaaacacagatgaatcaaacgcttaaggaggcaaagactcagggaaacagatgtgaatattcacgtagcccgaggaaggcttcgtaagtgtggtgtcagagaaaataaggcgtctgattactaatggatccaaatacccacttgtgaaaaacaggttgtagcatctaaaaaagaagatattcagtgtgtgtgtgtgtgtgtgtgtgtgtgtgtgtgtgtgttttaatgtatatgtaatgtgttcgtgtgtgggtatgtgaacctgtacactagtgcatgtataaggctgatattgggcgtcttccttactcacccacctatacccaccatgtatttttgagacagggtctctcgccgagcattccagttctgctagaccagctggtcagtaagctctagccatcctgtttctttcctccaccagtaccggggttataggtttacatcaccatacttaactttattgttggtggttttgtgggggttttttgtttttcaagatagggcttctctgtgtagccctggccatcctggaacttgctccgcagatcaggctggcctcaaacttagagatttacctgcctttgccttcctcatgagagaattaaaggtgtaccactgcctggacatattaaaaaacgatttattttgtgtgtatgtctgtctttgtgtatgtgtgcacatacatgcagtacccacagaggccagtagagggcaccaggtttccccgaggacagaaataacaggcagttttgagctcctctgaactgtttctccagccccccccccttttaaagaacagcaataaaaacaccaagggatggatttatatcatgtggagaaattccattgagtctcttgcccatgccagctgcagctgagtgtgtcaggaagtatactcaggtgactgggaagggatacagatgtttccagaactttcctggcaagccagactgagagcatcggttgcgggtgtagattcctcagtctctgcttatatagcatttgtgtggcaagcccaaagtgcagccctgagcgcctatgtgctggtgtgtacctccttgggaggacacatgagtgcaaagacatcaatccacggcttggagatcacaagaaaagagaaaggggatgtcaactgccggctggaaactcggcagctggcctaagtcgacgctctccaccagggaaaaccttccgccaaaataattgagaatcttgtaaagataactttcccatggagccacaaagaatgccggggccggagagacaaaagacacgcatggtcattcataaaacaccctttgtctattcagggcgacttcagttcttggctcccgagggccaagggggagaaagaacaaggaggaatttttatcaagttactctttcagtgaactgagctttctatgaaggaattgaagccagcttcattcagaacgtttgtttttaaaagcagggcttgttttaagttagagactcgggactttgacagtggttccaggaaaccttgtaacaagtgatgtttaggagctgaattcaatccaagggaatgaagggttttttttttgtttgtttgtttgttttgtttgtttgtttgatgttttccattagcatgtattaagtgtacatgatactgggtttccttatgacattttcatatatgtatatagtgtgttctaaccatattcacctctttctggaccttgcttctaatcttcattctctctctctctctctctctctctctctctctctctctctatgtgtgtgtgtgtgtgtgtgtgtgtgtgtgtgtgtgtgtgtttgcgtgcttgtgtgtctgtgtgtcccagtgtgttgcagtagggatgcctacaggaggggcgtggtgaaggtttgcttgcgggagtgtggttaccttaccagtgttatgccacggaagtctattccatgaggatgcttagctttttttttttttttctttctttctttctttttttcggagctcggggaccaaacccagggccttgcgcttgctaggcaagccctctaccactgagctaaatccccaacccctgcttagcttttacgtagggattattatctggaaaaatggacattagacatctgtgttctccacagtcacaatcccagccctcagcccacggtggcaaatgaccgcaacaggagggctaccatttgtatgcactgagttttgaagattttaaagcttttcctgagttttctttttctttttttttctttttaaggatgactgtgctaggtagctcaactgaagccatccgttggcaactggaatagggccagctgcagagactcccgaaacacagcaacattcctccacaggcctcccgccctgttggcatgagcacttggagttatgaccaaatgtttattagccgtgcccctggctgggctgtcttaacagagggaaaaataacacatcaagggaagcattgctcgtcagagcagcgcccaccgaaaaacatctgctctttaattacacgcgcgtttccaagcaccccacccccaccccccattccaccgatgcctgcgcttcttttgaaacaacatttaggcatggtgtttccattgctgttccagtctcgcggaggaagctcacaggccagtgagtcaagatttgtaactcgtgaaaaggattacgcgagttaagtaagagcagatgccctggtatggaaagccagaggcagcagagcgggggacacttgtcaactcctctctcactgtttgaggccatccattttccattgctgtagcaaaatacccaagaccatgtcatttagaagcatagatctttagaccccttgtggctccggaggctggaaagttctagagcatggcgccgtttcagccaatgcctttgtaactgcatagttttgccgaaagaagatgtgatgtcgcaggaagagtgcatgcatcagttcagatctacccttctcttactaacccaccagtcacttcctggtgaccccctcctggtgacctcattcagttctcattacctttccaaggcctccgcttcaaacactgtcgacttaatgaatgtgaaggagattcgatttctagcgggatctggggagacagatgagagcctgaggcactttaccattaagatcccgttttttctaggtggctccagtttataccggggttgacactaactaactcacctgtcatccaagcatgaggacctaagtttaaagcccagaacccacagaaagcagatgcaatccagagtgaacacccgtggctctagtgcgtccactgagaggtggcggtgtggggacaggaaaatccacagtgcacaagccagctaccttgtggcaaacagtaagagactctgtccctaacaagatggcagcggagaactgatgtcttacttagggtttaattgctgcgaagagacactatgactgtgacaactcctataagaagggcggcacttaatcgagtccggcttatagtttagcccactgtcatggcaggaagcatggcagcggacagacagacatggtgttggagcatctccatctcaatccacagatagcagaaggagagtgtataccaccacactgggcatagcttgagcacggggaacctcaaagcccacaaaaaccacaatgacacacttcctccaacaaggctacgcttattccaacaagccacgcctcctaatagtaccactccatatgagctcagcattcaagcacatgagtctctggaggccatctctatccaaaatgacacctgagattgtcttctgaactctatgcaccatagcccatacatacctacatgtgggagcatgggctcacacacgcgtgcgcacgcacacacacacacacacacaagcaagggcagttggatcaaatttttttttaattattgatttattatatttgagtacactgtccctgtcttcagacacagcagaagagggcatcagatctcattacagatggttgtgagccaccatgtgttgctgggaattgaactcgggacctctggaagagcagtcagtgctcttaaccaatgagccatctctccagccccatggatcaaataagtttagcttttggcactaagcatctgttgcatctcgacacctttaagtgtctgtcctgctggctccatactccatatgtaacatggtggtgcctacctttaatcccagccctcaggagtcagatacaagcgagtccaaggacagcctgatctccacagtgagtaacagaacagccagggctatgtagagggccctgcctatctcaaagaagaagttgaaatgaatcttacgaggtcagtgagtcagcagtcttagttatccaagtgagcagaaatcccaaatagtaatgaagatttggcttgttgttgtagttttaatttttattacactttatgtatttatggggggggggttgggggaatgtgtcctgtcatggcagacaagtatgtgcccatccgaggacaatttgcacacgttggttttcttccaccatttggatcccaggtttgagcttgaattatcaggtttggcagcaaaagcacctttacccttctcagccatcttgccagcctgtttgtttgtttgtttgtttgtttttaactggttaatgttttgatgctgggaaataagactagtgccttgggcatacctagcacgtgctagctataaccctaggcctgagtctgtgagagtaaaaagcaaacagatgatcattttattggacgctgtaggtttggacagagcatggaccccaggtgttatatatagaaaactgttcaaatgattctacagggttttcctggtctatacaatactctgtctgttgtccggaagacactgtctctactaaacagggaaaggcacacatttacatactgcatctctgactggactttctttctcaggggccatcggtgcgctagaagatgatcttgtgaccccgggtccaggagatgacatggtgaacccaggtctagaagacagaatagaaaccacggacactacaggagaactggataagtcaactgccaaggcgcctctggtgagtgtctagggagagaggtcattggctccaaaaccttacctgtcacatacctgggtatgatgtatgtttatgtaagaaaacagctccatacaaagaaatggtaatatgactcataacagtgacacaggtctcatccagggacagggagctagtttgttggcacaaactatttgagagcaatagaccacatcttcttgtgggctggagaggcagatggctcagtggttaagagcactggctgctcttccagaggtcctaagttcagtttccagcaacacatggtggctcataaccatctgtaacgggatctggtgccctcttctagtgtgtctgaggacagtgacaatgtacttatataaaattaattaattaattaattaaaaaagactacatcttctcaaagtagtaagaaaccagcttggcgttgtttgcaaacttgagctggggcagggcaggtaattacacctgttattccagtatccaggaggcagatgtgtgtaaatacgaactctacgatgtggcaactataatagcaaatagtaaaataattcctatagcctggtctatgcagtgagttccaggacagcctgggctacagagcaagattctgccaaataaaacaaacaaatgaactaaaaaggactgaattcagggagctttggtagggccctgaggaggggagataccttcatccgaaaagggtaggaaagccccaagccagttcctgcccaacctcttctttttttttttttttttttttttttttttctttttttttagagctggggaacgaacccagggccttgcgctttctaggcaagcgctctaccactgagctaaatccccaacccccaacctcttcattcaaatcacttgctccatcctctgtgatgaacaatgaaaaggtttaaaagccaccactgggctggggaaatggctctcggtaacatggacgccttgcgagcatgaggacctacctgagttcactctccaaaagccagacgtgataatatctgggggctgtcctgactctggggaggcctctgggtccctggggtgtgttggccagctagcctagcctaattggcaagggccaggccagtgagagacctatgtcagagaacaacaaacacacattcacatatgcccacctcaacccctgcatacattgatacttaaaaccagaacctcttcgtagtcctccgctgccgtggaatggctgagttctggcacaccgtgaaagctcttcagttcttcatggaatttacttcataaagttgcccttggcattgagaatggatttaaagggccgggtacaaagtaagttgtcagtgacagtgacacatctttccgccaagttgttctaagagggtttttttttttttaaatgtattgatcctttgtgagtttcacatcatgcaccccagtcacaattatcttactgttccctaatacctgccctcttcccttgcaacctcccccagacaaaataaacaaaacacagcatagaaaacatgtcattgtggaagctgtaatgtatcacagtgtgccccaaggtacatccctctgtccacacatcttcctcacttgctggtgtttgttgcaatgagtcatcggtgtggttcaacgtctctggcttctgtgacaccgtccgtataggatcctcatcggggctcctcctgattgtctggttaattgccctgtgtcacggagatcctgcaactttggatcggtgggactggcccttccatgcattctaaccatttgcagatgatacagatttggggggtacgcaaactcagagccctggatctgggccacgtgggtgggagctgagcttgtcagccccctgtgagcagtgttttttaaagaattaggggacaagaagtctccgtgccttcttttttgattttcttcttctttttttttttttcttttttttttccggagctggggaccgaacccagggccttgcgcttgctaagcaagcgctctaccactgagctaaatccccaacccgtctccgtgccttcttcatttaagatttatcgtaacatttaagattgatttctggattgaacctggttttgttccccatctcactccgttatggtttggtttggttttggttctacctggaatttatgtgggttcttttgggtgtgtgctaccctaaaatctttcccgagggaagacagacagtgtacattttaaaccttcagaatttatcttctctctttctcgcctcacttctgacaggtaccaacacagcctcccattgaggaactgccgacctcaggaacctccgaccacgatcacaaagaacatgagagtacgaccactgtcaaagcggtgaccagccactccacggacaagaaaacaactcaccccaatagaggtgggtccgttttatataacccacgaacctcatgagcagaagagtcaaagggactgagggactaagaaaatgaatccctcaccagactttgtgtggtgggtccagaatccggtgtaactgtgtcaacttagtttattggctttctggaaatatctcttaactgtgactgataactagtagtaactccctacacacacgggccagtcgatggctccccttgtattatacccttctgttaagaaccttgtgttggtgctggagagatggatagcttactggacaagcccatgaatactttcagaattcattcagttcccagcatctcacaatgcctctgtcttctgagggggcctcacataacaaacgtaaaataaatgtttgaaaaggaaaaacatcttgcataagacgggtcatatggctcagtaggtcagcaggtaaagaaagaggcttgctgccaaccttgacagtccctgaaacatacatggttagaggcaagaaactaaggcctagaaattgtctcttgcagggcaccacagcacaatacccacatacaataaatgaataagtaaaaaaaaaaaaaaaaaaaaaatttttttttaacaaaccttgtgttgacactggagcagcaattctacactaaagtttcccattttacattatggccattataagtcagactcagcaggaccttggattgtgtgtatcaaccaggctggtgcctacaacctgtactgacttttgtagctgaggctgtccttgaaccccgaatcatactacttctacattttaagtgctgtgattacataggctactgtgcctgactgaatgttgtgttacttaatgtgtacctcatgtccaggtgccagtctggccttaagagctcaacacttcttcttttgttatgatttgtttttatttgacgtgcattggtatttgctgcctacatatatctttatgtgagggtgctggatttcctggaaagcaagttacagacagcttcaagctgccatggaggtgctgggaattgaacccagttcccctggaagagcagccagcatatctaatcacttgttcatttttccagcccctctatagcatttctaaagccttaaaaattggttttagatccaggtttggtagttacatggccataatggctcatattctaaggcacaaagattattagttagaggctagccccggctacatagtaagactttatcttataaaatagccacacggggctacatgagatgctgtttcaagaacaaaaaaaacttccacatttgtacatatgtacaaatcactgtccgcaatatttaacacttggaagcagcagggctcacaaacaggtgaaagatgtaatgtcttcgcatggtggaatgttacttagctttaaaagagaaaggaacgctgacacatgttacaatacatgcgaggcagttcagtcggacacaaaggacagtgtggtatgaaatctacttgcttgaagcaccaaaagtgctgaagccaatggacacagacattggaacggtggcccctagcagcgtaggagggggtaaatggagagttgttgtgtagtatgtttaatttttacacgatgaaaaggggttgagaatttggctctgacagatgcttgcctaccaaggtcctgggttcaagccgtgatacacacacacataaaaagagctcagtcaacggatggaggtgatgactgtccatgattaaatataatctcactgcactgcacacttaaaaggatttgtggtggccaggcacggtaggacacaccgtcaatctcagcaatcaggaggcagaggctgcttggtctacagagtgagctctagacaagccagggcgacacagtgaagtcctgtctcaaaacaaaacacaaagccaagtcgggtaggggctctgtctgttccgttgattgattgggtattttggggtgctctggatctaatccagccccttcctcacagctaggcaaccgctctgtctaccactgagtcacaccctgtaaagcgctttgaaatggatgaaaagcttgctgcaagctgttaggaaaacgctaacattaaacacgaggtggaaccgaggcggaccaaaagaaggaggggtgttacgacacgtttcgaaatcgtagaggatttctcgtttctatcatgattcagcgtgtaactagcagaaaaaagtagcctttcaccgagcatttcctgctattgctcttaggtgttggaagcttggctccgtggctaagaacacttcctgttctttgcaggggtctgggatcagctcctggcaaccacatagcagctaacaatcacctgtcactccagttctaggagatcagatatcttccgcaggctcaaggtgcacataaacacacgctctctctccctctcccttcctctctctccctctctctcctttcccctctccctctctctctcacatacaaacacaccaaataaacaaacaatcaaataaataaataaatgtgggctggagaggtggctcatctgttaaaggctaggctcacaaccaaaactaaatcttaaaagttgagtatgggggtgcacacctgtaatcttttttttaaaaatgttttatttatttatcatatatatgcagtacactgtagctgtcttcagacacaccagaagagggcatcagatctcattacagatggttgtgagccgccatgtggttgctgggatttgaactcagggcctcgggaagagcagtcggtgctcttaaccactgagccatctctccagccccacacctgtaatcttaacactgggaggaaagaactcaaagtggagagggtgtgtgttgctgctcgacccgaatgcaagaggaaaccctcaagaacagaattgaagtctcaagggaccagttatcactaggcctgtagcagggctggctactgcctcaagatgtataggtctgaccatcaaagaagaatggagtaggtagcaggagggcagcccaggttacctcttcctaaattagaagcctgctgggaaagtgctcagatgaaccttatcattccgtgttttctaggatcttgataaaaaggtgaggcagccacacctggattctttcgctatctcttttcgccgacaagtttcccaaccctttatctcccagctctggactcagtgtccttgactctgagaataagataaggcaaaatcctacggatacaaaagcagtgaaagcctgtaggtgggaagtagcaaattgaggacaatagatacaaagacagcagtctgtcggggctgccttctaaactcccatcaggtttgttgaggaaattaccctcattgccggtgtttgctacattccacttaaggtaaatttatctgccaactgttaaattatagtcattaaatcctaatgattctgatgtcccatcttcctctttccagataacgcaggcggtgaaacgcagaccacagataagaaaggtaaatgagaggttgatatattcctttgggagataaaaagagagcgtctttgaggtttttttttttttattccattctttctaggatctcagtcaaacaataaacagaatggaacatcttttcttccttcctttctttctttctttttctttttttttttttttttggttcttttttttccggagctggggaccgaacccagggccttgcgcttcctaggcaagcgctctaccactgagctaaatccccaacccctctctcttcctttctaattgcctccctccccacctttctgaagtagtgggaattgaacccaggaccttatgcatgcttaagccaatgctcaaccactaagcaacgtccccagcccacgtctaactttttactttgagacagtcttaagttttcccaggctgacttctctgataggcctagcaccttcatctttctaattattaagggaaaaaaaggaaaatctgtgtatttgaaaagaaattgggctggcagcatagttaacttttaactctgttagtttagtatgggaacccagcactacataaatatgtatttgtgtgcacacatagcgcatgcgcgcgcgcgcacacacacacacacacacacacacacacacacactcttccccctcccccgacaccacacttagtatggacagctgtgaggaataacatatcacaattactctattatattgaatatgctggaatctttgttctttgttatggacatatgatgttttcccacttaatgttggccgtaagttttcatgcattttttttttttttttatgtatgaaacatactttactatgtcgaagtatgttccttctggcttttcaggggcttttgtcatggaagccataaagaagcattgcccatcaacaatgaagccagtgtgttatgtgcgataaatctagagactcagaaaccttttgattcacaagatgggattagggggctggagagatggctcagcggttaagagcactgactgctcttccagaggtcctgagttcaaatcccagcaaccacatggtggctcacaaccatcatgtaatgagatctgatgccctcttctggcgtgtccgaagacagctacagtgtactcatataaataaataaaaaaagagatgggattcggccgggacttggcttggtggtactgtgctcgacgaggcctgggtttgctctctggtaccaagcagagaaaaatggttcagtgcttccacacttgactcctctggactcgggagacaagcgggggacgttccctgccgagaccagcacggcagttctgttccttgcttatgacgtgtggtttggcacatctgtctattcctgggactcatgcttctttcccggtctattcagatggcttggctgtagtgacctggtcggcaatcataattggcgtcttgttagccattggcttcattggagggatcatcattgtggttatgaggaagatttctggaaggttctcgtaagtagcctctcatccccctgtgacgtgggaatgtaggcaattctgccaccgcccaaacctttgcatgcgcggaagcctctgcccacggtcctcttcagaagcccatggcacggcctctgacgtcatctgggatggatgtcagcctctgcacacggtcctcttcagaagcccatggcacggcctctgacggcttctgggatggatgtcagccctggctttacaagtttctgaaacaaaacttaacatgctttgaggtctgagcagatccgatctctcgtcttaattttccaactgcacaaatttgaaagaaaaatcccaagttttaacttgtttctttttttttttttcttttttcttttttttcggagctggggaccgaacccagggccttgcgcttcctaggcaagcgctctaccactgagctaaatccccaaccccttaacttgtttcttaatctccttgttccctctgccatcaatagcacccatcacactgcccctgttctgatgaggacctacactgtgtgcatggggggcaggcatgcatgttttgcatttagatccttccctgacacctaatccctccaccacggagtcattatatcctcctggttaagcttcctttagaatttagaatgttccaactcaggaccggagaaagccagagaaagacagtccgggaggggagaggatgtgtcatctatgactgggaggtacactgtcatgcagttgtccatgcatcgtgttcggaaatgtctggggtcctgaccctggctacgtaaggtgtggaggggaatatctggggggaaagggcacaaagttccgggactgaagctagagaaaaggacaataggattaattgacggtgggaaagggagtgactagtcccaaccgcagtccaagcagtaactatgttctttactttcacaggccctaaagagccaaacagaactggttgttctcccaacacatctgaaaataagagagcttccaccttgccctgttccccatccctcttcctgtggaggaagatgacccatggaatgcccacccacccctctcacagccatggtgacccctccacttgccagcagtaccaaaggaaagatacgggacaagccactggcccctcgaaccatctgcctttggaaatcaaattttttaatataaatgttatgattgaggaccacatgcatagaaaaatggtgcaaaaaccgagacagtatcatcagctttatcaactgtaaccatgggttggttcttccgggccagtcccagtctgttaagaggcaaaagaatttggaaatgttacctcacagaggcacgggtctttttgcagttgccaacctgcaaatgcagttgatgcatacatattccagcctagtggggtctgaatcagtgcattgaaagtataaacccaaaatcaggcgtgataggcagcccctcagggagcttcattataccttttcagaagcatccactgccttcagttcccggaagataccttgctttttacaagcctccaaaccctctctaagcctcagatgactcaatgacccagaggtctgtctactccactccccctggtgatggaaagcccaagttgaggaaccatgtcctcacctccctaggcctcaagccttcagatcaaccgcttctttctggacgatggagacctcatcccagatgctcagaaagtttgttggatgtcacaaaatgccagagcctcagccgctgtcgaaccaagaacgaaactcagtccttaagtggaagtgactcctgtgcctgctttagcgtaggaaatgagaccaaccagtttctagcacctgccttctgcttcccaggaaagacggagaaaaaaataatcttgtatgttcttaactgcttctaggtggtggatggaaaggtttgatgttaatttccggtcttcgtgacataccacatcttcccatgaggactcggtgttgctggcacaagagctgtagtgtcttggttacctgtgttggtactcaatacagtgtagacatcttttcaaataaaatatgattgtgtacaatcatgagtccaacatttgacacgtctgtcaactttagatgtcacttctggtgatatatattattataatgtcatatattatatcatatatatatatatatatatatatatatatatatatatattagttttgtagactaagctagccagcctcaaacgagaacct

SEQ ID NO: 3898 - DNA, 1146 bp, Rattus norvegicus
ggtgctttggactataaagctagtggggattcagtaactcccagccctaagtgaccagctacagtcggaaaccatcagcaagcaggtatgtactctccaaggtgggcctagcttccccagtcaagactccaaggatttgagggacgctgtgggctcttctcttacatgtaccttttgctagcctcaaccctgactatcttccaggtcattgttccaacatggccctgtggatccgcttcctgcccctgctggccctgctcatcctctgggagccccgccctgcccaggcttttgtcaaacagcacctttgtggttctcacttggtggaagctctctacctggtgtgtggggagcgtggattcttctacacacccatgtcccgccgcgaagtggaggacccacaaggtaagctctgctcctgaattctatcccaagtgctaactaccctgtttgtctttcacccttgagaccttgtaaattgtgccctaggtgtggagggtctcaggctaaccagtggggggcacatttctgtgggcagctagacatatgtaaacatggtagctgccaagaaggagtgagaatccttccttaagtctcctaggtggtgacgggtggctaggccccaggataggtacctatttggggaccccatagagcactgcactgactgagggatggtaacaggatgtgtaggttttggaggcccatatgtccattcatgaccagtgacttgtctcacagccatgcaacccttgcctcctgtgctgacttagcaggggataaagtgagagaaagcttgggctaatcagggggtcgctcagctcctcctaactggattgtcctatgtgtctttgcttctgtgctgctgatgctctgccctgtgctgacatgacctccctggcagtggcacaactggagctgggtggaggcccgggggccggtgaccttcagaccttggcactggaggtggcccggcagaagcgcggcatcgtggatcagtgctgcaccagcatctgctctctctaccaactggagaactactgcaactaggcccaccactaccctgtccacccctctgcaatgaataaaacctttgaaagagcactacaagttgtgtgtacatgcgtgcatgtgcatatgtggtgc

SEQ ID NO: 3899 - DNA, 1136 bp, Rattus norvegicus
tacaaagtgtacaagtatgaccgtgcgtgccctgatgggtttgtcttgaagaatacccagtgcatcccagaaggcttggagagctactacacggagcaagactccagtgcccgggagaaattttacactgtcataaatcactacaacctggccaagcagagcatcacgcgctcagtgtcaccgtggatgtcagttctgtcagaagagaagctgtcggaacaggagaccgaagctgcagagaagtcagcttagcaagcggggcaggttccttacaatgtgtcacttgaaggcaacaaagggactttgagggacatttcattaaatataattaccgataatttagagattactcatttacggtgcaattgcttctgtttgctaatgctgctttgcaaataaaacttgctgcggaccacccacaggcataagaaaagtgcatctcagcactgcttagagagcttgatgccactgtccatgccgaggagtcgccatttagctccttcactgggacgcactggatactgtcaagaggtaattcgccctggctatgccagggctccggccatcagaacagtgcatttggtggtttcgttctcttttatgcccctttgctatttgcagaccttaccccatacatagagtgaccccacgctctgctgactgcagtgtggatgcactgctaagcggcgcagaggaaggaaggtgtgcaccacgacacacgcagccctgccagggcagttctgggaggttctctttgctatgtcccctgcgcagaacacgaggatggggtggggaggagctggctctgggccagggggttgccgagcctgtgctcctgtgggtggtgtctgctggtgatgtgctagataggaagaaagcccactggctcgttcctttcctgttatgatacatttgcacgtacagccctgaatgcaggtgcagttttggttttttgttttcttagccagtgggcaaagtgaaatgtaattttgggtaagccagggcttctttagcttttattctgtgaacagatgtgactcctgtgctgtgggaagggggcaggacggctggtggggggctgatgtggcaccttgaaaatagaataagtccacaatctttgtaagaaaagaaccccg

SEQ ID NO: 3900 - DNA, 499 bp, Rattus norvegicus
attcctcccttggttcctggaccccagaggaagctcgggttccttagctggtgcccaagacgccgcacctgtgggctccctgtcgcctccctttgcgctcgggtgcagctccccggggctccgctaggggtctctctcgggtggcaagccgggtgggcgggatcagctgactctcccggctgccagccccgccgccgcgctccagctctgtcagtttcctcggcggcgggaggcgagagcactaggagcagagagagcgcgggggccaccggagacggcggcggcggcggcgacgacgcggacacagtcagggtgcggcggatcttccacttgcacacggagcagtcggtggcccacgcaggatcacgatgctgcccagcctggcactgctcctgctggccgcctggacggttcgggctctggaggtgggtgccgcgccttgggaacgaaacgggggtggcgggagccggaggacaaaatcctccccatcaaggagctt

SEQ ID NO: 3901 - DNA, 455 bp, Rattus norvegicus
  misc_feature (387)..(388): n is a, c, g, or t
agacgataaacatgcctgcccacgcacacacagctatagaggtgcactctccctcagaagcacccatcttaaagcactgggagaagaggtggtgccctatattgttgcctaccctacacattttcttccccaacccttcctaagaggcttagcaatggaagagcaggaaggaggaggaggggacaggtactttaccatcagctcctgccaggaattcaggtgtgtgtgtgtgtgtgtgtatgtgtgtgtgtgtgtgtgtgtgtgtgtgtgtgtgtgtgtgatgtaacagccagtgagtgtggcttgctaagtgttgagtgactactatttgggccctcaagagcttcctgacctgcgtcgctttccagtcattatgcacgctctgtnnctgcgcctggttttgccatgcaatattgtagcaactccgaaatggtcattttttactccccttgtag

SEQ ID NO: 3902 - DNA, 448 bp, Rattus norvegicus
cggccgcaaaggggtggctatggaggaggcagctttggtggaggctacggaggaggcagctttggtggaggctatggaggaggcagcttcggtggaggatatggaggaggcagcttcggtggaggcagcttcggtggaggaagcttcggtggaggaagcttcggcggtgggcttggaggagatggtggtggccttctctctggaaatgaaaaggtgaccatgcagaacctgaatgaccgcctggcctcctacatgaacaaggtccgggatctggaagagtcaaactatgagctggagggtaaaatcaaggagtggtacgagaagcacggcaactccagccagcgagagccccgggactacagcaaatactacaaaaccatcgaagaccttaaagggcagatcgtcaacctgacaactgacaatgccaatgtcctgctgcagattgaca

SEQ ID NO: 3903 - DNA, 489 bp, Rattus norvegicus
tttttttttttttttgtcagcaaacacaatatatttactgtattcgcatttgctcacagggcaaatggtacaacattacaccgtttcaataattgcttttaaaaatgctgttttcattaactatattatattggcataacaatgtgacaagaagtaaatgaaatgttggtgaagaatctcacctttcacaatatcaagcatttttttaaccttagtataaggtactataaatccaagaaataaaaacatccacaaaatatattacatctggttcgtctttttctaagtactcaactgtatacaaaagtctttcaaaaaatatcattccccatgggtttttcctttttaaaacctgattttttttctctcagttcacataagttagagtgcattttcttttgttttttttttttttttttgtgtttcaaacatgcagacatataaaaaattgggatagcacaaccttttggcaacaaagttttttttttc

SEQ ID NO: 3904 - DNA, 5580 bp, Rattus norvegicus
  misc_feature (5563)..(5563): n is a, c, g, or t
agaggctgccagtggggacatttccccatgctccatagcatgggtgttggccggagaaagttggccccattctgggtcctagccttggctctgaccttcaaccaacacacaggtcaggcccttgaggacactcggaaatctcaccttgaacactactctgacttatctcaacctcaagggcatgttggtaccccactcaatagagtgaccatcatcccacctctgaagaccattcctgtggtacgagccttcaacccagcacataccaggcgggtgtgcagcacatggggcaacttccactacaagacctttgatggacaggtcttctacttccctggtctgtgcaactatgtgttctcggaacactgtggggctgcctacgaggacttcaatatccagctacgccgtggcctggagtctaattccaccactctgagcagggtcatcatgaagcttgatggcctagttgttgagctgaccaagagctccgtcttagtcaataaccacccggtccagctgcccttcagccagtctggggtcctcattgagctcagcaatggctacctgaaggtggtggccaggctggggctggtcttcatgtggaatgatgatgacagtcttctgctggagttggacaccaaatatgccaacaagacttgtggtctctgtggagacttcaatggcagtccagaatccagcgagtttctctcccacaatgttaggctgacaccccttgagtttgggaactttcagaagatggacggccccacagagcagtgccaggaccccctccccgtgccccagaagaactgctccatcagatctagcatctgtgaagagatcctgaaaggtcagctgttctcaaactgtgcggccctggtggacatcagcagctacctggaggcttgccagcaggacctctgtctctgtgagagctctgacccgtctaactgcatctgccataccctggctgagtactctcggcagtgtgcacatgccggaggacagcctcagaactggcggggtcccaacctctgccctcagacctgtctcctcaacatggagtaccaggaatgtggctcaccctgtgtagacacctgctccaacccccagcattcccaggtctgtgaggaccactgtgttgctggctgcttctgtcctgagggtatggtgcttgatgacagtaaccagacgggctgtgtccctgtgtcccagtgtgcttgcctgtacaatgggacattgtatgcaccgggtaccagctattctactgactgcaccaagtgcacgtgctctggaggtcagtggagctgccaggaagttccatgctctggtacctgctcagtaatgggaggctcccacatctccacgtttgatgaaaggcagtacacagtacatggggactgcagctacgtgctgtgcaagccctatgacagcaatgccttcactgtgctggctgagctgcggaagtgtggattgactgagagcgagacttgtctgaagactgtgacgttgaacctgggtggggggaagacggtgatcacggtgaaagccactggagaggtctttgtgaaccagatctatacccagctgccggtatccacagccaacgctaccttcttccggccttcaaccttcttcatcattggccagaccaacctgggtttgcagcttgagatccagctgcatcccattatgcaggtgtctgtgcgtatagcacccgagttcagggggctaacctccgggctctgtggtaatttcaacagtatgcaggccgatgacttccagaccatcagtggggttgtggagggcacagcagctgctttcttcaacaccttcaagactcaggcggcttgtcccaatgttaagaatatctttgaggacccctgctcgctcagcgtggagaatgaaaagtatgcgcagcactggtgttctcagctgactgatgccaatggcccattttcccagtgccatgccacagtgaaccccagcaccttcttctcgaactgcatgtttgacacgtgcaactgtgagaagagtgaggactgcctgtgtgccgccctgtcctcctacgtgcgtgcctgtgctgccaaaggcgtgctgctcagtgactggagggagggcatatgcgcaaaacctacaattacctgtcccaagtcgatgacctatcaataccatatcagcacctgccagcccacctgccggtctctgagtgaggaagatgtcacctgccatgtcaacttcatccctgtggatggctgcacctgccccaaaggcaccttcttggatgattcgggcaaatgtgtacaggccactagctgtccttgctattacaagggatccccagttcccaatggcgagtctgtgcatgacaacggggccatttgcacctgcacccaaggagcactaacttgtattggaggtcctgtcctgactccagtgtgtgatgcccccatgatctattttgactgtcgtaatgccacacctggtgacactggagctggatgtcagaagagctgtcacaccctagatatgacctgctacagctccgagtgtgtgcctggctgtgtgtgcccgaatgggctggtggcagatggcaatggaagctgtgttgttgctgaggactgcccttgtgtgcacaatgaggccacctacaggcctggggagaccatccaagtgggctgcaacaactgcacctgtgagaacaggatgtggcagtgcacagacaagccttgcctggccacctgtgctgtgtacggggatggccactatatcacttttgatgggcagcgctacagtttcagtggggactgcgagtacacactgctgcaggacaactgtggtgggaacggcagctcccaggatgcctttcgtgttgtcactgagaacattccctgtggtactacagggactacgtgctcaaagggaatcaagatcttcctggggagctatgagctgaaattgagtgacagcaagatggaggtggtccagaagggtgtggggcaggagcccccctacttcgtccatcagatgggcaactacctggtggtggaaaccgacattggcctggtgcttttgtgggacaagaagaccagcatctttctcagactcagccctgagttcaagggcaaggtctgtggcctgtgtgggaactttgatgacaacgccatcaatgacttcaccacacgcagccagtctgtggtcagtgacatgctggagtttggaaatagctggaagttgtctccgtcctgcccggatgcctcggtgtccaaggatccctgcactgccaacccttaccgcaagtcctgggcccaaaagcaatgcagcatcatcaacagcgcagccttctctgcctgccatgctcatgtggaaccggccaagtactatgaagcctgtgtgaatgacgcctgtgcctgtgactcagggggtgactgcgagtgcttctgcactgctgtggctgcctatgcccaggcctgccacgaagtgggagtgtgtgtgtcctggaggactccagacatctgtccactgttctgtgactactacaacccagagggtcagtgtgagtggcactaccagccgtgtggggccccctgcatgcgtacctgccagaaccctactggacagtgcctacaagatctccgtggcctggaaggctgctaccccaagtgcccaccaacagcccccatctttgatgagggcactatgcagtgtgtatccaactgtacagtcagcccctcaccctgccgtgtcaatggaaagttgtaccgaccaggtacaccgataccttcagatgaaaactgttattcctgcgtttgtacggagagtggtgtgaactgtacccatgatgctggtgcctgtgtttgtacctacaatgggcaacggtaccatcctggggacaccatctaccacacgacagatggcatgggaggttgtatctctgcacactgcagggacaatggcaccattgagaggatcgttgacacctgcagttccaccagccccccaccccccaccactttctccttctccacaacgctggtcatgacctcaatgcaaccctccagcacacattccagccctaccccgagcgtagtgtacccggggtccccaagcaaggccgtgttgacagccagcagcgtatcgtctgtgaagacccctgaaacaacctctgtcttgactacatctacttcagcctccaccttaaccatgccagcttgccaagaggagtgcctctggtctccctggatggatatcagccgtcctggacgtggcattgacagtggtgactttgacactctggagaacctccatgcccatggctaccagatctgcccagtgccaaaagcagtggagtgccgtgctgaggataaccctggggtgcctttccatgcactacagcagcatgtggagtgtagcacaactgtagggctgatctgttacaacagtgaccaggtgtcagggctctgtgacaactaccagatcaaaatccaatgctgtacccccatcaactgtccaacctccactggtcctacccagaccacccatttgatagtctccaggacaagtacgatggaggacacaacctcctcagtccctgtcacctcaactgagcacacatatagcacagttgcctcaagtccttctacccataccccaggtccttctccctcttcctccgtaccttcttcatcagctccagctcgatcgactcctactccagtcagttctaccactgttaaaacaactctgcccaccacaagcccaatgccagagccaacttcagccacatcgtctgtgtccatctcaaccttagggtccaccctagcctcccctgagataactcatgggtgcagaaaggagctttgcaattggactgattggatagatggcagctaccctgagcctggcagaagcagtggtgattttgacacctttgtaaacctgagagccaaagggtacaagttctgtgagaagccatggaatgttgagtgcagggctcagttctttcccaacacaccactgcaagagctgggacaggatgtgacctgtagccgagaagtgggtttgatctgtttgaacaagaaccagctgccacccatttgctacaactatgagatccggatagaatgctgcaccatagtaaacatctgttccacaacttcagctaccacacagcccacctcacatggagtcagcataaaaacaaagacgaactggatcacaaacacatattccttttccaccgagaataccagtggtcactcaacagtcataaacaccaagacctgggtcacaggtagtacacacacaacccctcaaccaggaacaaggccgacacccagcatagtgtccacccaggacaccagcaccagctctgtgcagacagacagcaccacctcctcatcccacaccagctcaccaaatacaggaagagtcagcaccacccacacaacccacaccagctcaccacctacaggaggaaccagccccacctccacaacccacaccagctcaccaaatacaggaggaaccagccccacctccacaacccacaccagctcaccanctacaggaggaaccagc

SEQ ID NO: 3905 - DNA, 1262 bp, Rattus norvegicus
attttgctcctcatgtatttcttgaaataattttgacttaacatattaacacatctagatcactgaagttttaacaacccttagttctccagtcttactgcattaggagacttgcgtcggttttagtttctccaggagttcaaatatgttttatatcacctaccttgctccctctcctaggctgggaatatcatcaaataatttcaactcagggcggggaatatggttctggggcagagtttgataagccattgcaatgccactaccggactgagggtggagaacagggggaaaaaaacaaaacaaaccaaacaaacaaacaaaaaaaaaaaaaccaacaaccaaccaaacaaccccaaaactatttacctacaggtggcatcgttgatccacccacttctgcctggaaaagaatcctggcacttctaagttgaaggagtcgtgtttcccgtgacatcagccggcagcatttcaacggcgcacattgttgacttcctgtttttccttgcctatcgcgagctttgccggttctgtgcgccggaagcgagccgctggcagtctgggcttgcgcgtcaggtgagggaggagggaaggttgagacaaagttgtgagtccgtagtgcacgagcgcgtgcgggcctggggagcaggtgtgcggctccttgctggagtctcagtgtccccgctgttccctgtgcagcctgcgatcgccactttagaggaaaagtacccgcttatccccgcggcaaggctgggaagccgggcttactcagcgctaacgggaacgaaggcacagatttgagtcctttcgtagcagtatttattatgcccttactgtttgtagagacagttttaggggtttagaataacagaacaaattagaaaaattgtctggagaacttattttgtcaagcaattttagcagacaatggattggaagtgagaacaggtttttttcccttcttctgctggttattgaacaaagcagttggttgagacaacagagtttcttttgtctcgttctgtttttgtttttaaaagaaaagaggaaatccccacatgtgcaaagatgtggttgcaaattgggtgcacatgaagttgggtgcacttaggatttaggattagtgaacacgtgtgttcttgatgtatactgtagtttttgatttatcactttttcctttctttcctttaggaaaagcctaaagattaggttataagaaaaaccgaagccatgtttcgaagacctgtgttacaggtagtcac

SEQ ID NO: 3906 - DNA, 840 bp, Rattus norvegicus
aagcttttaaagaaaagatgcattttgcgtgtgtgtgtgtgtgtgtgtgtgtgtgtgtgtgtgtgtgtgtgctattgttgtttttgctagttaggatgggactctaaagacctaggcataatacttatgaagttcacttgcagaagaagagcattttccaagtctgaggtgagaaatggtatatgaagccggcattcgatttaaaggtgtaattaatagtgtgagtcaaagcagggcgaccacggacatacagattttcctcaagaaaatagtttactgtagtcataattataaaactagaatccctatgaagaacactatgacttttctttgctgtggcaaaagtacggtgctttgcaaataggagtagttttatgaagtaacagatgttttatgtgtagacataaagccgaggctgattctagtaagaggtgggtatgaatagtaacctgtcagagctggacactcttggagatgtgtgtactcggttctcttatgtttgtaaagggtggactattcctagccacaggcttcactggctcaatgcatcacccaggtcgtgtctcagaagccaagagagatttccattagatagtgaattatgaaatgtctcacactggaaaaacgagtcatctgctgatgtcatgctgattctaaccaatcctaaacaaagccccagccctcctctttgagaggtaccaatgtgtgagtgtacaactaagtactacagtataaaacttcacagtgccaataccatgaagaggaactcagacagctctgacctcatgagacaagagccggctggcaaaacagaagggacccgaaaggtaatgcttttaa

SEQ ID NO: 3907 - DNA, 2301 bp, Rattus norvegicus
ccagtattcaggggcacaggcaagaggagttcggcgagttcaaacccagcatggtccatataacaagttcagtccagccatggtcacatacaaagaacccagtgattccaacatggggttactttccgatgttcagttctgtcttaaactcttatctacaaacaaacaaatttcagtccctatcccctggctatgttgtcactgattttcaattgaagatgcatcccaacctttggagtggagtgaggccccccacccatctctcctttggatctctgaccctgtggttcaaggagtccctattctttaatatccagttatactaaatagacagtggaccaaaatgagacacagggcagctggcttctgttcccaattctttcattcatctgcaatgtgctctcttagcaagttaatcctccctggaccctagcttctccatctgcagcagagggaaaacattccaatgtcatgcctggatagggaaaaaaaataagaaaaatctcccaatgtcccttacagtttctgccttccttagcctttgtgcacaagactgtagagatgagtcggtagatgaacggggacatcatggtcatgatgaaaacagaagcctccagcatccagctcagatgcactgtcctagtcatagggtgggaagtcccaccccttcagaacctatatttgtaaaggattccccctcaataaatcctattgtaagtaacacttgagatcagactgtgccccattctaacttggtattgtgtaaaacgatagctttacaagttgtgcctttccctgacagactccactgtacaagcagattttgactacattctgaatgcaaacagagatgggatgattgtaccttggtgggcacctctgtctggcaccacctataggcacagatgattaataacttatacctaagcgtatacaaggatgataccccataaatttatcaaaaaaaaaaaaaaccttcggaccataggagcatgtaagtatgttagagtcatttaaaagcaaacatctcgcctggactccgtaaagaaaacagctaacttcacatggtatcagcctccaccagccgtcgtctggccacgtggggtgtgtgtcaaaggactgacagcagacaattgcagactgtcccaggagctagagctcaaatccattctcactgtggcatggcctgctagaacttccatccgcctggacccgccatctgtttgctttcccattgtccatcttgacccagccctctcgttcacctccacagcatccgtgtcctaacattttgctcgtagactctgaggctcagctctgacctgcagccctggagcagtaggcactcctgtaagaataaggtgaagactgatagaacactaggcatcctcctgtggcctccattcacacacacacacacacacacacacacacacacacacacacacacacttttttaatctttattcccacaaagactcattgtagccctatcagctccctctgctcctagacagaaagacagacagacagacgataaataaatgagatggacatacaggatagagttcttttgttcctatcttaattactaatgttaactctcaggtcacacatcacacattaagtgtgcctatatctaccaagctatctggaggatcagaatcacctggcaaattgctttcaacaagtcccctgtaccttgctaatgtactgttatcaatgacacaagtgtgttctatgttcctgatattgtgtgctcatgacaaatactcttccatggggaaaacaggaagaccaaaatcaagtctgggctagaacttgagaagttgccaaaggaagaccaatggcttgaccttaacctaactgacccctacttgccttaaggcaacagctccctgctacctggggagggcctgcttgggatagcggatctgaggatgaagggaaggacaagattctaccccccattactatgtttggccaaagagggagtggataagtcatcctggactggagggtagttagaggcagagtcatatttccaaagtgatttcagttttcttttcctttttttttaatatgtgtgtgtgtgtgtgtgtgtgtgtgtgtgtgtgttttcattttctgacagcagccagggtttgatctcttttgtggaaactcccccagtcctaggaagggggggcacttcctctgctgccctggctccctataaaaggtctgcctgagcagtcgagcacccctgcagatgattctgagacaacgcatgcatcttccacagtctctgcttcaggtacc

SEQ ID NO: 3908 - DNA, 447 bp, Rattus norvegicus
tttttttttttttttttgggcagaagaacaacgtgggtttattttaaggtaaatacaacactgagatcacagaagacaaacacagatgaagttgaaattttaaagtctctttgtgtgttttaggaatactccagatggcgtctactgtacaaagccatgcgcttccgaaataaaaagtatccaatacgtaatttcgttatccaacaacaacaaaaaaataaataaattattttcgtgttttgtaaaagaccttcatttgtgggggaaaaacctattttattatggtactgtggggagaatagacccacacaggtttcttgaattcaatttggcagtaacagttgggcaagatgaaaccttatccagtggacacaactttaaatattatattaaaggctctgggtaacaacgaactcgcctggttacaaatccgcactcgtttacaga

SEQ ID NO: 3909 - DNA, 283 bp, Rattus norvegicus
tttttttttttttttttccaaaaacaaatcccagggctttctccttttattgtagcatcttcctgacctggggcatccttagcccaggcttgaagaggtaggcttgactgtgatcagccccttgaagaatttcactgggttcggtcctgcttgctcttttgtgcagatcggcactgccaggttcctctacagaccatctcgctgcgcaacgcatagttgatggcgttgattgtgggcatggttttcgcaatgagggcaggcacatctgcgacagcggcatata

SEQ ID NO: 3910 - DNA, 326 bp, Rattus norvegicus
gccgtaccgtaaactgggaaggggtctttccctttatttggcccactgaggtgtgggcttgaagtttaaataagatttcaattaggcagggatgctgtacagagggatccagggatccgcccccgaagggctgggagaaggtaggcaaggcctttctccgcttcctctgtacttcctccttgtcttccaccagagggtaatacgtgaactgtttggagtcggagacatcgcccccacgcttgcgtttcagctgcaggaacactgttacaggcctctcaatcttcatcttgtgatagggcggtgtccggaacacaatggcatacttg

SEQ ID NO: 3911 - DNA, 500 bp, Rattus norvegicus
cggtcgcaggaaatgcgacagtacttcaacgttgggcaacaagcacagatccccatcgctacggccggtgtcgtgtaccccggtgccatcgccatggcaggaatgccgtcccctcacctgccctcagagcactcgagcgtgtccagcagcccagagcccgggatgcccgtgattcagagcacttacggcgtgaagggagaggagcctcacatcaaggaagaaatccaggctgaggacatcaacggagagatttatgaggagtacgaggaggaggatgaggaccccgacgtcgactatgggagtgacagcgaaaaccatattgcaggacaagccaactgatcagggccaacggaccgcggtgagctgatgacttgaagaagccctagctggttcatccttagtaatggccaagcacattagctcgctcatacactgactgttatttgaactgttagtcttagatagttgggatatcagctgacaaatagaccctcgtgccg

SEQ ID NO: 3912 - DNA, 407 bp, Rattus norvegicus
cggccgcaaaggttttttttaaagtcatagtggatacctcggatctgcctgacccctgacaagaaaccagggaggtggattcagcagaaggtaactcctctggggggttgaacaggtctgtcttcacgaaggtcctcgccctcagaaaggaccttgtgggacagaggaagcagccggaggaggaggaggaggaggtcgagtggctggcaggaggagccacatgtgaaaacagaccccaacggattttataatagactagccacactcactctgaagaattatttatccatcaacaagataaatattgctgtcagagaaggttttcattttcattttaaaagatctagttaattaaggtggaaacatatatgctaaaaagaaacatgatttttcttcccctcgtgccg

SEQ ID NO: 3913 - DNA, 319 bp, Rattus norvegicus
tttttttttttttttttgagatggttctaatgattttattgctcagtggcaaaataaatcaaagcaacgaagaatcccaaagtcacatcatttagacatgtcagtgactgccaggaagcaggtctgaatgctgggacagggtctgggaggaaggcatcgcagtgtggtatgttcttgtaaacattggtagaggtggagagcaatatccccaggtggtgtgagcaaagccccaagcttcctctgtttgcacaaagacaaagaagcatttcctgtccttttcacttcacacctgcgggagctgaaaccattgccctggaga

SEQ ID NO: 3914 - DNA, 383 bp, Rattus norvegicus
tttttttttttttttttagtattgttttacattccattcataaatgacctaacttgtaactcagcatacagcacacggaaagatagagtttgacacttatgcagaaaactacaattatgataacttacatgccttcattaccaggaacaccttaatatatcttctaattatttcaacaacagtctattccagagcacaggataacccggtacacgtttacacatttcgcttcggtcgcctttttttttttttttttttttttttaggtttcgggtgtcagagtgctgttggcttggattttactgtcacctgttcctggttaacacgacgacctgacgcaatattaaactagcaatatttctgcttaaaccccgtgccgaatt

SEQ ID NO: 3915 - DNA, 661 bp, Rattus norvegicus
ggccaccaagacaaaatgcacaagtctgtctgtggatgctgtgaacagtgaccccaccaaggctggccagcctggagaaggactgagaaaatctgtgcccccatctgtgccaaagcctcagtcagctactaagccaccggggacccccaccagcccgggctccaccccctccacagcgccagcaccttcacccctggctggggaccagcagccatcttctgctgccttcatccccctcatatcaacccgtgtgtctcttcgaaagacccgacagccgccagagcgcatcgccagtggcaccatcaccaagggtgtggttctggacagtactgaggccctgtgccttgccatctcccggaactcggagcagatggccagccacagtgctgtgctggaggcgggcaagaacctgtacacattctgtgtgagctacgtggactctatccagcagatgaggaacaagtttgccttccgcgaggctatcaacaagctggagagcaacctccgagagctgcagatctgccctgcgacagcctccagtgggccagcggccacacaagacttcagcaagctgcttagctctgtgaaggagatcagcgacattgtccggaggtagcagcaacctgtgtgtgtcagcgagagatactgcagtcctcggggc

SEQ ID NO: 3916 - DNA, 614 bp, Rattus norvegicus
gcaggcatccaacaccatagagctaggccagcagggcttcgtacaggtgagcatgtctccattgacctctgaggtcacagtccagctagacagctgccatctggatttggggccagaaggtgacatggtggaactcatccagagtcgagcagccaagggcagctgtgtgagcttgctgtccccaagccctgagggcgacccacgtttcagctttctcctccgtgtctacatggtgcccacacccgcagctggcaccctcagttgcaacttagccctgcaccctagcaccttgtcccaggaagtctacaagactgtctccatgcgcctgaacatcgtcagtcctgacctgtctggcaaaggcctcgtcctgccctctgtactgggcatcacctttggtgccttcctcattggggccctgctcacagctgcactctggtacatctattctcacacacgtgcccctagcaagcgggagcccgtggtggcagtggctgccccggcctcctctgagagcagcagtaccaaccacagcatcgggagcagccacaagctgggaaccatcggccatgaacttgtcccctcagccaaggatggagcgtcctcctgtacctgct

SEQ ID NO: 3917 - DNA, 550 bp, Rattus norvegicus
gcccaggagtacctgcgcggcatggactggatcctggccctagctgtgctcaactcagccatcaatcctctcatctattccttccgcagccgtgaggtgcagcacgctgtgctgaccttcctgtgctgcggctgcctcaggttaggcctgagaggccctggagactgcctgacccggatcaccgaggcccactctggggcatccaccactgacagctcgctgaggcccagggacagttttcggaccttcgaggtcactcagcttcaagatgcgagagccgctgtccagcgtttccagcatccgcagcgcctagagcttgaaccagccggtcgcccaccgagcaggccctcccaggagaggtgagaagggactggacacaagatcttagcctgacagtgattgagaacatgcctgcaggccccgggttccttccacgaaactccccatgatgaatgtttggcagggagtggccagatccagatccagtgagtctgggcctcgatggggctcccaggcagcaaagggggtgtccatgtccgaggccatggac

SEQ ID NO: 3918 - DNA, 256 bp, Rattus norvegicus
ttcctttttttttttttctttttttttttcttggcaaggcaagcgctcacagcgggtgtctgcaaagcggcgatggttctcagggcactcgaaggatagacagcggaagctgccctggatgtttaagcaggtctcgttaatggaacagttgtggataccggtcacacactcgtcaatgtcttggcagttgcgaccattgggagctagcctgtagccggatgagggacagctgcactggaagcttcccgggatgttg

SEQ ID NO: 3919 - DNA, 622 bp, Rattus norvegicus
  misc_feature (543)..(543): n is a, c, g, or t
tttttttttttttttttgactttccaataatatattttgggagaaatttctgcaaggtacaaatacctgcatgtggaattactggatgagaaaggcaggaaaatatttagcttcgaagatgtgttgcccaggagcctgtacccttggcactcccactagtttttgaacatgtcacacagcagcttctccattggagtgttccctatggtctttcggaagaagaggagctcgatgcgctcagctgtgatgaacctcaaggatgggagcaggagaagcaatttcccaaacctgagaggtgactaaagatgaccgtgtcaccatagttcttcagaagatggcagacagtgtggtctagaagagtccagatgcttggctgaatggaataaactacctggtgcgtcagtgtaagacctggtgctagactacgttgggacctacacctatgtctgccacctccgcacagcctgcaccagttggccatagctatgtttcttcatgcctggctttcccacacatcctcacagtgtgccttccacactttcnccagagcttggcaagttccttctaactctcaactttccttttaagttttgaacagtcctgcttccgaatgcatagcttt

SEQ ID NO: 3920 - DNA, 355 bp, Rattus norvegicus
tttttttttttttttttcaacttattgccttttatttcgctgtctgcccagctggccccactacagggcacagggctaagcttgtacacactcatgctctctgtgcaggcaagcatgtgcacaacacacgcatacataccccacccccgtctttcacacacacacacacacacacacacacacacacacacacacacacgtctctggctctctgagtcagtctctgggaggcacaggctgcttctcagcctgctcccgcctgcccttttatgacagcaccaagggtaggcagggccctcagcccccaacaagtccctgtgcaaactggaggtaccagctggcttcaggatggggg

SEQ ID NO: 3921 - DNA, 1056 bp, Rattus norvegicus
  misc_feature (1)..(1): n is a, c, g, or t
nttgaccattgcattcgcatttaatacgactcagcgtattgggaatttggccctcgaggccaagaattcaggacgaggggcggaggcggcgacggttgtttttcaccctaccattcaaaacctggaggcactggccctcacaaagccttgctgatttcacgaaagaagagtcatcaaagatgtccaccatgacagtgatctccaacagcacagcccaagttaggacaactgtgcagcacctgacattgaaagcctctatcgcacgaatatacgtttcccaagtgtgtgtagaccttatgtcatactgggaagagcatgctctgagcgacccttgggtgctgtgcatgccgaccattactaacctactcttggatatgaagacctgccttatgttatagaggaccatgaatcaccccttgccttttaatgctgaccacagcagcaacctggtgagcttcatgcaagctacctgcgtaccacaggtggtaactaaaacacgcttctgttggcataacaaaccctcaaggctttctatatcaagttggcctttcttctacctttactggtttaatacacacttacaatcttattttgtattaggaaatatggcctcatattgcgttactactgactaatgaaaatgccaagtgagtaatggggacgctcgtgtttacagtatactatttgctgaagatattgtgaagacctacacttggcttaacccactccacttaattcaaagatgtcttaagaaatcggctttcattttcaaatattctttcccactttccctttgcgttggaacccgggtctcccaaaggcgcttattttcccccctttctaaagggagtggggataattacgttgtgtgggctcttcggtgttcaacgtggggcccgcccccgatttttataaacaaaactcgttacccggggcaactcctgtggaaaaaccacccccctgtgggcagcttttcgccctccaaactctttataatattggggtcttttgtgccggaacaacggatatctcccccattcttttttccctcgcgct

SEQ ID NO: 3922 - DNA, 675 bp, Rattus norvegicus
  misc_feature (387)..(387): n is a, c, g, or t
gaaagggctcataacggctttattttgtgattgaacatatcatgcaattatgcaaaccagatcctgccagttgttacttctcaccctcagatcctggaaactggggataacaacaacacaaattaagcatcttggccaaccagaaaacatcctgatagattttaagagctctgccatggagctctaaaataaatttccaaaagaaatattcccataggtttaggaaaacccccccctaatgtttgccaaaaatatttcattaaaaacatcttataattacagcaggctcttaaagcccatatacttgctaacacttatagaacgtctctttttctacacggtatgaaacggcactcacttatctggaccatatgtaacattcttccngagaaaaagttcctccccctggttaatcatctattttaaaccacagatgttaaacaacttcgcccatgctcaggaatattagtaaagcttcttaaacgaaaacagtttggtttgttacaacggggccctttaaagcttgattcactgtagctctttcccttacaggccgggcacacttaagctttaaggttaaatggatcttcaaaagggtgataaaaataccctccgaaatttctatttgccccgggttttaagcatacaacaactttaaaggatttctcccgggag

SEQ ID NO: 3923 - DNA, 582 bp, Rattus norvegicus
gaaacactccagtttatagattctttcttgaacacttccagcaaccatgaaaactcgggcttagatacgcctactttaccctccacgcctctcattggtcacaaactgacaccgtgtcaccgagaccagactgtgaaaactcaaaaggaaaactccatctttagaactccagctatcaaaaggtcaatcctcgaaagctctcccagaactcccacaccattcaaacatgccctggcagctcaagaaattaaatacggtcccctgaagatgctacctcagaccccctctcatgtagtggaagacctacaagatgtgatcaagcaggaatctgatgaatccggaattgttgctgcgtttcatgagaatggaccaccgttactgaagaaaatcaagcaggaggtggactcacccactgagaaagcgggaaatttcttctgctcaaaccactgggaagagaccaatctgagcacccagctgttcgctcaggcgtctcctgtggcagatgccccaaatattcttacgagctctgttttaatgacacccgtatcagaagatgaagacaacgttctcaaagcctttacc

SEQ ID NO: 3924 - DNA, 424 bp, Rattus norvegicus
tttttttttttttttttaccattttgctgtctgtttatttcaactgtacagagaagcttaaacacctgtggaaaaacacgaaaggcttagttgtctcttaagttcatgtactttttagtgataaatacacagtatttaactttatacacctgataaaaggaaaatgcatagtataaagggtcgggaatgaaacagaagcatcgggcattgaatcgatcacagagtagaaaaatctgcagtccccagaaactcggcctccagctggagaggggaaccagcgtaccctgaaacttccctagcaccttggaagcaagtggaggtcatggttcttccactcggcaacgtgaagctccccgctggaagacaagtgagagcgacaggccaggcctgtgtgtccacctgcacagggctcgtgccgaaatct

SEQ ID NO: 3925 - DNA, 496 bp, Rattus norvegicus
tttttttttttttttttactccaggagcccgtcactcaccggccacgcgcaccgtgatgcgccgtgcgtggcgcccatgcgcattggtggctgcgcactcatactcgccaccatggctgcccatggcacccgccacgctcagcgtgctgttgttgctggagagaccgaggttgagagctcccgggggcgcgcgccagctgatctgggctggaggccaggcctctgcacggcaggtcagagtgaagtttccgccaggccgcacgcttgggggcgaggctgccagctcagccaccacaggccggtattccacacccacagtgacggtccgtgaatccgtgccatgcgcgttggtagccacacacaggtaggtccccgcatcctctcgggacacctgtagcctctccagcctggctgcaccttccctggaacagcgcacgcgtggagaggggcggcctctggcactgcaggccagcgcagtagcctcgggtccttccag

SEQ ID NO: 3926 - DNA, 303 bp, Rattus norvegicus
  misc_feature (74)..(75): n is a, c, g, or t
  misc_feature (77)..(77): n is a, c, g, or t
ttttttttttttttttggctagaattgcatttcttaccagtgtgaccacactgttacgatgcaattctagccannanaaaaaaaaaaaaaaaaaaaattttttttttttactttttcctagtcttatggaaagcaaatatacaatgattttcagtaggcttctggaatagaaacagtggtttgaagaccccactgccacctttatggactggcccctttgagtctgaatccccggcctctgtcacctgagacccaacccctagctgggccaactccagtgaattcacccatttttcttcttca

SEQ ID NO: 3927 - DNA, 300 bp, Rattus norvegicus
tttttttttttttttttgggtttccgttagtgttttaagaacttttctttaaaaaaaaaaaaaaaccaacaacaacaaaaaacaccgcctttttgaaagagaaatgacagacacaaaagactgtaaagaaaatggggcgaatttctgatagcatttccccaagggcagaggcaaaacccagatcagacctgggggcccaatagtgatgtggcttccatagtacgttgttcaccaaatctaaggtcacctggtctggccaggccaatgctgttggcctttggggaagcaggtcaccctgca

SEQ ID NO: 3928 - DNA, 493 bp, Rattus norvegicus
  misc_feature (212)..(212): n is a, c, g, or t
tttttttttttttttttaaatataaataatttatacaaaatggctcatacaaaaagcagtaggtatgggggaagagatgcctcggtgggtggctaaaatgaccaagagatgaacctctagccggagcgcagggctctggcaggcagggagggtaaggctggacaaacaggccctcaggggagcaggccagcgagtagggtggtgaagcgtanggcctgccctgcaagctctgccacacatcgcgccatctcttggaccgcagtgtcagatgggtaacctaaggcggcccccttgacagcaagcacagtggcccgcaaggtttgggccagcactgtacctgcagcccccacctgtgctcggagaggtgcagaggctgccagccggcctagggtgtccccaacaaataccaggcggtgggcagccaccaccactcgtttgccgtggggcacatagagacatggcggctggttgggctgggtactggacatgagag

SEQ ID NO: 3929 - DNA, 429 bp, Rattus norvegicus
tttttttttttttttatatcaaaacatttattttttgtgttacaaaaacacaaataaatccaagcagataatgaaataaacacatttttttagtgtcccatcctgggttctctgccctagaatgtattaagcaggtcaagtttaggttacttcaacacttcttctggatgctatgaagtctccatcttataaccatgtttctctagttcagctcgtaactgattagagaagtcatcctctacattgtcatcatcccaattatcctcccagacatgtgcatcttcatcttcatctaagccagcccagtcttcggcagggaactcttcaaactcgtcgtcttcctctaacagacctaagtctaccggctgctttttctctgacatctagactgtccgcgcccaacaactcccaaataagcagaaaagttgg

SEQ ID NO: 3930 - DNA, 488 bp, Rattus norvegicus
tttttttttttttttttccagtgattccaaacagtttaatgtaattccaagacagtgtgatcacatcgctacacatatacaatatgcatatgtgagtttacagggtcaattaataactcgcttcacctcagagaccgagaaaatgatcaaaaagaaactgagtaacaagctataacagttcaccacaacaggacccccgcctcaccctacagttagtaatattacaattaaaataactatattcttctataattttttctgttaaaatcatctcataaatttacaatgctattattagtttccaagactaatataaattcactccatttttctacaacgaaaatgatgattaatttagaagcgcacgatgtcatgatgaaaacaagcattttagtagcgacaacttcatcagttaagaattagttttcttgaaaaacattctaaagccaagtaaaatacccatccttataacatacctataatcctcg

SEQ ID NO: 3931 - DNA, 391 bp, Rattus norvegicus
tttttttttttttttgtaatcaatgtcttttatctctgaaaacggaagcgagtgtttgacaggacactatggacactctataagagtgggcgtaggggcattacactgtcctggggactgtcatgagaagaagttcacactttctctcgtgaagcttgaaggatctggcgatctcacacttgttgacgtcaagcccccgcttgggcatgtaacccatccctctctgaggctccttgctgctgaaggtgttgacgtattgcacgtatggggactcatccgtgatttcaaagtagcggatactgctgtcacccttcccacataatgtaaatgatgctggcgtccggggcgtataaagggagcagcaccccattgctagtgtccatttcatgaa

SEQ ID NO: 3932 - DNA, 351 bp, Rattus norvegicus
gggattactaccgccaagggcgcattgccaagatgccagtcaagtggattgctatcgagagtctggcagatcgagtctacaccagcaagagtgacgtgtggtccttcggtgtgacaatgtgggagatcgccacccgaggccaaactccctatcctggggtggagaacagtgagatttacgactacctacgtcaaggaaatcgcctgaaacagcctctggactgtctggatggcctctatgccctgatgtcccggtgctgggagctgaaccctcgagaccggccaagttttgcagagctccgggaagacttggagaacacattgaaggctctaccccctgctcaggagcctg

SEQ ID NO: 3933 - DNA, 327 bp, Rattus norvegicus
cgctcaatacacagccccgaggtcccctttctcaggctccaactccagcacctaagtttgctccagtggcacctaaatttactcccgtggcttccaaattcagccctggtgctccaagtggacctgggccacagcccagtcaaaaatcggtgcctctggaagctccttcttctgtgggcacaggctccccccagccccctagcttcacctatgctcagcagaaggagaagcccctagttcaagagaagcagcacccactgcctccaccagctcaaaaccaaaaccaggtacgttctcctggaggcccaggccccttgaccctgaagg

SEQ ID NO: 3934 - DNA, 377 bp, Rattus norvegicus
gcttccttcctgttctaactgccagtactcagaagtcagagttgagagacaggcagaggtaacctacagagacacacagggcggacaggagcctggaattaaggaacaatcaagatgacggagaaggatgagcagccacagctggaggagggagaggatgagctggacagcaagctcaactacaagccgccccctcagaagtccctgaaggagctgcaggagatggacaaagatgacgagagtctaaccaagtacaagaaaacactgctgggagatgtccccgtggtagcagacccaacagttcccaacgtgactgtgacccggcttagccttgtttgtgacagtgcaccatgaccaatcaccatggaccttactgg

SEQ ID NO: 3935 - DNA, 440 bp, Rattus norvegicus
tttttttttttttttttaatataaaacaatataatcacaataccagaatatggagctctacagtgttacttcctatgggctatgcaggtatccatttctcttgactgtgctattcacaaggttgttaagtccagaaacaggaaaccgaagtggtgggagactgaagacttgcactttcactacgtggcacacatcaaagggcatcaattcaagggcaaacggctgagctcaccacacctacctacgccatcactccagcctgagaagccgtccaggtgccaagctccctgtagccgtggccaggcctgaaagccaaggcgttgggtgtcctactgtgagtacagggagtttgaggagctgcttttcagtggagcgggaaggcctggcgccgggaggcggtaccgaggaagcactgagattgaacaactgagacacacctt

SEQ ID NO: 3936 - DNA, 542 bp, Rattus norvegicus
tttttttttttttttttagtgtcttccatttcttttatcaaagtgtgtgtgtgtgtgtgtgtgtgtgtgtgtgtgtgtgtgtgtgtcacagttatcataacaacccaagtcctagtattggtagaagtttggggtcttcatagtgaggggagacagccagcaagatgttcacttgaccagagtggctaactgagatagtaccctggcccctaaggtgaggcatgaggttctcttgacaattgttagaaggcagctctgggagataaaagatggtgagagctctctaaaagctccaagtcctggggcaatgtcctcccagactgaggtggttatcctatgctccactcttctccctatgaaaaaggcctgtgaggcacacaggcctgtggagtccgaaaagcagcttgtcaccttcgcagcttccggcacctgcaggtatctgggttgagctctaagccccgcccttggcaatggaggaagcggcggcgtctgcagcggcaacggcaggtccggggatcagggcgctgacggcgctgggtgca

SEQ ID NO: 3937 - DNA, 523 bp, Rattus norvegicus
tttttttttttttttttaaaaaaacttcctctttaatcaaggcttttaacatgaacagatttcttgaataaaatggaaagtttccagtacactgaaacataaatccgcaagtcaccacacatacaacacccggcaggaaaaaacaaaaacagcaagtttacatgatccctgtaacagccatggtctcaaactcagatgcttcctccatctgccaagtgtgttctggatacagagcacatcgtggcttctggggtcacactcagcttaggctgtgggtccacagagcactcatctggctgggctatggtggtggtggctctactcaagaagcaaagcagttaccagcacattcaaacagtgtattgaacatcttttaaatatcaaagtgagaaacaagaaggcaacataataatgttatcagaaagatgttaggaagtaaggacagctgtgtaaagcttgaggctgaaaagtagcttgccagcttcatttctttggtttcttgggtagtgggcgccggaacagc

SEQ ID NO: 3938 - DNA, 395 bp, Rattus norvegicus
tttttttttttttttttgggcagagttggagtttatttgctgcagttccttggcgctcctcagggctgcgccctgcaccgccctggtccagggtcctgtggaggggcggggcgagacggccagccagccagccacctgctctgcctggactggcatgctggccctggcggagtggcaggagctgccctgagagtccctgagagaacggcaggaaaatgctgcgtgtcacggctcccttcatactgtaatgaggaggggcagggccagctcacacagcgcctgcaggggaagacagatatgccagaggcagcccggccacccccctcactccagtgcaccccacggagcagacaaagggccatcttccccctctagggggcccaccacacaatgca

SEQ ID NO: 3939 - DNA, 441 bp, Rattus norvegicus
ttttttttttcttttttacatttttaaagaataatatgcaatgctatactggaatttacggtactgggggaagggatagatcgactttaaaaggcacgacatttttaaaaactctattttctaaatgaaaactactaacagcagcgtgggttgtggcgggcgcacttcagaccctgtaagaccttcggagactgaagatctaagtttccggaggtttctcaaagccgctctggatctttcaatcggggatgtctgagggaccttccgcggcatctatgcgggcatggctcccgcctctggggcccccctgcagaccctcgcaggtaccgtcacaacatcacgatggcccatctcctcaaccaggtccacgggcatacggtcccaggacatcgcgcacgtccagccgcgccccggcccggtgcagcaccgacaccgtgtcca

SEQ ID NO: 3940 - DNA, 589 bp, Rattus norvegicus
tttttttttataagcaatatgactttatttagttcctttggaaacaaaaccccccaaataatgcctgaacccaaaggtacataaaaatgacccaaaatagatttgaacatcacttgtagtttcttcctcgtaacatgagtgctttcagctggacagtagattacaaagcatctccgatcacgttaaggcagatgatcaatctgtggctgcatctgtaactcctcctgggaaaataatcctgttggagttgggggctcttcccagttgtttggttagttggcccaggaaggggcagtcctggagctggcgggtggggagccaggccccacctgtcttgtcactgctcgttctgctggccctctgtcactgatgctgatacggagccctggcccttgttgacatcactgatgcacacccactgcccatcaactgactccttccacagggtcaccttattgtctccaccagagacagccaggatgttggctgtgatggaccagctcacatgccacaccacatcgttgaacttgtgcaacaatttaggggaccacgtattgcttgaggcatcatcaccctcgtgccgaattct

SEQ ID NO: 3941 - DNA, 555 bp, Rattus norvegicus
tttttttttttttttcttataaaaagtcataataatattaataataatatactcggcactgtcaggctgggtgctgcccaggagtccgtgggaggcaggcagctgcctatgaggggcaaggacgtgtgttggcccctgcctgggcacgatgctgcaggtccaggggctgtgggggtggggctccaggccgggctgagtgcagcaccagattcttgagacagcctgtgatcccagaggagaacttgcccctggtcagtgtggccacatctggggcaccaccaatatagatgatgtccttggtgttgacggccacattacgacccggggaccggccgatgaccagctcctcaccgtctacttggatggagcctctctggccctctcgcagtgccgtcactcgatgccactcgccgtcattgatggggtcttcagagacaaggcgggcttccccactgcccagttggtagttgaagacaagatggccatcctgtagtccaaggctaatgaagtctttgctgcggctggactctttcaccacaccctgccagagcaaga

SEQ ID NO: 3942 - DNA, 459 bp, Rattus norvegicus
ttttttttttttttttttccaggaacaagcaaggacttttcccctactctatttccgggaacattcactagtgatttctgccagctccctgatcctggggaaaggaaacaacaggtcaggcaaacacctctcaggctaggagctgatggcccacacttgggtcttcctatgtctgtggaggtgaaacgtccagctgaagccacgcccacgatccctgcacttaagggcttcttgccagagtaggtctgctgatgtctgatgagggcagagttaaagccaaaggcttctctaccaactggactgagtcctctagtcagacgtgaggtgtggaatcccatccactccctacccacataagctgtttacaaaaagcctcttctacttggagtgtgtcctctggtgtctggtgagaagtgacttaaaaccaaaagcacgcccgcactgggagcacaggtaagg

SEQ ID NO: 3943 - DNA, 236 bp, Rattus norvegicus
cacgagggcacgagggccaagagcgagtgagcggggagggggcgccggcgacacccaggtgtcgcatggcagggtccacgaggtgacctgcctgggccagcagcgcgcagcttgcacgagtatgcgctagggcacccactccagttccccacgcacacccgagggaggcctgccccgcctgctgagcgctgttttctccaggtcccaggccgatttcccaggtgagcggtcagtgc

SEQ ID NO: 3944 - DNA, 460 bp, Rattus norvegicus
cacgaggctagtgctggggaccccaggctagaccttccactccattacagtccttggcaagaaacgaatgaggatctgcagagagtgtccaaggtttgcacccagtgtggtccctttggcacgtggcggaagctcactggggcttggctggggctgagtcccagctggctgagcccccgagagtcctgaagccgggactcctccttgtcttggcagtgggacacactgagcatcctgcagctcctttctccatcccactgcccttgcagacccaggggtgctttgcttgacaatgctttcctcctgcttctgagcttttcctgcaacaggagcctccctcctgggctccatccctgcctggcccagtatatgcagaatgatacacttcagctccttcttccctagccttcaggtcgccatggctcggtcctgctcagcttgggcctgtgacaatccacaa

SEQ ID NO: 3945 - DNA, 438 bp, Rattus norvegicus
cacgaggctaaaagctctgcagaagctacaggctggaaggtctcaagggcctcaccaagcaaactcaaatcccttcagctccatgccaccacggcaggacagtgccagaagccccactacaccttcccttcgacccagtgatgtcctccaggtctctctgaagtttgagctgctggactcacccaaaatgggccaagatataaactttgtcctgttggctgtcaacatgtcacctcagttcaaggatctcaaactcaacttgagtgcccagtctctgttgcacgatggcagccccctggccccgttttggcaggacacggcattcatcacactgttccctaaagaagaaaagacctacccttgcaaaatcctctactcacagtacaggcagtacctgtcgacagacaagctaattcgcatcagtgccctgggtgaaga

SEQ ID NO: 3946 - DNA, 362 bp, Rattus norvegicus
caagaggggtccattttaatgaattagagtaaaaaaatagacctaagccatttgtaccttagtcttagtgtttggcctcatctagcaaccaggaagcctggttggagaaacagaagaaatgattccctccagagccctgtctcccttccccaggcaagaagagccaggagggcacaggcttacgcttcactctgatctgtgtgcttcacagggcaaggtgaaagacacttgaatttccctttttagcaatcttactgttttctggtgctgccggctgaacccaggaccttgccctcactaagcaaatgtacctaccaccagtgagccagatttcgttcgagccctcctttgggaagttcagt

SEQ ID NO: 3947 - DNA, 376 bp, Rattus norvegicus
cacgaggagaagcagatagtaaaagccacagaggcttggagagtcaactgcagcaccagctgtgcagccccagagatcggtggtctggagacccctacgaataagttaatgttggaagaggaccctcatgggaaatggatagaattcctagtctcaaacgccacagtcgacacggtcttactttgccatttcacttgttcgggaaagcagcaggcagagagtttcaacatcagggtgtatgagcctccagctcaggtaacactgaaactgcagccccctcgagtgtttatgggtgaagccttcaccattgaatgcaaggtgccctctgtgaagccccttgagagcctcaccctctctctgctctgtggcagagaga

SEQ ID NO: 3948 - DNA, 313 bp, Rattus norvegicus
cacgaggagaagacctccccagctcgggaagtgagttcagagagtggaacaagtggccagttcactcccccctctagtacctcagtcgcaaccattgccagcagcagtgctccagtgtctatctggagcccggcctccatctccccactgtctgaccccttgtccacctcctcctcctgcatgcagaggtcctaccccatgacctatactcaggcttcaggttatagtcaaggctatgccggctcgacttcctactttgggggcaaggactgtggatcttacttgacccctatgcatcaccagcttcctggac

SEQ ID NO: 3949 - DNA, 429 bp, Rattus norvegicus
gcacgagggctggctggaactgctggctgggttgctgctggtcgtgggtccacctgtgctacagcagatcagtaacgtgctcttgatcctcctcatgatgggggctgtcttcactttggtggtcctggaagagtcactgagtacttatatcccagctgttgtctgtctggggctcctgctgctgctggattcctgccagttcttagttcgaactaaaggagcggtcagatgccgtaacaaaatccctggtgcacttgggaaccctaggaagtgagtcttcatgccacacagcacagcagggacagtcatagcatactgtctacaactttgttagtcattcagtgtaaagagagagcttgtctaggcctcagtctcccctaataactatgttgctctgttctgaggggggcagtaacactcttcaagtca

SEQ ID NO: 3950 - DNA, 360 bp, Rattus norvegicus
cacgaggcttcaatgagatcaaggctgacttatctggaatgtgtcctgagaaagacctgtgtgtgtccaagtttgttcacgagtgtgtggtagaggtcaatgaagaaggaactgaggctgctgcagcatctgcagctgactgttgttacagttgtagtgaatataccccaactttctgtgctgatcgccccttccttttcttcatcaggcacaatcaaaccaacagcatcctgttctgtggcaggttctcatctccataaactcacattcactatgtggggaaagttccctctttatccccaacaatgctacatctctggtagggtgggcaaataagggaataccttcttccaagatgag

SEQ ID NO: 3951 - DNA, 577 bp, Rattus norvegicus
cacgagggcgatctgtgtgatctgttcggagaagccgaaataccgctgcccagcttgccgcgtgccctactgctcggtcgcctgtttccagaagcacaaagagcagtgcaactctgaagcgcgtcctgttgagaaaagcccaacagtggttcccgtaaggactgaggaaaacaaaggtgacgactcctctatagctgatttcctcaacagtgatgaggaagacgatagagtgtctgtgcagagtttaaagaatctagttttcacagctaatcctgctccatgatatcagcaacagcctcctcactcaacttccgtctatcctaaccctgcacccgccctccagtgagcagacaaggattctctgagaatacaagatactgccactcccttctcacaccagcagcttccagtgcactcagagcaactgtgacgggtctcgggcctgctccatctggcccctgttcgcttacatcctgctccttctcggtggcccagttccctggtacctcactatggcttttctctgttctaagtctcactggcggggcctttccttttctctgggcctacacagata

SEQ ID NO: 3952 - DNA, 458 bp, Rattus norvegicus
cacgaggagtgcagctactccagttacctctgccagtaccgctgtgtcaatgagccaggtcgcttctcctgtcactgcccacaaggctaccaactgctggccacaaggctctgccaagacattgacgagtgcgaaacaggtgcacaccagtgttcggaggcccaaacctgcgtcaacttccatgggggttaccgctgtgtggacaccaaccgttgtgtggagccctatgtccaagtgtcggacaaccgctgcctctgtcctgcctccaaccccctttgtcgagagcaaccgtcatccatcgtgcaccgctacatgagcatcacctcagagcgaagtgtgcctgccgacgtgtttcagatccaggcaacctctgtctaccctggcgcctacaatgcctttcagatccgtgctgggaacacacatggggacttctacattaagcaaatcaacaatgtcag

SEQ ID NO: 3953 - DNA, 393 bp, Rattus norvegicus
cacgaggggctggatcctcatagaccgttgtggaaagcactttggcaccatcttgaattacctccgagatgacaccgtcaccctccctcaaagccggcaagaaatccaggaattgatggctgaagcaaaatattacctcattcaagggctggtgagcttgtgccaggccgccctgcaggacaagaaagactcctaccagcctgtgtgcaacatccccatcatcacatccctgagggaggaggacaggctcattgaatcctccacaaagccggtggtgaagctgctgtacaacaggagcaataacaagtactcgtacaccagcaactctgatgatcacctactgaaaaacattggactgtttgacaagctgtccctagaagaaattttgcacgg

SEQ ID NO: 3954 - DNA, 430 bp, Rattus norvegicus
cacgaggcacgtagttcaggcatgtcaccgtttcatccaagccagctatgaacctctaggcatctccctgcgacccatggaggcagaacccccaagacccccaacagtccctccaccaggcagtcccaggcgctcagaaggacacccggacccacctactgagtctcgaagctgcagtcaaggttccccaagtccagccagcccagaagtgttacaaggttggttgagggctgcagtttctggtggggaacatgtagataaagatgttagggacggagtgccatggttagatggagtgtctgggatgttagatagtatttgggagccttgatttacagttctgctctcgttgccttgggacctatctgattatagtacttgggtaaacggtaaaaggacttgaatttgtagggcagagactcctgaatta

SEQ ID NO: 3955 - DNA, 406 bp, Rattus norvegicus
  misc_feature (387)..(387): n is a, c, g, or t
cacgaggatgtggtcctccatgaactctatcttctcattcttccgggcatgcgctttctgcagcctcactatcctgtcaatcagcatggccttgtccacttctgggaagttgtccacagccaccgaggagctggtgttctctggagatcggtcttcagcactgcttcgagcattaagtgaccctgatgaactggaacgacttcccatgctgctcacatctttgtcgtagtttccattctcagtctggtctaactttctccgagcttgctgaagctgtttgctgaggtccttgacgttagaggcgtgcttgcgcctctgtgttactaactcatctttcagctcttccacctgggtgctcaaggctctggcttccgtctgcacagcggnaagctcggcttgcaaactc

SEQ ID NO: 3956 - DNA, 436 bp, Rattus norvegicus
cacgaggcaatgctgcagccctcctcgaagaaccagcgtttgtaatctttcattcccagctgtggctgactcctcctgcacattccatccctggttagtgaacgcatcacaaagagaacaagccattcatcactttaatctttgctatttcattatctgctcttatgccttctaaacctcctgttttattacttgcttgtttagcttcaaatgttcctacatctcttcaaacatggaacctagccttggattttcattatgcatgaggattataaacacacaaagattatcccctcatctgtatagaaaaatgtgctgttacttcctcccttggaaatatatgaaaaatatttattgtggattgaatcatgccctttcacatgccaggagaaaaaatgtattaactccagctatttatctagaaccagagtcatga

SEQ ID NO: 3957 - DNA, 419 bp, Rattus norvegicus
cacgagggaaacaatggtcagatccaactatggcagtttttgcttgaacttcttactgacaaggatgctcgagactgtatttcttgggttggtgatgaaggggaattcaagctaaatcagcctgaattagttgcacaaaaatggggacaacgtaaaaacaagcctacaatgaactatgagaaacttagccgtgcattacggtattattatgatggggacatgatttgtaaagttcaaggcaagagatttgtgtacaaatttgtctgtgacttgaagactctgattggatacagtgcagcggaactgaaccgcttggtcacagaatgtgaacagaagaagcttgccaagatgcagctccacgggattgctcagccagtcacagccgtggcactggctgctgcctctctccagacagaaaa

SEQ ID NO: 3958 - DNA, 527 bp, Rattus norvegicus
cacgaggggtggacagccccagaagctatcgcctacaggaaattctcctcagcgagtgatgcctggagctacgggattgtcatgtgggaggtgatgtcctatggagagagaccatactgggaaatgtccaaccaggatgttattttatccattgaagaaggttaccgacttcctgctccaatgggctgcccaccgtcgctgcaccagctgatgctccactgctggcagaaggagagaaaccacaggccaaaattcactgacatcgtcagcttcctggacaaactgattcgcaaccccagcgcccttcacacgctggtggaggacatcctcgtaatgccagaatcccctggtgatgttcctgaatatccactgtttgtcacagtgggtgactggctggattctataaagatggggcaatacaagagtaacttcatggcagcgggttttacaacatttgatctgatttcaagaatgagcatcgacgatattagacgaatcggagtcatactcattggacatcagagacg

SEQ ID NO: 3959 - DNA, 611 bp, Rattus norvegicus
cacgagggacatttgcactttgccactcaatgttgtacctcggttcactgtttgtttttgaatgccctgttttcatagaatcctaccctctcagatggtggaatctttggggaaaatttaaaataactaatttttattttaaaaaaatcttggcagacataagaggacacaagcccccatgcacatctgtaaatgactatatggttatgattatagtatcatgaaaagtcatgttattttttttaagacacacacacaaaaagaaacttaaagaccaaaaactgtgctaagaagatatgccccacctatctttggtacacggtaggtgttgtgatgggaaagaaaagcattggttaaatggaatagaggtcttgatctttggaatgcatgccggtaatgtattttacagtacatgttaataatttatgtttaatatttgtatttgtgttctctttttttattttacttagggtatatggatattttgcaataattttaatgattcttaagctatttggaggaaagaatatggatttctcatgtcttgaggttttgttcatgcccccctatgactgaccaatgtgataaggactttacaaaagaagcatgta

SEQ ID NO: 3960 - DNA, 488 bp, Rattus norvegicus
cacgaggtgattcttcagcatcaagactccagttgtggtggtacaactaagaagcattcactggaaggggatgaaggcagtgactttgtaacgaacaccagaaatttggtgagctcagtattctgtacccaggagacaagagaagaaattcctggacgagaagctcgaacaggtcctcctgatggccagcaagattcagagtgctgcaggaacaaagagaagaccttaggaaaagaagttttattactgatgcaagcgctaaacaccctttcaaccccagaggaaaagctggcggctctgtgtaagaaatatgctgatctcctggaagaaagcaggaatgttcagaaacaaatgaagattcttcagaagaagcatgcccagatcgtgaaagagaaagttcaccttcaaagggaacacagcaaggccatcttggcaagaagcaaactggagtctctttgcagggaacttcaacgtcataataagacctt

SEQ ID NO: 3961 - DNA, 479 bp, Rattus norvegicus
  misc_feature (358)..(358): n is a, c, g, or t
cacgaggatcttaagagtatgtgccatttgcttattgtagtttgtattagtaatgatgacttatcccttaggtctactcggtaagaaaatttaccaaggagttattacttgaaacactgataaatcttttatatagctatgatggcatccactaacgataccaagatctgtaagaaccaagatggacttttggaaataaaaatggaggaagagtgtaagttccacactttctcagcaccaaggagttcacactggtacaaaaccctatgaatgcagtgattgtgggagagcttttgtttataactcatctcttgctacccatcaggaaacccatcacaaggagaaactcttcactcanagtggtcctagtcagcagcggaagaaccacaccagcgagaagtcctataagtgcagtatatgtggaaaaacatttgttcaaaaaacaagtcttatagaacatgagcaaattcatactgaag

SEQ ID NO: 3962 - DNA, 440 bp, Rattus norvegicus
cacgaggatggcactcggcatagggatcgcaaccatggtcactattccaaccatgacctgggatggcagaatctaggaaggccacactccaagatgcctcatataaagggacatgaaggagacccctgtctgcggtcatcagactgcattgatgggttttgttgtgctcgccacttctggaccaaaatctgcaaaccagtgctccatcagggggaagtctgtaccaaacaacgcaagaagggttcacatgggctggagattttccagaggtgtgactgtgcaaagggcctgtcctgcaaagtgtggaaggatgctacctactcttccaaagccagactccatgtgtgccagaagatctgataaacactggaagagtcatcacgagcagactgtgaatttgtgtatttaatgcattatggtgtgatggaaaacccggattg

SEQ ID NO: 3963 - DNA, 582 bp, Rattus norvegicus
cacgaggggaacgaatcccaccaccaggaggaatgcaaaggctggacccacagcaagaaaccggtacgccagccagtggaccctcaacagaccccaccccaccatctcagcacacactctcaccacagactggagactgcctacccccagggctacaggctccgtggacaaggaaagtgacagctacagcgtcagcccatcacaagacacagacagagcaaggagcagcatggtctccacagaaagtgcctcctctacctacgaagaactggccagggcctacgagcatgccaagatggaggagcagctgaggcacgccaagttcaccatcacagagtgcttcatatccgacacgtcctccgagcagctgacggcagggacaaacgagtacacggacagtctgacctccagtaccccttcagaatcggggatctgcagattcactgcgtctccccccaaacctcaggatggaggtcgtgtggtgaacatggcggttccaaaggcccatcggccaggcgacctcatacacctgcctccatacctgcgaatggacttcttgttaaaccggggcgcaccaggcac

SEQ ID NO: 3964 - DNA, 460 bp, Rattus norvegicus
cacgaggccttttgatgaatgtattattttgttgcctttttacctgagcagaacataagagtggtctttgaataatgttgtttgctacttctgtatttataaaaaaaaaaaaatgacagcttctaaggcagtgaaactcagaactccatgattcatgtggaaatatttaaaacttaaatgattagtgacacgttattctgtggatgtaatttccatctgaacaactggaatatagttttgctagtagtgtccaataaatatggggactgttttattcagtgtttcatatttatactttagagtatttttgtacaagatccagatttattttgcttgaggtgtttatgccatcacaaagttgtaaataattttctaagactcttttaatgtaatctacaattttcctaaaatatttttcttgaggcctcttttaaataatcactaggagtttcttcaaaga

SEQ ID NO: 3965 - DNA, 144 bp, Rattus norvegicus
tcatgccctgtggggtagtggggcagggctgtcaccatgggtatagattggtccctggactgcagtggatcatagtaatgtccctccatgatactgatatgcacaggaggagcaggggctctggcacaggccgctgcgctggaa

SEQ ID NO: 3966 - DNA, 704 bp, Rattus norvegicus
  misc_feature (47)..(48): n is a, c, g, or t
  misc_feature (62)..(62): n is a, c, g, or t
  misc_feature (507)..(507): n is a, c, g, or t
ttactgttaattttttttaattaaagtatattaaaggttaaataaannacatgactgtgtcnagactattaagacttgagaaagggttagtttttttcttaggcctcccttgtggttatgtaacatttttagttaaaaattacacagggcaaataaaatcgaggtataaactaatgatagttgcccactgggaaatgacatggaagatcaaggcaggagataagacaaaccacaatctctactttaccatcttgttagaagactttcaagaaaccatacaaatcagggatggcagatacacagcccatgtgaatcatgaatgcatacaagatgagaaggacctcaggctgatgctagagtggtcatgtctacccaccctagtgcctgctagcaccacgctgggaaagtcctgattgagaatccccatctctatctactaggagctgggaagaagctagatcagagacttggggtcagagttcaacagtcaggaagacccattcctgnggaaaaggatagttcaagcgttctcaaagtggagaagtcttccctctaaagaagtcttcctctgcattcaatggccccacagcagcacaggagctccttgccttgcacactgcccacttcgtagttgagtccccaagtgattcttttccaaccccgattctcttgctggcaatgaaggccacccaaaggtaagccaa

SEQ ID NO: 3967 - DNA, 566 bp, Rattus norvegicus
  misc_feature (51)..(51): n is a, c, g, or t
taaggcaagttctcatctaggatttttaactaaagcttaagagattgtgcnagactgttaaaggttgacagcttaatacgtgatctctgaggctgatcgggtgaagggagcccccgggactcctccctctgacgaccggttatcagaagcctggacagctgagtttccaaagctgggtcaggaccaggcgctggcccaggcaaagagtggcacgttcacatcggcaagacacgtgggcttggctcgtcttcacctggagctgccctggctgctcacagagcgtgtggtgctatagcgcttcttcacaatcatgctgatatacgctttcatgagcttggccacatccaccacctcactcgtctcaaagagcagctcccgctcgtcaactacgatcttgtgcgtgtgggccccggggccccgaacgagaggatgtgctcatactgcaggacttctgacggtttgccctctcgaccctggtggacagacacggggtatgagctgacacccatcctgaagtgctaggtgatgactcgctctcgcactccgacatcaagaagtgtgagtcc

SEQ ID NO: 3968 - DNA, 732 bp, Rattus norvegicus
ctgagtccaaaacgtcctatggctggatcgagattgttggatgtgctgaccgatcctgctatgacctctcctgtcatgctcgagccaccaaagtcccgctggtggctgataagcccctgaaagagcccaaaacagttaacgttgtacagtttgagcccaacaagggagccgtgggcaaggcgtacaagaaagatgcaaagctggtgctggagtacctcggcgcctgcgatgagtgctacattaccgagatggagctgctgctgagcgagaaaggggaattcactattgaaactgaaggaaaaacatttcagttaacaaaagacatggtcagtgtgaagagattccagaaaacactacacgtggaagaagttgttccgagtgtaattgagccctcttttggcctgagcaggatcatgtataccatattggaacatacattccacggtccggagggagatgagcagagaacgttcttcagtttccctgctgtggctgctccattcaaatgttctgtcctttcactgagcccaaaccaagagtttatgccttttgtcaaggaattattggtaagctcttgattcgaaatggcgtgtcttcataaaggttgacgaattcctcttgggcctaattggaaggcgctattgcaggaacttgttgagacttggccttggcgttttggcaattaccattggacttttgatacccgtggaccaaggaaccctcaccactgtg

SEQ ID NO: 3969 - DNA, 540 bp, Rattus norvegicus
  misc_feature (514)..(514): n is a, c, g, or t
ggctagcggagtggagtgcggaaggacctatttatctgaaaccctcctgcacttaacaacactcttatcatagtgaacatactgtatgcattccttagacctttcgtaatgctggcattccaggcaaacatagttaacatgtaccccgtagactgtggcctggaagctcccttgttgtcatcccccgcattgcccgggaccactgtttggcataaggggccagcatgtacctggcaacattcatgtgttgtcctacaagattcaggcatgttgccctcacggttttccccaccccctcctgccctgtatgctttagcccacacttagagacgtgtggccattaacctggaagtgatcgtttgcactggagtgctacactcttgcacctttccaaagttagctggttcgcaggtcgtgttgtcacgtacgagactgtcaccgtttaaccgtgctctgtctgaaacatttctttgtattcctattggcttcaatgtcgactaaggagaatagctgntaactgtggacgtcaggtacttcaag

SEQ ID NO: 3970 - DNA, 523 bp, Rattus norvegicus
tgtctatctacctatctacctacctacatacctatcatctgtctgtctgtctttcctaaatggtataggaaaactgtacgttttctatgcactttgcccttttcatttagtgtattgatacttatgctgcttccagactgatctaaagatccataaagagaactgcctcatttctaggttttctttcccatccctctaggcacctctcacactgtctaggccagacacttgctgcctgtatctgtagacatcatttataaagtgtgtactcaccgagtttgtgtctactcaaagggaggccatgggtccccagggtcactgagtcaacccagtaccaaggtggagccttgtatctccatggcagaagcaaatctggggccatttctgtttcttccttgacttcttttctaaaacacagatgctctaattacttattacaggttgtccctggtaatgtcagcattgctcctagacttctgggtgccctggaaaagcccgttagctctgtgtgaacccttaagga

SEQ ID NO: 3971 - DNA, 531 bp, Rattus norvegicus
  misc_feature (356)..(356): n is a, c, g, or t
ccgagattttatacaatgggttcctttctatcctactaagacgctttaagtttcattctaatatccaaggtagatagagtgcattgttttgttttaatcttttcattttatcttttagatattagttctggagtgattctgtctaaatatttgaataaaaactgagagctttattgctgattttaagcataatttggacatcatttcgcgttctttattaccaccaagtatttaactgctaatcattatcagtgtaactgaagcattatcatcacatggcatggatcatcattgtctccagggactggattcttacttgagtatcatcatagattgagttttaacaccaacactgnaacatttactaattatttttttaaacttcagttttactgcattttcacaacatatcagacttcaccaaatatatgccttactattggattatattactgctttactgagtatctcaataaagcacgcagttacgtttcaaaatttaataattttatctcgagggggggcccaggg

SEQ ID NO: 3972 - DNA, 491 bp, Rattus norvegicus
  misc_feature (393)..(393): n is a, c, g, or t
aaagcggcggctggggacaggatcttgggactgccaccgagtgggacagacactgaggttagaatcatgaaagaaattgaagggagcacccctctgctctgtgagtctttacctaaaccttgtgattaggagagtcacattgggttggctgttaccctcgtcactgggatatgctagagatcgacttcaatactctcagaacgagcaagggggccaaagtggatccctgagccattcataataatttgatcaccactcaccgagtgcattacctgaactgtctgtcatgtgagacccaaaggatgtttcacacttgctgcctgcccaggacatatgtctttgcaagattctcccttacccatcttcttaatgacctctgctctccaccagagnggagatacagatctggaacagagcctcttagggacagctcatcaagcttttgagaacaaacaagtggcctcggtaagatctctatctggttggatcat

SEQ ID NO: 3973 - DNA, 625 bp, Rattus norvegicus
tctgaatgcttgtaaactaatacaattttctttactaggactgatgaccttatcataggtctgaaggatatgattctcatgccgaacctgcaccgttcgctatcgcccatactgagccacatggattatttgcgactatctctatattgaccgatactactcttgaccacccaccctgcgtattgggccagggtcagcacctaccgatactgctgcagaactctccaggattgagatcagttttattggagatactctacttggcacagcatggtacgatcacattctgtctcaccgtgcgaacattaaatcgtgcagctcggtcgactgtccttgaaggactaattgaagggtgtgtactgctccttacctgaggactgctttaactgccattactgtgctatgacaggtatatcatggagtttcctctactaaagacctgagaatgcatccccaaaagcgtgagcttaagacacacgactgcagttctatctgatgaccttagtcccagccaaggctgtcatgacaagctggctgcaatgccgatggccttctatctagatgcagagtgctcaggatacttgactgcctagagggatatctactagctgagcccagcttttac

SEQ ID NO: 3974 - DNA, 615 bp, Rattus norvegicus
cagctttgcaaggactctcaccaagcttccagttgggtcttgatagtattatttagtgaactgaatctgaccgtgtagaagagtcatgtctctggcctccatgctaccataactttcatgcttgtaaataaaagtttgatggtatgtactgacaagcattcaagttagcattgatcatacaggtggcgcatacctagtgcgaaaaatctggagctcagaagcactgtgcaatctaacacctgtgctcagacgcgatgccatgagtggtaaagcccacagcccacttcgtgatggggtgcagacaaaatacaggtgcgctcaaaatacataaagttgatcttcagccacgagaaatacaagcggaccttgcgtttagatttggatcccatcctcaaggtattatggaatacttttgaaagtctgcgaaaataaaattaaaacatttcagtttcaaagcattattgtatgttcaaccctgtcggtaaaatttttaaactgacagtcatttgccattttggcagctgggagcactcagtcgaaaatgatgagaaaactgcttagaatatcgatcctatttaaacagttgttaaactgggatcaagtttggaccgagga

SEQ ID NO: 3975 - DNA, 471 bp, Rattus norvegicus
  misc_feature (466)..(466): n is a, c, g, or t
  misc_feature (471)..(471): n is a, c, g, or t
acatctcactctcaagccttataaatcataaaagtgtacaccctggggagaagccctttaagtgtgatgagtgtgagaaagccttcatcacataccgaacccttctaaaccacaaaaaaattcatcttggagaaaagccctataaatgcgatgtgtgtgagaaatcatttaactacacctcactcctttctcaacacaaaagagttcatactagagagaagccctttgaatgtgacaggtgtgagaaggtcttcagaaacaactcaagccttaaagtgcataaaagaatacacactggggagaagccgtatgagtgtgacatatgtggaaaagcctacatctcacactcaagccttattaaccataaaagtacacaccctggcaagacgccctatacatgtgatgaatgcggaaaagcatttttctcaagcagaactctcataagccataagagagtccatcttgnggaan

SEQ ID NO: 3976 - DNA, 459 bp, Rattus norvegicus
  misc_feature (13)..(13): n is a, c, g, or t
  misc_feature (25)..(25): n is a, c, g, or t
  misc_feature (48)..(48): n is a, c, g, or t
  misc_feature (89)..(89): n is a, c, g, or t
  misc_feature (136)..(136): n is a, c, g, or t
  misc_feature (153)..(153): n is a, c, g, or t
  misc_feature (244)..(244): n is a, c, g, or t
  misc_feature (262)..(262): n is a, c, g, or t
  misc_feature (296)..(296): n is a, c, g, or t
  misc_feature (322)..(322): n is a, c, g, or t
  misc_feature (370)..(370): n is a, c, g, or t
  misc_feature (392)..(392): n is a, c, g, or t
  misc_feature (397)..(397): n is a, c, g, or t
tttttttttttcncaggcaaaaatnaaacaatttattctcatcgcaantaattccaaactcaggatgggaaccacaaaaaggccccagnagccccaagggggacccaccccaggggcctcgcctgaggatcctaancccaaacactgggtgantgggggtggtggaaaacaaggtgtccccacccctcgtgtcctgaccatgtttcccacttccataggaaggaagggcagctcggctacatantactataatatataaaancgcaggagctggccgcggcacctgggtggggctnaaacccccgattattgcaaaaggganggggctcaatgctggtgtcaccccgggtgctgtgctggctgtgggcanggatgggcaggggaaggggccnccctnttcctctgggccggggctctttgggccctgcctcccctaagatggggcgttctcacccgggt

SEQ ID NO: 3977 - DNA, 329 bp, Rattus norvegicus
  misc_feature (16)..(16): n is a, c, g, or t
  misc_feature (20)..(20): n is a, c, g, or t
  misc_feature (23)..(23): n is a, c, g, or t
  misc_feature (268)..(268): n is a, c, g, or t
  misc_feature (291)..(291): n is a, c, g, or t
  misc_feature (299)..(299): n is a, c, g, or t
agtagacctacattantttngtnttttactctctgccccagaacaccaacctgcaggcgtccattgcagaggctgagcagcgtggtgagcgggccctcaaggatgcagatgccaaattccaagacttgcaggctgctctgcagaaggccaaggaggacctggcccggctgctgcgcgagtaccaggagctgatgaacgttaagctggccctggatgtggagatcgctacctacaggaagctgctggagggtgaagagtgcaggttgtntggagagtttcagaatgctgtgnagcatttnggtggtcagcaatgttaccagcacaagcag

SEQ ID NO: 3978 - DNA, 420 bp, Rattus norvegicus
  misc_feature (69)..(69): n is a, c, g, or t
  misc_feature (88)..(88): n is a, c, g, or t
  misc_feature (180)..(180): n is a, c, g, or t
  misc_feature (183)..(183): n is a, c, g, or t
  misc_feature (201)..(201): n is a, c, g, or t
  misc_feature (282)..(282): n is a, c, g, or t
  misc_feature (345)..(345): n is a, c, g, or t
  misc_feature (359)..(359): n is a, c, g, or t
  misc_feature (385)..(385): n is a, c, g, or t
aagaaggcgtccacgtactgacgcagagccaagagggggacaagagagcgagccagagagcgcagggcntatggcctttgggattganttccactcagatgggttggaagggtgtgtctttgggggcttgggcttctgcagtcccttcttgagtcgagcctccaagagccgccgtcgggnganagtgaacatatatataantttttctttctcttatgtattaacaaattcaaatgacattgcacgtgcgattctagtgggtagttgcaaccgccgacccgncggcgctcgcagagacttgggcaagacgcgcgcggggtacccggagactttccgtggccgctncgtcctgccctctnctctccggatagccaggtggggccancttttggccgggtcctcggttgccggcctctttct

SEQ ID NO: 3979 - DNA, 5192 bp, Rattus norvegicus
ctgcagccaataccagaaaccactggggaactggacttctacttccatctacagtgacaaagcaccccatctcttcctcctgggtgagctgtcagaggaggtacggtagagagttaggaacacaccattcgcccatcactaagatggctatctctgcaacggtccctaaacaccatgctgggagctggaaaggccatgtttactcagcctaccttggtatcaaaaagggcagaaccatcggtaattgggacttcagtctccacttggcaataaagagcaagtccattgttgtaactgtacacttaagcatccccaattcaacagacagagcaatgagaccaaagcctcaatgacatcgtcaaggagacgagctctaggtaacaattggcatcaaaacgtagagcacggtaaaaaagcaggattgacagacaggaaatagacaagctaaacgagaaggaagagtttctctaccaagttaggcatggggtgcacagcaatacgtgcagactaaatgcccatacccacaaaataataatggaaattaaaattaaagccagaatgaggtatcactacatgtaagtaacaacgactgaattttttaagccaataatatcaaattttagtgaagctttatgagaaaatgagggaagatgttcatttctgctgggaaacagtcctctaatttctaaaaaaaaaaaaagaataaataaaacctaaataagcaaacaaataatcattcagcaatagcatttttttctagagaaaagaggatgtttgtttacataaaacttattttcaatgacatatataacagctttattcctaactgccaaatattggaaacatttcagatgtacatcaaagacaaatgtgtcaatagcagcagatctaaaccatggtctactatgcaactatgaaactatcgacacataggactggataaatcttgcggggattctgctgagtaggaacaggccacacacatgattctgattaattttataggaagacttgcctagatctaccaggggtgagctgagcactgatagcaaaaacctggtcgtgacttcagccatggtcttaaaagatgttatcactagggaaaccaaggcagacagcacataggctctctgcattgtctcttagaactgcacctagattggcaaatgcctcaaaatgcttaatcttgggggaaaatggagaagaatgggcctgatacatttttgtggggactgggagggagctctggatggctactccagattaaaggcctagcacctctaattgcaaagggcatgtctgttaccccaggatagcaagcaggaaaacagtccggcatcttccatccccctctcttaaaaacattaccattttctttgtgccccaaaatgcaccttgagcttgttactcctcttcttccctaccattagccaggagcgagcatgagtggtcactgctctcttggcaatttacttctcttctttttggctgattcccccatcccccatcacaaaacagcagggactatattttgttctattttggggtcagtactgttctttgagacagggcttcctgtaccctaaaggttctggaactccctaagtagctgtgaatgactggattcctaactctcctgtttctatcacacacacacacacacacacacacacacacacacacacacacgccgccgtactggtgcacatttctgaggtgctgggaatcagattcaactgaggcttcatgcaagtcaggcaagcattctatcagctgggctacatgcctgccactagaggcaatcttaaaacaaacaatagatcacagtagtctgctgcctgttctctctggcgatttcccatggcccttcatgtgaattctagcccaccctggtggtctccgaggtcctgcatacctatggctgctgtctgtctccccagtactatgacagacaaattcgatgtaaaccactgaaccctgagtaagaaagacagcctcagagtcagacctacctcaagtgggccccttaggccaaggtgcacagtgagagttagctgcttgggtgggggactgtgaagactgacaagcaggtttcatagtgtgagttaacaatcttgatttccacatcacaaacgtgcaattggactagaggaccagagaggccaggcagggggacctgaccttcaggacggagttcttcccgtgaagaacttggttttcactcctgcctctactcttatctgactcaacaggagaagaacgcagcaggcttctctgagctgtttcctctgatttatagacaaaacaaaatttaaaaacccattcctgtagctttgctaaaaaaaagacaatgaaggggagaaagggaggcgaggttaccatttccgattctaggtgtttcctctcttaattaacgatgtaatcaggatgtgacctgaaaggttttaaagtataaggccaggtctatggaggacacctgctgggtcagaacatttgctctgcaaacacaaggacctgaactcaatcgctagtacccagtacgggttgtgcctgcatagaacgggcacaggggcaccgaggcaccgagacagagggatcataatcagagctggttttgcagtgcagcaggaatctctgagtgcttttgagaactcagtaggtagacgtcatcccagggcaaagtacaaagagccaggtttccttgccagacattatcccacagaaacccgcagctcctctgtgcgccctgaagccactgtagcagtttcgcatgaggttggtctgtgacctgaattcacctggtaaaatcagcctgtgcaatatcctccctccagcctcagcctgcaggtatgtttagcccaccccagaagctatacagtctaagggagttgtgcctgcagtgggggaagagcagcgcccctggacctctgcgacctgcaagagagaagcacagcagtctcggactccctggcacagcatgatgaagacaaacaccatgacttcaaagcagatttaaaaggacaaaggtagaaaaacaacccaaggcagccgtcactcctaaccgtggcataagtgtgttttctgcagagccaagtccgtgggaaacactgacagggcatctccactctgggtcgtcagtggtgctgcataggactggacgcgggaacccttagcgcatcttggggtgctggaaagccggtgccaaagcggaacgcagcagctctctctctctaatagcaccacaccagtactctgtgatgagtaagccagtcaagccctgagaagcactgagcagaccttgggactgaaaagcatgctataaagattaatgtcactgctattagcactctcagcgcctgccttctaagacactgcatgctgcgtccccacttcagtcctggcaggaggtgactgggtctcattggtgacaagttagagcatatgaccatgatgagctccactgaagtttgggctttgaactgaattgtttgcttctcttcttgtcaacttacagaaatgagctgctgaagagggagctcaatgggtaagcaaaaggacctgggttcaagaccccaacatataaagtctaggcatggcctggcagtgcctatcatccctgcactgaagtggatctgctgacctgtgaaagtcatgcatgtggctttcagattctctgaggtcctgcctcaaatagaggcaggtacagggtagtggaggaagactctttaacaccaatccctggcctccacacagagcagtacatacacatgcatacaacacacatacacagagagagacagagacagagagacagagagacagacagatagacagagagatagacagatagatggacagagagaggcagagagagagacagagaggaagagacacagagaaagagagagagagagagaaagagacagagacagacagacagacagacacagggaaacagacagagatagacagacagagagacagagagagaggagaagagagagagagagagagagagagagagagagggagagggagagggagagagagagagagagggagggagagagggagagaggggggggatatggatgaggaaaggtgggaaagtcaggtcaattaattccagtttccctctggccgtcatggttctgtcttttaccatcgcctctcacatttcctctgctgcaaactggccccgtaaggactctgtgggtgccagtaaccacagccgccagtcacagtgaagctacactaactttggtatctccctcattatttttggatcagatgccagaggggattcctagaaagaaacaagatgaagacatgtgagtagaatttataggaaacccaaggctataacaaacacactccctctcccaatcagggtctctatgtgtagccaaggctgtcctgcaactcccatgccatccaatgagcctccaactcagccctcctgtcccagcctccccagtgtgagcattacagatgtgtcaccccatccggctgcgtgtctcatcctaaaatacactgagttaataacaacagaaagcatgtggccaccatctaccaagaactttttttgtatgccaaacatttatcgtgctatttcgtttaatcccctcaacaaaacagaatgcctgtgctattatctctatttggtcaagtcagaaaccaaacaatagaaaactaagacacagaaaagtcacagtgcagacccctccggccctcattcagatagaaaaccaatgcctccacagtctgtggctacagagcccacagcactagttctctgcagcgcaaactgctctgcaccctcccccctccccactttggcttccccacaacacagcatggctcagcttctctaagataccctacaggttgctcctctcacctgtccccatcccatttctgccacattcatcagcccttaaaatggttctgcctctggcttgtaacttatgagacctcctattgttctcaagccacaggtcaaggtatattgattgaattaccatcaatacgcagccttggttaagaaggtcagaattcacctccgcttgctcctcctcctacaatgtataaccaggcagagctgaggacagctactcatccacattcggaacaggacctggattgagacaacaactccgcacgcaacatgtcagaagacaaggtacagcaac

SEQ ID NO: 3980 - DNA, 864 bp, Rattus norvegicus
  misc_feature (45)..(45): n is a, c, g, or t
  misc_feature (88)..(88): n is a, c, g, or t
  misc_feature (177)..(177): n is a, c, g, or t
gaaggaaaaagagtcactctgatcagaatttttctccaaggttgncaagacacatgcgtggacaagtccctttgtgggccaaggcttnacctttaaattaatagtttgaaacctcatttagaaaatttaaagtatattggaaaggtggagccaaagactaaatatcaacaaggaatnaaaagattaagggcccgtcaagattcctcagcaggacagagcactagtagtacaagctggtctttcaatgccagaacccacaatagaaggaaaaaaactggttcacaaaagttgtctctgattaccatgctgtggtaggtatctgtccacacactattacaactgtaataaataaaaaaaagtttaaaagacacacagaaggctctccatatcgccgagaactggggaggacattggtgtagaagaccttggttaccatgagttccggtgcactgttgccgaaacctcagatgcatgatcctctgtccaagcgtctgtgggttcatattgttggtgcattcattgtggacctgggagttgctgctgcccataagtttggtgcagctaaaccaagaaagaaggcatatgcagatttctacaggaatcatgatcccatgaaagattttgacgagatgaggaaggctggagtctttcggagtgtgaagtaattttagaatacaaaggattctttggattgagctccatagaagttcattgctggtctgtgttcctaaactatgaaacatgaatatgtgagctaaggagtagtttctctcaataaacaataattacatggacgggggggggggaagacacatagaaagagaaactgtgtttttgaatagaaaagggtctcccaatagccca

SEQ ID NO: 3981 - DNA, 1852 bp, Rattus norvegicus
gactcgccgagcccccgctgcggggatgggcgcgctgcttcgagcactcttgctcctggtgctggcgcagtggctcttgagtgcggtccccgcgctggcccccgcgcccttcacgctgcccctccaagtggccggggccacgaaccacagagcctcggctgttcccggactcgggacccccgagttgccccgggccgatggtctggccctcgcactggagcctgtcagggctactgccaacttcttggctatggtggacaaccttcagggggactctggccgcggctactacctagagatgctgatcgggacccctccgcagaaggtacagattcttgtggacactggaagcagtaacttcgctgtggcaggtgccccacactcctacatagacacctactttgactcagagagctccagcacataccactccaagggctttgatgtcactgtgaagtacacacagggaagctggactggctttgttggtgaggaccttgtcaccatcccaaaaggcttcaacagctctttcttggtcaatattgccactattttcgagtctgagaatttctttttgcctggtattaaatggaatggaatccttggacttgcttatgctgctttggccaagccatcaagctctctggagacattttttgattccctggtggcccaagcaaagattccagacattttctccatgcagatgtgcggggctggattgccagtagctggttctggtaccaacggaggtagtcttgtcctgggtgggattgaaccaagtttgtataaaggagatatctggtataccccaattaaagaggaatggtactatcaaatagaaatcctgaagttggaaattggaggccagaacctcaacctggactgcagagagtataacgcagacaaggccattgtggacagtggcaccacgctcctgcgcctgccccagaaggtgtttgatgcagtggtggaagctgtggcacgaacatctctgattccagagttttctgatggcttctggacaggggcccagctggcatgctggacaaattctgaaacgccatgggcatatttccctaagatttctatctacctgagagatgagaatgccagtcgctccttccggatcaccattctcccacagctctacattcagcccatgatgggagctggtttcaattatgaatgctaccgttttggtatctcctcttccacaaatgcgctggtgattggtgcgaccgtgatggaaggcttctacstggtctttgacagagctcagaggaggstgggctttgcagtgagtccctgtgcagagattgmaggtaccacagtrtctgaaatttctgggcccttttccacggaagacwtagccagcaactstgttccagcacaggctctgaatgagcccatcttgtggattstgtcctatrccctgatgagtgtgtstggasccattctcytggttctgatcctcctsctgctgytcccgstgcaytgccgwcaygccccccgagaccstgaggtrgttaacgatgartcctcactagtcagacatcgytggaaatgaagagcctcaymtgaactccascagccttgaactcagctcttyyaagagsgayrymwccarytggcttytctsyctrttagtckkgaacytcarcygkgcawytgaakgccttccagastgtatcttgattaststtgatttccaagytttmagrtcttttytacttcagagagaaatgatamtaaaaacacctcattgtgamccaaaaaaaaaaaarmramgccccgtttcagcggtctctgcgccagcccaaccccatttctgcaaggtcggctgcggccg

SEQ ID NO: 3982 - DNA, 1888 bp, Rattus norvegicus
ctcaggaaggcttcggctgacaggagaggcatgcagacctcaagcagacgctcccttgaagggcaggttgcattcatggttggttcatggaggcggccttggctaggcctgggcggcatcagcctccaacagcagcagcagcagcagcagcagcagcagcagcagcagcagcagcagcagcagcaggagcagcagcagcagcagcagcaaggcgctggccgttccgctcacccacaagaacagctgccaccagtaccctggggatgactagaggccggaccacaggccacaaaaagaagaaggctaccccacttacagatgcagaccatgtgggggtccggagagctgcttgtagcgtggtttctagtactggcagcaggtggtactactgagcatgtctacagacccagccgtagagtgtgtaccgtgggggtttccggaggctccatctcagagacctttgtgcagcgtgtataccagccttacctcaccacttgtgatggacacagagcctgtagcacctaccgaaccatctaccggactgcctaccggattgcctatcgccatagcccggggctgactcccagcaggcctcgctatgcctgctgccctggttggaagaggaccaacgggctccctggagcttgtggagcagggcaacccttccctggatgccgcagggttctgggaactcccctgaatgggtgacagacaggcctctcctacccacagcaatatgccagccaccgtgtgggaatgaagggagttgcatccgcccaggccgctgccgctgccctgtgggatggcagggagatacttgccagatagatgttgatgaatgcagtacaggagaggccaggtgtccccagcgctgtgtcaatactgtgggaagttactggtgccagtgttgggaggggcagagcccatctgcagatggggtgctctgcctgcctaaggaggggccctccccggtggcaccaagtcccacgccaggagtggacagcgtggtgagagagraggtgtacaagctgcaggcccgggttgatgtattagaacagaaactgcagctggtgctggccccactgcacagcctggcctctcggtccccggagcatgggctgcaagatcctggcagcctgctggcccactccttccagcagctggaccggattgactcactgagcgagcaggtctccttcctggaggaacagctggggtcctgctcttgcaaaaaagacctgtgatggcttctcagtgcccatgttggattgagctgttacccctacgtcccttctagcctgagttcaagtgctgtccggtggtgcctgtgagcagaaggccctgcttgtttatccctctctcttaggaggttcctaggccctgggcatggggaggggggtcttgtgtggctcttaagtgaggcttccgggaaaggaataagatctccctgcmtaagaagtgaggtggggggctgtctccacctttgtcatattaaagctgggacttgagctgctgtcactgggtgagtcggactgtgtacacactgtactactgccatgtaggagctgcagtgggcagtcctgaggctctcttcagcctatgctgatgctgccaagcccgtggtctgcacacccttcagttctgtggaccctgcattcactgagcaaagcaatgctggctgatcacagctcacctgcaggcagttagggaggagggagctcagacaccgcagccccagggatcgattcacacaccatctttcccacccttcatccctggatggggacttgggaagaactcttaccaccctctggtctctaggcacttctgagttcatttataaaaaaaagamccaamaaaaaaaaaaaaaaaaaaaaaaaaaaaaaaa

SEQ ID NO: 3983 - DNA, 842 bp, Rattus norvegicus
gaattcattacaacccactgctgtcctcttcaacgtaagaaccagccttcctggaacccgtggctactgaagtcttggtcaaattctctcaggcttcaagctgcagttcctcaatcacttcaggaatgggagtcggggagcccagtggcctttagacctaatccaggggccttgtccatggcagacacgtgcatttattgcaccgccctgtacagcgtaccaagggactgaatgttctgctaaccaccgggtgctcaggctgggctttcgaactgcccttggctaccagggatagtccaggagttttgatacatcctctgctgagggctcagcgtatatcgaaagcagagtgaaagtaaggctcccttgactttcaacttaggtccctccaacagcgcaactcctttctccccagcaaaccacctagggtggtcacccagggaacagcccgggagcctgggtctccgcagtacctggatccgcctgcgccgaaggggtgctcggcggtggtgttgaatcacggttgagtcacccctttcggggtctcggagtttcctacgggaggggagtgggcggagcaggggtgtggactgaccgggagccgcccaccgcgaaagcgagtgaccggggccccggggggcggggagtcgcgagcctcgacggaggcggcgcggggtggagaggagccggtgtccgcgcggccctttataacgcgccccgcgcggaccccggcagcctgggtacaaccggtacccatcactcgctccgtctgatcgctcgtgtagcgtagcctccgcgcctctgctgaagccccgcgacctcgccagcagcccttggacatg

SEQ ID NO: 3984 - DNA, 729 bp, Rattus norvegicus
  misc_feature (49)..(93): n is a, c, g, or t
  misc_feature (336)..(351): n is a, c, g, or t
  misc_feature (456)..(489): n is a, c, g, or t
  misc_feature (675)..(699): n is a, c, g, or t
gcattcagaaagtaaaattagtgtaaacctatttaagacacatccacannnnnnnnnnnnnnnnnnnnnnnnnnnnnnnnnnnnnnnnnnnnncagacccaaggaccacaagcattggccacatttgccatggctcggctctgtgctttcttgatgtccctggtggtggtgagctactggtcagcctgctgtctaggatgtgacctgcctcatactcataacctcaggaacaagagagtcttcacactcctggcacaaatgaggagactctcccctgtctcatgcctgaaggacagaaagtactttgggttccctttggagaaggtggatggccannnnnnnnnnnnnnnncaagctatccctgtcctgcatgagctgacccagcagatcctcagcctcttcacatcaaaggagtcatctactgcttgggatgcaaccctcctagactcattctgnnnnnnnnnnnnnnnnnnnnnnnnnnnnnnnnnngcctgtctgatgcagcaggtaggggtgcaggaatctcccctgacccaggaagactccctactggctgtgagggaatacttccacagaatcactgtgtacctgagagagaataaacacagcccctgtgcctgggaggtggtcaaagcagaagtctggagagccctgtcttcctcagccaacttgatnnnnnnnnnnnnnnnnnnnnnnnnngagtcctgagccacattggagaggactccg

SEQ ID NO: 3985 - DNA, 9578 bp, Rattus norvegicus
gaattccggagctgctgtgggacagccgccctggaattgcgtgtcactgagcaagctgttcttcaccctgaggacatccaaggaacatctccagagattgcccagtgtcccctgggtacaaaaatcacaccaccttgaggacagctgagttgaacagaggtgtgggaaggaggcgtgtgagaatgatcggcaaagctggtgggtgtgggggctgggaatccggcgcagatgactgagggctttcctggcattctgagggacctgagtctgatcctcagtgccatgtgaggtgggcacggttggcacgcgcctgtaatggcagcattctgaaggcggaggcaggaggatcgggagttgaagggcatcttcagctactcggtgagtccgaggccagcctgggttatgtgagaccctgactcaattttaaatgataggtgtgtccaaactacccagtcctgttgtcatctgtccccagcccaacccaatcctccacatcagctctgcactctcttaaaactatgagtccctgggttcaattcccagtgtcctcagctaccctctgccctggtgactctcagcaaacaccatcctccaagcctgccctcatctacaacaaggactaagggagcccacccactgctgtgtcttaacacacgtgaaaccccccacacaggaggcaaatgatgtggaaccagggtcccccattgctttggcaatgagatgctggtccagagagtacaaggtagctgtgtccacacatgggctttgtgtcatcctggcttgcctacttccctctatccctgacccaaacctgtggtcatccctaatgcggatggtcagaaagaacaatgcacaccacaggccagaaaaagcagcagacgtggggctggagagatggctcagtggttaagagcactggctgctcctccagaggtcctgagttcaaatcccagcaaccacatggtggctcacaaccatctgtcatggactctgatgccctcttctggtgtgtctgaagtcagcgatggtgtgctcacatatattaaataaacaaataaatcttttttaaaaaaaagcacatggactctgtgtgtgtgtgtgtgtgtgtgtgtgtgtgtgtgtgtgtttatgctgtggacacacaggtctctgcacacagcctggaaacgggtcagaggggatggtcacgatggtcatagtggtggtggtggtgatggttactggtactgatactgatggtagtgctgatagtgttgacagtggtggccaatagtgaatagtgatggtgatgataaaggttaccaacactggctacctgttcaatttcaagtctctcacctaacgcagtcccacctcttcaaagcctggaacagcggtacccatgtcatccctgtttacacacgaacagaggctctcgaggtcaaggttcttgcccagagccatgtatctagtaacagcagagcaggacttgaacccagatcccctttgtctaacccatacgcccttttatatgaagaggatggcaggggatggtggtaagcaaggggtgtcaatcatagcttgggcgtcaacccccaagtcccgcctttcactatctatacgagctgtgcctcatttccactctgtacagacctgttggatggttttacattgatttgggttcatgaagctgagccccatactccccgccctttttctttctattttgagacaggctctcactccttagtccaggctgtccttctgcctcagcttctattgttctggcttgaaggtgtgagttgccatatggctggcctgtgtgtttcttggccataaacagaccagcaactgtccggcttttctgttatttctgggattgacccctgggactctggcaggagctcctcagtgctgcgctgcccgcccacgagtcctataggcctttcggagatgaatgtcttcatttgcaacggaaaaaaaaaaaaaaaaaaaaaagaacggggagagaaggtgaggcggaccttggagggcagaacaagtggtgcagcatggaccagggggcggggatttctgggggcgtggcctgcctgggccctcattggctgcccggaggctcagcccggagaataaagccctggggtgtcctgccaactttccactctcccaggacacagacaaaatctacccttctcgctcgctctgtccagctcctcctgtgccgggtatgtggccctcagcctcagtctcaccccaagattgacagccagagcagggtaccgggaagggaagagggactgggactcatccagttcaagtctccatgtactgatctgtaaaatgggacgatgatataggccctctagatcaggacgtcgccggggtggctgtgacttggccaagtgctcgcatgagtcaaatgacaaggaagagacttctgccgtggaacccatgccgcaccggccacctttgccaagaccgcctgtgcctttttctctcgcaggtcatatcacctatagaggcggatgcgactggcctctggggtgggaatcagtatggagtacactgcccattttcccaaaggtttccaatgctacagcctgggacaggaaccaggcagggttcgccaaagccacctggaaggggtctgcgtggcggaaactatccactagccaaaggctgcactggctgggccttttgggtccagagaagaccctgtatgtcaggatggggctagctaggacaaagcaaagaaatttggagttactcttgtgtgccattgtttccgactgcctttcaagaggtcttctagaaagaggagtctggtggcttgcctataatctcagcacttgagagactgaggcaggaggatcacaagtctgtctctgtctgtctgtctcttgactgaggcaggagaatcacaaggagtttaatctctcctacactcacacacagtcactcgaattcgtgtagatgctgggaagagacaccacctgcctaggtttggtcccacttgactctgtatctctcttggggcttctcacagggctccaaggtgaaagtggctgagccggtgttaacccaaaggcttcctcactgtcctggctcccgaggggacctcagggtgccattagccaaacttgccgtgcagcctctatctgcatcgaggttccctctcattgtggacgctgtatgacgagggcaagccagaggtctctgttgcctcttccccatgccagaaaaagcaattccataattctatctttttaaaagaatgagagcctttcagagctcgatgctggatttccaggtcttttgggggttttgttttgttttgaaacagactcctatacagcccagggtggccctcaaactccctacatagccaaggttgaccttgaatggctagtcctcttgcccttgcccccaagcaatgggattacaggcctcctgcaccaagcccatttttttcttcaaaaatatgtatttgtcgaacacaggtgcggcggggcatacctgtgatcccagcaattgggagactgagacaggaggatccaaccttcaaagctacatggtaagaacatactgagtttgttttaaagcatgtgtggggttgggatatggctcagtctatgaagggcttcctgggaaagcatgagggcctgtgttcatattcccagaatgcacctcaaaaatgctgagctcaacaataaatggctatcatccctgcactagggagcaagagacagaaggacctcaagggacatccaggggcctctggaacctcaggggacttctgggaacctctggggacctcagagcctccggggttctctggccagccagttggactgaatcagggtgctcctggttcagtgcaagaccctgcctcaaaaatagtgggcagctgaggaggctactgactgatgttgacctctggtttctccacacacacacacacacacacacacacacacacgcacgcacgcacgcacgtgcgcgcgcacgcacacacacacacatgtttaagtaatatataatagggcaaaatgctgagcacggaggggtgctgtggcccggagggtcactcttcacaggtaccccatttggcccattttgtgtgtgtgtgtgtgtgtgtgtgtgtgtgtgtgtgtgtgtgtgtgtgtgtgtgctgacatactctgagctcatgggaacaggtcagcccgggttggttcctgaggactttgcagaaacagaccctggctgaccctggctgtgctttgttcccatcttgtggcctcattctgagccagtttgaacaagcccctccctctgaactttagcccaacgctgcagcctaaagatgtttctgagcttgtgaccttctaactttgggccactgggtagttggagctgagctttgatttggtgtcctttccttatcattatgggtatgaaagagtggtcctagagcccaggagggcagcctctcttgaccctctgtatctcctctctgcccccagccatggctgcccaggagtccctgcacgtgaagaccccactacgtgacagcatggcattgtccaaagtggccggcactagtgtgttccttaagatggacagctctcagccctctggctccttcaagatccgaggcattgggcatctctgcaagatggtacaaggcagggtggcatactggcaggagaggcagtccctcctacctgacagctgtagaggcaggtgtgcagatacacacccaggattccaaacggaggcaggaaggtggaaagtgaatggtatcccagagtgcatagcaagaacctgtctctaaggaataataataattttagggactgcagttgagacagctcggcggctgagagcactggctgcttttgcaggggacttgagctcagttcccgcaaccccatggtggctcacgatcaactataactccagctccaggagatccaacactctcttctgatttcccggagcaactgcatcacatgcatataattcaaaataagtaaatattgggctggagcgataattcagtggttaggaatacttggggctctttcagaacagccatgctcaccctcagcatccaagtgagcgaggggctgtaactccagctgcagggcatcaaatgctctcctctgccctctacaggcaatacgtacacacagacacaagtgcacataaagaaaacacatcttttttttttctttttaagaatttttatttattttacttatatgagcacactgttgctgtcttcagaaacaccagaagagggcaccagatcccatcgcagatggttgtgagccaccatgtggttgctggggattgaactcaggacctctggaagagcagtcagtgctcttaacccctaagccatctctccagcccaagaaagcacatcctaaataaataaataaaatatgttttaaagaaaataataattttagaataggtttcacacatcagggctctctctggctaaggggtgcccaccctacagactgacacctgcctccttaccccagttaatcaccttgggggagatgagcctgagagagtggttcagataccaagtgggcaagctcagatgttccagtggtgaggacgtgtcctaggcagggacttgggggtggcctgatccttcctcttgtccccacagaaggcaaaacaaggctgtaaacatttcgtctgctcttcaggtgagtgcccagttcgttttctttcccttcctaccctgttctgtgtgtcctgtggcccagcaccaggcattctccctggactctgggctctgcaacaacacatccattcgtagtcgtccagatttggggttccagaatgaggggcagaagtcactctggagatgagcagccccacgtgaggtcccaggccctccttcctgatacaccctctccactgacagcgggcaacgcgggcatggcgactgcctatgctgccaggaggctgggcctcccagccactattgttgtgccaagcaccacacctgccctcaccattgagcggctgaagaacgaaggggccacagttgaagtggtgggagaggtgagtgcagacctattgtgggcagcagagctggcgggtggaggtggggggctgataactggatagagccctcgttcatctcaatctcttcctgcccccacccctgcagatgctggatgaggccatccaactggccaaggctctggaaaagaacaacccaggttgggtgtacatctcccccttcgatgaccctctcatctggtaagttggagccaccccactccctactgcatgtgtggtctctgctcatgttctcgccggcacaccagccatgaggggtccccagatgcagagattcggagagatcgactcatcttggggtggctaggagcaaactaactagggaacgcatcggtggaggtggctttcatgtgccagcatctgccctgaacaactgaagcttggcccctgggaaccctgggagtcggtggggaatgagcatctaaggatgtgtccactggtgggcaggaaatgggggtttatctaccacacccacagccatctcctctctgggagtgcgtggggtgagggggtgggggggtggggtcttgtctcctaccctgtgccctgagcagcagggaggtcagaggtcaggttcatcatggcctggcatagagggaaaaacagaccttagctggtatctttgaccagcccttgtgtcttcaggaagccctgacctgacctgccacccctctcttgcccagggaaggccacacttcccttgtgaaggagctgaaggagacactgagcgccaagcccggggccattgtgctgtctgtgggcggtggaggcctgctgtgcggagtggtccaggggctgcgggaggtgggctgggaggatgtgcccatcatcgccatggagaccttcggcgcccacagcttccacgctgccgtcaaggaaggaaagctggtcaccctgcccaagatcaccaggtgagcccggggcacctctccagcacacaggcggtggagctgagcctttggtcctttgcccgaagccacactctcgcgcgccgtctgggccttgaacgtgagtccgttctttatgtgacagtgcttaagtgacgtccttcgcttcttgaggtcctcacgcctcatttcttttgctgctgtttgatctggcctccgaaatgtgccagaccctggctggtcctggactcagcctgggagaaaacaatctctggcctgcaaagaatttataaccaaaccccaccgcggcggctcaaaccaaactgagctctagttctatttaagactattaggggcaactcttcgaaccaggggctcagttcctttagtctcttgtcccgccactgagagtgttgacctagggtccaaagtggctgctttggtgccagccaccgcacacacactccctctgaaaagaggctaagcaagagcagaagtgtttctaaactttaaagaccaagtagagctgctccccagctgacaatggggtcacacccaatctttaaccattcgttaaagattgctatgaatgagttgaacctggtctgctggacgccttacctaagctttttggcacacggtacagaactggctgcttcttgctgataggctgatgggagaggtctccctcaaggctgccactgggcaacccaagagcggattgtactgcaaacccatagtctgagaaaaggtctgagttcaactctcaaagtttggtttgtaccaaatgtggatttttttttttttgacaccacaacgttgaactctcatagaccaaccctcagaaatcagagctgtctgtacttccctcttatcatgcactgggcagtgcttggtcacatgaccatacctagctgcaagggaggcagggcaaggttcacactaggcatccacaagaacagctagaagggatttctagagagaggatggcttctgtcataggtagggaacaccgaatcagttaaaagactcttccatatttttgggcaccatggtgagactgatgccatcctgctaccactattctttcctgccgataggaatacagatgcagtagctggcactcaagcagccatttttggaccctaagttaatatgaccctggggcagatattgcctcatctgtttcccactctatacaacttggagcttggaaagtgtgtgacagacacctgatactttaggaaggactagttctccctgtttgttagagtgtgggagggctgtctgagagcctcaactaatccatgagaccaaggagtccctctgggagtctccctggaagaggtagcaagtgagcaaagcaggcggaggttacaagctggcaggctgggggtgggggtggggcagcagagtccttctggtatctgaatcaggccagtttgatatcctagaccactgtacaggttcctggggctgggcagggttgcccactcccactgttcacctgtagtccccgcatctcacgtgcacccttctaccttgtctctccccatgtccacccccctctcattcccacctcccagtgttgccaaggccttgggtgtgaacactgtgggggcacagaccctgaagctgttttacgaacaccccattttctctgaggtcatctcagaccaggaggctgtgactgctatcgagaagttcgtaggtatgttctgtgggatctttttgtccttgattttctccctcctcagcctagaccatctcatgaaaggaaactaaagccagtcagtggtaaacgcaaaagctgctcgagaaaacatgaacctggttaaccatgatagcagggaggacaaactagttttataagtgccagttttgagctttctggtagccagagtcaaaagggaaagggccaagatgaggtgatctctctgggcttagcctgggagatggtcaaaggaacgagagtagtgcacactgccattaataacttcagcttgctacaccactagagagcaaccttctcaggggcccaggaaccccaagcacagactgtagaaaccgagactgggttcagaacaaacagtcctggccacagtgactgacgagagctgacgagccccctcccctacagacgatgagaagatcctggtggagcccgcgtgtggcgctgccctggctgcagtgtacagcggtgtggtgtgcaggctgcaggctgagggccgactgcaaaccccactggcctcgctggttgtcattgtgtgtggtggcagcaacatcagcctggcacagctgcaggcactcaaggcacagctgggcctgaatgagctactcaagtgatatctgctgctgccctggccaccctgaggggtcaccagcacccctgagtaggctgggtgggcgtccgcctgacagtggcccaccctcctttatccatgtttataatatgcactttttcattgtaaataaaaattaatatatatatgtttataaagcaaagatcttttgagctttgttattgacatggggtctatgtgcagcccaggctggcttcaaactggagatccaagcttgggtgaggtcgactctagaggatcgatccccgggcgagct

SEQ ID NO: 3986 - DNA, 367 bp, Rattus norvegicus
cctacacagtctggagccctggtttgaacacgttttggaggcttgaccaaggtctgatagcgagacccaaagacatattcacacaacgaaacgtttcttttatagagaagctgcaccgtgaatgagtccacgctcacaacactgaaagacttcctggaaagcctaaaaagcatcctacgagggaaatacttgcagtcctgcacttccatgtcctaacttatgagtttttaatggttttatttttttaatatttatatatatatttataactcttaaaataaaatatttgtataatatttgtataatgcaactaatgactcttcatttggcaataaggtcggtaggttttatactgttagagaaagca

SEQ ID NO: 3987 - DNA, 3778 bp, Rattus norvegicus
gctcgctgagctgttactccgagctacctgctggggaaattcacttcgacgtagcctggggtgtcttccaccagtcacagaatcagaaaagttgtcctctctaacaccaaagaggagatttcgctttctggggacaagttcaagacactgaagtgcaaggctgtggtaaattcctggaaagataaaatatgacaaaaagcaacggagaagagcccaggatgggaagcaggatggaaagattccagcaaggggtgcgcaagcggacgctcctggccaagaagaaagttcagaacatcaccaaggaggatgtgaagagctacctgtttcggaatgcctttgtgctactcaccgtcagcgctgtcattgtgggtacaatccttggatttgccctccgaccgtataaaatgagctaccgggaggtcaagtacttctcctttcctggggagcttctgatgcggatgctgcagatgttggtcttacccctgatcatctccagtcttgtcacaggaatggcggccctagatagtaaggcatctgggaagatggggatgcgagctgtggtctattacatgactaccaccatcattgctgtggtgatcggcataatcattgtcatcatcatccaccccggaaagggcacgaaagaaaacatgtacagagaaggtaaaatcgtgcaggtgactgccgcagatgccttcctggatttaatcaggaacatgttcccacccaatctggtagaagcctgctttaaacagtttaaaaccagctatgagaagagaagctttaaagtgcccatccaggccaacgaaacactgttgggcgccgtgatcaacaacgtgtcagaggccatggagactctgacccggatccgggaggagatggtacccgttcctgggtctgtgaatggggtcaatgccctgggcctcgttgtcttctccatgtgcttcggcttcgtgatcggaaacatgaaggagcaggggcaagcgctaagagagttcttcgactctctcaatgaagccatcatgagattggtagcggtgataatgtggtatgcacctctgggcatcctcttcttgatcgcagggaagattcttgagatggaagatatgggtgtgattggggggcagcttgccatgtatacagtgacagtcatcgtcggcctcctcattcatgccgtcatcgtcctgcctctcctctacttcctggtaacccggaagaacccctgggttttcattggagggttgctgcaagcactcatcacagccctggggacctcctcaagttctgccaccctgcccatcactttcaagtgcctggaagaaaacaatggtgtggacaaacgcatcaccagatttgtgcttcccgtgggggccaccattaacatggatgggaccgccctctacgaggctttggccgccattttcatcgctcaagttaacaactttgacctgaattttggacagattataacaataagtatcacagccacagccgcaagcattggggcagctggcattcctcaggccggtctagtcaccatggtcatcgtgctgacatctgtgggcctgcccacggatgacatcacactcatcattgcagtggactggtttctggaccgcctccgaaccaccaccaacgtgctgggtgactccctcggggccgggattgttgaacacttgtcccgacatgaactgaagaaccgagatgttgaaatggggaactccgtgattgaggagaatgaaatgaaaaagccgtatcagctgattgcccaggacaatgaaccagagaaacccgtggcagacagcgaaaccaagatgtagactaacacagaagtgctttcttaagcaccaggtgttggaaactgttctacaatgtgtccatctcccagagctctctctcccagtgagctcctctttcctccctactctgataggattggaaaatgtccaaaaacaaaggagggctctgcagcagccaaaacgtattggttttagccctcatttgaaaattttaaatcatttcgtattattcttaccaagtaagttactacaaacattaccaatttagatgacaaatgatcccttgtgattgttttgtaagtaaaagcattaagcaaatgataggctacaaaaacgttttaaaaccaactttcaaaatgtaaaaatccttcagaacactactgagttttagtcttaaaacatagcaacttgatgagcaattatcagttacccgttggtagctgagaggtttgccctttcttctgactctcatcctgactttatcagcatcagggcaatgccacatgcacacagcacagccgtgaggtggagcagaaagtgaggctccccaatggtcttgagtgagccttgtctcatccctgggcctcagtgttctcatgcagaaaatgagtgacccctagataccataggcctctctagcccagacttttacaacatcaggaaggaccctgcccctgtataacatgaggatttcagacaggacacttaatgggagtggacatttctctctaggggcaggctgcgtgtggctcactagatcctgggtccagaatgtgggttatataagtagacaggtggaaggccatcccgggagaccatccccttggcctgttgttctgttttatcttgttttccaacattaaaagaagcactcccttcttgggtactcttccaaacccaagggaagaaagcctcccaccacctcttcgactgacagtgagatgtttaggaaacaaggagaagactagcagctagcaagtgtgtccatggtcttactacggaacacaaaagagcagaggcggaatagagtacagcccacattacaaaggaggattctttttaagatcagaaaaagttggttttctttaaagactaaaagagagctgaaccttggccttcttctgctggcctaaacgctttgtcttctgttcctaatcaatccccaaagaaacaacacataacatcactcctttcttatttcacagtccagcaaatgatatctctggaacagattcatatctataagctgggtggatggtctcatttccaaaaaaaaaagtttaaaatttggttagtttttcctattttaactggaagttcttaggatgacaaaaccacatactcctttgtacagagatgtctcttgacaaatcattcaagactctcatctagaatggagtttgcttgtgtccctgtctccccctccctaaatgcagatgaatcagcatgaaaataacatcaacgagggtggaagaaaagagggcaaaggaattgttttcaggcgaggctgattttggaaatgttcagaaccatgcatctagagtggcctggctggtgttgtccttgggttcccttgaccactgaacaaattcccagaagtccgctcttccattgttccttcacaatttaccaaaatcagagcttcaacagacatacaaaataagtcttcttttaaacttacagctgtacagagtttcaattaataaagcatatctttaatctgacagttccactgagcgggcctattcctagacaaataggtgatattaacatctgatctaaaggcaaggtgacgtcacttctcttaaacgccaagaaagattaaccaacaatgcaactaatacatcaatcttaatataagacattgagagggaactagaaataatatataagtatcactccactgagttggcataaaacccacagactattgacacgagtttctacctgtcaatcaatgctgtatttacgccgaattc

SEQ ID NO: 3988 - DNA, 3931 bp, Rattus norvegicus
attcggctcgagttcacctggtgctgctttgacttcaggctcttccttctgcccagctccgtcccacccagcagcccgcagagaaaggaggcagctggcaccacactgggctttggagacactgcggggactgtggaccccaccctgctgcacggagctcctgcaaaagcaaacctgagaaccttgggtcctcccagcgcccagccatgggggaactgtgccgcagggactccgcactcacggcactggacgaggagacactgtgggagatgatggagagccaccgccacaggatcgtacgctgcatctgccccagccgcctcaccccctacctgcgccaggccaaggtgctgtgccagctggacgaggaggaggtgctgcacagcccccggctcaccaacagcgccatgcgggccgggcacttgctggatttgctgaagactcgagggaagaacggggccatcgccttcctggagagcctgaagttccacaaccctgacgtctacaccctggtcaccgggctgcagcctgatgttgacttcagtaactttagcggtctcatggagacatccaagctgaccgagtgcctggctggggccatcggcagcctgcaggaggagctgaaccaggaaaaggggcagaaggaggtgctgctgcggcggtgccagcagctgcaggagcacctgggcctggccgagacccgtgccgagggcctgcaccagctggaggctgaccacagccgcatgaagcgtgaggttagcgcacacttccatgaggtgctgaggctgaaggacgagatgctcagcctctcgctgcactatagcaatgcgctgcaggagaaggagctggccgcctcacgctgccgcagcctgcaggaggagctgtatctactgaagcaggagctgcagcgagccaacatggtttcctcctgtgagctggaattgcaagagcagtccctgaggacagccagcgaccaggagtccggggatgaggagctgaaccgcctgaaggaggagaatgagaaactgcgctcgctgactttcagcctggcggagaaggacattctggagcagagcctggacgaggcgcgggggagccgacaggagctggtggagcgcatccactcgctgcgggagcgggccgtggctgccgagaggcagcgagagcagtactgggaagagaaggaacagaccctgctgcagttccagaagagtaagatggcctgccaactctacagggagaaggtgaatgcgctgcaggcccaggtgtgcgagctgcagaaggagcgagaccaggcgtactccgcgagggacagtgctcagagggagatttcccagagcctggtggagaaggactccctccgcaggcaggtgttcgagctgacggaccaggtctgcgagctgcgcacacagcttcgccagctgcaggcagagcctccgggtgtgctcaagcaggaagccaggaccagggagccctgtccacgggagaagcagcggctggtgcggatgcatgccatctgccccagagacgacagcgactgcagcctcgtcagctccacagagtctcagctcttgtcggacctgagtgccacgtccagccgcgagctggtggacagcttccgctccagcagccccgcgccccccagccagcagtccctgtacaagcgggtggccgaggacttcggggaagaaccctggtctttcagcagctgcctggagatcccggagggagacccgggagccctgccgggagctaaggcaggcgacccacacctggattatgagctcctagacacggcagaccttccgcagctggaaagcagcctgcagccagtctcccctggaaggcttgatgtctcggagagcggcgtcctcatgcggcggaggccagcccgcaggatcctgagccaggtcaccatgctggcgttccagggggatgcattgctggagcagatcagcgtcatcggcgggaacctcacgggcatcttcatccaccgggtcaccccgggctcggcggcggaccagatggccttgcgcccgggcacccagattgtgatggttgattacgaagcctcagagcccttgttcaaggcagtcctggaggacacgaccctggaggaggccgtggggcttctcaggagggtggacggcttctgctgcctgtctgtgaaggtcaacacggacggttataagaggctactccaggacctggaggccaaagtggcgacctcgggggactcattctacatccgggtcaacctggccatggagggcagggccaaaggggagctgcaggtgcattgcaacgaggtcctgcacgtcaccgacaccatgttccagggctgcggctgctggcatgcccaccgcgtgaactcttacaccatgaaggatactgccgcgcacggcaccatccccaactactccagggctcagcagcagctcatagccctcatccaggacatgactcagcagtgcaccgtgacccgcaagccatcttctgggggaccacagaagctggtccgcatcgtcagtatggacaaagccaaggccagccctctgcgtttgtcctttgacaggggccagttggaccccagcaggatggagggctccagcacgtgcttctgggccgagagctgcctcaccctggtgccctataccctggtgtggccccatcgacccgcccggccccggcctgtgctcctcgtgcccagggcggttgggaagatcctgagcgagaaactgtgcctcctccaagggtttaagaagtgcctggcagagtacttgagccaggaggagtatgaggcctggagccagagaggggacatcatccaggagggagaggtgtccgggggccgctgctgggtgacccgccatgctgtggagtccctcatggaaaagaacacccatgccctcctggacgtccagctggacagtgtctgcaccctgcacaggatggacatcttccccatcgtcatccacgtctctgtcaacgagaagatggcaaagaagctcaagaagggcctacagcggttgggcacctcagaggagcagctcctggaggctgcgaggcaggaggagggagacctggaccgggcgccctgtctatacagcagcctggctcctgacggctggagcgacctggacggcctgctcagctgtgtccgccaggccatcgccgacgagcagaagaaggtggtgtggacggagcagagcccccgatgatgcaccgtgccccttcccgggactgtgggggcttctgtgtgcctgttaatgcagtcctgttcctcagcccaggccctcttggcacagctgtgggctccttggcacatgaggccggctctccccactggctggggtctaaccttgaaccctcaccacgtgcaggtcacacacagtgaagccacttgtaactgcacacttttctgtggaaacatcttcaccctttaccaggcttggcatggtctgaactggaaaccctgagaatgtttctgcagtaggacaggagggacatcttcccatgccttccctagaaccggaggccccggacttctctggaaaaccgcctgtctgcaggcccgattcaaatctatgggggctgcacttcccttttacattttgatgtgtcaaaggcttttggagtgaccaaaagcacagaggcagcgggtggggcgcctgggtggtccccaaggtcgctgccacccttgcccggggcagaggcataagcccacatatgctgtgacgctggccaccttttctcagcttctgaggctgcgatgcctcaggaactccagtttacagagaccagtgtgtttacttgtaaataaagcctctgggtggtggagacggtactttcagtgggtctgtgccccgtggcccctgtgcctgttcggtgggggtgtcccagagaagcctggcaccagtacccccgtcaa

SEQ ID NO: 3989 - DNA, 167 bp, Rattus norvegicus
aacagcacagcccaagctaggagaactgtgcagcagctgagattggaagcctccatcgaaagaataaaggtctccaaagcatctgcagacctgatgtcatactgtgaggagcatgcccggagcgaccctctgctgatgggcataccgacctcagaaaacccattcaa

SEQ ID NO: 3990 - DNA, 2814 bp, Rattus norvegicus
cgggtcgacccacgcgcccgcgctgagctaggggtgcaccgacgcaccgcgggcggctggagctcggctttgctctcgctgcagcagccgcgccgcccgccccactccgctcagattccgacaccagccccctctggatcgccctcctggactctagcccgggctcttgctccgaccccgcggaccatgctccgggcgccccccggaaaaccgggctgggcgaagagccggcaaagattaggctcacgagcgggggccccacccggccacccagctctccgcccgtgccctgcccggtgtccccgagccgtgtgagcctgctgggccatggagcgcgcgccgcccgacgggctgatgaacgcgtcgggcactctggccggagaggcggcggctgcaggcggggcgcgcggcttctcggctgcctggaccgctgtcctggctgcgctcatggcgctgctcatcgtggccacagtactgggcaacgcgctggtcatgctcgccttcgtggcggattcgagcctccgcacccagaacaacttctttctgctcaacctcgccatctccgacttcctcgtgggtgccttctgcatcccattgtacgtaccctatgtgctgaccggccgttggaccttcggccggggcctctgcaagctgtggctggtggtagactacctactgtgtgcctcctcggtcttcaacatcgtactcatcagctatgaccgattcctgtcagtcactcgagctgtctcctacagggcccagcagggggacacgagacgggccgttcggaagatggcactggtgtgggtgctggccttcctgctgtatgggcctgccatcctgagttgggagtacctgtctggtggcagttccatccccgagggccactgctatgctgagttcttctacaactggtactttctcatcacggcctccaccctcgagttcttcacgcccttcctcagcgttaccttcttcaacctcagcatctacctgaacatccagaggcgcacccgccttcggcttgatgggggccgtgaggctggcccagaacccccaccagatgcccagccctcgccacctccagctccccccagctgctggggctgctggccaaaagggcatggcgaggccatgccgttgcacaggtatggggtgggtgaggcaggccctggtgttgaggctggggaggctgccctcgggggtggcagtggtggaggtgctgctgcctcgcccacctccagctctggcagctcctcaaggggcactgagaggccacgctcactcaaaaggggctccaagccatcagcatcttcagcatccctggagaagcgcatgaagatggtgtcccagagcatcacccagcgcttccggctgtcgcgggacaagaaggtggccaagtcgctggccatcatcgtgagcatctttgggctctgctgggcgccgtacacgctcctaatgatcatccgagctgcttgccatggccgctgcatccccgattactggtacgagacgtccttctggcttctgtgggccaactcggccgtcaaccccgtcctctacccactgtgccactacagcttccgcagagccttcaccaagctcctctgcccccagaagctcaaggtccagccccacggctccctggagcagtgctggaagtgagcagctgccccacccttctgaggccaggcccttgtacttgtttgagtgggcagccggagcgtgggcggggccctggtccatgctccgctccaaatgccatggcggcctcttagatcatcaaccccgcagtggggtagcatggcaggtgggccaagagccctagttggtggagctagagtgtgctggttagctctgccgccacattctccttcaccacacagaagagacaatccaggagtcccaggcatgccttccacctacacacacacacacacacacacacacacacacaccacagtgcagtgccagtgatgtccccttttgcatatttagtggttggtgtcctccctaatgcaaacctcggtgtgtgctcccggctccggccctggcaatgcgtgcgtgcgccctgcatgtgctcacacccgccacacacccgcccgccacacacttgcaacacctcctctctcccagaagagctggggacgatgccctttgctgccactgtctcttgcttaatcccagagcctggctccttatcccccactctcccttcaactctgccccacaaagtgtcgagcgcctcgggaaacttgaagcttctctgctccttccactctggatgttttcaggaagatggaggagaagaaaacacgtctgtgaacttgatgttccttggatgtttaatcaagagagacaaaattgccgaggagctcggggctggattggcaggtgtgggctcccacgccctcctccctcagtgctgcagcttccggctgagccgcgccagctgcttctgcctgccccgcccccaggcttgggacgatggccctgccctgcttgccccgtctgtacaatcagaatttgggggtgggtggttatggggtagagcggctcttcactgtgccctaaaggtcctgaggctcacaggacagtcagcaggagagcaggcaggcccgcgacacctgggaggaatgctttgcctcgtcctgtgtactcacctcaggcttctgcatgctctgctgcccttgtgccctggtgtgctgcctctgccaatgtgaaaacacaataaagtgtatttttttaaaaaaaaaaaaaaaaaaaaaaaaaaaaaaaaaaaaagggcggccgcatacatatgtagtctggtct

SEQ ID NO: 3991 - DNA, 1837 bp, Rattus norvegicus
gtcgacccacgcgtccggaaaaacatttccttctcaagggcagcattccagcacctgcttgcatctctcagccatctttccttgatcctgtctgggaagtgtatctcagtgactccacaatttctctctttgtccttttgttttaaaagtaacactttctataaaatagctaaatgtccttgaaggggtttaatcgtgcaaaaagtaagcaatataatatataatgtacgcaacctttaatgacagtatctattttcttaggggtattattcagataccttcccagatctggatttaactttggtaattgttatctatatagaaaatcaacaatatcaaataaatatttcagtgttctggcataaagtcctcgtgagtaagaactaatgattttggaatttgctttgtgtctattgttatgtccctcatttcatttctgatttttaattcatgtattgtgtctcttgtgcattgttagtttgaggaaggggttgtctctcttgtggatcttctccagaagaagaagaagaagaagaagaagaagaagaagaagaaaaagaagaagaagaagaagaagaagaagaagaagaagaagaagtagaaaagacagctcttgctttccttgactttgtatttttctctttgtttctgaaggcttgatttcaaccctgagttcatttcctttcatcagatcctaccagactctctatgggatgaggctttgcctcactttgggcaggctggatgatgacattcagttgacaatgtggacatctcaagacagtcactggacaatggctgacacacttgtctgaagactggaaatgtttctctatcttggagaggaaagaaggaccctccaactacactgaactctaaggaaggttattcagatctcaagactggttaaccccccaaaactgaccctgctaccagttgactgtgattataaagaagccaacagccaacagctgcacagcagagagatgggggagatgctgggagagaaacatcatcccctgaaactgccctaagcgagaagcaggctaagaaggaaaaagagaggctgatagaagagctgcagctcattaccgaggagagaaatgacctgagagatcgcctgaggtttctgacagagagatccatgaacaacaggccacacttcaggccaaatccatattatgaagacctggagagaatggaggaggcagtcatgtcaattctgcacaacttagagatggagaacactgagatccatgagaacaaccataagctgaagaaggagatgaccttctctagaaacctgctcagccagctcctgatggagaacacttttaggaagaagttggtcccactgaagcaggagagcaaggaggtacatcttgattgggtaccgatccagaaatatttggttgaattcaacaagatcgataaagaccagcaacctccagaccccgcatcatctggtctcaaaaagtacaagagagctgaaattggacacacactagtaagagagcttcctgaagaataagttgctttctcaggagtccctgatgaccaacatcctgaatgaaaacaccacttgagagacaacttgggggactgcctttcattatgtgtgctagaggagaaatagcaatacatctgtgcttctaaatattcctaaatgttcttgttactatttttcacttttcaaatactttaaaacatttatatttattcattttcatcctctgtctttgtaaaacgtatttcttatgaataaaaattgaattctatctcctgaaaaaaaaaaaaaaaaaaaaaaaaaaaaaaaaaaaaaaaaaaaaaaaaaaaa

SEQ ID NO: 3992 - DNA, 1475 bp, Rattus norvegicus
gtcgacccacgcgtccgcccacgcgtccgcccacgcgtccgcccacgcgtccggttggtcagccggcgactgacaggggcgcgagcccgggcacctctgcttgcgagtctcctcgaggcttggtgccgccagggcaggaccacctcctcctactccgctttctcggagccgtcgcgtgtgcgggcgctggtctatggcaaccacggggatccagccaaggtcatccactataaaagcagaacaatagtctgcaagctattgaaatgggatggaagctggccggcctataaagcacttggcagggagcctggctgaacactcactgactgaagaacctggagctcactgctgtggaaggatctgacgtccatgtgaagatgctggcagcccctatcaatccatctgacataaatatgatccaagggaactatggcctccttcccaagctgcctgctgttggagggaatgaaggtgttggacaggtgatagcagtgggcagcagtgtgtctggattgaagccaggagattgggtgatcccagcaaatgctggtttgggaacctggcggactgaggcggtgttcagtgaggaagcgctgattggagtccctaaggacatccctctccagagtgctgccaccctaggtgtcaacccctgcacagcctacaggatgttggtggactttgaacagctacaaccaggggactctgtcatccagaatgcgtccaacagtggagtagggcaagcagtcattcagatcgcctcagcccttggcctaaagaccatcaacgtgatccgagacagacctgacatcaagaagctaactgacagactgaaggatctaggagctgattatgtcctcacagaggaggagataaggatgcccgagaccaaaaacatcttcaaggacctgccgctgccccgactggctctcaactgtgtcggtgggaagagttccacagagctgctccggcacctagcgcccggaggaaccatggtgacctatggaggaatggccaagcagcctgtaacagcctctgtgagtatgctcatttttaaggacctcaaacttcgtggcttttggttgtcccagtggaagaagaaccatagtccagatgagttcaaggagctgattctcattctctgcaacctcatccgccaaggccagctcacagcccctgcctggtccgggattccactgcaggactaccagcaggctttggaagcctccatgaagccttttgtgtcttcgaagcagattctcactatgtgattactccagaggaccaggaggaaagcaggagaggcaggccagcaagattggctggctgctggccctccatgaggactccagactgcctcaccctcactgcctcttcctaccaggagggtgggaggccaaccccagggtccctaataaaccctggacttcccaagtaaaaaaaaaaaaaaaaaaaaaaaaaaaaaaaaaaaaaaa

SEQ ID NO: 3993 - DNA, 1791 bp, Rattus norvegicus
gtcgacccacgcgtccggctgatcgaggctgaccttccaaacctagatggttgctggtcctgcacatgagtggaaatatattcatggagaaacttccatgatgcacagtatctgccgttcttcagtcctctgtctttctttgtcattcagttctgggcattgagcagccgcagtcacagctgcaggacctctctggaccagctcagtcgcagactgcgcaaccaccagaccactgcggcaaacaagcccagctgagccaagcaatagcgatggccgaccccgagaagcagggacccgctgagagccgcgccgaggacgaggtaatggagggcgctcagggtggcgaggatgcagcaaccggtgacagtgccactgcacccgcggccgaggagccccaggcccccgcggagaatgcgcccaagcccaaaaatgactttatcgagagcttgcccaatcccgtcaagtgccgggttctggcgctcaaaaagctgcagaagcgctgcgataagatcgaggcgaaatttgacaaggaattccaggctctggagaagaagtacaatgatatctacaagcccctactcgccaagatccaggaactcaccggagagatggagggctgcgcgtggaccctggagggagaggatgatgaagacgacgaggaagaagatgaggaggaggaagaagaggaggctgcagctggcgcaactgggggtcccgactctgccgagaagtgagcacagcagctgacagacttgagactgatgaaaggttgtcagttagatgggaattaaagtgcgtcacacgttgaaatccattcatcacactacaccttaacacccaagctaagacagaactcttctcaatgcttaattcttcagtttctttacatttcccagcgcagaggaagaggaacccaagaacgacgtcatctttaagacttttgcttttgcaaacccagacatcagctttacactccagaggagacaaggcatggaggaaggctggactgacagcatttactgtttatgtggctagaaaaactgccatttcaagttgtgaaaaatgttttgaatatttgaatttacagaaagaacacggttccaaaaataagggtgtattccatgtataatattgtcaacacgtgttcatctgtaatggtctcatgttatctgttttcttggtagtgtttgtttacaaaatcgtaaaaattaccccaaatgttttaagtattaaattcccttatagcattttagaaatataatttacttgaagagatgtagaatgtagcaattctgtaaagcatgtgtatccagtgttgcctagtttgactttgtgaagtctttttgtcttgtagcttttagcaagtagctgtgaaaaccatcagaactcctcaatgaagctaatgtttggaaaaaagtatatacttgaagaaccaacccaagtgtgtatccccaaccccagctcagaaataggaaggatttaagtttgcttgtattagctgtgccttcattattttgctatgtaaatgtgacttattaaatggtgcataatcaaattttattgcttgaggacaaaaatggcataaagggaagacttttgggaaaaagacatttaatgtaaaggcctttagcttctttgtgggttttgaactatctgtgaatcaatgttctgtaaagaaacacaaacgtaaagttgtttaccactgtggtgttaacaaaacagtattttcaaaaataaaaaaaacttgttattctgaaaaaaaaaaaaaaaaaaaaaaaaaagggcggccgc

SEQ ID NO: 3994 - DNA, 2046 bp, Rattus norvegicus
gtcgacccacgcgtccggtttttattactttaattattgttataaaaagcctgccatttttaatatgtggtttggggaatttttgtttgtttttcctgtttgggggtttcctttgttttttgttttttttctggatttaaaaaaaaaaaaaacaaaaccttgcttttagtgtttgtactgctgctggtcagaatgttaaaacgctgaagttctaggaaataggagagctcgcctgtgcagcattccacacagcagggctaagggggcacctaggtctggtcagctgtccagggcatggtgacccatgagcagcaggaacttggcacagctctggcagctgagctcctgagacaggcacagctctggcagagagctccacactgggggatctcccttcccagtttcaagtcctcagtcagggctgaccaacttgaaagagatcctcttcctgccagagcctgtgactatcctccatcacggggggggggagaggaggcagagcctacccttggccaccaggctcaatggctgtacagagcagctgccttgcagtctgtccccaccctgctctacccccaaccccttgctctgcctgccaagagtcttctagacaaggaagtgccaccagtactgtcagcagtcaacaaagcaccttcctctgcctacagccagtcagagatggtccaaaggagagcagaggctgcacaccctgggcaaagcactgcccagttttccagttaagtgctgcgtgcgctcagtgttcctttcccaggctaagaacacaccgatgactggaagcttttgctaatctgcttggcaatggcttctgggaaaggtaggacccataacttaagacatgcacagtctctcccaccgtcccacaggagttcccctggctgagtatacgatccaaagcaagccatgccctcccaggtcagtctggggcacaagctgagccgatgactagcaatgcctatggcctttcccttgcctgccctcctccagcatctccgcctgtggagaccgagtacccccgtgctcatacgtaaagtgacaatcagaaccaggtacaagccaggaaagtggcagctgactgccactcagaccacgtggcgcttttcccatcccacggtctcagagctggacgaggctaaatagaacacagtagcccccccttccaggtactgcaccgtccctggagatccctctgacccttccctgctacagatctgctctgctctaggctggactgtggaattagcatgtacatggaaatcccagtccttgaccatggcttcccactccacctgcaagtgatagatgccatctgtcctgggtgtctgatcagacccgccaccatcacagatgagtgaccaagaggggggctgtcaacacctcggtacatggtgatcttaaaaccacccaactgcaccatcgcaccagactgtacctctggggcacccagaacaagccccaccctaacagtgggggccacagccaggcttccagcactgagtctcaaccagctaagttgaatggcaaactcgatgcctccgcccccacccctcagctgcccaggccccagcatgcagatggcctgcacagcaggctcagcacctctgaggtgtgcattagccacttaacagcagcagtctgtactcaagtacaaaagcttttacttcacgacttgccgtagcctgtccccactgtctgatccagtgcttaacttcaaccctagagtctgccttgaccctgaggaggcatctcactggtttcgtacttgtgtgtgccctatgcctcactgctggggccgcgcacccagacccagccaggagggaggatgggtgcctcggtcgctctgggggcagtttagatgctgtgaaattaaacccgttctaagtgtacttgtttgaattaactgtattgtaatattatttgttgaatgtagtaattaggtatttatgaatatattgctgtaatttctgacatcccaaaaataaaatcttcctaaatcatgttaaaaaaaaaaaaaaaaagggcggccgc

SEQ ID NO: 3995 - DNA, 1911 bp, Rattus norvegicus
atgaaccactgccctcgcaggtgccggagcccgttggggcaggcagctcgatctctctaccagttggtaactgggtcgctgtcgccagacagcgtagaggatgagtttgaattatccacggtgtgtcaccgacctgagggcctggaacaactccaggaacagaccaagttcacacgcagagagctgcaggtcctgtaccgaggcttcaagaacgaatgccccagtgggattgtcaacgaggagaacttcaagcagatttattctcagttctttccccaaggagactccagcaactatgctacttttctcttcaatgcctttgacaccaaccacgatggctctgtcagttttgaggactttgtggctggtttgtcggtgattcttcgggggaccatagatgatagactgagctgggctttcaacttatatgacctcaacaaggacggctgtatcacaaaggaggaaatgcttgacattatgaagtccatctatgacatgatgggcaagtacacataccctgccctccgggaggaggccccaagagaacacgtggagagcttcttccagaagatggacaggaacaaggacggcgtggtgaccatcgaggaattcatcgagtcttgtcaacaggacgagaacatcatgaggtccatgcagctctttgataatgtcatctagctccccagggagaggggttagtgtgtcctagggtgaccaggctgtagtcctagtccagacgaacctaaccctctctctccaggcctgtcctcatcttacctgtaccctgggggctgtagggattcaatatcctggggcttcagtagtccagatccctgagctaagtcacaaaagtaggcaagagtaggcaagctaaatctgggggcttcccaacccccgacagctctcaccccttctcaactgatacctagtgctgaggacacccctggtgtagggaccaagtggttctccaccttctagtcccactctagaaaccacattagacagaaggtctcctgctatggtgctttccccatccctaatctcttagattttcctcaagactcccttctcagagaacacgctctgtccatgtccccagctggcttctcagcctagcctttgagggccctgtggggaggcggggacaagaaagcagaaaagtcttggccccgagctagtggttaggtcctaggaattggctggagtggaggccagaaagcctgggcagatgatgagagcccagctgggctgtcactgcaggttccagggcctacagccctgggtcagcagagtatgagttcccagactttccagaaggtccttagcaatgtcccagaaattcaccatacacttctcagtgtcccggatgatgcctgtcaaggtcccacctcccctccggctgttctcatgacagctgtttggttctccatgacccctatctagatgtagaggcatggagtgagtcagggatttcccgaacttgagttttaccactcctcctagtggctgccttaggggaatgggaagaacccagtgtgggggcacccattagaatctttgcccggttcctcacaatgccctagggtcccctagggtacccgctccctctgtttagtctacccagagatgctcctgagctcacctagagggtagggacggtaggctccaggtccaacctctccaggtcagcaccctgccatgctgctgctcctcattaacaaacctgcttgtctcctcctgcgccccttctcagtcagccagggtctgaggggaagggcctcccgtttccccatccgtcagacatggttgactgctttgcattttgggctcttctatctattttgtaaaataagacatcagatccaataaaacacacggctatgcacaaaaaaaaaaaaaaaaaactcgagt

SEQ ID NO: 3996 - DNA, 1512 bp, Rattus norvegicus
ctcggcgttgctgggtgggacttggctcttctgccatgggcaagcagaatagcaagctgcggccagagatgctgcaggacctgcgagagaacaccgagttctctgagctggagcttcaggagtggtacaagggcttcctgaaggactgcccgactggcatcctcaacgtggatgagttcaagaagatctacgccaacttcttcccctacggcgatgcctccaagttcgccgagcatgtcttccgcacttttgacaccaacagcgacggcaccatcgacttccgggagttcatcatcgctctgagcgtgacctcgcgtggccgcctggagcagaagctcatgtgggccttcagcatgtacgacctggacggcaatggctacatcagccgggaggagatgctagaaattgtgcaggccatttacaagatggtttcgtccgtgatgaagatgcctgaggatgagtctaccccggaaaagaggactgagaaaatcttccgccaaatggacacaaacaatgacggcaagctgtcactggaggagttcatccgcggggccaaaagcgacccatcgatcgtgcgcctgctgcaatgcgatcccagcagcgcttcccagttctgagctgagaggagccagctcgcctccctgccttcaccggccctccggctctcagcttcctctccctcgtgtctatccaggctggggaatccccttctggggtctgcactgtgggggggcctctggagaagcgaaccctgcaaggaaggggctaagcaaggcagccgttagtccccacggcctaagaggcagaatctcccttagtgggaccgagattacccccgggtcaggttctgtattctttccccagacagctggatcaccttccacccacccacaacccggaggctcttccacaacacggggaagagggtccttcttgggtggtcctcagcctggagggaggtggggatttgtgccaaggtgaagagtctttttgtttgtttggtggggagacccggaggattactgggctgtgggactttgaagaagttccctgatctacttccctgcagaagaacacttcctgtcccagctcttgctggctggaggccatggtaaaaagaagatctcccaggattccaactgggggtccccaaacccagcctgcctctttgcacttggataaccacagatttacccgtctgtcctctgtatttctctctccttcccccacctcacacacgcacgggcgcgcgcgcacatgcgcgcgcaacacacacacacacacacacacgcacgcatatgcacgcacacatgcacacgcacccgcgcacacagaggccggcagacagatgagcagagcccctccacagcgttctgtgtgggaaagaagtgcaggcccctggccaagccccatgtccctctgcatgcgccacacggagcgtctttgttctttttaataacttcaaaataaagtcttgtttcagtgaaaaaaaaaaaaaaaaagggcggccgc

SEQ ID NO: 3997 - DNA, 1334 bp, Rattus norvegicus
ctccccagggagaggggttagtgtgtcctagggtgaccaggctgtagtcctagtccagacgaacctaaccctctctctccaggcctgtcctcatcttacctgtaccctgggggctgtagggattcaatatcctggggcttcagtagtccagatccctgagctaagtcacaaaagtaggcaagagtaggcaagctaaatctgggggcttcccaacccccgacagctctcaccccttctcaactgatacctagtgctgaggacacccctggtgtagggaccaagtggttctccaccttctagtcccactctagaaaccacattagacagaaggtctcctgctatggtgctttccccatccctaatctcttagattttcctcaagactcccttctcagagaacacgctctgtccatgtccccagctggcttctcagcctagcctttgagggccctgtggggaggcggggacaagaaagcagaaaagtcttggccccgagccagtggttaggtcctaggaattggctggagtggaggccagaaagcctgggcagatgatgagagcccagctgggctgtcactgcaggttccggggcctacagccctgggtcagcagagtatgagttcccagactttccagaaggtccttagcaatgtcccagaaattcaccgtacacttctcagtgtcttaggagggcccgggatccagatgtctggttcatccctgaatcctctccctccttcttgctcgtatggtgggagtggtggccaggggaagatgagtggtgtcccggatgatgcctgtcaaggtcccacctcccctccggctgttctcatgacagctgtttggttctccatgacccctatctagatgtagaggcatggagtgagtcagggatttcccgaacttgagttttaccactcctcctagtggctgccttaggggaatgggaagaacccagtgtgggggcacccattagaatctttgcccggctcctcacaatgccctagggtcccctagggtacccgctccctctgtttagtctacccagagatgctcctgagctcacctagagggtagggacggtaggctccaggtccaacctctccaggtcagcaccctgccatgctgctgctcctcattaacaaacctgcttgtctcctcctgcgccccttctcagtcagccagggtctgaggggaagggcctcccgtttccccatccgtcagacatggttgactgctttgcattttgggctcttctatctattttgtaaaataagacatcagatccaataaaacacacggctatgcacaaaaaaaaaaaaaaaaaactcgag

SEQ ID NO: 3998 - DNA, 1403 bp, Rattus norvegicus
gtcgacccacgcgtccgagcggttcttgggggcgcagggggcgcgtcgccctctgcccccgccggcaccctggccatgacaggcaagtcggtgaaggacgtggatcggtaccaggcggtcctggccaacctgctgctggaggaagataacaagttctgtgctgactgccagtccaaagggccgagatgggcctcctggaacatcggcgtgtttatctgcattcggtgtgctggaatccacaggaatctgggggtgcatatatccagggtaaaatcagtgaacctcgaccagtggactcaagaacagattcagtgcatgcaagagatggggaatggaaaagcaaaccgactctatgaagcctaccttcctgagacctttcggcgacctcagatagacccagctgttgaaggatttattcgagataaatatgagaagaagaaatatatggaccgaagtctggacatcaatgtccttaggaaagagaaggatgataagtggaaacgaggaagtgagcctgctccagagaaaaagatggaacccgttgtctttgagaaagtaaaaatgccacagaaaaaagaagacgcacagctacctcggaaaagctccccgaaatccgcagcccctgtcatggacttgttgggccttgatgctcctgtggcctgctctattgcaaacagtaagaccagcaatgccctagaaaaggatctagatcttttggcctctgttccatccccttcttcagtttccagaaaggctgtaggttccatgccaactgccgggagtgctggttctgtccctgaaaacctgaacctatttccagagccggggagcaagtcagaagaaacaggcaagaaacagctctccaaggactccatcctgtcactgtatggatcccagacgcctcaaatgcctgcccaagcaatgttcatggctcctgctcagatggcatatcccacagcgtaccccagcttccctggggttacaccacctaacagcatcatggggagcatgatgcccccaccagtcggcatggtagctcacccaggagcctctggaatggtcacccccatggccatgcccgcaggctatatggggggcatgcaggcttccatggcgggcatgccgagcgggatgatgaccactcagcaggccggctacatggcgagcatggcagccatgccccagactgtgtacggcgttcagccagctcagcaactgcagtggaacctcactcagatgacccagcagatggctgggatgaacttctacggagccaacggcatgatgagctatggacagtcaatgggcggtggaaatggccaggcagccaatcagactctcagtcctcagatgtggaaataaaagcaaagcacctgtaaaaaaaaaaaaaaaagggcggccgc

SEQ ID NO: 3999 - DNA, 4240 bp, Rattus norvegicus
ccacgcgtccgccggatcagagagtgctccgagctgggttgccccactgtgcttgtatctgcactctccaacactaggcatcattgacatgttaaagcttagccaaatagaattgttctttgtcattctttttttaacttttacttattcattaggatgatttcataatatatttcctggtttagaggaaacaggaacaatggctaccgagagtactccctcagagatcatagaaagagaaagaaaaaagttgcttgaaatccttcaacatgatcctgattctatcttagacacgttaacttctcggaggctgatttctgaggaagagtatgagactctggagaatgttacagatctcctgaagaaaagtcggaagctgttaattttggtacagaaaaagggagaggcgacctgtcagcattttctcaagtgtttatttagtacttttccacagttagctgccatttgcggcttaaggcatgaagttttaaaacatgagaatacagtacctcctcaatctatgggggcaagcagtaattcagaagatgctttttctcctggaataaaacagcctgaagcccctgagatcacagtgttcttcagtgagaaggaacacttggatttggaaacctctgagtttttcagggacaagaaaactagttatagggaaacagctttgtctgccaggaagaatgagaaggaatatgacacaccagaagtcacattatcatattcagttgagaaagttggatgtgaagttccagcaactattacatatataaaagatggacagagatatgaggagctagatgattctttatacttaggaaaagaggaatatctaggatctgttgacacccctgaagatgcagaagccactgtggaagaggaggtttatgatgacccagagcacgttggatatgatggtgaagaggacttcgagaattcagaaaccacagagttctctggtgaagaaccaagttatgagggatcagaaaccagcctttcattggaggaggaacaggagaaaagtatagaagaaagaaaaaaggtgtttaaagatgtcctgttatgtttgaacatggatagaagcagaaaggttctgccagattttgttaaacaattctccttagatcgaggatgtaagtggacccctgagagtccaggagacttagcctggaatttcctgatgaaagttcaagcacgagatgtgacggctagggattcaatcctcagtcacaaggttctggatgaagatagcaaggaggatttgctggctggagtggagaatttggaaattcgagacatacaaaccattaatccccttgacgtgctttgtgccaccatgctgtgttcagatagctctttgcaacgccaagtcatgtcaaacatgtatcagtgccagtttgctcttcccctgctactgccagatgcagaaaacaacaaaagcatcttaatgctgggggccatgaaagacattgtgaagaagcagtcaacacagttttcaggggggcctacagaggatacagaaaagtttctgactctcatgaagatgcctgtcatctcttttgtgcgtctaggatactgtagcttctctaagtccagaatcctcaacacacttctcagccctgcccagttgaaattacacaaaatctttcttcatcaagatttgcctcttttggtgcttccccggcaaatctctgatggcctggttgagataacatggtgttttcctgatagcgatgatagaaaggaaaacccctttttccaaaagcctgttgctctggctaatctccgtggaaatctagaaagtttttggactcagtttggttttttgatggaagtttcttcagctgtgttttttttcactgactgtttaggtgagaaggaatgggacttgctaatgtttttaggagaggctgccattgaaagatgctactttgttctcagttcccaagccagggagagtgaagaggctcaaatttttcagaggatactgaacttgaagccagcacagctactgttttgggagaggggagatgctggggatagaaggaagaacatggagggccttcaagctgccctccaggaagtgatgttctcttcttgcctcagatgtgtgtctgtggaggatatggccgccctggccagggagctggggattcaggtagatgaagactttgaaaacactcagagaattcaagtttcctctggagaaaacatggctgggacagctgaaggtgagggtcagcaaagacacagtcagctaaaaagctcatctaaaagccaggctctaatgccaattcaagagcctgggactcaatgtgagctcagccagaatcttcagaatctctatggtaccccagtattcaggcctgttctagagaactcctggctctttccaaccagaattggaggtaactttaaccatgtttccttgaaagcctcctgggttatgggccgcccctttgggtcagagcagaggcctaagtggttccatcctttgccttttcagaatgcaggggcccagggccgaggtaaaagttttggtattcaatccttccatccccagatattttattcaggtgaaagattcatgaaattttccagagttgctcggggatgtcactcgaatggaacatttgggagactgccaagacccatttgtcagcatgtacaggcctgccctgagagaccacaaatgatgggaactcttgaaaggtctagggcagtagcctccaagataggtcactcctattccctggattcacagccagcaagagcagtagggaagccatggcctcagcaagcttgcaccagggtaacagagttaactgaagcaactggaaaactgataagaacatcccatattggaaagcctcaccctcagtcctttcaaccagcagcagccacacaaaaactaagacctgcttctcagcaaggagtccagatgaagacacaaggtggggcttcaaatccagctctccaaatagggtcccatcccatgtgcaagagctctcagttcaaatccgatcagtccaacccatccacagtcaaacactcccagcctaaacccttccattctgtgccctctcaacctaaatcctctcagacaaaatcctgtcagtcccagccctcccaaactaaaccttctccatgcaaatctactcagcctaagccaagccagccctggcctccccagtctaagccttctcagcccagaccccctcaacctaagtcatcctcaaccaatccttcacaagctaaggcacaccactcaaaagcagggcagaagaggggagggaagcattaaagagctaactccagagatctataaagcatatcctttacccaggccattcctatcatatagtaagcagaagagttgccatgaaagtaaaagactactgtcattagcatgtaaaacaaagaaagatatacatgaccgaattggatatctttgtttgtttgtttgagacagagtttcactcttgttgcccaggctggagtgcaatggcacgatctcggctcaccgcaacctctgcttcctggcttaaagtgattctcctgcctcagcctctcgagtagctgggattacaggcatgcaccaccacacccagctaattttgtatttttagtagaggcagggtttctccatgttggtcaggctggtcttgaactcccgacctcaggtgatccgcccacctaggcctctcaaagtgttgggattacgtgtgtaagccacagtgcccagcccgaattggatatctttaagatatctgtaagtgttatatccctaaccaagaagaaaaatatgaaaataattaagactagaatcaagcagtagataattgaatccaatcttgggtattattagataatgtataacttgcacccagggaatgggggtctatgagacaaccccacttggagaagaatggggttagggtctctaattgcaaagtgactgtacaataggacgaaagttgcctctgtgtctgagaaagtatcttagttgttggctgctccagaggtatctttgtcaaaagcttctggttcaatatcagccactgagcagataaccctgcttatttggtgtggttaaatcaactagcttctgctaatagccccaatttgcttgaatgggaaaactctctcatttgacccttataggtagaaataatgaattaacaaccaataaaattaatcatttggcattaaaaaaaaaaaaaaaaaaaaa

SEQ ID NO: 4000 - DNA, 5100 bp, Rattus norvegicus
tgggagccagcagcccgggggctccactctgggttctgaaagcccattccctgctctgcggctcctcccaccccacctcttctcagccttgcagctcaagggttgatctcaggagtccaggacccaggagagggaagaatctgaggaacacagaacaagatggctggcggagcctggggccgcctggcctgttacttggagttcctgaagaaggaggagctgaaggagttccagcttctgctcgccaataaagcgcactccaggagctcttcgggtgagacacccgctcagccagagaagacgagtggcatggaggtggcctcgtacctggtggctcagtatggggagcagcgggcctgggacctagccctccatacctgggagcagatggggctgaggtcactgtgcgcccaagcccaggaaggggcaggccactctccctcattcccctacagcccaagtgaaccccacctggggtctcccagccaacccacctccaccgcagtgctaatgccctggatccatgaattgccggcggggtgcacccagggctcagagagaagggttttgagacagctgcctgacacatctggacgccgctggagagaaatctctgcctcacacctctaccaagctcttccaagctccccagaccatgagtctccaagccaggagtcacccaacgcccccacatccacagcagtgctggggagctggggatccccacctcagcccagcctagcacccagagagcaggaggctcctgggacccaatggcctctggatgaaacgtcaggaatttactacacagaaatcagagaaagagagagagagaaatcagagaaaggcaggcccccatgggcagcggtggtaggaacgcccccacaggcgcacagcagcctacagccccaccaccacccatgggagccttctgtgagagagagcctctgttccacatggccctggaaaaatgaggattttaaccaaaaattcacacagctgctacttctacaaagacctcaccccagaagccaagatcccctggtcaagagaagctggcctgattatgtggaggagaatcgaggacatttaattgagatcagagacttatttggcccaggcctggatacccaagaacctcgcatagtcatactgcagggggctgctggaattgggaagtcaacactggccaggcaggtgaaggaagcctgggggagaggccagctgtatggggaccgcttccagcatgtcttctacttcagctgcagagagctggcccagtccaaggtggtgagtctcgctgagctcatcggaaaagatgggacagccactccggctcccattagacagatcctgtctaggccagagcggctgctcttcatcctcgatggtgtagatgagccaggatgggtcttgcaggagccgagttctgagctctgtctgcactggagccagccacagccggcggatgcactgctgggcagtttgctggggaaaactatacttcccgaggcatcctttctgatcacggctcggaccacagctctgcagaacctcattccttctttggagcaggcacgttgggtagaggtcctggggttctctgagtccagcaggaaggaatatttctacagatatttcacagatgaaaggcaagcaattagagcctttaggttggtcaaatcaaacaaagagctctgggccctgtgtcttgtgccctgggtgtcctggctggcctgcacttgcctgatgcagcagatgaagcggaaggaaaaactcacactgacttccaagaccaccacaaccctctgtctacattaccttgcccaggctctccaagctcagccattgggaccccagctcagagacctctgctctctggctgctgagggcatctggcaaaaaaagacccttttcagtccagatgacctcaggaagcatgggttagatggggccatcatctccaccttcttgaagatgggtattcttcaagagcaccccatccctctgagctacagcttcattcacctctgtttccaggagttctttgcagcaatgtcctatgtcttggaggatgagaaggggagaggtaaacattctaattgcatcatagatttggaaaagacgctagaagcatatggaatacatggcctgtttggggcatcaaccacacgtttcctattgggcctgttaagtgatgagggggagagagagatggagaacatctttcactgccggctgtctcaggggaggaacctgatgcagtgggtcccgtcccttcagctgctgctgcagccacactctctggagtccctccactgcttgtatgagactcggaacaaaacgttcctgacacaagtgatggcccatttcgaagaaatgggcatgtgtgtagaaacagacatggagctcttagtgtgcactttctgcattaaattcagccgccacgtgaagaagcttcagctgattgagggcaggcagcacagatcaacatggagccccagcatggtagtcctgttcaggtgggtcccagtcacagatgcctattggcagattctcttctccgtcctcaaggtcaccagaaacctgaaggagctggacctaagtggaaactcgctgagccactctgcagtgaagagtctttgtaagaccctgagacgccctcgctgcctcctggagaccctgcggttggctggctgtggcctcacagctgaggactgtaaggaccttgcctttgggctgagagccaaccagaccctgaccgagctggacctgagcttcaatgtgctcatggatgctggagccaaacacctttgccagagactgagacagccgagctgcaagctacagcgactgcagctggtcagctgtggcctcacgtctgactgctgccaggacctggcctctgtgcttagtgccagccccagcctgaaggagctagacctgcagcagaacaacctggatgacgttggcgtgcgactgctctgtgaggggctcaggcatcctgcctgcaaactcatacgcctggggctggaccagacgactctgagtgatgagatgaggcaggagctgagggccctggagcaggagaagcctcagctgctcatcttcagcagacggaaaccaagtgtgatgacccctattgagggcctggatacgggagagatgagtaatagcacatcctcactcaagcggcagagactcggatcagagagggcggcttcccatgttgctcaggctaatctcaaactcctggacgtgagcaagatcttcccaattgctgagattgcagaggaaagctccccagaggtagtaccggtggaactcttgtgcgtgccttctcctgcctctcaaggggacctgcatacgaagcctttggggactgacgatgacttctggggccccacggggcctgtggctactgaggtagttgacaaagaaaagaacttgtaccgagttcacttccctgtagctggctcctaccgctggcccaacacgggtctctgctttgtggtgagagaagcggtgaccgttgagattgaattctgtgtgtgggaccagttcctgggtgagatcaacccacagcacagctggatggtggcagggcctctgctggacatcaaggctgagcctggagccgtggaagctgtgcacctccctcactttgtggctctccaagggggccatgtggacacatccctgttccaagtggcccactttaaagaggaggggatgctcctggagaagccagccagggtggagctgcatcacatagttctggaaaaccccagcttttcccccttgggagtcctcctgaaaatgatccataatgccctgcgcttcattcccgtcacctctgtggtgttgctttaccaccgcctccatcctgaggaagtcaccttccacctctacctgatcccaagtgactgctccattcggaaggaactggagctctgctatcgaagccctggagaagaccagctgttctcggagttctacgttggccacttgggatcagggatcaggctgcaagtgaaagacaagaaagatgagactctggtgtgggaggccttggtgaaaccaggagatctcatgcctgcaactactctgatccctccagcctgcatagccgtaccttcacctctggatgccccgcagttgctgcactttgtggaccagtatcgagagcagctgatagcccgagtgacatcggtggaggttgtcttggacaaactgcatggacaggtgctgagccaggagcagtacgagagggtgctggctgagaacacgaggcccagccagatgcggaagctgttcagcttgagccagtcctgggaccggaagtgcaaagatggactctaccaagccctgaaggagacccatcctcacctcattatggaactctgggagaagggcagcaaaaagggactcctgccactcagcagctgaagtatgaacaccagcccttgacccttgagtcctggctttggctgacccttccttgggtctcagtttctttctctgcaaacaagttgccatctggtttgccttccagcactaaagtaatggaactttgatgatgcctttgctgggcattatgtgtccatgccagggatgccacagggggccccagtccaggtggcctaacagcatctcagggaatgtccatctggagctggcaagacccctgcagacctcatagagcctcatctggtggccacagcagccaagcctagagccctccggatcccatccaggcgcaaagaggaataggagggacatggaaccatttgcctctggctgtgtcacagggtgagccccaaaattggggttcagcgtgggaggccacgtggattcttggctttgtacaggaagatctacaagagcaagccaacagagtaaagtggaaggaagtttattcagaaaataaaggagtatcactgctcttttagaatttgtctagcagactttccagtttttaccagaaaacccctataaattaaaaattttttacttaaatttaagaattaaaaaaatacaaaaaagaaaaaatgaaaataaaggaataagaagttaaaaaaaaaaaaaaaaaaaaaaaaa

SEQ ID NO: 4001 - DNA, 2168 bp, Rattus norvegicus
gaggctggctctgcgcctgcgcggtgccgaggggacgggtcggactcagaaatggcggcgtccatgttcttcggccggcagttggccgcggccgccctgaggagccaccggtcgcagactacagtgcgagccacggcccaggctctgggaagttctggattgtttaacaagcatggattccaaatgcagcagcagcagcagcagcagaggagtctctcactgcatgaatacttgagtatggaattactgcaagaagcgggcgtctctgtccccaaaggcttcgttgcaaagtcatcagatgaagcttatgcaatcgccaaaaagctagggtcaaaggatgttgtgataaaggcacaggttttagctggcggcagaggaaaaggaacgtttacaagtggcctcaaaggaggagtgaagattgttttctctccagaagaagcaaaagctgtttcctcacagatgattgggcaaaaattgattaccaagcaaactggagcaaagggcagaatatgcaatcaagttttggtctgtgagcgaaaatatcccaggagagaatactactttgcaataacaatggagaggtcatttcaaggccctgtactgataggaagttcacaaggtggggttaacattgaagatgttgctgctgagaatcctgaagccattgtaaaggagcctgttgatataattgaaggcgtcaaaaaggaacaagctgtgacacttgcaaagaagatgggatttccttctaacattgtggactctgcagcagaaaacatgatcaagctttataacctttttctgaagtatgacgcaactatggtagaaataaacccaatggtagaagatgctgatggaaaggtgttgtgcatggatgcaaagatcaattttgattcaaattcagcctatcgccagaagaagatctttgctcttcaggactggagccaggaggacgagagggacaaagacgcagctgatgcagatattaactatattggcctcgacgggaacataggatgtctagtaaatggtgctggcttggctatggccacaatggatataataaagctacacggagggactccagccaacttccttgatgttggtggaggcgccacagtccatcaagtaacagaagcatttaaactgatcacttcagataaaagggtgcaggctattctggtcaacatctttggaggaatcatgagatgtgatattattgcacaaggaatagtcatggcagtaaaagatctagaaattagaatacctgttgtggtacggttacaaggtacacgagttgatgatgctaaggcactaattgcagacagtggtcttaaaattcttgcttgcgatgatttggatgaagctgctaaaatggttgtaaagctctctgaaatcgtgaccttagccaaagaagcccacgtggatgtgaagtttcagttgccaatatgagcaaaaccttggtgaatggcttcgggtattaatgtgctgtaattctttattatactgtggtctctcctagtgtccctttcttttaaatgtgtggagaatgtaatcaccacataggcacacatacctttgaaagcattcgctctgcatttgattctgctgctcagactggactgtttatataaagaatgtctgatgtaaacttacagtggtctcgtttcttgcagccatctttcttgcttcctctgcagaatgtcacttggagtatgcctgttttctggtgttggatacgaagttcttcattgataagagtcctataaataaaattactacaaagagaaagctttattctttagtatgaaaatatatctaataacagcctcattaggataatggcgtgttatagcaatgttttatataagaaatatttatcttcagcatcaaatggctcttaaatgtatcaatcattattcttagaacttggaagcactcctcagaatatcttttaagtattttagagaagtaccttgctgattatttgaccattgttttaatcattacaggacaatgataactgcaagtcgtcatgattctgtggtggtaaaaacacctgcagattgatttaaaaaaagacacttattaagaacttgggcaaaattaagaatgccagtttaagttaataaaagtttcccaatgtaaaaaaaaaaaaaaaaaaactcgag

SEQ ID NO: 4002 - DNA, 1678 bp, Rattus norvegicus
agtgcctgtgcctggctgaagaaggcagcagccacaagctccaggcgccccggccccacgctttctgaataccaagctgcaggcgagcttttttgctttcttgcttttcctcttctccaattcaaagtgggcagtccacaccgatttcttttcaggggagggaggagacagggccaggggtcccaagtcgcacacaagtcttcgctgccatgggggccgtcatgggtaccttctcgtccctgcagaccaaacaaaggcgaccctctaaagacaagatcgaggatgatctggagatgaccatggtttgccatcggcctgagggactggagcagcttgaggcacagacgaacttcaccaagagagaactgcaggtcctttaccggggattcaaaaacgagtgccccagtggtgtggttaacgaagagacattcaagcagatctacgctcagtttttccctcatggagatgccagcacatacgcacattacctcttcaatgccttcgacaccacccagacaggctctgtaaagttcgaggactttgtgactgctctgtcgattttactgagaggaacggtccatgaaaaactgaggtggacgtttaatttgtacgacatcaataaagacggctacataaacaaagaggagatgatggacatagtgaaagccatctatgacatgatggggaaatacacctatcctgtgctcaaagaggacactcccaggcagcacgtggacgtcttcttccagaaaatggataaaaataaagatggcattgtaacgttagacgaatttctcgagtcctgtcaggaggatgacaacatcatgaggtctctacagctgttccaaaatgtcatgtaactgaggacactggccatcctgctctcagagacactgacaaacacctcaatgccctgatctgcccttgttccagttttacacatcaactctcgggacagaaataccttttacactttggaagaattctctgctgaagactttctacaaaacctggcaccgcgtggctcagtctctgattgccaactcttcctccctcctcctcttgagagggacgagctgaaatccgaagtttgttttggaagcatgcccatctctccatgctgctgctgccctgtggaaggcccctctgcttgagcttaaacagtagtgcacagttttctgcgtatacagatccccaactcactgcctctaagtcaggcagaccctgatcaatctgaaccaaatgtgcaccatcctccgatggcctcccaagccaatgtgcctgcttctcttcctctggtgggaagaaagaacgctctacagagcacttagagcttaccatgaaaatactgggagaggcagcacctaacacatgtagaataggactgaattattaagcatggtggtatcagatgatgcaaacagcccatgtcattttttttccagaggtagggactaataattctcccacactagcacctacgatcatagaacaagtcttttaacacatccaggagggaaaccgctgcccagtggtctatcccttctctccatcccctgctcaagcccagcactgcatgtctctcccggaaggtccagaatgcctgtgaaatgctgtaacttttataccctgttataatcaataaacagaactatttcgtacacaaaaaaaaaaaaaa

SEQ ID NO: 4003 - DNA, 3133 bp, Rattus norvegicus
cgctctagcccggtgggaagctttcatccagaacaatgaatttcataaaggacaatagccgagcccttattcaaagaatgggaatgactgttataaagcaaatcacagatgacctatttgtatggaatgttctgaatcgcgaagaagtaaacatcatttgctgcgagaaggtggagcaggatgctgctagagggatcattcacatgattttgaaaaagggttcagagtcctgtaacctctttcttaaatcccttaaggagtggaactatcctctatttcaggacttgaatggacaaagtctttttcatcagacatcagaaggagacttggacgatttggctcaggatttaaaggacttgtaccataccccatcttttctgaacttttatccccttggtgaagatattgacattatttttaacttgaaaagcaccttcacagaacctgtcctgtggaggaaggaccaacaccatcaccgcgtggagcagctgaccctgaatggcctcctgcaggctcttcagagcccctgcatcattgaaggggaatctggcaaaggcaagtccactctgctgcagcgcattgccatgctctggggctccggaaagtgcaaggctctgaccaagttcaaattcgtcttcttcctccgtctcagcagggcccagggtggactttttgaaaccctctgtgatcaactcctggatatacctggcacaatcaggaagcagacattcatggccatgctgctgaagctgcggcagagggttcttttccttcttgatggctacaatgaattcaagccccagaactgcccagaaatcgaagccctgataaaggaaaaccaccgcttcaagaacatggtcatcgtcaccactaccactgagtgcctgaggcacatacggcagtttggtgccctgactgctgaggtgggggatatgacagaagacagcgcccaggctctcatccgagaagtgctgatcaaggagcttgctgaaggcttgttgctccaaattcagaaatccaggtgcttgaggaatctcatgaagacccctctctttgtggtcatcacttgtgcaatccagatgggtgaaagtgagttccactctcacacacaaacaacgctgttccataccttctatgatctgttgatacagaaaaacaaacacaaacataaaggtgtggctgcaagtgacttcattcggagcctggaccactgtggagacctagctctggagggtgtgttctcccacaagtttgatttcgaactgcaggatgtgtccagcgtgaatgaggatgtcctgctgacaactgggctcctctgtaaatatacagctcaaaggttcaagccaaagtataaattctttcacaagtcattccaggagtacacagcaggacgaagactcagcagtttattgacgtctcatgagccagaggaggtgaccaaggggaatggttacttgcagaaaatggtttccatttcggacattacatccacttatagcagcctgctccggtacacctgtgggtcatctgtggaagccaccagggctgttatgaagcacctcgcagcagtgtatcaacacggctgccttctcggactttccatcgccaagaggcctctctggagacaggaatctttgcaaagtgtgaaaaacaccactgagcaagaaattctgaaagccataaacatcaattcctttgtagagtgtggcatccatttatatcaagagagtacatccaaatcagccctgagccaagaatttgaagctttctttcaaggtaaaagcttatatatcaactcagggaacatccccgattacttatttgacttctttgaacatttgcccaattgtgcaagtgctctggacttcattaaactggacttttatgggggagctatggcttcatgggaaaaggctgcagaagacacaggtggaatccacatggaagaggccccagaaacctacattcccagcagggctgtatctttgttcttcaactggaagcaggaattcaggactctggaggtcacactccgggatttcagcaagttgaataagcaagatatcacatatctggggaaaatattcagctctgccacaagcctcaggctgcaaataaagagatgtgctggtgtggctggaagcctcagtttggtcctcagcacctgtaagaacatttattctctcatggtggaagccagtcccctcaccatagaagatgagaggcacatcacatctgtaacaaacctgaaaaccttgagtattcatgacctacagaatcaacggctgccgggtggtctgactgacagcttgggtaacttgaagaaccttacaaagctcataatggataacataaagatgaatgaagaagatgctataaaactagctgaaggcctgaaaaacctgaagaagatgtgtttatttcatttgacccacttgtctgacattggagagggaatggattacatagtcaagtctctgtcaagtgaaccctgtgaccttgaagaaattcaattagtctcctgctgcttgtctgcaaatgcagtgaaaatcctagctcagaatcttcacaatttggtcaaactgagcattcttgatttatcagaaaattacctggaaaaagatggaaatgaagctcttcatgaactgatcgacaggatgaacgtgctagaacagctcaccgcactgatgctgccctggggctgtgacgtgcaaggcagcctgagcagcctgttgaaacatttggaggaggtcccacaactcgtcaagcttgggttgaaaaactggagactcacagatacagagattagaattttaggtgcattttttggaaagaaccctctgaaaaacttccagcagttgaatttggcgggaaatcgtgtgagcagtgatggatggcttgccttcatgggtgtatttgagaatcttaagcaattagtgttttttgactttagtactaaagaatttctacctgatccagcattagtcagaaaacttagccaagtgttatccaagttaacttttctgcaagaagctaggcttgttgggtggcaatttgatgatgatgatctcagtgttattacaggtgcttttaaactagtaactgcttaaataaagtgtactcgaagccagta

SEQ ID NO: 4004 - DNA, 2098 bp, Rattus norvegicus
actatagggagtcgacccacgcgtccggctcctccctccctgcagccccgggcagcatctcccagaggctccgcggcccaggctcctggtgtgtctgcagtgcaggtggctcctggaagaccctcagcctgcctgctgaggccatgtcggactacgagaacgatgacgagtgctggaacgtcctggagggcttccgggtgacgctcacctcggtcatcgacccctcacgcatcacaccttacctgcggcagtgcaaggtcctgaaccctgatgatgaggagcaggtgctcagcgaccccaacctggtcatccgcaaacggaaagtgggtgtgctcctggacatcctgcagcggaccggccacaagggctacgtggccttcctcgagagcctggagctctactacccgcagctgtacaagaaggtcacaggcaaggagccagcccgcgtcttctccatgatcatcgacgcgtccggggagtcaggcctgactcagctgctgatgactgaggtcatgaagctgcagaagaaggtgcaggacctgaccgcgctgctgagctccaaagatgacttcatcaaggagctgcgggtgaaggacagcctgctgcgcaagcaccaggagcgtgtgcagaggctcaaggaggagtgcgaggccggcagccgcgagctcaagcgctgcaaggaggagaactacgacctggccatgcgcctggcgcaccagagtgaggagaagggcgccgcgctcatgcggaaccgtgacctgcagctggagattgaccagctcaagcacagcctcatgaaggccgaggacgactgcaaggtggagcgcaagcacacgctgaagctcaggcacgccatggagcagcggcccagccaggagctgctgtgggagctgcagcaggagaaggccctgctccaggcccgggtgcaggagctggaggcctccgtccaggaggggaagctggacaggagcagcccctacatccaggtactggaggaggactggcggcaggcgctgcgggaccaccaggagcaggccaacaccatcttctccctgcgcaaggacctccgccagggcgaggcccgacgcctccggtgcatggaggagaaggagatgttcgagctgcagtgcctggcactacgtaaggactccaagatgtacaaggaccgcatcgaggccatcctgctgcagatggaggaggtcgccattgagcgggaccaggccatagccacgcgggaggagctgcacgcacagcacgcccggggcctgcaggagaaggacgcgctgcgcaagcaggtgcgggagctgggcgagaaggcggatgagctgcagctgcaggtgttccagtgtgaggcgcagctactggccgtggagggcaggctcaggcggcagcagctggagacgctcgtcctgagctccgacctggaagatggctcacccaggaggtcccaggagctctcactcccccaggacctggaggacacccagctctcagacaaaggctgccttgccggcggggggagcccgaaacagccctttgcagctctgcaccaggagcaggttttgcggaacccccatgacgcaggcctgagcagcggggagccgcccgagaaggagcggcggcgcctcaaagagagttttgagaactaccgcaggaagcgcgccctcaggaagatgcagaaaggatggcggcagggggaggaggaccgggagaacaccacgggcagcgacaacaccgacactgagggctcctagccgcagcagcgcaggccccgaccagggcacacccaccggcccggcctgccacccgggggtgccgacgccctggggcgcagacttccccgagccgtcgctgacttggcctggaacgaggaatctggtgccctgaaaggcccagccggactgccgggcattggggccgtttgttaagcggcactcattttgcggaggccatgcgggtgctcaccacccccatgcacacgccatctgtgtaacttcaggatctgttctgtttcaccatgtaacacacaatacatgcatgcactgtattagtgttaagaaaacacagctgcgtaaataaacagcacgggtgacccgca

SEQ ID NO: 4005 - DNA, 3381 bp, Rattus norvegicus
gtcgacccacgcgtccgcggacgcgtgggccggtttgagaggtgactgtgagctgggctcagtgctgccaccggtcacctaagggagcgctggcgaggcgcagactctcggcttagtcggccgcggcccaggctcccggcgcggcgcggaacggagtggcagaaatcttaaataattccatcagaatgacaccttctcaggtcacctttgaaataagaggaactcttttaccaggagaggtctttgcaatgtgtggaaactgtgatgccttgggaaactggagtcctcaaaatgctgtgcctcttactgagagtgagacaggcgaaagtgtatggaaagcagtgattgttcttagtagaggaatgtccgtgaagtaccgctacttcagaggctgctttttagaaccaaagactatcggtggtccatgtcaagtcatagttcacaagtgggagactcatctacaaccacgatcaataacccctttagaaaacgaaatcattattgacgatggacaatttggaatccacaatggtgttgaaacactggattctggatggcttacctgtcagactgaaataagactgcgtctgcatttttctgagaaacctcctgtttcaattaccaagaaaaagttcaaaaaatctagatttagggtaaagcttacactagagggtctggaggaagatgatgacgacgatgataaggcatctcccactgttcttcacaagatgtccaatagcctggagatatccttaataagtgacaatgagttcaagtgcaggcactcacagccagaatgtgggtatggcttacagcctgaccgctggacagagtacagcatacagacaatggagccggacaaccttgaactcatctttgacttttttgaggaagatctcagtgagcatgtagtccagggtgatgttcttcctggacatgtgggcacagcatgcctcctgtcatctaccattgctgagagtgagagaagcgctggaatccttactcttcccatcatgagcagaagttccagaaaaactataggcaaagtcagagttgattttatcatcatcaagccattaccaggatatagttgttctatgcagtcttcattctccaagtattggaaaccaagaataccactggatgttggacatcgtggtgcagggaactcaacaacaactgccaagctggctaaagtacaggaaaatactattgcttctttaagaaatgctgccagccatggtgcagcatttgtggaatttgatgtccacctttcaaaggacttagtgcctgtagtgtatcatgatctcacctgctgtttaactatgaaaaggaaatatgaagctgatccagttgaattgtttgaaatcccagtaaaggaattaacattcgaccaactccagttattgaagctttctcatgtgactgcactaaaaaccaaagaccagaaacaatgtatggctgaggaggaaaattccttttctgaaaaccaaccatttccttctcttaagatggttttagagtcattgccagaaaatgtaggatttaatatagaaataaaatggatttgccaacacagggatggagtatgggacggcaacttatcgacatattttgatatgaatgcatttttggatataattttaaaaactgttttagaaaattccgggaagaggagaatagtattttcttcatttgatgcagacatctgtacaatggttcggcagaaacaaaacaaatatcccatattatttttgacccaaggaaagtctgacatttaccctgaactcatggacctcagatctcggacaacacccattgcaatgagctttgcacagtttgaaaatattttggggataaatgcccatactgaagatctccttagaaacccatcctatgtccaagaggcaaaagataagggattggtcatattctgctggggtgatgataccaatgatcctgaaaacagaaggaaactgaaggaatttggagtaaatggtctaatatatgataggtatttgttttttgtaaaaaatctccatggaattgttcaaacagtgtagttttatctattttaactattttaaaattagatagtttagcctaaagttttatcttgacactgtgacctttcccaggtgttgagatatgtcaaaagccacttaagaagccctaacccaaatgtatttgccttgaagtgagggtacttgcctgtctcactcctgtctgtcaaaactttttctgcagttgtcttagttacattctattgctgtgaagaagtactgtgatcaaggtgaattgtttgcagttttggagggtgagcccatggctgtcatggtggggagtgtggcagaaggcaggcatggcactggagtagttagtagctgtcagcttacttctgatccacaagcaggagtcagagacacaggcagaaacagattgtccctggtgtggacttttgtaacctcaaagtttactgcctcataacaaacacacgaggccatacatacctcctaatctttcccaaatagtccaactggggaccatacttcctcattcaagggtctacagtgatctcttcctgtgtgggggtccttatcttcactcatatccaactcaggacacttccctgactttaaaacttttacgtcccttctcttgatttcagcctaaatggccactctgcttattttgctttctcaggccgaatccttgaagtcttccatggcagtgttcttgaacctcttcttcattcctattttcccctgggatcttaactcacacaacattcctcaatgggctctttctttctgcttcagagagtgactcccgtacactgaaatgtcacttgcacaaggactacactatttaaaatggtagcttctgttcatagggtgcttcttaactttgcttgagataatttatcacggacaaacacagatatatgtaacattgtattgtgtgtcttttccttcctggcctccccgtttcctaatgcatacacagagtgtgggctgcacaagaaccaggacactttcctttttttgtttactatcgtcaaaggctaagacaataatatgtagactgtgggatcagatatttgttgactggatacagcttcctaggaattggtatgtaagatgtaagtttaatagctgctgatgttcagaaagttgctttagtgtaaagaagctttaggttgtaaaaaaacgactcgatggaggaagtacaaagttttgaccagaccttgagaaaaaaaaccaaaataagctttccttagatttaattcctactactctttatcctactgagttgtaccattctttttaataaagactttactcccaaaaaaaaaaaaaaaaaaaaaaaaagggcggccgc

SEQ ID NO: 4006 - DNA, 4390 bp, Rattus norvegicus
ctctagctctcagcggctgcgaagtctgtaaacctggtggccaagtgattgtaagtcaggagactttccttcggtttctgcctttgatggcaatttccttcggtttctgcctttgatggcaagaggtggagattgtggcggcgattacagagaacgtctgggaagacaagttgctgtttttatgggaatcgcaggcttggaagagacagaagcaattccagaaataaattggaaattgaagatttaaacaatgttgttttaaaatattctaacttcaaagaatgatgccagaaacttaaaaaggggctgcgcagagtagcaggggccctggagggcgcggcctgaatcctgattgcccttctgctgagaggacacacgcagctgaagatgaatttgggaaaagtagccgcttgctactttaactatggaagagcagggccacagtgagatggaaataatcccatcagagtctcacccccacattcaattactgaaaagcaatcgggaacttctggtcactcacatccgcaatactcagtgtctggtggacaacttgctgaagaatgactacttctcggccgaagatgcggagattgtgtgtgcctgccccacccagcctgacaaggtccgcaaaattctggacctggtacagagcaagggcgaggaggtgtccgagttcttcctctacttgctccagcaactcgcagatgcctacgtggacctcaggccttggctgctggagatcggcttctccccttccctgctcactcagagcaaagtcgtggtcaacactgacccagtgagcaggtatacccagcagctgcgacaccatctgggccgtgactccaagttcgtgctgtgctatgcccagaaggaggagctgctgctggaggagatctacatggacaccatcatggagctggttggcttcagcaatgagagcctgggcagcctgaacagcctggcctgcctcctggaccacaccaccggcatcctcaatgagcagggtgagaccatcttcatcctgggtgatgctggggtgggcaagtccatgctgctacagcggctgcagagcctctgggccacgggccggctagacgcaggggtcaaattcttcttccactttcgctgccgcatgttcagctgcttcaaggaaagtgacaggctgtgtctgcaggacctgctcttcaagcactactgctacccagagcgggaccccgaggaggtgtttgccttcctgctgcgcttcccccacgtggccctcttcaccttcgatggcctggacgagctgcactcggacttggacctgagccgcgtgcctgacagctcctgcccctgggagcctgcccaccccctggtcttgctggccaacctgctcagtgggaagctgctcaagggggctagcaagctgctcacagcccgcacaggcatcgaggtcccgcgccagttcctgcggaagaaggtgcttctccggggcttctcccccagccacctgcgcgcctatgccaggaggatgttccccgagcgggccctgcaggaccgcctgctgagccagctggaggccaaccccaacctctgcagcctgtgctctgtgcccctcttctgctggatcatcttccggtgcttccagcacttccgtgctgcctttgaaggctcaccacagctgcccgactgcacgatgaccctgacagatgtcttcctcctggtcactgaggtccatctgaacaggatgcagcccagcagcctggtgcagcggaacacacgcagcccagtggagaccctccacgccggccgggacactctgtgctcgctggggcaggtggcccaccggggcatggagaagagcctctttgtcttcacccaggaggaggtgcaggcctccgggctgcaggagagagacatgcagctgggcttcctgcgggctttgccggagctgggccccgggggtgaccagcagtcctatgagtttttccacctcaccctccaggccttctttacagccttcttcctcgtgctggacgacagggtgggcactcaggagctgctcaggttcttccaggagtggatgccccctgcgggggcagcgaccacgtcctgctatcctcccttcctcccgttccagtgcctgcagggcagtggtccggcgcgggaagacctcttcaagaacaaggatcacttccagttcaccaacctcttcctgtgcgggctgttgtccaaagccaaacagaaactcctgcggcatctggtgcccgcggcagccctgaggagaaagcgcaaggccctgtgggcacacctgttttccagcctgcggggctacctgaagagcctgccccgcgttcaggtcgaaagcttcaaccaggtgcaggccatgcccacgttcatctggatgctgcgctgcatctacgagacacagagccagaaggtggggcagctggcggccaggggcatctgcgccaactacctcaagctgacctactgcaacgcctgctcggccgactgcagcgccctctccttcgtcctgcatcacttccccaagcggctggccctagacctagacaacaacaatctcaacgactacggcgtgcgggagctgcagccctgcttcagccgcctcactgttctcagactcagcgtaaaccagatcactgacggtggggtaaaggtgctaagcgaagagctgaccaaatacaaaattgtgacctatttgggtttatacaacaaccagatcaccgatgtcggagccaggtacgtcaccaaaatcctggatgaatgcaaaggcctcacgcatcttaaactgggaaaaaacaaaataacaagtgaaggagggaagtatctcgccctggctgtgaagaacagcaaatcaatctctgaggttgggatgtggggcaatcaagttggggatgaaggagcaaaagccttcgcagaggctctgcggaaccaccccagcttgaccaccctgagtcttgcgtccaacggcatctccacagaaggaggaaagagccttgcgagggccctgcagcagaacacgtctctagaaatactgtggctgacccaaaatgaactcaacgatgaagtggcagagagtttggcagaaatgttgaaagtcaaccagacgttaaagcatttatggcttatccagaatcagatcacagctaaggggactgcccagctggcagatgcgttacagagcaacactggcataacagagatttgcctaaatggaaacctgataaaaccagaggaggccaaagtctatgaagatgagaagcggattatctgtttctgagaggatgctttcctgttcatggggtttttgccctggagcctcagcagcaaatgccactctgggcagtcttttgtgtcagtgtcttaaaggggcctgcgcaggcgggactatcaggagtccactgcctccatgatgcaagccagcttcctgtgcagaaggtctggtcggcaaactccctaagtacccgctacaattctgcagaaaaagaatgtgtcttgcgagctgttgtagttacagtaaatacactgtgaagagactttattgcctattataattatttttatctgaagctagaggaataaagctgtgagcaaacagaggaggccagcctcacctcattccaacacctgccatagggaccaacgggagcgagttggtcaccgctcttttcattgaagagttgaggatgtggcacaaagttggtgccaagcttcttgaataaaacgtgtttgatggattagtattatacctgaaatattttcttccttctcagcactttcccatgtattgatactggtcccacttcacagctggagacaccggagtatgtgcagtgtgggatttgactcctccaaggttttgtggaaagttaatgtcaaggaaaggatgcaccacgggcttttaattttaatcctggagtctcactgtctgctggcaaagatagagaatgccctcagctcttagctggtctaagaatgacgatgccttcaaaatgctgcttccactcagggcttctcctctgctaggctaccctcctctagaaggctgagtaccatgggctacagtgtctggccttgggaagaagtgattctgtccctccaaagaaatagggcatggcttgcccctgtggccctggcatccaaatggctgcttttgtctcccttacctcgtgaagaggggaagtctcttcctgcctcccaagcagctgaagggtgactaaacgggcgccaagactcaggggatcggctgggaactgggccagcagagcatgttggacaccccccaccatggtgggcttgtggtggctgctccatgagggtgggggtgatactactagatcacttgtcctcttgcccgctcatttgttaataaaatactgaaaac

SEQ ID NO: 4007 - DNA, 1009 bp, Rattus norvegicus
gtcgacccacgcgtccggcggttacaagctaagacatgttttcccatcttcgcaagcgttttgggagggggaacgtcgattctggagagactagagtgaaggagtctggcctttcgtctcaaagtaatgatggagaaagacagcacttctggggaatgtggaacgttgggagagaaacatcatcccctggcactgacctaagcaagaatcaggccatgaaggaaaaggagaggctgattaaagagctgcagctcattaccgaggagagaaatgacctgagagatcgcctgaagtttctaacagagagatccatgaagaacaggccacacttcaggccaaatccatattatgaagacctggagagaatggaggaggcggtcatatcaattctgcacaacttagagatggagaacactgaggtccatgagaacaaccataagctgaagaaggagatgaccttctctagaaacctgctcagccagcccctgatggagaacacatgtaggaagaagttgttccccctgaagcaggagagcaaggaggtacatcttgattgtgcactgaaccagaaatatttggttgacttcaaccagaaagataaagaccatcaacggccagaaccagcattatcaggtctcagaaagtgcaagagagctggaattggacacaccccagtaagagagcttcctgaagaataagttgctttctcaggagtccctgatgacaaatatcctgaatgaaaacagcacttgagagacaacttgggggaccgcctttcattatgtgtgctagaggagaaacagcaatatgtctgtgcttctaaatgttcgttaagaatatgcttttagaaatatttttgttatgattttaattgaagttttctttttgttgtttcatatttatatgttcttgttactatttttactttcaaatatttttaaatatttttattcattttaatcctgttttgttgtaaaaatgtatttgttatgaataaaaattgaattct

SEQ ID NO: 4008 - DNA, 1623 bp, Rattus norvegicus
atgaacggggaggccatctgcagcgccctgcccaccattccctaccacaaactcgccgacctgcgctacctgagccgcggcgcctctggcactgtgtcgtccgcccgccacgcagactggcgcgtccaggtggccgtgaagcacctgcacatccacactccgctgctcgacagtgaaagaaaggatgtcttaagagaagctgaaattttacacaaagctagatttagttacattcttccaattttgggaatttgcaatgagcctgaatttttgggaatagttactgaatacatgccaaatggatcattaaatgaactcctacataggaaaactgaatatcctgatgttgcttggccattgagatttcgcatcctgcatgaaattgcccttggtgtaaattacctgcacaatatgactcctcctttacttcatcatgacttgaagactcagaatatcttattggacaatgaatttcatgttaagattgcagattttggtttatcaaagtggcgcatgatgtccctctcacagtcacgaagtagcaaatctgcaccagaaggagggacaattatctatatgccacctgaaaactatgaacctggacaaaaatcaagggccagtatcaagcacgatatatatagctatgcagttatcacatgggaagtgttatccagaaaacagccttttgaagatgtcaccaatcctttgcagataatgtatagtgtgtcacaaggacatcgacctgttattaatgaagaaagtttgccatatgatatacctcaccgagcacgtatgatctctctaatagaaagtggatgggcacaaaatccagatgaaagaccatctttcttaaaatgtttaatagaacttgaaccagttttgagaacatttgaagagataacttttcttgaagctgttattcagctaaagaaaacaaagttacagagtgtttcaagtgccattcacctatgtgacaagaagaaaatggaattatctctgaacatacctgtaaatcatggtccacaagaggaatcatgtggatcctctcagctccatgaaaatagtggttctcctgaaacttcaaggtccctgccagctcctcaagacaatgattttttatctagaaaagctcaagactgttattttatgaagctgcatcactgtcctggaaatcacagttgggatagcaccatttctggatctcaaagggctgcattctgtgatcacaagaccactccatgctcttcagcaataataaatccactctcaactgcaggaaactcagaacgtctgcagcctggtatagcccagcagtggatccagagcaaaagggaagacattgtgaaccaaatgacagaagcctgccttaaccagtcgctagatgcccttctgtccagggacttgatcatgaaagaggactatgaacttgttagtaccaagcctacaaggacctcaaaagtcagacaattactagacactactgacatccaaggagaagaatttgccaaagttatagtacaaaaattgaaagataacaaacaaatgggtcttcagccttacccggaaatacttgtggtttctagatcaccatctttaaatttacttcaaaataaaagcatgtaa

SEQ ID NO: 4009 - DNA, 3949 bp, Rattus norvegicus
ccccgtgcgcctcttgcccgcagaccctgaggacacggccatgccgggccgggcggaggcgggggaggccgaggaggaggccggggccggctcggggtctgaggcggaggaggacgcgctgtgggagcgaatcgagggcgtccggcatcggctggctcgcgccctgaacccggccaagctcacgccgtatctgcgccagtgccgggtcatcgacgagcaggacgaggaggaggtgctgagcacctaccgcttcccgtgccgcgtcaaccgcaccgggcgcctgatggacatcttgcgctgccgtggcaagaggggctatgaggccttcctggaagccctggagttctactaccccgaacacttcacgctgctcacgggccaggaacccgcccagcgctgctccatgatcctcgatgaggaggggcctgagggcctgacccaattcttgatgacagaggtgcgacggctgcgggaagctcgcaagagccagctgcagcgggagcagcaactgcaggcccggggccgggtgctcgaggaggagcgggcagggctggagcagcggctgcgggaccagcagcaggctcaggagcgctgtcaacggctgcgggaggactgggaggcgggcagcctggagctgctgcggctcaaggatgagaactacatgatcgccatgcgcctggcacagctcagtgaggagaagaactcggctgtacttcgcagccgtgacctgcagctggcggtggatcagctcaagctcaaagtgagtcggctggaggaagagtgtgcactgcttcgaagggccaggggcccgccccctggggcagaggagaaggagaaggagaaggagaaggagaaggagccagacaatgtggaccttgtctctgagctgcgtgctgagaaccagcagctgacggcgtcactgcgggagttgcaggagggcctgcagcaggaggcgagccggccgggggccccgggctccgagcgcatcctgctggacatcctagagcatgactggcgggaggcgcaggacagcaggcaggagctgtgccagaagctgcatgccgtgcagggggagctgcagtgggccgaggagctgcgcgaccagtacctgcaggagatggaagacctgcggctcaagcaccgcacgctgcagaaggactgtgacctgtacaagcaccgcatggccactgtcctggcccaactggaggagattgagaaggagcgagaccaggccatccagagccgtgaccggatccagttgcagtactcacagagcctcatcgagaaggaccagtaccgcaagcaggtgcggggcctggaggcggagcgggatgagctgctgacaacgctcaccagcctggagggcaccaaggctctgctggaggttcagctgcagcgggcccagggtggcacctgcctcaaggcctgtgcctcctcccattccctgtgctccaacctcagcagcacttggagcctgagcgagttcccctcccctctgggaggcccagaagcaactggggaggcagctgtcatggggggacctgagcctcacaactcggaggaagccacagacagtgaaaaggagatcaatcggctctccatcctgcccttcccccccagtgccggctccatcctccgccggcagcgtgaggaagaccccgcaccccctaagagatccttcagcagcatgtcagacatcacagggagtgtgacacttaagccctggtcccctggcctctcttcgtcctcatcctctgacagcgtgtggcctttgggaaagccggaaggcctcctggctcggggctgtggcctggacttcctcaacaggtctctggctattcgggtgtctggccggagccccccagggggcccagagccgcaggacaagggaccagatggactgtcgttttatggggacagatggtctggggctgtggtgcgcagggtgctgtctgggcctgggtccgccaggatggaaccaagagagcaaagggtggaagctgctggtctggagggggcgtgcctggaagccgaggcccagcagagaaccttgctctggaatcaggggtccacactcccctccctgatggactcgaaggcctgccagtccttccacgaggccctagaagcctgggcaaagggaccaggtgccgagcccttctacattcgtgccaacctcaccttgcctgagagggcagatccccatgccctttgcgtgaaagcccaagagatccttcgactggtggactcggcatacaagcggaggcaggaatggttctgcacccgggttgaccccctcactctgcgggacctggaccggggcaccgtgcccaattatcagagagcccagcagctcctagaagttcaggagaaatgcctgccctccagccggcaccgaggcccccgcagtaatctgaagaagagagccctggaccagctgcggctggtgaggcccaagcccgtgggggcgcctgcaggggactccccggatcagctgctgctggagccctgtgcagagccggagcggagcctcagaccctacagtttggtgcggccgctactggtgtctgccctgcggcccgtggtgctgttgcctgagtgcctggcgccccggctcatccgtaacctgctagacctgcccagctcccggctggacttccaagtgtgcccagcggaaagcctctctggggaggaactgtgcccatcctcagcgcctggagcccccaaggctcagcctgccacccctgggctaggcagcaggatccgggccatccaggagtctgttgggaagaagcactgcctgctggagctgggtgctcggggtgtgcgggagcgggtgcagaacgagatctaccccatcgtcatccacgtggaggtgactgagaagaatgtccgggaagtcaggggtctgctgggccggccgggctggcgggactcagagctgctgcggcagtgccgtggctcagagcaggtgctctgggggctgccctgctcctgggtgcaggtgcccgcccatgagtggggacacgcagaggagctggccaaggtggtgcgcggccgcatcctgcaggagcaggcccgcctcgtgtgggtggagtgcggcagcagcagaggctgccccagcagcagtgaggcctgaggctcatctgatacctgcaccttctccccaagccagcgtggaccctggtgtctatggtgaagctgggccctcccaccctgagccttcctagacccttggactctcagatgcagggcccttggctctggcctctcacccccaaggctgtctctggccctgccgagcctatgggagtcccgggacagagtgcccactcccctctacttgctgctctgggcctccccacctttcctggggtctccacattcccactagtgggtcttatgtgtgtctgtgtcttctccttaaacactcgccctggagtctgttctcacacctgtgcgcaggtttgcacactcaagttctcatgggcaggctcaggtctgtcccgctgccctgggcacgaggtctcctgaggacctgggcctgttctgctcctaggagacctgagcccgttaccgcgtgactcccaccatccagctcgcgctcctcgtggattcagccatgcatggactggggtgttccctggcccatggtcacctgtgcccctcgtgtctcctcacatgggtgtctgtggttctctcctgtgtaaatgtcacgccccacccctgtttcatgtgggcactaacacgtgtgcgttcctggcgggcacacacaggaccgtgcctcacagggcccactccctgcctatgcctccctcttggggggccgaggagggcggctgctctgtcatgagaatgtacggcccgtggatgattaacgggcctttttcacttagaagctgcacattatggagcattaaacacttttgtcataaaaaaaaaaaaaaaa

SEQ ID NO: 4010 - DNA, 4276 bp, Rattus norvegicus
ccacgcgtccgccgcgccgcccgcagccccctcccggccctgcagcccctgggcgggcggcgcccctcggaggacggctccgggcccggggggacggagggcctggtcgcctggaggaagccggaggcctgcgtggaggaggcgccccgcgcagctggctggcggagcatgagcgccccagatcccaagcactgcaagtccagatgcaacgggagcctggctcaagggacgacaagatccagccggaaagtgtagaagtcacaccccaatggcgggatagcagcccctgtgtgtgagcacccctccatgccaggaggagggccagagatggatgactacatggagacgctgaaggatgaagaggacgccttgtgggagaatgtggagtgtaaccggcacatgctcagccgctatatcaaccctgccaagctcacgccctacctgcgtcagtgtaaggtcattgatgagcaggatgaagatgaagtgcttaatgcccctatgctgccatccaagatcaaccgagcaggccggctgttggacattctacataccaaggggcaaaggggctatgtggtcttcttggagagcctagaattttattacccagaactgtacaaactggtgactgggaaagagcccactcggagattctccaccattgtggtggaggaaggccacgagggcctcacgcacttcctgatgaacgaggtcatcaagctgcagcagcagatgaaggccaaggacctgcaacgctgcgagctgctggccaggttgcggcagctggaggatgagaagaagcagatgacgctgacgcgcgtggagctgctaaccttccaggagcggtactacaagatgaaggaagagcgggacagctacaatgacgagctggtcaaggtgaaggacgacaactacaacttagccatgcgctacgcacagctcagtgaggagaagaacatggcggtcatgaggagccgagacctccaactcgagatcgatcagctaaagcaccggttgaataagatggaggaggaatgtaagctggagagaaatcagtctctaaaactgaagaatgacattgaaaatcggcccaagaaggagcaggttctggaactggagcgggagaatgaaatgctgaagaccaaaaaccaggagctgcagtccatcatccaggccgggaagcgcagcctgccagactcagacaaggccatcctggacatcttggaacacgaccgcaaggaggccctggaggacaggcaggagctggtcaacaggatctacaacctgcaggaggaggcccgccaggcagaggagctgcgagacaagtacctggaggagaaggaggacctggagctcaagtgctcgaccctgggaaaggactgtgaaatgtacaagcaccgcatgaacacggtcatgctgcagctggaggaggtggagcgggagcgggaccaggccttccactcccgagatgaagctcagacacagtactcgcagtgcttaatcgaaaaggacaagtacaggaagcagatccgcgagctggaggagaagaacgacgagatgaggatcgagatggtgcggcgggaggcctgcatcgtcaacctggagagcaagctgcggcgcctctccaaggacagcaacaacctggaccagagtctgcccaggaacctgccagtaaccatcatctctcaggactttggggatgccagccccaggaccaatggtcaagaagctgacgattcttccacctcggaggagtcacctgaagacagcaagtacttcctgccctaccatccgccccagcgcaggatgaacctgaagggcatccagctgcagagagccaaatcccccatcagcctgaagcgaacatcagattttcaagccaaggggcacgaggaagaaggcacggacgccagccctagctcctgcggatctctgcccatcaccaactccttcaccaagatgcagcccccccggagccgcagcagcatcatgtcaatcaccgccgagcccccgggaaacgactccatcgtcagacgctacaaggaggacgcgccccatcgcagcacagtcgaagaagacaatgacagcggcgggtttgacgccttagatctggatgatgacagtcacgaacgctactccttcggaccctcctccatccactcctcctcctcctcccaccaatccgagggcctggatgcctacgacctggagcaggtcaacctcatgttcaggaagttctctctggaaagacccttccggccttcggtcacctctgtggggcacgtgcggggcccagggccctcggtgcagcacacgacgctgaatggcgacagcctcacctcccagctcaccctgctggggggcaacgcgcgagggagcttcgtgcactcggtcaagcctggctctctggccgagaaagccggcctccgtgagggccaccagctgctgctgctagaaggctgcatccgaggcgagaggcagagtgtcccgttggacacatgcaccaaagaggaagcccactggaccatccagaggtgcagcggccccgtcacgctgcactacaaggtcaaccacgaagggtaccggaagctggtgaaggacatggaggacggcctgatcacatcgggggactcgttctacatccggctgaacctgaacatctccagccagctggacgcctgcaccatgtccctgaagtgtgacgatgttgtgcacgtccgtgacaccatgtaccaggacaggcacgagtggccgtgcgcgcgggtcgaccctttcacagaccatgacctggatatgggcaccatacccagctacagccgagcccagcagctcctcctggtgaaactgcagcgcctgatgcaccgaggcagccgggaggaggtagacggcacccaccacaccctgcgggcactccggaacaccctgcagccggaagaagcgctttcaacaagcgacccccgggtcagcccccgtctctcgcgagcaagcttcctttttggccagctccttcagttcgtcagcaggtccgagaacaagtataagcggatgaacagcaatgagcgggtccgcatcatctcggggagtccgctagggagcctggcccggtcctcgctggacgccaccaagctcttgactgagaagcaggaagagctggaccctgagagcgagctgggcaagaacctcagcctcatcccctacagcctggtacgcgccttctactgcgagcgccgccggcccgtgctcttcacacccaccgtgctggccaagacgctggtgcagaggctgctcaactcgggaggtgccatggagttcaccatctgcaagtcagatatcgtcacaagagatgagttcctcagaaggcagaagacggagaccatcatctactcccgagagaagaaccccaacgcgttcgaatgcatcgcccctgccaacattgaagctgtggccgccaagaacaagcactgcctgctggaggctgggatcggctgcacaagagacttgatcaagtccaacatctaccccatcgtgctcttcatccgggtgtgtgagaagaacatcaagaggttcagaaagctgctgccccggcctgagacggaggaggagttcctgcgcgtgtgccggctgaaggagaaggagctggaggccctgccgtgcctgtacgccacggtggaacctgacatgtggggcagcgtagaggagctgctccgcgttgtcaaggacaagatcggcgaggagcagcgcaagaccatctgggtggacgaggaccagctgtgaggcgggcgccctgggcagagagactctgtggcgcggggcatcctatgaggcaggcaccctgggcagagagatgcagtgggtgcggggggatcctgtggcccacagagctgccccagcagacgctccgccccacccggtgatggagccccggggggacagtcgtgcctggggaggagcagggtacagcccattcccccagccctggctgacctggcctagcagtttggccctgctggccttagcagggagacaggggagcaaagaacgccaagccggaggcccgaggccagccggcctctcgagagccagagcagcagttgaatgtaatgctggggacaggcatgctgccgccagtagggcggggacccggacagccaggtgactaccagtcctggggacacactcaccataaacacatccccaggcaggacagatcggggaaggggtgtgtaccaggctatgatttctcttgcattaaaatgtattattaaaaaaaaaaaaaaaa

SEQ ID NO: 4011 - DNA, 782 bp, Rattus norvegicus
gtccaggttccgccccggagccgacttcctcctggtcggcggctgcagcggggtgagcggcggcagcggccggggatcctggagccatggggcgcgcgcgcgacgccatcctggatgcgctggagaacctgaccgccgaggagctcaagaagttcaagctgaagctgctgtcggtgccgctgcgcgagggctacgggcgcatcccgcggggcgcgctgctgtccatggacgccttggacctcaccgacaagctggtcagcttctacctggagacctacggcgccgagctcaccgctaacgtgctgcgcgacatgggcctgcaggagatggccgggcagctgcaggcggccacgcaccagggctctggagccgcgccagctgggatccaggcccctcctcagtcggcagccaagccaggcctgcactttatagaccagcaccgggctgcgcttatcgcgagggtcacaaacgttgagtggctgctggatgctctgtacgggaaggtcctgacggatgagcagtaccaggcagtgcgggccgagcccaccaacccaagcaagatgcggaagctcttcagtttcacaccagcctggaactggacctgcaaggacttgctcctccaggccctaagggagtcccagtcctacctggtggaggacctggagcggagctgaggctccttcccagcaacactccggtcagcccctggcaatcccaccaaatcatcctgaatctgatctttttatacacaatatacgaaaagccagcttgaaaaaaaaaaa

SEQ ID NO: 4012 - DNA, 5059 bp, Rattus norvegicus
ctggttctcaacttcttttgaaataatgttcatagagaaggagggctgtctgagattcgagggaaacaagctctcaggacttccggtcgccatgatggctgtgggcggtaaacgcggttagtgcaagcatctgggccatcttcaatggtaaaaaagatacagtaaagacataaataccacatttgacaaatggaaaaaaaggagtgtccagaaaagagtagcagcagtgaggaagagctgccgagacgggtatacagggagctaccctgtgtttctgagaccctttgtgacatctcacattttttccaagaagatgatgagacagaggcagagccattattgttccgtgctgttcctgagtgtcaactatctgggggggacattcccaggagacatttgctcagaagagaatcaaatagtttcctcttatgcttctaaagtctgttttgagatcgaagaagattataaaaatcgtcagtttctggggcctgaaggaaatgtggatgttgagttgattgataagagcacaaacagatacagcgtttggttccccactgctggctggtatctgtggtcagccacaggcctcggcttcctggtaagggatgaggtcacagtgacgattgcgtttggttcctggagtcagcacctggccctggacctgcagcaccatgaacagtggctggtgggcggccccttgtttgatgtcactgcagagccagaggaggctgtcgccgaaatccacctcccccacttcatctccctccaaggtgaggtggacgtctcctggtttctcgttgcccattttaagaatgaagggatggtcctggagcatccagcccgggtggagcctttctatgctgtcctggaaagccccagcttctctctgatgggcatcctgctgcggatcgccagtgggactcgcctctccatccccatcacttccaacacattgatctattatcacccccaccccgaagatattaagttccacttgtaccttgtccccagcgacgccttgctaacaaaggcgatagatgatgaggaagatcgcttccatggtgtgcgcctgcagacttcgcccccaatggaacccctgaactttggttccagttatattgtgtctaattctgctaacctgaaagtaatgcccaaggagttgaaattgtcctacaggagccctggagaaattcagcacttctcaaaattctatgctgggcagatgaaggaacccattcaacttgagattactgaaaaaagacatgggactttggtgtgggatactgaggtgaagccagtggatctccagcttgtagctgcatcagcccctcctcctttctcaggtgcagcctttgtgaaggagaaccaccggcaactccaagccaggatgggggacctgaaaggggtgctcgatgatctccaggacaatgaggttcttactgagaatgagaaggagctggtggagcaggaaaagacacggcagagcaagaatgaggccttgctgagcatggtggagaagaaaggggacctggccctggacgtgctcttcagaagcattagtgaaagggacccttacctcgtgtcctatcttagacagcagaatttgtaaaatgagtcagttaggtagtctggaagagagaatccagcgttctcattggaaatggataaacagaaatgtgatcattgatttcagtgttcaagacagaagaagactgggtaacatctatcacacaggctttcaggacagacttgtaacctggcatgtacctattgactgtatcctcatgcattttcctcaagaatgtctgaagaaggtagtaatattccttttaaattttttccaaccattgcttgatatatcactattttatccattgacatgattcttgaagacccaggataaaggacatccggataggtgtgtttatgaaggatggggcctggaaaggcaacttttcctgattaatgtgaaaaataattcctatggacactccgtttgaagtatcaccttctcataactaaaagcagaaaagctaacaaaagcttctcagctgaggacactcaaggcatacatgatgacagtcttttttttttttgtatgttaggactttaacactttatctatggctactgttattagaacaatgtaaatgtatttgctgaaagagagcacaaaaatgggagaaaatgcaaacatgagcagaaaatattttcccactggtgtgtagcctgctacaaggagttgttgggttaaatgttcatggtcaactccaaggaatactgagatgaaatgtggtaaatcaactccacagaaccaccaaaaagaaaatgagggtaattcagcttattctgagacagacattcctggcaatgtaccatacaaaaaataagccaactctgacatttggattctaccatagactctgtcattttgtagccatttcagctgtcttttgattaatgttttcgtggcacacatatttccatccttttatgtttaatctgtttaaaacaagttcctagtagacaccatctggttgagtcagttttttttatggtgtattttgaacccattctgatagtctcttttaactggaagatttcaattacttacgttaatgtaattattaatatgttaggatttatcctcagtcagccagtttgttatgtcttttctattctactgttatcacatttgtaccacttaaagtggaatctaggcactttatcaccatttagatcctattaccttttctcatctaggatatagttatcttctacataatctttctgtatcttaaaacccatcaataaattattatatattttctacttttaatcactcagaagatttaaaaaactcatgagaagagtaatctgttatgtttttccagatatttaccatttctgttgctcttccttcattattttccaaatttcgttctgcaaatttccacttcttctgatagacgttttttagttcttttagagtggttctgataggtacagattctcttattttttgcttcctctgaggacatctttttctcaccttcattctcagtgatgttttttgcttgtagtatttttagttgacattgttttctgttcagcagtttccttttagcttccgtatttcctgatgagaaatctgcagtcattcaaattgttgtttccctgtatgtagtgtgtcatttttctgtcagatttcaaggtatttatctttagtttttagccatttcattatgttggggatgagtttccttgttttattccctttggaatttgctccaattcataaatttgcagttttatgtcttttaccaaacttagaggttttcagcctaatttctaaaaatactttttattagcctgattttcatctttataggaaatagtttaagtgatgacaagttccaatagcttatatgcccagaaggccttcaaaataagaattttgaaagaatacagaaaacaaacttttatatccttctcatgtcttctactgtaaaattcatatgctttgctactctaaacctagtttgaaatcaacagtcttgagaatagatgaaaattttgatgaatagtggaattcttttaaatggaaacctcttacatgtgattttccttgccatctagaaataaaccatagtatttatgttgaatcaatcaatattatattttgtttttttcctcctcttctgagactcttattgtggaaatgttagacttttatgttttcctaaatgtccctgatattctacttatttagaacatcttttcattttttccattattctgattgggtaattttaatttgtctattttcaaatttgctggagtgttcacctgttgttgtctgtgtcgtcccactgagtgcattcaccaccttttaaattttggtcactgtatgtatcagttctaaaatttccattttgttctctatattttaaatttcttggcttatattctattttcctgcaaatgtgtcagcatttgcttgtttgagctttttttttttcaagacagggtctcaactctgttacccaggctggagtgcagtggtgcgatctcagctcactgcaacctctgcctcctggttcaagcgattattgtgcctcagcctcctgagtagctgggattacaggcatgcaccaccacagcccagctaattttttgtatttttagtagagacagagttttgctatgttggccaggctggttttgaactcctggcctcaagtgatccacccacctcagcctcccaaagtgctgggattacaggccactacacctggcacatttgagtattttttttttttttttttttttgagatggagtctcgctctgtcatctaggctggagtgcagtggtgtgatctcagctcactgcagcctctgtctcccgggctcaagcgattctcttgcctcagcctcctgagtagctaggactacaggtgcatgccaacacgcccggctaatttttttaaaaaatatttttagtagagacagggtttcaccattttggccaggatggtctcgatctcctgacctcatgatccacccgcctcggccttccaaagtgctgggattacaggcatgagccaccgtgcctggcctcatttgagtatttttataatgtctcttttaaagtctttgtcagataattccactgtacatgttattcagtgtttggtgtccactgagttgtcatttgccagacaagtggagatttttgcagctcatccttgtattctcagtagttccgatatgtaccctcgacatgtgaatgttatcttatgagactctgttttatttgtatccaacagaagatgtttattatttatttggctttctgtgaactgaggtcttaatatcagctcattttaaaagtctttgcagtggtattcggatctatcctgtgtgtgcctatgagattgggtgcagtgtatcctgttagctccattctcagggcgtttgaatgtgaattaggaccagcgcaatgaatgctcaagttggggttgggcgttagaattcataaaagtctttatatgctcag

SEQ ID NO: 4013 - DNA, 735 bp, Rattus norvegicus
gcttacagttcctcagggaagccatagcacacaagtacaggattcactgaagctatgttctcgtgattggttttgtacgatgaagacagaaagggcagaagagatatatccagtgatggagaaggaaggccgaacccgcctggccctcatcatctgcaacaaaaagtttgactatctttttgatagagatgatgctgagactgacattttgaacatgaaagaactacttcaaaatcttggatactcagtggtgataaaggaaaaccttacagctcaggaaatggagacagaattaatgaagtttgctggccgtccagagcaccagtcctccgacagcacattcctggtctttatgtcccacggcatcctggaaggaatctgtggggtgaagcacagaaacaaaaagccagatgttcttcatgatgacactatcttcaccattttcaacaattctaactgtccgagtctgagaaacaaacccaagattctcatcatgcaagcctgcagaggcagacatactggtactatttgggtatccacaagcaaagggatagccactgctgatacagatgaggaatgtgtgttgagccatagatggaataatagtataacaaaggcccatgtggagacagatttcattgctttcaaatcttctaccccacataacatttcttggaaggtaggcaagagtggctctctcttcatttccaaactcattgactgcttcaaaaagta

SEQ ID NO: 4014 - DNA, 2013 bp, Rattus norvegicus
ggtggagctaagcactcactgcggtgctgccctgcgtctgcagagaacaaggaaagcttctctgcagggctgtcagctgccaaaatgaacggcgtggaagggaacaacgagctccctctcgctaacacctcgacctccgcccttgtcccggaagatctggatctgaagcaagaccagccgctcagcgaggaaactgacacggtgcgggagatggaggctgcaggtgaggccggtgcggagggaggcgcgtcccccgattcggagcactgcgacccccagctctgcctccgagtggctgagaatggctgtgctgccgcagcgggagaggggctggaggatggtctgtcttcatcaaagtgtggggacgcacccttggcgtctgtggcagccaacgacagcaataaaaatggctgtcagcttgcagggccgctcagccctgctaagccaaaaactctggaagccagtggtgcagtgggcctggggtcgcagatgatgccagggccgaagaagaccaaggtaatgactaccaagggcgccatctctgcgactacaggcaaggaaggagaagcaggggcggcaatgcaggaaaagaagggggtgcagaaagaaaaaaaggcagctggaggagggaaagacgagactcgtcctagagcccctaagatcaataactgcatggactccctggaagccatcgatcaagagctgtcaaatgtaaatgcgcaagctgacagggccttcctccagctggaacgcaaatttgggcggatgagaaggctccacatgcagcgccgaagtttcatcatccaaaacatcccaggtttctgggtcacagcgtttcggaaccacccgcaactgtcaccgatgatcagtggccaagatgaagacatgatgaggtacatgatcaatttagaggtggaggagcttaagcacccaagagcagggtgcaaatttaagttcatcttccaaagcaacccctacttccgaaatgaggggctggtcaaagagtacgagcgcagatcctcaggtcgagtggtgtcgctctctacgccaatccgctggcaccggggtcaagaaccccaggcccatatccacaggaatagagaggggaacacgattcccagtttcttcaattggttctcagaccacagcctcctagaattcgacagaatagctgaaattatcaaaggggagctttggtccaatcccctacaatactacctgatgggcgatgggccacgcagaggagttcgagtcccaccaaggcagccagtggagagtcccaggtccttcaggttccagtctggctaagctctgccctcgtgagaagctcttacagaagagtccttaccaccttctcagcttggctagcagcatgcagccttctgtctgctttctcttccttggattgtgtcctttggttcttctaagtctccggtagtttcaaggttgtggcttccaagtctttgctcttctttctcttggccatcacgatgtcctgcatagtgttaatggtgttccaagtgcatggcctccaaactgcttctatgccaagctcacgtgctgtagtttgtactgcttttctttgcatggcttggttcctgtctgtgatcttctaggttttttgttttcttttttaaaagtggttctctatcaaaagaaagcttgacatatccttaccaagaactagccagatttcatactgtgttcccgatatctatgtactgtgaagaactgtgagtttcgccactgcaagatgggactgtatcccaatccagccatcagcccaacaggacattccaagctgtcaccaactgatcctagctgtcttcctgggcctttgccatttaccctgctttttatctatagaatgagcaggtggctggtaggtgactactaggtaagagtgaagtattaggtgaggagtgttttctgtcaccacattgttcttgtaccaatgcatcatgatcagcttggatcagctactgactgtctgatatttctaacccccaacac

SEQ ID NO: 4015 - DNA, 1586 bp, Rattus norvegicus
gaattcgccctttgtaaaacgacggccagtgcggcacgaggcacatcgtaaaaagtgaaggtcctttcagaagttagtggcaatttctctggggagagctgcaatatcggtggaacactggaccatgcagccaccactctttgtgatttctgtgtatctgttatggttgaaatattgtgacagtgcacctacttggaaggagacagatgctacggatggaaacctaaagagtcttccagaggtaggagaggcagatgtagagggagaggtcaagaaggctttgattggcattaagcaaatgaaaatcatgatggaaaggagagaggaggaacacgcaaaattgatgaaagccttgaagaagtgcaaagaagaaaagcaggaggcccagaaactcatgaacgaagtgcaagaacgtctggaggaagaagaaaagctatgtcaggcatcttctataggttcttgggatggatgcaggccatgtttggaaagtaactgcatacgattttatacagcttgccaacctggttggtcctctgtgaaaagcatgatgaagcaatttctcaagaagatataccgatttctgtcttcccagagtgaagatgtaaaggatccccctgccatagaacagctgactaaggaagatttacaagtggtacacatagagaacctgtttagccagctggccgtggatgcaaaatctctcttcaacatgagcttttacatttttaagcagatgcagcaagaatttgatcaggcttttcaattatacttcatgtccgatgtggacttaatggagccataccccccagctttatctaaagagataaycaaaaaagaagaacttgggcaaaggtggggcattcccaatgtcttccagctgtttcataatttcagtctctctgtttatgggagagtccaacaaataataatgaagacactcaatgcaattgaagattcatgggaaccacacaaagagttagaccagagaggtatgacttcagagatgttacctgagcaaaatggagaaatgtgtgaggaatttgtcaagaatttatctggatgtttaaaatttcgtaaaagatgccaaaaatgtcacaattacctatctgaagaatgccctgatgtacctgaacttcacatagaattccttgaggccctgaaattagtcaatgtatccaatcagcaatatgatcagattgtccagatgacccagtatcatttggaagataccatatacctgatggagaaaatgcaagagcagtttggatgggtgtctcaactggcaagccataacccagtgactgaggacatctttaattcaacaaaggcagttccaaagattcatggaggagattcttccaagcaggatgaaattatggtagactcaagcagcattctgccttcctctaacttcaccgtccagaatcctcctgaagaaggtgctgagagctcaaatgttatttactacatggcagctaaagttctgcagcatctaaagggatgttttgaaacttggtaagaatagctgattaggaaagctttgttgagagggtaggggtcatagctgtttcctgaagggcgaattc

SEQ ID NO: 4016 - DNA, 1403 bp, Rattus norvegicus
ttatttatcgatcgcacgggcagagcagcgcgcggagctcgctcgggggagatgcgggaccacccactggcggggaagcagcgagcagccctctcgcgcccccgcgccgccgagcgcctcctgcctccgcgcccggacgccagcccgctcctgcctcggtcccggccccacgctgccaccgcctgccccgcaaccccggaaccccgcagtcccggagccccgcagccccgcagcgccccgaccccggggacgccggccgcgcagtaagttggcaggagcgagtggcctgggcggctcgcctcccccgcacctttttgaacttgttgctgttggctctgctcgcctgcgcctggcttttgggaaggtgacaaggaggagggaggcacagagggtgggggaaggggacagagagctcgccagagctttatttatgctccccgggagcctgggatctggctgctcgggagccgctggctctgcctttccctttccgggtgcaaggcgacagcaaagtctctatgcaactcagccccggcgcgtactttgccaggtatgtacggcgggcgaggcgcgttctgcgcggaggcagatgctgctgccgccacggcggcggcggctgccagctccgagctctataactgtcacactgcacctgagctgaacttgaacagagagtgaaggggcccatcaggcgaacgctctctttcggctggcacagagggtgtcagtcgacgtgaggggacagagaactctagaccgacgccccccgccgcgagccctgcacttcacctccatctctgcaagcgcagcgttgagtagaggaggccagcggactccaagggacgcgggacagcggctgtgacccgatttctggagctacaacaacaggtcgtctttttgagacgcctttggcgggaaggaccacttcatcagaaggtgaaaaggttctttcttgtaagagactaccactggttgactttccctgtttcctctcacctgctctatataccgaccctgtatcaaccagactgtatcaggggagaagtgaagacacctgtttgaagcaaggctgtctctaaagtcaccctgtgcgtttagatgtgccaggaggtgccctggtccaactgttggcagagctttgtttaggctctatggagagagatttttaggtcactgtattttttttttctctctcttagtattccaaatacttgtctgtgagagaaatctggctttttgggtactgtgacttcaggtgcgccaccttggaataaccgtgttcctgtgagccgtgttccccagtgttttgtctgaggtgaagaagtggggcattttgcttactttcattgtgttactttgggtgacccctgatcactcttgtgacctctacttcagacaacatg

SEQ ID NO: 4017 - DNA, 1596 bp, Rattus norvegicus
gcggccgcccttttttttttttttttttttttttttttttttttttttttttttttttttttttttttttttttttactaaaaacctttgaccagttttatttaacaagtgttgtacaaagagatttctgtaccgaaatgtttaccacaggcaccatactagaaacactagaaacatttagaaatctttgaatggagaaagcatacatgtttagtcagtaaacatgctgcaggtgtggggaaacacaccatgttaagtgaaaaggtgtgacaaaaccatctgatacaatttaacatatatatgtatgtataaaaaacatctatgtccatgcatctcaccagccagccagccccatcaccactggtggatcaggttgctgctttccctattgctactgctatctagaatctgaagttgtctaaaattaaagttgcttacaaacaggtattagttgtttcgttcatgcccaggatgagcttcctgacccccacgatcctgctgctggcgctggtcgccgccacccaggccgagcccctgcacttcaaggactgcggttctaaggtgggagttataaaggaagtgaatgtgagcccatgccctacccagccctgtcagctacacaaaggccagtcctacagtgtcaacgtcacctttactagcggcactcagtcccagaacagcacggccttggtccacggcatcttggcaggggtcccagtctacttccctattcctgagcctgacggttgtaaatgtggaatcaactgccccatccagaaagacaaggtctacagctacctgaataagctgccggtgaagagcgaatatccctctctaaaactggtggtggaatggaaacttcaagatgacaaaaaggataacctcttctgctgggagatcccagtagagatcaaaggctaggctgcttggtgccctgtgtctgtgcagggtgagaggccatgggcggagggaggggaaggaagagaaatcagacctgaaattgagtcggtgccataagacgaacagaacttcaagaatgctgttttatgcctttcagcctccaaaaacatacctgcagccctactactcttgagagccagagccatggccccctgagatagcctttgtggaggcttcgggagggaaaggggagactggagagattagattagtgtccatggctgtttgctgttggattacgtcggcaggtccaggcaagatgaggcagggatgcttgaggatgtcagataacctgtcaatccactgtgaaggatggcttcccagaatcttctggctggccgggagtattacctcttctgtatctaagtgcctcctgagtcccaagcaccctgcttatcgatccgatgagtctccatggtaccctctgcccaacgcttcaacagcagtgactaactctccatggtccagagacggcctgagggaaggtctgcgcagaaacttagctctgactggctgctgctttgcggttagctcttgttctttggtagttttcattaaagccaatacttggttgcaaaaaaaaaaaaaaaaaaaaaaaaaaaaaaaacccacgcgtccgcggacgcgtgggtcgac

SEQ ID NO: 4018 - DNA, 2393 bp, Rattus norvegicus
gtcgacccacgcgtccggtgcaaacattcaaaaatagtaaaacagattgatctctccctttttctaatagaaatatgaagctgatccagttgaattgtttgaaatcccagtaaaggaattaacattcgaccaactccagttattgaagctttctcatgtgactgcactaaaaaccaaagaccagaaacaatgtatggctgaggaggaaaattccttttctgaaaaccaaccatttccttctcttaagatggttttagagtcattgccagaaaatgtaggatttaatatagaaataaaatggatttgccaacacagggatggagtatgggacggcaacttatcgacatattttgatatgaatgcatttttggatataattttaaaaactgttttagaaaattccgggaagaggagaatagtattttcttcatttgatgcagacatctgtacaatggttcggcagaaacaaaacaaatatcccatattatttttgacccaaggaaagtctgacatttaccctgaactcatggacctcagatctcggacaacacccattgcaatgagctttgcacagtttgaaaatattttggggataaatgcccatactgaagatctccttagaaacccatcctatgtccaagaggcaaaagataagggattggtcatattctgctggggtgatgataccaatgatcctgaaaacagaaggaaactgaaggaatttggagtaaatggtctaatatatgataggatatacgattggatgcctgaacaaccaaatatattccaagtggagcaactggagcgcctgaagcgagaattgccagagcttaagaactgtttgtgtcccactgttagccacttcattcctccttctttctgtatggagtctaaaatccatgtggatgctaacggcattgataatgtggagaacgcttagttcctagtgcacagaggacattcagaggctctcccctgcgctgaggttccgtctccaccactgaacaccggtcgcctcttaggtttctcagtccaatgaagcaataatgaagtattttactatcattacagttcccgcaagaatatcaagtacactatttatcacttgtccaggtataattaccaatcagtctctgtacaaatgttaaacactttaaatgagagatctaagcctataatggtgaatcttcattaaaagcataatacttggaaattagctatataaatatctcatagttcaggcttttcatttgattaggtcttaaatcttcagtgcttgagaaaaatgactgcataattatacctgaccatggaaataataagtacctcaagtgcatgcatttgcactggtggctccagctgcacaagtctgtgtcatccatgtacataggtgtctttacatgggttgatagaaacatgcactaggctcctttagtataaacctcagactgctgccatttcccacctgacccaaaccagcctgcagatgaacctcaaaacttgtttcatagactgttcaaagattttaaaagttccagaatgctgcagggtaacttaatgtataaagtatttgtaagaggtatatattgcatatatagtcgtgtagatcagaatgtgtaaatttgactccgtgcatgctttaggtttgttttaagcatgaggttgtacatgtttactgtccttgcatctggtgctaggtgagtgagatgttaaggactgaaaatattttgtcgcctaaaaagagtatgcctatttagtgtctcactacctagtaagcaattgccgtgtgtgctccacagtagttaacccccatgcagaaaaataaatgtcctgaattctcaaattgctattctttattgtttaatatatatcatgtatgtaatttatttaggaatgtagaaattactgtatataaatgcatgcttttaggattatactaagatttcattagaagcagattgtattgataaaactgtaacttcagaatgaatgttaaataaaatgacagatttattttttcctcatcttaaaatgaaatttgaagaaggtattttgtagaattgttttataatcgtatctgtctgacaatagtcatttattcattttgtatggctggctcaccgcacgctctgtgttcctgctggggtagtttgttcatgtattgacattttgacagaagctaaaatcctaagacttgagatgacaagttgtaccttttatttttttaattttttgggacaacctgtgtagccttggctgtccaggaactcactgtgtaaaccagctggctttgaactcccagatcatctgcctctgcttcctaagtggtattaaagtcatgcgccaccaaaaaaaaaaaaaaaaaaaaaaaaaaaaaaaaaaagggcggccgc

SEQ ID NO: 4019 - DNA, 441 bp, Rattus norvegicus
cctcgtgccgcctccagcccctcttcagattgcccctggtgtccttcacccagctcctcctccaatcgctcctcctctagtacagccctctcccccggtagccagagccgccccagtgtgtgagactgtacccgttcatccactcccacaaggtgaagtgcaggggctgcctccgcccccgccgccgccgcctctgcctcctccaggcattcggccatcatcacctgtcacggtcgcagctcttgcgcatcctccctctgggctccacccaactccatctcctgcccctggtccccatgctccattaatgcctccgtccccaccttcacaagtcctgcctgcctctgagccaaagcgccatccttccaccctacccgtgatcagtgacgcgaggagtgtgctgctggaggccatacggaaaggcattcagcttcgcaaagt

SEQ ID NO: 4020 - DNA, 1150 bp, Rattus norvegicus
atggtgctgctcaaggaatatcgggtcatcctgcctgtgtctgtagatgagtatcaagtggggcagctgtactctgtggctgaagccagtaaaaatgaaactggtggtggggaaggtgtggaggtcctggtgaacgagccctacgagaaggatgatggcgagaaaggccagtacacacacaagatctaccacttacagagcaaagttcccacgtttgttcgaatgctggccccagaaggcgccctgaatatacatgagaaagcctggaatgcctacccttactgcagaaccgttattacaaatgagtacatgaaggaagactttctcattaaaattgaaacctggcacaagccagaccttggcacccaggagaatgtgcataaactggagcctgaggcatggaaacatgtggaagctatatatatagacatcgctgatcgaagccaagtacttagcaaggattacaaggcagaggaagacccagcaaaatttaaatctatcaaaacaggacgaggaccattgggcccgaattggaagcaagaacttgtcaatcagaaggactgcccatatatgtgtgcatacaaactggttactgtcaagttcaagtggtggggcttgcagaacaaagtggaaaactttatacataagcaagagaagcgtctgtttacaaactttcacaggcagctgttctgttggcttgataaatgggttgatctgactatggatgacattcggaggatggaagaagagacgaagagacagctggatgagatgagacaaaaggaccccgtgaaaggaatgacagcagatgactagcgctaccgccctttctgcactttttgcaagacagtggtccacaggaaggcccagcagctccaccctcctgagtggcaggccatctttggacgcagcctttctgtgctcattcttcaggcaactttcagtcccttactatagctatttctagatgccctttaacattgtgaacaaatagaccgtctggtattataaagcctgtgtgtgcgggagcctgatcctctaagatatatggtgtatgctgctgtatttacagctcatcctctctccattgtgccctgacccatttctgtatgccctccccctttatttccaagtgacgttctcattcttt

SEQ ID NO: 4021 - DNA, 442 bp, Rattus norvegicus
tttgaggactttgtggttgggctctccatcctgcttcgagggaccgtccatgagaagctcaagtgggccttcaatctctacgacatcaacaaggacggttacatcaccaaagaggagatgctggccatcatgaagtccatctacgacatgatgggccgccacacctaccctatcctgcgggaggacgcacctctggagcatgtggagaggttcttccagaaaatggacaggaaccaggatggagtagtgactattgatgaatttctggagacttgtcagaaggacgagaacatcatgagctccatgcagctgtttgagaacgtcatctaggacatgtaggaggggaccctgggtggccatgggttctcaacccagagaagcctcaatcctgacaggagaagcctctatgagaaacatttttctaatatatttgcaaaaagtg

SEQ ID NO: 4022 - DNA, 710 bp, Rattus norvegicus
gcaggtgtcctagctggacatgacaaccgagtcagctgcttgggggtgactgatgatggcatggctgtggcaacaggatcctgggacagcttcctcaagatctggaactaaggccagtagcaggtggatggatgccatggcgactggaagaccattccaaccttgaagcgttactgcgatagcatatcctatccaaccatactaacgtggacacccacacctcccctcagaacttcaaaagggcaagatcttttttccttcacttattgctgaaaccaagagcacaactcccattaagagaaggatctctgtgctgtaaactaaaacaaattgtgcatttttctggggccattgtctttggtttattttgttttgttttttgtttttgttttgttttgtcttggtcaaatttttaaaggaaatactacaataaaaatgttaaccagaaggtaaccctgagtatgattgtgagagagacacaccttcttactagttcatttgcatttaaatcagtgatcctgatctgtggcattcatgaaaaacaagttgaagactttgtttatctggaattgtttctaaatataagtcatttgtagcaagactttggaagcattcacgtttcttccttaaacatattcctttatgttcagtagttaagagaaccagagcccatgggggtgtctgactgtcactgatgcatttttgtccct

SEQ ID NO: 4023 - DNA, 456 bp, Rattus norvegicus
aaccgtgtgagctgccttggggtcacagatgatgggatggctgtggctacaggctcctgggactccttcctcaagatctggaactaacctccccaaccccagatgggcccaggcagggagcagccctgcccatgcccacactacaggcccggagctttggggctgggcacacatgccaagcctccctccctgggctacagggccttgggtcctgctcccatacccaggtttggttcctctcggggggcccccactgtggagataaaagtcggggatggaatgggggaagaggaagggcaggaaagccctcaccctttgctgccctggggccagggcctcacccctctggagggccagaggcaggaggtggaaactccaggggctggtttttttaactggttttattttaatttttattatattttcagtttttccataaaggaaccacttccaact

SEQ ID NO: 4024 - DNA, 1175 bp, Rattus norvegicus
actgatgacggcatggctgtggccactggctcctgggacagttttctcagaatctggaattgagtgctgtattttctgttctccaatgatatttggagaaatccgtgctacagccatagctgtgaggaaaaaaccctctaccttctatttgcagatgaagttcttctattgaggtgactatatatatatataaagccactttcaataaactgtagtttattgaaactcttctaacaaaaatggtggtcaaagaaacaatcaagactaagatcccttgctgcggttaagcccgtgatattcactgagcggttgtgttgactttatccctatcccgacagactcttgcttgtgctaattgtttttctgtagattagagtgcacactttatagcaggacaaccatttgtgtttgcattttgttaaggcctaccattgaactttgtatatacaagaaatgtcacattttttagagtgttgttgtggaagcaccagggcctgtgacagacagaagtgatactgtagacatatgtgctgtctgaaggaaggccccttggattctgacatcacattttaacctgaatgtccctgactgcttcacgattaggagggctgataggtgaggtgattctgagggacccagtggctgttcacgcattctttggcacactaggaagttaagtagatgctcattttcagtcctttgaggggacaggtgatatgaaggccagggggtaaaaaaattcactttgacatagggtacacactgaagaaatgtcattacagtttattacattagaaaccagtagacactggcatgcaatttttggtattttaagaggttcagccatttgaaccatcggaccttgctgttaattttgcattctgaagcgaagtttgtagaaagtactagtatttgagaagtctgacaaaaacctgacttgtccctgcatttgaagactcttgcctggtgttctctgtaacaggacgaaacagtgtctcacctttgacgtttttgagaaatgtaaactcatccattcaactggcacaaatatatgattgatgtgtcacacacacatacatatatatatatatgtatatacacacacatatacacatgtacgatgactttatgaattctgtgtgatgtaaaaatttatgtaatgtaaaagcaggtat

SEQ ID NO: 4025 - DNA, 565 bp, Rattus norvegicus
agacgctggcgtcgctgaagagcgaggccgagagcctcaagggcaagctagaggaggagcgggcgaagctgcatgacgtggagcttcaccaggtggccgagcgggtggaggccctgggccagtttgtcatgaagaccagaaggaccctcaaaggacacgggaacaaagtcctgtgcatggattggtgcaaagacaagcggaggatcgtgagctcctcacaggatgggaaggtgattgtctgggattccttcactactaacaaggagcacgcggtcaccatgccttgcacctgggtgatggcgtgtgcttatgccccatcaggatgtgccattgcttgtggtggtctggataataagtgttccgtgtacccactgacatttgacaagaacgagaacatggctgccaagaagaagtctgtcgctatgcacaccaactacctgtctgcctgcagcttcaccaactcagacatgcagatcctgacagccagcggtgatggcacttgcgccctgtgggatgtggaaagtggacagctgttgcagagcttccatggccatggggctgacgt

SEQ ID NO: 4026 - DNA, 109 bp, Rattus norvegicus
caggataaaggtgtccaaggcagctgcagacttgatggcctactgtgaggcacatgccaaggaagatcccctgctgaccccagtcccggcctcagaaaatccctttcgg

SEQ ID NO: 4027 - DNA, 175 bp, Rattus norvegicus
cagcactatgagtattggccaagcacgcaagatggtggaacagcttaagattgaggccagcttgtgccggataaaggtgtccaaggcagcagcagacctgatgacttactgtgatgcccacgcttgtgaggatcccctcatcactcctgtgcccacttcggagaaccccttccgg

SEQ ID NO: 4028 - DNA, 1263 bp, Rattus norvegicus
atgttcccacacttccttctgctgctgaccgtcttgggccctggcaacagccttcatctgcaggagccgtgggggcatgaaaccatggaaggcctgggccctgtgcatctccgggaacggagacaggtggttggggatgatgattttgaataccccgactacagcgtgtatggcacagatcccccagaaacgttgataagtgtccccaacatggtggcggctcaccttgagcttcggacaatggtggccgtgttagagcagagagtttccgcgggggctggaacttctgagactgtcactgcgcaggttgccaccactggccctgctgacccggatacagaaaggccagcagttgggatgctgagcactgaatctgtcacacagcggagactaagcccagtggagatgactacccggctagcacccacggaggcagagacctcacagccagcacccataaaggcagagacctcacagccagcacccataaaggcagagacctcacagccagcacccagggaggcagagacctcacagccagcacccacggaggcagagacctcacagccagcacccacaaaggcagagacctcacagccagcacccacagaggcagagacctcacagccagcacccacggaggtagagacctcacagccagcacccacagaggcagagacctcacagccagcacccacggaggcagagacctcacagccagcgtccacagagacagagaccacccagcttcccaggagtcaggttgtagaaagtctatttacaacatctgcggtcacagaagccccttctacggaacccaccgccatggagaccctgtccacagaggctaatgagtctgccatcttccttgggccttccattggccacttacctgacaccgggctgaagaaagggctgattgtcacccctgggagttctctggccccaaccccgccagggacctcggacctcatcccggtgaagcaatgtttgctggccattctcatcttagcctccctggccaccatcttccttgtgtgcacggtggtgctggccgtccgcctctcccgtaagacgcacatgtacccagtgcggaactactcccccacagagatgatctgcatctcatccttgcttcccgaggggggtgacggggcccctgtcacagccaacgggggcctgcccaaggtccaggaccagaagacagaacgcagtggggacccggatggggatgacctcaccctgcacagcttcctcccttag

SEQ ID NO: 4029 - DNA, 16300 bp, Rattus norvegicus
gttaatgtagcttataataaagcaaagcactgaaaatgcttagatggattcaaaaatcccataaacacaaaggtttggtcctggccttataattaattggaggtaagattacacatgcaaacatccataaaccggtgtaaaatcccttaaagatttgcctaaaacttaaggagagggcatcaagcacataatatagctcaagacgccttgcctagccacacccccacgggactcagcagtgataaatattaagcaatgaacgaaagtttgactaagctagtacctctcagggttggtaaatttcgtgccagccaccgcggtcatacgattaacccaaactaattattttcggcgtaaaacgtgccaactataaatctcataatagaattaaaatccaacttatatgtgaaaattcattgttaggacctaagcccaataacgaaagtaattctaatcatttatataatgcacgatagctaagacccaaactgggattagataccccactatgcttagccctaaaccttaataattaaacctacaaaattatttgccagagaactactagctacagcttaaaactcaaaggacttggcggtactttatatccatctagaggagcctgttctataatcgataaaccccgttctaccttaccccttctcgctaattcagcctatataccgccatcttcagcaaaccctaaaaaggcactaaagtaagcacaagaacaaacataaaaacgttaggtcaaggtgtagccaatgaagcggaaagaaatgggctacattttcttttcccagagaacattacgaaacctttatgaaactaaaggacaaaggaggatttagtagtaaattaagaatagagagcttaattgaatagagcaatgaagtacgcacacaccgcccgtcaccctcctcaaattagattgacattcacatatacataatttcactaacaaatttatgagaggagataagtcgtaacaaggtaagcatactggaaagtgtgcttggaataatcacagtgtagcttaatcacaaagcatctggcctacacccagaagaattcataaaaaatgaacactttgaactaaccctagccctacaaccaaccaacataactaaacccccacataaactaaaacatttaactcaaaaagtattggagaaagaaatttacttaccaagagctatagagaaagtaccgcaagggaaatgatgaaagactaatttaaagtaaaaacaagacaaagattaaacctgtaccttttgcataatgaattaactagaaaatccttaacaaaaagaatttaagctaagaaccccgaaaccaaacgagctacctaaaaacaatttcatgaatcaacccgtctatgtagcaaaatagtgggaagatttttaggtagaggtgaaaagcctatcgagcttggtgatagctggttgcccaaaaaagaatttcagttcaaactttaagcttccatcagaacaacaaatcaaaatgtaaacttaaaatatagccaaaagagggacagctctttaggaaacggaaaaaaccttaaatagtgaataaacaactacaatcacttaaccattgtaggcttaaaagcaagccatcaataaagaaagcgtcaagccacatcatcttacacacacactaattccacaaacctcaaaaattccaaaattacaaattgggctaaatctatgatcctagtgaatactgttaatatgtgaacaagaaccaatccaccaagcacaagtgctaagacaaccggataaccattgttaattattgaatcataggcataacccaacaatagaattacctatccctaactcgttagcccaacacaggcgtgctttaaggaaagtttaaaaaagtaaaggaactcggcaaacacgaaccccgcctgtttaccaaaaacatctcctctagcataacaagtattagtggcatcgcctgcccagtgactaaagttccacggccgcggtatcccgaccgtgcaaaggtaggataatcacttgttccttaattagggactagaatgaatggctaaacgagggtccaaccgtctcttacttgcaatcagtgaaattgaccttccagtgaaggggcggactcataataaaagacgagaagaccctatggagctttaatttactaatttcaatttatataaaaaaacctaatgggcgaaaacaacaaaattatgaactaccaaatttcggttggggtgacctcggagaataaaaaatcctccgaatgattataaccgagtcggtaaccgtgtccgacccagtcaagtaatactaatatcttattgacccaattattgatcaacggaccaagttaccctagggtaacagcgcgacctatttaagagttcatatcgacaattagggtttacgacctcgatgttggatcaggacatcccaatggtgcagaagctattaatggttcgtttgttcaacgattaaagtcctacgtgatctaagtccggcaatccaggtcggtttctatctatttacaatttctcccagttacgaaaggacaagagaaatggagaccaaccaatcctaggcttccaaccaatttagaaaaacttaataaagtatatatgtacaataaataaccttagacccaagttattagggtggcagagccaagtaattgcgtaagacttaaaaccttgttcccagaggttcaaatcctctccctaatagtgtactttattaatatcctaacactcctaatcccaatcttaattgccataggccttctcaccctagtagaacggaaaatcctaggctacatacaattacgcaaaggccccaacaacgaaggcccatatggtaaactacaaccatttgcagatgccataaaactattcataaaagaacccatacgccctctaaccacctcaatatcactatttattatcgccccaaccctctcccttacactagctctaagcctatgaattcccttaccaataccccacccccttatcaacctcaacctaggcataccatttattctagccacatccagcctttcggtctactccattctatgatcgggatgagcctcaaattcaaaatactccctattcggagccctacgagccgttgcccaaaccatctcttacgaagtcacaatagccttatacctcttatccgtcctcctaataagcggctccttctccctacaaatacttatcactacacaagaacatatctgactattaatccccgcctgaccaatagccataatatgatacatttcaaccctcgcagaaacaaatcgagctcccttcgacttaacagaaggagaatcagaattagtctcaggctttaacgtcgaatacgccgcaggaccattcgccctattcttcatagccgagtacaccaacattattctaataaacgccctaacatcaattgtattcctaggccccttatatcatatcaattaccctgaattatactcaaccagcttcataacagaaacactacttctatccacaactttcctatggattcgagcatcctacccccgttttcgatatgaccaactaatgcacctcctatgaaaaaatttcctcccactaacactagcattctgcatatgatacatttccctgccaattttcctagcaggaattccaccctacacatagaaatatgtctgacaaaagagttactttgatagagtaaataatagaggtttaaatcctcttatttctaggacaataggaattgaacctacacctaagaattcaaaattctccgtgccaccaatacaccctatcctacatagtaaggtcagctaactaagctatcgggcccataccccgaaaatgttggttaaacccttcccgtactaataaatccaattaccctaaccattatttacttaaccacctttaaaggccgcctaatcacgacacttagcaccaacttaccaccaatatgagtaggattggaaataagccttttagctatcatcccacttctagccaacaaaaaaagcccacgatcaactgaagcagcaacaaaatattttctaacccaagctacagcctcaataattatcctactagtcatcatcctcaactacaaacaatcaggaatatgaacccttcaacaacaaaccaataacatactactcaacataatactcatttcactggccataaaacttggactagccccattccactactgactacccgaagtcacccaaggaattcccctacacattggattaatcttactaacatgacaaaaaattgctccactatcaattctataccaattttatcaactcctaaacccaactatcaccaccattctcgcaatttcatcagtctttgttggcgcctgaggaggacttaaccagacccaaacacgaaaaatcatagcatactcatcaattgcccacataggatgaataacagcaatccttccatacaaccctaacttaaccctcctaaacttaacaatttacatcctacttactgttccaatattcaattacatcataacaaactcagcaacaacaatcaacacactctcactcgcatgaaataaaactcccataatcctaaccatagcatccatcatcctcctatcactaggaggactcccccctctcacaggatttttaccaaaatgagcaattatctccgagcttctaaaaaacaactgctcaaccctatcaacactaatagctatcatagccctattaagcctattcttctatactcgactaatttactctatatccctcaccacattcccaaccaacaacaactccaaaataatctcccaccaccaaaacccaaaacataattttatcctcccaaccctcacagtattaagtaccctaaccctaccgctttcctcccaactaatcacatagaagtttaggatatacagttcaagagccttcaaagcccttagaaaacaaacaagtttaacttctgataaggactgtaagactatatcttacatctgttaaatgcaaatcaactgctttaattaagctaaatcctcaactagattggaaggaatcaaattcctacgaaaatttagttaacagctaaataccctacttactggcttcaatctacttctcccgcctatcagaaaagaggcgggagaagccttagtagaggagattctctacaccttcgaacttgcaattcgacatgataatcaccttaaggctttttggtaaaaagggggctcaacccctgtctttagatttacagtctaatgcttactcagccattttacctatgttcgtaaaccgttgactcttttcaactaaccacaaagatatcggaaccctctacctattatttggagcctgagcaggaatagtagggacagctttgagtattctaattcgagctgaactaggacagccaggcgcactcctaggagatgaccaaatctataatgtcatcgtcacagcccatgcattcgtaataattttctttatagtaatacctataataattggaggcttcggaaactgacttgtaccactaataattggagcccctgatatagcattcccacgaataaataacataagcttttgactgcttcctccatcatttctactccttttagcatcctccatagtagaagctggagctggaacaggatgaacagtatatccccccttagccggaaacctagcccatgctggggtatccgtagatttaactattttttccctccacctagccggggtgtcttctatcttaggagctatcaactttatcaccactatcattaatataaaaccccctgctataacccaatatcagacacctctctttgtatgatccgtactaattacagccgtcctactacttctctcactgccagtattagcagcaggtatcactatactccttacagaccgaaatctaaatactactttcttcgaccccgctggaggtggagacccaattctttatcaacacctattctgattcttcggccacccagaagtgtacatcttaattcttccagggtttggaattatttcacatgtagttacctattactctggaaaaaaagaacccttcggatatataggtatggtatgaaccataatatctattggcttcctaggatttattgtatgagcacatcacatattcacagtaggcctagatgtagacacccgagcctactttacatctgccactataattatcgcaattcctacaggcgtaaaagtattcagctgactcgctacactacatggaggaaatatcaaatgatcccccgccatattatgagccttagggtttatcttcttattcacagtagggggcctaacagggatcgtactatctaactcatcccttgacattgtacttcatgatacatactacgtagtagctcacttccactatgtcttatctataggagcagtattcgccatcatagctggcttcgtccactgattcccactattctcaggctataccctaaatgacacatgagcaaaagcccactttgccattatatttgtaggtgtaaacataacattttttcctcaacacttcctaggattagcagggatacctcgtcgttactctgattatccagatgcttataccacatgaaatacagtctcctctataggctcattcatctcacttacggccgtccttgtaatgatcttcatgatttgagaagccttcgcatcaaaacgagaagtgctctcaatttcctactcttcaactaacctagaatgactgcatggatgccccccaccttaccacacattcgaagaaccttcctatgtaaaagttaaataagaaaggaaggaatcgaccccctacaactggtttcaagccaatttcataaccattatgtctttctcaatgagatattagtaaaataattacataaccttgtcaaggttaagttatagacctaatcctatatatcttacatggcttacccatttcaacttggcttacaagacgctacatcacctatcatagaagaacttacaaactttcatgaccacaccctaataattgtattcctcatcagctccctagtactttatattatttcactaatactaacaacaaaactaacacacacaagcacaatagacgcccaagaagtagaaacaatttgaacaattctcccagctgtcattcttattctaattgcccttccctccctacgaattctatacataatagacgagattaataacccagttctaacagtaaaaactataggacaccaatgatactgaagctatgaatatactgactatgaagacctatgctttgactcctacataatcccaaccaatgacctaaaaccaggtgaacttcgtctattagaagttgataatcgggtagtcttaccaatagaacttccaattcgtatactaatctcatccgaagacgtcctgcactcatgagccatcccttcactagggttaaaaaccgacgcaatccccggccgcctaaaccaagctacagtcacatcaaaccgaccaggtctattctatggccaatgctctgaaatttgcggctcaaatcacagcttcatacccattgtactagaaatagtgcctctaaaatatttcgaaaactgatcagcttctataatttaaactcattgcgaagcttagagcgttaaccttttaagttaaagttagagacaacaaatctccacaatgacatgccacaactagacacatccacatgatttattacaatcatctcctcaatagccacactatttattttatttcaattaaaaatttcttcccaaacctttcctgcacctccctcacccaaaactatagccacagaaaaaacgaataacccttgagaatcaaaatgaacgaaaatctatttgcctctttcattacccccacaataataggtctaccaattgttgtgaccattattatgttcccatcaattctattcccatcatcagaacgcctaatcagcaaccgactacactcatttcaacactgactaatcaaacttatcatcaaacaaataatgttaattcacacaccaaaaggacgaacctgagccctaataattgtatccctaattatatttattggctcaaccaaccttctagggcttcttccccatacatttacccctaccactcagctatctatagacctaagcatagccatccccctatgagcaggagccgtaattctaggtttccgacacaaactaaaaaattctttagcccacttctcaccgcaaggaacccccatctcactaattcccatactaatcatcatcgaaactatcagcctatttattcaaccgatagcactagcagtacgactaacagcaaacattacagcaggccatctattaatgcatctaatcggaggagctaccctagtacttatagacatcagcccaccaaccgctacaattacatttattattctacttctacttacagtacttgaatttgccgtagccttaattcaagcctatgtattcacccttctagtcagcctgtacctacatgataacacataatgacccaccaaacccatgcataccatatagtaaacccaagcccatgaccactaacaggagccctatcagctcttctactcacatccggcttagtaatatgattccattacaactccacaattctcctatcattaggcctcctgacaaacatcctaactatatatcaatgatgacgagatatcatccgtgaaggaacataccaaggccaccacacccctattgtacaaaaaggcctccgatacggaataatcctgtttattgtctccgaagtattcttctttgccggatttttctgagcattttatcattccagcctagttcctacccacgacctaggcggttgctgacccccaacaggaatcacccctttaaatcccctagaagtaccccttctaaatacatcagtcctcttagcatcaggagtctcaattacatgagcccatcacagcctaatagaaggcaaccgaaaccatataaaccaagccctactaatcaccattctcttaggattatatttcactatcttacaagcctcagagtatttcgaaacatcattttctatctcagacggaatttacggctcaacattcttcatagcaacgggatttcatggcctccacgtaattattggctcaactttcctaattgtctgtctactacgacaactaaaattccacttcacatcaaaacatcatttcggatttgaagccgcagcatgatactgacacttcgtagatgtagtttgactattcctatacgtttctatctattgatgaggatcctactcccttagtataaacaatacaactgacttccaatcagttaattctgaaaaaactcagaagagagtaattaacctacccattatcatcacaattaacatcaccttatcctttatcctcatttcaattgcattctgattgcctcaaataaacttatactccgaaaaagcaaacccatatgaatgtggcttcgacccaacaagttctgcacgccttcctttttcaataaaatttttcttagtagccattacatttctactattcgacctagaaatcgccttactacttcccctcccatgagcgattcaaacaaccaataccactacaataatagcaactgcctttattttagtcactattttgtctcttggcctagcctacgaatgaacacaaaaaggactagaatgaacagaataattggtaattagtttaaataaaattaatgatttcgactcattagattatgataataatcataattaccaacaatgacatctgctttcctaaatttaactatagcctttacattatctctactaggtacttttatatttcgctcccacctaatatccactctcctctgcctagaaggaataatactatcactatttgtcataacttcaacatccacattaaactccaactccataatctccataaccatcccaattaccattctagtttttgcagcctgcgaagcagcagtaggtttagccttactagtaaaaatttcaaatacttacggaacagactacgtacaaaacctcaaccttctacaatgttaaaaattattttcccatctatcatactcctcccactaacatgactctcagccaacaaaaaaatctgaaccaatgtcacctcctacagctttctagtgagcctattaagcttatcactcctatgacaaaatgacgaaaattacctaaatttctcagttatattctcctccgatccattatccaccccactaatcattctaacaacttgactcctcccactaataatgctcgctagccaaaatcacataaaaaaagaaaatataatgcatcaaaaactttacatctcaatacttattagcctccaaattttactcatcataacattctccgcaacagaactaattttattttatatcctgttcgaggccactctaatcccaacactaattatcattacacgatgaggcaaccaaacagaacgcttaaatgcaggaatttatttcctgttttatacactaattggctccatcccactcttaattgccctcatttcaatccaaaactcaataggaacactcaacttcctaatcctttccctcacaacacaccccctaccctcaacatgatccaacaccattctatgactagcatgtataatagcatttataatcaaaataccattatacggagtccatctatgattaccaaaagcccacgtagaagctccaattgcaggctctataattttagcagcaattctcctaaagctagggggttatgggataatacgagtttccatcattctagaccccctaacaaaatctttagcctacccattcatcatcctctcattatgaggcataattataactagctcaatctgcctacgccaaacagatctaaaatcattaattgcttactcatcagtaagccatatagccctagtcatcacagccattataatccagacaccatgaagcttcatgggagccacaatactaataatcgcccacggcttaacctcatcactcttattctgcctagcaaacaccaactacgaacgaattcacagccgaactataattatagctcgaggattacaaataatctttccattgatagcaacatgatgactattagcaagcttagccaacctagcactaccacccctaattaacctcataggcgagttattcattgttatagcaacattttcctgatcgaacccctctatcatccttatagcaactaacattgtcatcacaggaatatactcaatatatatgattatcacaacccaacgaggaaaactaaccagccacataaacaacctccaaccttcccacacacgagaattaacactcatagctctacacattattcccctcatactattaacaatcaaccctaaactcatcacaggcctaacaatatgtagatatagtttacaaaaaacattagactgtgaatctaacaacaggaaatcaaattccttatttaccaagaaagtatgcaagaactgctaattcatgcacccatacctaaaacatatggctttcttacttttataggatagaagtaatccattggtcttaggaaccaaaaaccttggtgcaactccaaataaaagtaataaatataataacaatcctaatcctcataattcttgatttacttacaacaccaatcacattttcaataacaatcttaaccaaacttatgtacttccgtcatatgctcattacatcaattaaattctcattcctccttagcctcttacctttactactattcttccaccacaacacagaatacataattactaactgacattgactaactattaattctattaaacttactataagtttcaaaattgactatttctcaatcctattcctatcagtatccctattcgtaacatgatcaattatacaattctcttcatgatatatacactctgacccccacattaaccgattcattaagtacttaataatattcctgaataacatactaatcctaacctcagctaacaatctattccaactctttattggatgagaaggggtaggaattatatccttcttattaatcggatgatgatatggccttgcagacgccaacacagcggccctccaagcaatcctctacaaccgagtcggagacattggtttcatcctagctataacctgattctgcctaaacataaactcctgagaactccaacaaattttcttaaccaacaccaacaacaatctagtccctctcacaggactactaattgcagccacaggaaaatccgcccaattcggacttcatccatgactcccatcagctatagaaggcccaactcccgtctctgccctactacactcaagcacaatagttgtagcagggatcttcctaataatccgattccaccccctaacctcaaacaatagtactattataacagccatactatgtcttggtgcaatcaccacattattcacagcaatctgtgctctcacccaaaacgacatcaaaaaaatcgtagctttctcaacatccagccaactaggccttataatagtcacattagggattaaccaaccctaccttgctttcctccacatttgcacccatgcattcttcaaagccatattattcatatgctccggatcaatcatccatatcctcaacgatgaacaagacattcgaaaaataggcaatataataaaagcaataccattcacatcatcttgtctcattatcggaagcctagcccttaccggaatacctttcctcacaggattctattcaaaagatctcatcatcgaagccatcaacacgtgtaacaccaacgcctgagccctaataatcactttaatcgccacatccataactgctgtgtacagcatacggatcatctacttcgtcaccatgacaaaaccacgatactccccactaattactattaatgaaaacaacccaaacctcattaatccaatcaaacgcctagcattaggaagcatcctagcaggcttccttatctcactaaatattcctccaactaacattcaaattctcacaataccctgacatttaaaaataacagccctacttattacaatcctaggatttgccattgccctagaacttaacaatttaacactaaatctatcaataagcaaacccaccaaactatcatcattctcaacctccctaggctactacccaccaattataccccgaattattcctcaaaaaactctaaattctagctacaaattatccttaaacctactagacctaatctgatcagaaaagacaatcccaaaatcaacctcaatcacccaaacccaactatctaaaataatatccaaccaaaaaggactaatcaaactatatttcctatcatttctcatcactatttcactaatttttatcttacacacacttaatcccgagtgatttcaataataataaaaatccccgcaaacaatgaccacccagccaccactatcattcaagtagcacaactataaatagccgcaaccccaatccccccctccaacataaccccaacatcatcaatctcatacattaatcaatcgcctagactatcaaaatcaactaactccaccttattattcaaactaaacaagtagaacactaccaactccataaaaagccctaaaacaaaaaaactaaaaataaaccaattagaccctcaagtttccggatattcctcagtagccatagcagttgtatacccaaatacaaccaacatcccacccaaataaattaaaaatactattaaacctaaaaacgaacccccaaaccctaaaactattaagcacccaatacatccactaacaatcaatccaaacccaccataaataggtgaaggcttcaacgccaaccctagacaaccagtcaaaaacagtaaacttaaaataaacatataatttgtcattatttctacacagcatttaactgtgactaatgacatgaaaaatcatcgttgtaattcaactatagaaacatctaatgacaaacatccgaaaatctcaccccctattcaaaatcatcaaccactcctttatcgacctaccggccccatctaacatctcatcatgatgaaacttcggttctctactaggagtatgcctcatagtacaaatcctcacaggcttattcctagcaatacactacacgtctgataccataacagcattctcatcagtcacccacatctgccgagacgtaaactacggctgactaatccgatacctacaagccaacggcgcctcaatatttttcatctgcctattcctccatgtgggacgaggactatactatggatcctacactttcctagaaacctgaaacattgggatcatcctactatttgcagtcatagcaactgcattcatgggctatgtactcccatgaggacaaatatcattctgaggagctacagtaattacaaacctattatcagctatcccttacattgggactaccctagtcgaatgaatctgaggaggcttctcagtagacaaagcaaccctaacacgcttcttcgcattccacttcatcctcccattcattatcgccgcccttgcaattgtacatcttcttttcctccacgaaacaggatcaaataaccccacaggattaaactccgacgcagacaaaatcccattccatccatattatacaattaaagacctcctaggtgtatttatattactattattcctaataaccctagtactattcttcccagacctactaggagacccagacaattatacacccgctaaccccctcaacaccccaccccacatcaaaccagaatgatactttctctttgcctacgctattctacgctccattcccaacaaactaggaggggtcgtagccctaatcttatcaatcctaatcttagccttcctaccattcctgcatacctcaaaacaacgcagcttaacattccgcccaatcacccaaatcctttactgaatcctagtagccaacctcctagtcttaacatgaatcggaggccaaccagtagaacacccatttatcattattggtcaactagcctccatcagttatttttcaattatcctcattctcataccaatctctggaattgttgaagacaaaatgttaaaatgaaattaatgtcccgatagtataaaaattactctggtcttgtaaaccaaaaatgaagagtcagtcttctcaggacaatcaagaagaaggaactacctccccaccatcaacacccaaagctgatattctacttaaactacttcttgtcagtacataaaatgatatggacattaaaacatttatgtatatcgtacattaaattattttccccaagcatataagcatgtaatatatatctaatgatttaggacatacatttaaactcaactataaattcacaacaacatgtctattctcaaatacattaagataatgcttattagacatatctgtgttattagacatgcaccattaagtcataaacctttctcttccatatgactatccctgtccccaattggtctctatttctaccatcctccgtgaaatcaacaacccgcccactcgtccccctcttctcgctccgggcccattcgtcctgggggtgactatactgaaactttaccaggcatctggttcttacttcagggccatcaattggttcatcgtccatacgttccccttaaataagacatctcgatggtaacgggtctaatcagcccatgatcaacataactgtggtgatatacatttggtattttttaattttcggatgccttcctcaacatagccgtcaaggcatgaaggtcagcacaaagtcctgtggaaccttttagttaagggtcatttatcctcatagacaaagctcgaaagactattttattcatgtttgtaagacataaatatttataaatactgaaaaatctgtcaacaaacccccccaccccctacacctgaaacttcaatgccaaaccccaaaaacattaaagcaagaattaaataaaacaaaaagctacttaattcttaaaaggcttctccattctagtagaccacaaaattttaacttaaatcttagcattggtaaaatttcccgacacaaaatctttcctcctaactaaaccctctttacttgcctaccctcagaaaattccacatacaccaaa

SEQ ID NO: 4030 - DNA, 1446 bp, Rattus norvegicus
agcagcaagacgtgagagcacagttgtggctggttttgagaatacaagaaaaagggaaatgggatgaaggcggaaaccttcagccatgcttccaaacttccctgggtgttcctggtcatttctctctagcgtctcttgtgactgtcccatctgagggtgtaatgccttcgcctctcatcctgtgtcgctacctccctcgcgagctgtcgccaacggtggactcgaggtcctgcagcagccccttggtggcctcgagggcggggaagttcctgggggccactcctcctcgggccccgcggctgtcacgccggctggcctggtgcttcatagactggggacaggtatgcctgctgcataggctgggttctggagggtttggctcggtgtacaaagccacttaccacggtgttcctgtggccatcaagcaagtgaacaagtgcaccagaaccctacgtgcatcccaacggaatttctgggctgaactgaacattgcaaggctgcaccacgacaacataatccgggttgtggctgccagcacgcgcacgccggaaggttccaacagccttggtaccataatcatggagtttgggggcaatgtgactctacaccaagtcatctacggtgccacccgctccccagagcctctcagctgcagagagcaactgagtttgggaaagtgcctcaagtattccctagatattgttaacggcctgctttttctccactcacaaagcattttgcacttggacctgaagccagcgaacattttgatcagtgagaaggacgtttgtaagataagtgacttcggctgctcccagaagcttcaggatctgcggtgccggccgtcccttcaccacatcgggggcacgtacacgcaccaagctccggagctcctgaaaggagagatcgccacgcccaaagccgacatctactcttttggcatcaccctgtggcagatgaccaccagggaggtgccttactccggcgagcctcagtacgtgcagtacgcagtggtagcctacaatctgcgccctcactggcaggcggtgttcaccgcctccctgactgggaagacgctgcagaacaatgtccagagctgctgggaggcccgcgccctgcagaggccgggtgcagaactgctccagaaggacctgaaggctttccgaggggcactgggctgactccatcgagccgatgtgcagataagcttttcgtttctgtttatttttaaataagtaaggatgggcttttagggcatatttttagaaaataaagttactacaaacttcagcctgaagtgcctttcctaagactaacgagggtacagatatcatgggcaccactcacggttgttaaacaacctgagccctttgtgtgtcacctttctgggtctactgtatcatttccgtagtaaggtttgttcctgaatgaaaagagaaagggggt

SEQ ID NO: 4031 - DNA, 2615 bp, Rattus norvegicus
catcctccctggggtcctagagaacactcttcagttcagtccttcctcacagccaaagcagccacctagatcatgccttctgtgtatggattcccagccttcacatcagccacagagctgctcttggccgtcaccacattctgccttggattctgggtggttagagtcacaagaacctgggttcccaaaggtctgaagagtccacccggaccctggggcttgcccttcatggggcacgtgctgaccctggggaagaacccacacctgtcactgacaaaactgagtcagcagtatggggacgtgctgcagatccgtattggctccacacccgtggtggtgctgagcggcctgaacaccatcaagcaggccctggtgaaacagggggatgacttcaaaggccggccagacctctacagcttcacacttatcgctaatggccagagcatgactttcaacccagactctggaccgctgtgggctgcccgccggcgcctggcccagaatgcgctgaagagtttctccatagcctcagacccaacactggcatcctcttgctacttggaagagcacgtgagcaaagaggctgaatacttaatcagcaagttccagaagctgatggcagaggttggccacttcgaccctttcaagtatttggtggtgtcagtggccaatgtcatctgtgccatatgctttggcagacgttatgaccacgatgaccaagagctgctcagcatagtcaatctaagcaatgagtttggggaggttactggttctggatacccagctgacttcattcctatcctccgttacctccctaactcttccctggatgccttcaaggacttgaataagaagttctacagtttcatgaagaagctaatcaaagagcactacaggacatttgagaagggccacatccgggacatcacagacagcctcattgagcattgtcaggacaggaggctggacgagaatgccaatgtccagctctcagatgataaggtcattacgattgtttttgacctctttggagctgggtttgacacaatcacaactgctatctcttggagcctcatgtacctggtaaccaaccctaggatacagagaaagatccaggaggagttagacacagtgattggcagggatcggcagccccggctttctgacagacctcagctgccctatctggaggccttcatcctggagaccttccgacattcatcctttgtcccattcaccatcccccacagcaccataagagatacaagtctgaatggcttctatatccccaagggacactgtgtctttgtgaaccagtggcaggttaaccatgaccaggaactatggggtgatccaaacgagttccggcctgaaaggtttcttacctccagtggcactctggacaaacacctgagtgagaaggtcattctctttggtttgggcaagcgaaagtgcattggggagaccattggccgactggaggtctttctcttcctggccatcctgctgcagcaaatggaatttaatgtgtcaccaggcgagaaggtggatatgactcctgcctatgggctgactttaaaacatgcccgctgtgagcacttccaagtgcagatgcggtcttctggtcctcagcatctccaggcttagactgtcctggatgctcaccagactaggtggctgttcctaggattcaacttcagtcagaaacacagaccctggggcattgtgcctgcctcctactttggacttgtttctctatatgctgaacacagacactgggcacagcagagacccacaggaacctcagatccttctcaagttcagcatcaactaggagacctaaaagggttatgagatacctgggcctcagaaaacccctgaagagctctctggtcctccagtggctggctggtttgaaaaatacttacaacaggtcatgctaggatctggctggttactttgacaaccgggagtagcccagaatggagggagaagagaactcaaaatactggcacggaggtgctcttgccatctgctgaggctcaactgtcttccaacatgggtttatgacactacatgtgggggtgtagcaccttcatttaccctacatagaaataaacaaggtctccttgtccttgcaaagcccatgttcctgtttaggaagggctgagagttgtgtgtagaaagacctaagaacatagggacagactttctgggcagtaagaccaggtttagagtaaaggaatgccttttgagacagtattgtgtagtccaagttgcctctgaacttgctaccaagggtggccttgaactccttaattcttttttctgcttttaccaccctaccaagtgctagggtacagtcatgaaccgctacaccagctcttggtctcttgtctttactgtataaaacgtttctttctttcttttttttttaaagaaaatgtttgtgcataagagttttttattgtggcctgtattttgcttatgcatttgtattagtcgtacttcaatagatttagataattcgcttagtgtaatagagaaaaatctaactcaagtatccagaaatatataggaaaaacgtacctgagctaaataaaaatattacctgg

SEQ ID NO: 4032 - DNA, 1874 bp, Rattus norvegicus
tacctggttgatcctgccagtagcatatgcttgtctcaaagattaagccatgcatgtctaagtacgcacggccggtacagtgaaactgcgaatggctcattaaatcagttatggttcctttggtcgctcgctcctctcctacttggataactgtggtaattctagagctaatacatgccgacgggcgctgaccccccttcccgtggggggaacgcgtgcatttatcagatcaaaaccaacccggtcagccccctcccggctccggccgggggtcgggcgccggcggctttggtgactctagataacctcgggccgatcgcacgtccccgtggcggcgacgacccattcgaacgtctgccctatcaactttcgatggtagtcgccgtgcctaccatggtgaccacgggtgacggggaatcagggttcgattccggagagggagcctgagaaacggctaccacatccaaggaaggcagcaggcgcgcaaattacccactcccgacccggggaggtagtgacgaaaaataacaatacaggactctttcgaggccctgtaattggaatgagtccactttaaatcctttaacgaggatccattggagggcaagtctggtgccagcagccgcggtaattccagctccaatagcgtatattaaagttgctgcagttaaaaagctcgtagttggatcttgggagcgggcgggcggtccgccgcgaggcgagctcaccgccctgtccccagcccctgcctctcggcgccccctcgatgctcttagctgagtgtcccgcggggcccgaagcgtttactttgaaaaaattagagtgttcaaagcaggcccgagccgcctggataccgcagctaggaataatggaataggaccgcggttctattttgttggttttcggaactgaggccatgattaagagggacggccgggggcattcgtattgcgccgctagaggtgaaattcttggaccggcgcaagacgaaccagagcgaaagcatttgccaagaatgttttcattaatcaagaacgaaagtcggaggttcgaagacgatcagataccgtcgtagttccgaccataaacgatgccgactggcgatgcggcggcgttattcccatgacccgccgggcagcttccgggaaaccaaagtctttgggttccggggggagtatggttgcaaagctgaaacttaaaggaattgacggaagggcaccaccaggagtggagcctgcggcttaatttgactcaacacgggaaacctcacccggcccggacacggacaggattgacagattgatagctctttctcgattccgtgggtggtggtgcatggccgttcttagttggtggagcgatttgtctggttaattccgataacgaacgagactctcggcatgctaactagttacgcgacccccgagcggtcggcgtcccccaacttcttagagggacaagtggcgttcagccaccgagattgagcaataacaggtctgtgatgcccttagatgtccggggctgcacgcgcgctacactgaactggctcagcgtgtgcctaccctacgccggcaggcgcgggtaacccgttgaaccccattcgtgatggggatcggggattgcaattattccccatgaacgaggaattcccagtaagtgcgggtcataagcttgcgttgattaagtccctgccctttgtacacaccgcccgtcgctactaccgattggatggtttagtgaggccctcggatcggccccgccggggtcggcccacggccttggcggaggcctgagaagacggtcgaacttgactatctagaggaagtaaaagtcgtaacaaggtttccgtaggtgaacctgcggaaggatcatta

SEQ ID NO: 4033 - DNA, 3201 bp, Rattus norvegicus
aggctctctcaaacttctgccgcagctcttcattgccctcgcttccttccggcggcaccggcacattaaagtactcgccttcttcctggcttagtaacttgaaccctcatctccttgaaccttcgggtacttaggcgttcaatcctttcttgggcacccgaggtgctcatcttaacgcaccccagggcctaggacagggtgccaggggcgcggctcagatctgtccagcgcagtctgcggtcctcgcgccgcagcgtgcggctaagaacacttggctggggggcctgcgggttgcggtgtgtgtgtatatgtgtgtgtgtctgagtctgtgtgtgcgtttgctggtggtgccgatatgtaaagcagctggcggctctgggcggggcctgggttccatgcaaatgaaggaggaggggctaccctggggctccgcctccctcccccgcagctggggccagcggtgccaagcacagctggaccagcggcagcagctgggcgagtgacagcccagcaacgcgcgcgcggccgccgccagagccggcgcgaaggggcagcgcggccctgcggtccccgggcggcagcagcggccgcctagtcccgcgcctctccgggcttacagcccccggtcccgccgccccggggccgccacctctcggggctccccccagtccccgcgcgcgcaagatggctgacccggctgcggggccgccgccgagcgagggcgaggagagcacggtgcgcttcgcccgcaaaggcgccctccggcagaagaacgtgcacgaggtgaagaaccacaaattcaccgcccgcttcttcaagcagcccaccttctgcagccactgcaccgacttcatttggggcttcgggaaacagggattccagtgtcaagtctgctgctttgttgtacacaagcgctgccatgaattcgtcacgttctcctgccctggtgcagacaagggcccggcctctgatgacccacggagcaaacacaagtttaagatccacacctactccagccctaccttctgtgaccactgtggatcactgctgtatgggctcatccaccaggggatgaaatgcgacacctgtatgatgaatgtccacaagcgctgcgtgatgaacgtccccagcctctgtggcaccgaccacacagaacgccgtggccgcatctacatccaggcccacatcgacagggaggtcctcatcgttgttgtaagagatgctaaaaatctggtacctatggaccccaacggcttgtcagatccctacgtaaaactgaaactgatccctgatcccaaaagtgagagcaagcagaagaccaagactatcaaatgctccctcaacccggagtggaacgaaaccttcagatttcagctgaaggaatcagacaaagacagaagactgtccgtagagatctgggattgggacctgaccagcaggaatgacttcatgggatctctgtcgtttgggatttcagaactacagaaagccggagtggatggctggttcaagttactaagccaggaagaaggcgagtactttaatgtgccggtgccgccggaaggaagcgagggcaatgaagagctgcggcagaagtttgagagagccaagattggccaaggtaccaaggctccagaagaaaagacagcgaacactatatccaaatttgacaacaatggcaacagggaccggatgaaactgaccgattttaacttcctgatggtgctggggaaaggcagctttggcaaggtcatgctctcagagcggaagggtacagatgaactctatgccgtgaagatcctgaagaaagatgtggtgatccaagatgacgatgtggagtgcacaatggtggagaagagggtgctggccctgcctgggaagcccccattcctgactcagctccattcctgcttccagaccatggaccgcctctactttatgatggagtatgtgaacgggggtgacctcatgtaccacatccaacaagttggccgtttcaaggagccccatgctgtattttacgctgcagagattgccatcggtcttttcttcttgcagagcaagggcatcatttaccgtgacctgaaacttgacaacgtgatgctggattccgaggggcacatcaaaatcgctgactttggcatgtgtaaagagaatatctgggatggggtgacaaccaagacattctgtggcactccagactacattgccccagagatcattgcttatcagccctacgggaagtctgtggactggtgggcgtttggagtcctgctgtatgaaatgttggctggccaggcaccttttgaaggggaggatgaggatgaactcttccagtcaatcatggagcacaacgtggcgtatcccaagtccatgtctaaggaagctgtggcaatctgcaaagggctaatgaccaaacacccaggcaagcgcctgggttgtgggcctgaaggggaacgagacattaaggagcatgcatttttccggtatatcgactgggagaaactcgaacgcaaggagattcagccaccttataaaccaaaagctagagacaagcgagacacctccaacttcgacaaagagttcaccaggcagcctgtggaactgactcccactgacaaactcttcatcatgaacttggaccaaaatgaatttgctggcttctcgtatactaacccagagtttgtcattaatgtgtaggtgaatgcagattccatcgctgagcctgtgtgtaaggctgcaggctgaatgtctattatcaattccagtcttccaggattcatggtgcctctgttggcatccgtcatgtggagagcttgtcttagagggcttttctttgtatgtatagcttgctagtttgttttctacatttcaaaatgtttagtttagaataagtgcattgcccactgatagaggtacaattttccagacttccagaaactcatccaatgaaccaacagtgtcaaaacttaactgtgtccgataccaaaatgcttcagtatttgtaatttttaaagtcagatgctgatgttcctggtcaaagtttttacagttactctcgaatatctcctttgaatgctacctaagcatgaccggtatttttaaaagttgtgagtaagctttgcagttactgtgaactcttgtctcttggaggaaactttttgtttaagaattggtatgattaaatgaattcatatatgc

SEQ ID NO: 4034 - DNA, 1517 bp, Rattus norvegicus
gcaccttcgcccccgcattgctgctgctgctgctggcagacatggacgtggtgaatcagctggtggctgggggtcagttccgggtggtcaaggagccccttggcttcgtgaaggtgctgcagtgggtctttgccatcttcgcctttgctacgtgtggcagctacaccggggagcttcggctgagcgtggagtgtgccaacaagacggagagtgccctcaacatcgaagttgaattcgagtaccccttcaggctgcaccaagtgtactttgatgcaccctcctgcgtcaaagggggcactaccaagatcttcctggttggggactactcctcgtcggctgaattctttgtcaccgtggctgtgtttgccttcctctactccatgggggccctggccacctacatcttcctgcagaacaagtaccgagagaacaacaaagggcctatgatggactttctggctacagccgtgttcgctttcatgtggctagttagttcatcagcctgggccaaaggcctgtccgatgtgaagatggccacggacccagagaacattatcaaggagatgcccatgtgccgccagacagggaacacatgcaaggaactgagggaccctgtgacttcaggactcaacacctcagtggtgtttggcttcctgaacctggtgctctgggttggcaacttatggttcgtgttcaaggagacaggctgggcagccccattcatgcgcgcacctccaggcgccccggaaaagcaaccagcacctggcgatgcctacggcgatgcgggctacgggcagggccccggaggctatgggccccaggactcctacgggcctcagggtggttatcaacccgattacgggcagccagccagcggtggcggtggctacgggcctcagggcgactatgggcagcaaggctatggccaacagggtgcgcccacctccttctccaatcagatgtaatctggtcagtgaagtccatgaagatcccacgggtgggcaagagctcaagagaaggcctgccccccttttcccatccccatatccctaggtctccacccctcaacccaggagaccctaactgtctttgctgtttatatatatatatattatatataaatatctatttatctgtctgagccctacattcacccacttctccatgcactagaggcccagtcctgaatgggctcctccccaaccctgaccttgcattcctcagcccctatctgttccccagccctgtcccttgaggtaaggggctctagaaaggggacaggaagggaaccagaccttggctgcatggagtgggttggtgtgactttctctccttcctcctctccctctgcccctcctaactctggccttggtcctccagcatcacctgaacttcagaagctctcgaatggaaatctgaccccaagagtagagcagtagactgagtggaggaggcttgggtgaaacgggcagagaggagataacctctgtagagagaggactagtcagccaagagtt

SEQ ID NO: 4035 - DNA, 3025 bp, Rattus norvegicus
tgctttctgccctgcgctgcgcaccgttagtgccctgcccctgtccttccgatctcagagtctgcggagtgcccctatcgccgtccacctgtttcctcagaaaaaaggccagctcgtgatccctgctgcgttcctggggccatggcgggtctgggtcctggcgggggcgactcagaagggggaccccgacccctgttttgcagaaagggggcgctgaggcagaaggtggtccacgaggtgaagagccacaagttcaccgctcgtttcttcaagcagccaaccttctgcagtcactgtaccgacttcatctggggcattggaaagcagggcctgcaatgtcaagtctgcagctttgtggttcaccgccgatgccacgaatttgtgaccttcgagtgtccaggcgctggaaagggcccccagacggacgaccctcgcaacaagcacaagttccgtctgcacagctacagcagtcccaccttctgcgaccactgtggttccctcctctacgggctggtgcaccagggcatgaaatgttcctgttgcgaaatgaatgtgcaccgacgctgtgtgcgcagcgtgccctccctttgcggcgtggaccatacagagcgccgtggacgtctgcaactggaaatccgggctcccacatcagatgagatccatattactgtgggtgaggcccggaacctcattcctatggaccccaatggcctgtctgatccctatgtgaaactgaagctcatcccggaccctcggaacctgacaaaacagaagacaaagaccgtgaaagccacactgaatcccgtgtggaacgagaccttcgtgttcaacctgaagccgggggatgtggagcgccggctcagtgtggaggtgtgggattgggataggacatcccgaaatgacttcatgggtgccatgtcctttggtgtctcagagctactcaaggctcctgtggatggatggtacaagttactgaaccaggaggagggcgagtattacaatgtaccggtggccgatgctgacaactgcagcctcctccagaagtttgaggcctgtaattaccccttggaattgtatgagagagtgcggatgggcccctcttcctctcccattccttctccatcccccagtcccacggactccaagagatgcttcttcggtgccagcccaggacgcctgcatatctctgacttcagcttcctcatggttctagggaaaggcagttttgggaaggtgatgctggcagagcgcagaggatccgatgaactctatgccatcaagatactgaaaaaagacgtcattgtccaggatgatgatgtagactgcacccttgtggagaagcgtgtgctggcattgggaggccgaggtcctggaggccggccacactttctcacacaacttcattccacctttcagactccggaccgcctgtattttgtgatggagtacgtcactgggggcgatttaatgtaccacattcagcaactgggcaagtttaaggagccccacgcagcattctatgccgcggaaatcgccataggcctcttcttccttcacaaccagggcatcatctacagggacctcaagttggataatgtgatgctggatgctgaaggacacatcaagatcacagacttcggcatgtgtaaagagaatgtcttccctgggtccacaacccgcaccttctgtgggaccccagactacatagcacctgagatcattgcctatcagccctatgggaagtctgtcgactggtggtcctttggagtcctgctgtatgagatgttggcaggacagccaccctttgatggggaagatgaggaggagctgtttcaagccatcatggaacaaactgtcacctatcccaagtcactttcccgggaagctgtggccatctgcaaggggttcctgaccaagcacccaggaaagcgcctgggctcagggccagatggggaacccaccatccgggctcatggctttttccgttggatcgattgggagaggttggagagactggaaattgcgcctccttttagaccacgtccgtgtggccgcagcggcgaaaactttgacaagttcttcacgcgggcagcgccagccttgaccccgccagaccgcttggtcctagccagcatcgaccaagctgatttccagggctttacttatgtgaacccggacttcgtgcacccagatgcccgcagccccacaagccctgtgcctgtgcccgtcatgtaatctcatctgctgccgctaggtgttcccagtgctccctccgccaagttggctgtaactcccatccacccccatccccgcctctagtccgaattttaggtctcttaaaccacccaaccttctggcctctttcacgcgccccaagtgggttctagacgctgttccccagcattgctggcattttaaacttcaaacagtctctagagcctttctgtgttctagattcgttgtgctgagccctggtttttccccacccccaacatctggatgctgttccaactcttcccagaaaccccactccgtgtggggttctagactctatcttggtagttttatgccttctctctccctagaccacgttgggagaaatagtctcatgagattgcctgctccagactaagattccagatcagctctctgcatccttcaaggcccctcctacctccacttcagttgtagaattaagtgggaggctgggctccgtgttccaggccacctcccttccatgttctggggattcctggcatgcacggaggattctctccccgacttttctcagtcagcttttgttctagatttgttccagaacccttcactgctcacctgccccgtgcatggctccagccttggtcggaatcacacacacacacacacacacacacacacacacacacacacacacacacacaccccttgtcctccgcagtgcctgccactttctgggactttctcatcccccacgcccttcctttatcctctcccacccagacacagctgctggagaataaatttg

SEQ ID NO: 4036 - DNA, 1439 bp, Rattus norvegicus
  misc_feature (1096)..(1096): n is a, c, g, or t
gaattccggggactggcaagcggtgcgtcttagttctctactctcttgtgggaatgagttgccaacctttcacctcggctgatacctttatacctctgaattctgacgcttctgctgccctgcctctgagaatgcaccacagtgccgctgagggtctcccagcctccaaccacgccaccaacgtgatgtccacagcgacaggacttcattattctgtgccttcctgtcattatggaaaccagccatccacctacggagtgatggcaggcactttaaccccttgtctttacaagtttccagaccacaccctgagtcatgggtttcctcccctgcaccaacctctgctggcggaggacccaacagcctctgaatttaagcaggaactcaggcggaaaagtaaattggtggaagagccaatagacatggactccccggaaatccgagaactggagcagtttgccaacgaatttaaagtgagaagaattaagttaggatacacccagacaaacgtgggcgaagctctggccgctgtccacggctccgaattcagtcaaacaaccatctgccgatttgaaaacctgcagctcagtttcaaaaatgcttgcaaactgaaagcaattttatccaagtggctggaggaagctgagcaggtcggagctttgtacaatgaaaaagtgggagcaaacgaaaggaagaggaaacggaggacaactatcagtatcgccgctaaggatgctttggagagacactttggagagcacagcaaaccttcttcgcaggagatcatgcggatggctgaagaattgaatctcgagaaagaagtagtaagagtgtggttttgcaaccgaaggcagagagaaaaacgggtgaaaacgagtctcaatcaaagtctgttctctatttcaaaggagcatcttgagtgcagataagacttgcctgtggtagccatgtgtggtagcctttccattcctttctgatttgaagaaaaatcagaagttacttagcttcataaactagattaaatcagcaacccctgcagtttttgtttcactttcttctttctttcctttttagatccaatgatttaaaacaagangaattcatagcatggccctttactcctaaatcatcaccaagaatgctcacaatacctcttccaattctgcctttatacctaatacacagagatgtggtgataactgggagagaggccactatatatgtgaatattttgagtttaaaaattaccttttgtaagtcaatgtattgttctttaaattttaatcagtaaggacaaatatttaccgactataacagggatggctcaagttgataagctattacttgtccagagagatgtctcagtggttaagagcatctgttgctcttccagaggatgtgggttccatcacctatacagctcacaactgtctgtctct

SEQ ID NO: 4037 - DNA, 1775 bp, Rattus norvegicus
cggacccagaggagaacagtgccaggtcaccagatggaaagcgaaaaaggaagaacggccaatgtcccctgaaaagcagcatgtcagggtatatccctagttacctggacaaagacgagcagtgtgtcgtgtgtggggacaaggccaccggttatcactaccgctgtatcacttgtgagggctgcaagggcttctttcgccgtacaatccagaagaacctccatcccacctattcctgcaaatatgacagctgctgcgtcatcgacaagatcacccggaatcagtgccagttgtgccgcttcaagaagtgcatcgctgtgggcatggccatggacctggttctagacgattcaaagcgggtggccaaacgcaagctgattgagcagaaccgggagaggaggcgaaaggaggagatgatccgctcgctgcagcaacgaccagagcccactcctgaagagtgggatctgatccacgttgctacagaggcccatcgcagcaccaatgcccagggcagccattggaaacagaggcgaaaattcctgccggatgacattggccagtcacctattgtctccatgccggacggagacaaggtggacctagaggccttcagcgagtttaccaagatcatcaccccggccatcacccgcgtggtggactttgccaaaaaactgcccatgttctccgagctgccttgtgaagaccagatcatcctcctgaagggctgctgcatggagatcatgtccctgcgggcagctgtccgctatgaccctgagagcgacaccctgaccctgagtggggagatggcggttaagcgggagcagctcaagaatggtggcttgggtgtagtctccgacgccatctttgaactgggcaagtcactctctgcctttaacctggatgatacggaagtggctctgctgcaggctgtgctgttaatgtcaacagaccgctctggcctgctgtgtgtggacaagatcgagaagagtcaggaggcctacctgctggcgtttgagcactacgtcaaccaccgcaaacacaacattccgcacttctggcccaagctgctgatgaaggtgactgacctccgcatgatcggggcctgccacgccagccgcttcctccacatgaaagtcgagtgccccaccgaactcttccccccactcttcctggaggtctttgaggatcaggaagtctaaagcctcaggcggccagagggtgtgcggagctggtggggaggagcttggagagaagggacaaagctgggggctgagggagaacccccatctcttctctccttcctcccgtccttggatagatacagctcccatacacccctgcaccgcccagccccctcagaacctccagcccttggacagggcgacaaatgaacttgctatgaaaggccgtgtgggaggctgggacccaagttcttagtctctgggaccccaacctctaagaaagtaggggaagggaagaaagactgagagggacaagccatcttgactgtagggtcaggaggaatgaggaataggggcaggtgcccttactcacccctacacacacacaggagagccctgccaagttccttggcctagatttcccttcaggccacaggtctctacttccccaaatacctgggtcctgggtgcaaaggacagcttggcttggcttagctcctcccctggagctaaaaatggtagtcatcctaactgcactttggaaaccaagagagaggggagactataaatgaagaaaaactagacagaaaaaaa

SEQ ID NO: 4038 - DNA, 2182 bp, Rattus norvegicus
gttaacctgtagttggactttctttttctggcagaattcaaagaagctttctccctatttgacaaggacggggatgggacaataacaaccaaggagctggggacggtgatgcggtctctggggcagaaccccacagaagcagagctgcaggacatgatcaatgaagtagatgccgacggtaatggcacaatcgacttccctgaattcctgacaatgatggcaagaaaaatgaaagacacagacagtgaagaagaaattagagaagcgttccgtgtgtttgataaggtaaagccgggccgtgtgcgtgggctgagaatgtggtgaagctaataggacctacccagagcccgacctaggaactagctcagtgcagacttgtgtttcaagtcttagtgcaaagggcatatgacattatgtgcctttggaaccagggacagagtagtgactttgaatatgggaacatcctacttaatgacaattacagatcaactagtgtggatactcttcactttatgtggggaagaaatccccacctccacgtgcaccccgagacaggtttctgactgccctggaactcctgtggaccaggccgctgcagactcagagaacctcctgcctctgcctccacctgatgggaatttctggtctgctctcctaatatgagattgttcctcattagtaacagggttcaactattactcagacgtcacctcccactcttttgtaggatggcaatggctacatcagtgcagcagagcttcgccacgtgatgacaaaccttggagagaagttaacagatgaagaggttgatgaaatgatcagggaagcagacatcgatggggatggtcaggtaaactacgaaggtaagtcatgatgctgcctcactccactccacacgctgattctaggataaaattactgagggtgtttcatagctaaaaatcagcaatctttacctcccgaaatttggatgctaaaatagttctcactaaacttatgtcatttaaaatgtctgccaacaagactacatgactcaccttagaactttgactgtcagttctacgcctgcacctagaaaatcgacattgtaataagatattaacatttgaaaggaactgtacagtttttgtagaaggtggtgggataatttggaaagtttgaaattttactgtgaatattttactgtgaattccctaaaatgaaattaatagactatgtgactaggttctgtttttctttctgactccagtgtgaacagttctaattcaaaagtaccttggttacttgaaactcgaggatggctgcccacttgcaggaagtgagatttttagaaattgaaaggattccagggatcagtctttccgcctttcactttttcagttgtatttttcatgacataacagttataagcagcataaggttagccttacaaagtaaagacagttgttcttatactgagggtacagatttgacttttgacctagctgatagaaagttcaagtgtaaactatgccagataagctcttcatcctgttgctggggattgaactttgggccttagctgtgctggacaagtgttctaccaacgagctacacccacagccccaacattaattgcatcctatctcatgatctaaattaatagtgacttgtgaagatccaactttggccgttaactggctttcccgttactgtggtgattgtgtaggaaagggcagtgtgggtgtcacattgattttgtcctttgtcactgactcacggtttttttgtgttttttttttccagagtttgtacaaatgatgacagcgaagtgaagaccctgtacagaaggtgttaaatttcttgtacagaactgttaatttgccttttctctgtttgtaacttatctgtaaaaggttcccccactgtcagaacatgcatgtatagtaattaggactccattcctccatgtttcttccctatcttctgtcattgtccttcaaccttattttagaaaactgatcaagtaccatgttgcatgtggcttcctctggatatatctaagcccttctgcacatctacacttagatggagttggtcaaagggaacatctgggttatgccttttttacagtagctttaggaaccgtcggcatgttgctgttgaagtgtggagttgtgagcgtggactgtggacagtcgac

SEQ ID NO: 4039 - DNA, 363 bp, Rattus norvegicus
ctcttcgggcttgggcttcggttccggcgacatggctaaacgcaccaagaaggtcgggatcgtcggaaaatacgggacccgctatggtgcctccctccggaaaatggtgaagaaaattgaaatcagccagcacgctaagtacacttgctccttctgtggcaagaccaagatgaagagacgagccgttggcatctggcattgtggttcctgcatgaaaacagtggccggtggggcctggacctacaataccacttctgcagtcacagtgaagtctgccatcagaagactgaaggaactgaaggaccagtagaagcacctcctgagacttgcctggtctgcaataaatgggctaatttacacaac

SEQ ID NO: 4040 - DNA, 1028 bp, Rattus norvegicus
tccttgagttgtaagcagaataataatcacaacaacatgtactggtatcggcaggacatggggcatggtctgaggctaatccattactcatatgatgttaacagtactgaaaaaggagatgtccccaatgggtacaaagtctccagcccaagccaaggggatttcttcctcacgctagagtcggcttccccctctcagacatctgtgtacttctgtgccagcagtgacagctcaaacacagaagttttctttggtaaaggaacgagactgacagttgtagaggatctgaaaacggtgactccacccaaggtctccttgtttgagccatcagaagcagagatcgcagacaaacaaaaggctaccctcgtgtgcttggccaggggcttcttccctgaccatgtggagctgagctggtgggtgaatgggaaggagatccgcaatggggtcagcacagaccctcaggcctacaaggaaagcaacaatatcacctactgcctgagcagccgcctgagggtttctgctaccttctggcacaatcctcgcaaccacttccgctgccaagtgcagttctatgggcttacagaggaagacaactggtcagaggactcacccaaacctgtcacacagaacatcagtgcgggagcctggggccgagcagattgtgggattacctcagcatcctatcaacaaggggtcttgtctgccaccatcctttatgagatcctgataggaaaagccaccctgtatgctgtgcttgtcagtacgctggtagtgatggctatggtcaaaagaaagagttcctgaagccagacctgaaggtgaatccaagagcttacaacccattgtggtgttgatacagattttcttctaccggcgcttctgaagagcctattctcctttgtgaatcccaaagtctgcctagtcatgtatatttgtgtttgtattgtttgaaatccttgtggcctggagagtgcctagcacacttacaattagtaaccataaccaataaaacatgttctacaatggcc

SEQ ID NO: 4041 - DNA, 3933 bp, Rattus norvegicus
aagcgctctccgctctcggacgctcccaatttagcgctcctgctcgacggccgaaccgtcgcagcctccgcaggcagcgtgccctcggggttgcggcttcaacccaccccagcttcctccctcgctacgactcgggcgccctggacgttcgaccctcgccgctgagcccgaggatggcgagcagaccatggtgacagcgctgcccggtcgctgcactcgctgaggccatgccgggctcccgacgcgtccgtccgcgcctaagggcgctgctgctgctgccgccgcttctgctactccggggcggccacgcgagcgacctgaccgtggctgtggtgctgccgctgaccaacacctcgtacccgtggtcctgggcgcgtgtagggccggccgtggaactggctctcgcgcgggtgaaggctcggccggacttgctgccgggttggacggtccgcatggtgctgggcagcagtgagaacgcggcgggcgtctgctcggacaccgccgcaccgctggccgcggtggacctcaagtgggagcacagccccgcggtgttcctgggccccggctgcgtctactccgctgccccggtggggcgcttcaccgcgcactggcgggtgccgctgctgaccgccggcgccccggctctgggcatcggggtcaaggatgagtatgcgctaaccacccgcacaggacccagccatgtcaagctgggcgatttcgtgacggcgctgcatcgacggctgggctgggagcaccaggcgctggtgctctatgcagatcggctgggcgacgaccggccttgcttcttcatagtggaggggctgtacatgcgggtgcgtgaacgcctcaacatcacagtgaatcaccaggagttcgtcgagggcgacccggaccactaccccaagctactgcgggccgtgcggcgaaagggcagagttatctacatctgcagttctccggatgccttcaggaatctgatgcttctggccctgaacgctggcctgactggggaggactatgttttcttccacctggatgtgtttgggcaaagccttaagagtgctcagggccttgttccccagaaaccctgggaaagaggagatgggcaggacaggagtgcccgccaggcctttcaggctgccaaaattattacttacaaagagcctgataatcctgagtacttggaattcctgaagcagctgaaactcttggctgacaagaagttcaacttcaccgtggaggatggcctgaagaatatcatcccagcctccttccacgacgggctcctgctctatgtccaggcagtgacagagactctggcacaggggggaactgtcacagatggagagaacatcactcagcggatgtggaaccgaagcttccaaggtgtgacaggatacctgaaaattgatagaaacggagatcgggacaccgatttctctctctgggatatggatccagagacgggtgccttcagggttgtcctgaactataatggtacttcccaggagctaatggctgtgtcagaacacaaattatactggcctctgggatatccacctcctgacgtccctaaatgtggctttgacaatgaggacccagcctgcaaccaagaccacttttccacactggaggttctggctttggtgggcagcctctctctgattagctttctgattgtgtctttcttcatatacaggaagatgcagctggaaaaggagctggtctcagagttgtggcgggtgcgctgggaggacttgcagcccagcagcctggagaggcatcttcggagcgctggcagccggctgaccctgagtgggcgaggctccaattatggctccctgctaaccaccgagggccagttccaagtctttgccaagacagcatactataagggcaaccttgtggctgtgaaacgtgtgaaccggaaacgcattgagttgacacgaaaagtcctgtttgaacttaaacatatgcgggatgtgcagaatgagcacttgacaagatttgtgggtgcttgtaccgacccccccaacatctgtatcctcacagagtactgtccccgtggaagcctacaggacattctagagaatgagagtatcaccctggactggatgtttcggtactcgctcaccaatgacattgtcaagggaatgctctttctacacaatggggccatttgttcccatgggaacctcaagtcatccaactgtgtggtagacgggcgcttcgtgttaaagatcacagactacggtcttgagagcttcagagacccggagccagagcaagggcacaccctctttgccaaaaaattgtggacggcacctgagctcctgcgaatggcttcgccacctgcccgtggctcccaagctggggatgtgtacagctttggtatcatcctgcaggagattgccctaagaagtggggtcttctatgtggaaggtttggacctcagcccaaaagagatcattgagcgtgtgactcggggtgagcagcccccattccgaccctccatggatctgcagagccacctggaggaactggggcagctgatgcagcggtgctgggcagaggacccacaggagcggccaccctttcagcagatccgcctggcgctgcgcaagttcaacaaggagaacagcagcaacatcctggacaacctgctgtcacgcatggagcagtatgctaacaacctggaggaactggtagaggagagaacacaagcttatctggaggagaagcgcaaagctgaggccttgctttaccagattctgcctcactccgtggctgagcagctgaagagaggcgagacagtccaggctgaggcctttgatagtgttaccatctacttcagtgatattgtgggctttacagctctttcagcagaaagcacacccatgcaggtggtgactctgctcaatgatctgtacacctgttttgatgctgtcatagacaactttgatgtgtacaaggtggagaccattggtgatgcttacatggtggtgtcagggctcccagtgcggaatggacaactccacgcccgagaggtggcccgaatggcacttgcactactggatgctgtgcgctccttccgcatccgccataggccccaggaacagctgcgcttgcgcattggcatccacacaggtcctgtgtgtgctggtgtggtagggctaaagatgccccgatactgcctctttggagacacagtcaacacagcttcaagaatggagtctaatggagaagccctcaagatccacttgtcttcagagaccaaggctgtgctggaagagttcgatggtttcgagctggagctccgaggggatgtggaaatgaagggcaaaggcaaggttcggacctattggctcctgggggagcggggatgtagcactcgaggctgacctactgccctgctgttccttgtcacccctcctccctgtgccagaggtgacagaggtgtccagcttccacctctcccacagcagcccagccactgtggaaggattagggacctgaccagcacagtcaccagatgtgacctctgagagaggatggagatggtggggactgcaggggacacctaagtttgtaggactgactgaaacacagtccctcccatggcacccttgtggcacacatgcccagtcccacccttactctgctgcctagattgggacagcgattccttctctgccctcaacttagctccactgtgacttatagggagggaattgccacctgaaggaaacagaaagaggttagagtttgcaggaggcaggcagtcctgtgtcacaaatactcccctcacttccagcccaccacctgccccacagactttggacacagctcactgaggagaagagaagctgccggttaccttgcttctcctgtgaaccaaaccattaaagtctttattcctgtgaaaaaaaaaaa

SEQ ID NO: 4042 - DNA, 13206 bp, Rattus norvegicus
gaattcggcccaggtgtgtgcaggatgtgcccagtgttcagatccttgggatcgtggcagtatcccttcccactcatagtcaggactaggagatgagagcaggcagggatccacaggtcaacctctggcagcacccctaggctcaaaagtattaattttacaccaaatttcttttctggctaaactccaagtttgacatttctgatatctgctactctacccctggctgtgctcacaggacagatatttgcccccttgtgattatgacagcagactgcaatagtcttctaggtcataggtatcccgggctcttgtgttgaccctggggctcggggtagagtgtttgctgctgtgggacatgataagcaatgggtgcatctccaaatgggtaagaagtctctgggtagagtccagatcttctccattttccctctcggtgtcataagcaagggtacccacctctgcccacccacggcctcaacacactcacgtcatagtgatggtcctcgcaccatcctcttcctattctttgggtagggtgaatggactcagggctcacaatgagagaacagctagggcagccattctggcctgtattctggagcctatggggagttttctaggcaggtccatgccatagagtgcagtcctgcccatagcccttctccccccatactgtaaataatttgtcatcatggtactccaacagggtcggagggacagatataaccaattgaaattctctgaagatgccatctgtctcccggggtgccagcgcctgctatcatgtgcaccaagtggcactggagagccatagaagtcataagatactgtatgtgtaagcacatgtacatgaatgtgtgtgtgtgtgtatgtgtgtgtgtaagtgtgtgtgcgtgtgtgcacgagtctcattcagcctctggggtcaaatcagctcctctcctctcctctactcctggagagtagtgaccatcaacatttcccccttctagcttctatgtcttgtttttgctttccctcccccctcctcccctctccttccttctctccttctttatttgagggggcaagatgctgtacaaagtcaaacaaacaagtttacagttgtaagtgcaatgacccgagtcctccacatgaccttgtgaattgtgtgccgtcctcctgtgctctgtgagaactcgtggtacttcagtgtccctcccctgtactgtgacaaggtatttctgtggtatcagaataaaaggacttgatataaacaacctccagactgtctttgggatgatttctgaagtgggaatgcttagccaaacaagtaaatgccaatgcttgtgacaatatcctcaatgattaaagacgagagagagagagagagagagagagagagagagagagagagagaaaacaacgtttcagaaatgttggtacacaactggggctaagtttaaaaatgattgtccaggaaggtgtaaaggcctgtcccccaccaatgggtttccaccagttttcagggttctggttcccaggagctagtgctgccccctggtgctctcaagcaagctttacatttgtctgccttgctccaacctcagaatcctccccccccccccccaggctaagaccttaattcccacatatagtcaagagtagttcaagccgggtgtcatagcccacactttttttaaaaaaagattattattatcatatataagtacactataccagtcttcagacacaccagaagagggcagtgtatctcattacagtaggctgtgagccaccatgtggttgctgggatttgagctcaggacctctggaagagcagtcagtgctcttaaccactgagccatctctccagctcatagcccacactttttaaaatttttatttattttatgtatatgacgacactgtagctgtcttcagacacaccagaagagggtattggatcccattacagatggttgtgagccaccatgtggtttgaactcaggacctctggaagagcagtcagtgctctcaaccgctagtctagtcatctctccagatcccaaagtccacatttttaatcccagctcttgggaggcagagataggtgggtctctgtgagttagaggccaggactatgtagagaaactaaacaatataagtcaagtatcactagaaaataagaaacagagactaaacaaagtgtatcaattttgcctcgggaagaaagaaagtactcattcaaggggacccatagctggtctgaaagagcagccagtctcaaggatatggaggaaggggagatgcctactgttgcccaacctctcttgccctctgctgtcacctaagttcaacctagtcctgtgtggtgtgcaagaggagaccgcctgtctaggctcttctttccactgcacctcgctgctcttccgtgaagtctgaccccacccacatctgctcttggagtgggctgactcagtctgctcaagatcagcatcaatgagtcactgaaaagggcgggttaaggctgtagcaacagatagcttcgggggcaagtctggtggttgataaaccggggtagcacccagagagttcagcaccgccctttgccccgcgccccagggtccgcccggggacctgattttctcactcctaaccgcctggcttgcagtaaatgcggagagagctgaaagagatccctgcgagtgccgcgccccgcaacgtttcgacttcatggacctttcccaccccaccccaaatccccttgtccctcatccttcaggatcattggcgttcctcttaagcacagcccttcgaatgaatactcagagttttctctctgaccccgcagctcacagtcggctgaagtccggtcctacttctttcactcatcccagacctcccctatcccggaacaccagctctgttttctgcggttacatttctgccctcgctcctcggaggctttcccctctctaaaaatcccaggacccgactcccaggttctgcctccgacttgccaatcccgctccttcccgaggctccttcgtagccccgccttcataccacccagcacccgcccccagctggttgggcccgagctttgctgggccctgcaggtcccaggtcgccactgggtgtagcggaaactggggaccgccttaggccccgccctcggagcctcacttccgggacttaggcgctacagaaagatcgactatggagcgtcaggtgagggctcggcccgtggcccctgtggctccgtagcccgggctgagcctgaccctggtgtgtcccctgcgcaggtgctgctgagtgagccccaggaggcggcagcgctgtaccggggccttagccgccagccttcgctgagcgccgcctgcctgggtccggaggtcaccacgcagtatgggggcctctatcggaccgtgcacactggtgtgtagaccgaggggactgggtggcgacgggccgtgcatccaggtggggactgtggaaggcacgctgcttgacacgggcttggggaggaaaccaactgtagttcctgcgcacaggtgttttgggggttgtggtagccccgtaaatgaattgaaagtgtgggagtaaaattcagacctgcatggaaggtgtgaacctcgcagacctctccaacccttacattctatagcccaacaacagttacgttgcccttaaaattctatggttggtagtgggttctctccgactgtcagctcaggctctggaaacctaggcttaggttatattagtgaagtgttgaccaggttttactcaggatgtccgaagacagactggaaaaggtaggccatgattggtgggtagtgatccaaagtggcccagacaagttgagcagcctcgtgcctcccttgcagagtggactcagagggacttggagcgaatggagaacatccgattctgccgccagtacctagtgtttcatgacggagactcggtggtgtttgccgggcctgcaggcaacagtgtggaaacccggggggagtaagtgtgacaggaggagtttgtagatgagaccacaaccctccctgccatgctagccttgtataaatgtcaccacgtgtccttagggtgtcaagctctgtgccgctccccttcagggacaactttgggtagcttcagaggagcaaagaaccaggtgcctgctccttgagagtttatttggtctctggagacatggcctgataaacactagaagcttcttcctaactaggtcctgggtccctgggaatctgaagagagtcaagtcacgtaaggaagagagagaaggccagctagcttgaggagtgtgcatgggctgtatgagatcagactcccagttagctgggagatgtctcccatgctgccccctccgactttgtaatgctagaccaaaaaaaaaaaaaaaaaaaaagcttataaagaaaagggagaggggctagagagatagcacagaggttaaaggacctcttccagaggccgtgagttcaattcccagcaaccacatggtggctcacaaccatctgtaatgagacgtgacgccctcttctggcctgcagtcacatatgcaggcagaatgctgtatatataataaataaataaatcttaaaagaaaaaaggaaggagagagagagagagagagagagagagattcattcattcattcatgtaagaggctatgaccagtaagggggcagcacaaggctgttttggggcttggcagaatcctgacctgcaccccctgttctcaggctgctgagcagagagtctccttcaggcaccatgaaagctgtgcttcgcaaggccggaggcacagtctcaggagaggaaaaacagttcttggaggtgagtctgcaaggacgaggtggcaggcagtaggccataggtgaggaggatctgcggaggggcaggcagcctgatatcccaggtatcctcaggtctgggagaagaaccggaagctcaagagtttcaacctgtcagcgctggagaagcatgggcctgtctatgaggatggtgaggcgcctggctggtaagcaggcagggtgggaagaaggggcagccatagctttgggctccccctaatcgtccctccctgcatgtagactgctttggctgcctttcctggtcacactcagagacacacttgttgtatgtggcggagaagaagcgtcccaaggctgagtccttctttcagaccaaagccttggacatcagtgccagcgatgatgagatggccaggccgaagaagccagaccaggccatcaaggtgcttgtggtgtggccaggccacgaaggccccgctgggcagccctgcatcactgtatccagtggacctgggaggcccgaatgtctaggaggcagggcagggttctgaaggcactgggcattgagtgtcctctgttctcagggggaccagtttgtattttatgaagactggggagaaacgatggtttccaaaagcatccctgtgctctgcgtgctagatatcgacagtggcaacatctctgtgcttgagggagtccctgaaaatgtgtcacctggtcaggtcagcagcaacttggcctgtgccctcccggaggcagggttccctgtctgagcaattcgtcttgctcatacctactttgtggtcttgtttacaggctttttgggcccctggagacacgggggtggtgtttgtgggctggtggcatgaacccttcaggctcggcatccgctattgcaccaatcgcaggtgaggaaatgggcggaccagagggccgttatggcccagccgaccatggagctgagtgtctctctgacctttccagatcagctctgtactatgtggacctgagcggagggaagtgtggtaagtgtctggcgtccgcatgtgcttgcctgacacatgtgcttagtcttcccccgtgaatgtgtcagtcactcatatttctgtggcctagaactactctcggatggttccctggccatctgttctcctcggctcagcccagaccagtgtcgcatcgtctacctacagtatccatgtctagcccctcatcaccaatgcagccagctctgcctggtgagttgggaggtgagggtgagggggtggtggtggtttggttagcttcttgttggggaacgaaggctaaagggacatggtcatctcccccccttgggccctctcctgtcttcagtggatcagtggcttgaccttcaaggtaggacctggaggcttgagcactctcggggctcacctccttaagagtctcctccagtcacttagttcacatctccaagaagccaggctctacaaggagcaggggcagagttggaggctatacagagtccatcccctgcacaaggagagccctgggtggaagtcaagggacacacctatctgagacaagtccaggctaccgtaaaagagataaattagcccccttctctccctaaagcaatccaaagttgtcacctgaagagatagatatctgcgccctgagatccatgccctggtgggtctgaccattgtgttctcttgcagtacgactggtacaccaaggtcacctcagtggtggtggacattgtaccccggcagctgggaggtaagaggtgcctggctggggaaatcagtagggcctatactagggctatctgtcccaccttcctgggttcctttggaggactctctccttgctactgtagcccctgttgcccaggcccaccagagatagaagatggtgctatgggtaatagcctgatagaataagatcagagtagcccaagttggcttgggatgagtgtcagacaatgttagtttggaatgttaggcttgagaagcactgggcctgtgggtgtgtgttactctgttttcctgccccggcaacctttgtccagtgtaagtgagctggtcctctggaaaggggactcgaagctatgaggctcctctccgaacagcaggtgcttacagctctgcttgcagtcctcgggcatcccaaggacatgcggaggaaagtcttttctcaaaccaccgagaaaggtccaagggtccagtggggcaggtccagcagacaaagttccagggataaagcacatggctacctgtgcgtgatccttagcacataccttgagtttgcaaggacaccataatagggacctagtctgaacctcagctctgcccattagctgtgtgtccttggttggtgctctgtcttccatgagcttctgtttctccatttgtggacagggtgatcaagtccaccttctgagctcctgagtgagctgctgtactctgcactctggtggataagtacgttatcttaatacgggttaaggcacttacattgccaagacccaaaagggaatagccaataggaaagcatcgagttcgccaaataagctcaccagctctgcctcttccagtcctcagaaggttccccccaccccccttcaccttctactcagtaaactcctcattgccaaaggtaccctcatgtctaggactatctacctcagatttcaggggccctgggtgaattccccaacttcatattctcgatcccccaggcccctcctaagatggcagcttacacccttctacctttgcagagagcttctctggaatctactgcagtcttcttcctttgggatgctggtcagctgacagccagagagtagtctttgactctgcccagcgcagtcggcaggtaaaagcctctgattgtgtggagaggtagcatcaacatttgcctggggcaaagtgagtatgtggccctaggaggatgccgagcctgaaagtcttaactggctccaagaagccttttctgccttctgctggacttagttttccttaagaggaccaaatgttgggttgaggatttagctcagtggtagagcacttgcctaagcaaggcgcaaggccctgggttcggtccccagctccgaaaaaaaagaaaaaaggaagaggaccaaatgtttctgatgccccacagaagagccccaagctttggggttgtctctgagatgggtccctgaacacttggtaatggcagttgatggagacaggatgggcccttgagggatgatgtgccgggatgtgccatggtcctttaggtatgatattcttgttctcatatctttccgctccttgcctggattatctagtactttgtgaaggaattgaatctagatccagggttatccctgttttacacagtagccatcaccgtaggccaatgtccctaagacagtagaaaggacatcgggctgttggatgtgctgctacaagtggtctccccactgtttaaggacctgtttgctgtggacacccagacgggcagcatcacctccctgacagctggtgagcaggacctctgcagtagggtgatggctgggtgggtggatggcagcttaggaaaagcgctagagcttggttggcatggggcagcagtggtgtgctccacacgccctggcccatagccccacccctgtcctaaggtcacagacctttcctgcaatctattgtagtcatccacctcctgcccagaccctggagaaaccttgggtggactctctagcattcctgcactctcccctatggtctgcctcagaagcagcctttgagtcctccaccgacctggactctgcactctgcctatatctgctttctctagggcggtcagcagggagctggaagacagaaagatgctgtcttcgggtttccattgctgtgacgagacaccatgatcgtggctcctcttaataaggagacatttaattggggctggcttacagatccagaggtttagtccgttattgtcatggcagggagcggggcagcgctcaggcagattggctggcagcagaaagacagtgacagtagacctgacttgagcttctgaaacctcaaagcccacctcaatggcgcactttaacagcgccaaagcgaccctcttaatagtgccactccctatgaggctactgggggccatttttattcaaaccactacaggtgataagtcctaattctgcacctcattactagggtgtttccctagggtatacaaagcctcgtgcacataaataagtagtagtagtagtagtagtagtagtagtaatagtagtagtagtagtagtagtagtagtagtagtagtagcagcagtaatacacaaagcctagtaaagcctaattcacgtaagtaaatggtaatgacaataataaatggataagctttagcccagtcctctttcctccacccagttttttgggctaggctgctgttccctttacgttgcagtctttggagtaaatagagtaccttggtagctttctgtgtccccaggtctggcaattcttgagtataatcagtgtctctcagatgaacaggaggcttacccaggacatgtgcagttaggtagaaaagtggtggccctgccaggcacttacatcatctgcttcctctagcggggtcagcaggaagctggaagctgcttacaattgacaaagaccttatggttgcccagttctccacacccagtttgcccccaagcctggtgagtattgtgggtctcaggctagagccggattaacaagactccatgccatcgaactgggctcgaagactgaccgtggctggccagcatgtagaagggcagagaggacttggctccagctagtcctgtggttctttgggctcggcactcaagagtaggaactaggccagcacagtgtgcctacagaagtgcccagtcatttattattagagtccagggaaacagaaaaacctagaagccaagaaatgtggtagggctaggggtggtccatatgtggatgtctattggcatatgcagtgctctgtagaaatgggcttctgagagctggcccgcctgtgactttccttcccgttggcagaaagttgggttcctgcctcctcctgggaaggagcagtctgtgtcatgggtgtccctggaggaggctgaacctattcctggcatccactggggcgtccgtgtgctacacccacctccagaccaagagaatgtacaatatggtgagctgggccgatggcgggtggacggcttctccagacccccacacacagcatctgtggcgacccttcctagctcacgttgaaggctttctaggatttcctctgaatttttttctgatcttatggtcatggggagtagcatccaaagatctgagtacctgctgtggttatcagcactgggtcctgccagggcatatcctctgtggtgagaaagttaagatttaaaggaagtaggcctctcccaggctgctgcgactacaccagaatgttatccttccagacaatagggctctctgacaaggcagaaagggcacaagctttagggggctccatgtgccatggggggagctgcctaggcgctaccttggctgggctctgtttcacttgatcaggtttgtatcagacctgcagctgaccttgactttgaagcaatccttttgcagcccagcaatcctccagataagacccaggtccccatggtagtcatgccccatggtaggtatttacctaagagcccttgccaccctaccaccctcctagctggcctttcatggctgtcgcttcctgtctgcagggagaaggcagtagtcagcaagaccagtcctgctttccaaaggcttccttagccaagtcccatctgcagggggaccccattcgtccttcgtcactgcctggatgctgttcccagccatgctctgcaagatgggctttgcagtacttctgggtaagtcagaacggacctgcaattccactggggtccatgaagcgatggggtggccttggttgtatatccttttctatggtgtacttactctttagaaacgggctgggcaatgggggcacactcctttaatcccagcacttagaaggcagaggcaggtgaagtttgagtccaaggatcatcaggactacacagaaaaaccctgttttgaaaacaaaaagaaactactactagaaattgccctggcttagcctctggttcgtaacctggtgatcaggtggattaacttgaagcttctgtggaaaggatcctatggtctctgggtagcagcttcatctctcttggctacctccccttgacagcacgtgatgcagctggtcctagggcctatgtcacagccacatggaattgggttggggactgagaccattgcccaactatcttgtctcactttcagtgaactatcgtggctccactggctttggccaagacagcatcctttctctcccaggcaatgtgggccaccaggatgtgaaggatgtccaggttgcagggcggtgggctgctggacagggagggtggattcatggctttcggctgccagcgagcgaactgtagtgtcctctgcccacactttagtttgcagtggagcaggtactccaggaggaacactttgatgcaagacgcgtggcccttatgggtggttcccatggtgggttcctctcctgccacctgattggtcaatacccggagacctacagtgcttgtatagcccggaacccagtgatcaacattgcctccatgatgggctccactgacatccctgattggtgagtgtacattagagtcctgcccttcctcccaccccatttccatggagatcctgtagtctgtatcttttgggtcttttataggtgtatggtggagactggcttcccttatagcaacagctgcctcccagatctgaatgtgtgggaggagatgctggataagtcacccatcaaatacatccctcaggtactcaggtgttcttgtgtgtgccacccattcctccagagtccggagctcagctcaccacagctccttgccttccaatatacccaggtaaagacaccagtgttactgatgctgggccaggaggaccgacgggtacccttcaagcagggtatggagtattaccgtgccctcaaggcccggaatgtgcctgtccggtgagtgtcacagggtagttcgggcagctggtgacaggtaaacagggcaggaccctccaatgtgcatgtgttgctgctcacataggctcctgctgtaccccaagagcaaccacgcgctgtcagaggtggaggcggagtcagacagcttcatgaacgctgtgctttggctgcacacacacttgggcagctgaagccctatgttcttcttgagctgggcagcccgtcttgcactttgctgttggtaagctccaggatctgaccgaacagccaaacagtctcctaggctgtggactcagtgaatgggcagaggactaagaactatgttatcataataaaggaagacacagagcctggtttgtgctggttgtaccaagccatccccaaccccaggtcttgggtttactatccacagtggattcatctctgtcacctgacagagagaagccatgagagactcaaccctgcctgtcctggccaaatgggactggtgcagagcaacacagctccttccgctctggtcccatgtgctggaaacttctacactatccttgcattcccaggcacctctggaagatggcggcaccctgcccatccatttgaagttgttccgggatcagaacacctagcctagagtgtgctggtcttaagccagacagcctcttgtaaggagtcaacaactcattctctagaaacagagacgaagaagcactctctacagacatagagaaaagtttgctttagtttgataagcagccttgtcatctctaagagatcgaaagcaggcctactccagctgcacgaccttgttaatccagtccacaaacacagacacacgtgtgaagatagctggccagcgaggcccgtgcacacactctgttcgggatgataagtccctgtaggacccagcagtcatgggtatagcaggcaagtgggcccccgtagtcaccctagcaggtagaagaactggtgaaggcttgaccttggcaatgactgaccacctcccctgacatcctgcccccttggtaagcaagtagtatagttccagttcccaaaccttcccaggccggcccagcggctctcccactgacctcacaagcgcccgtaggggccagcaacccctcggtgcatatctcactctcttgtactcgtctccggtacttcacattacattcctgactggagatgaccttcattttggccacatgaaggactgtgctattgcttgtacctggagtgcagacaggagagg

SEQ ID NO: 4043 - DNA, 554 bp, Rattus norvegicus
ctttccgccggggcagccatcttccagtaactcgccaaaatgacgaacacaaaaggaaagaggaggggtactcggtatatgttctctagaccttttaggaaacatggagtcgttcctttggccacatacatgcgaatctacaagaagggtgatattgtagacatcaagggaatgggcactgttcaaaaaggaatgccccataagtgttaccatggcaaaaccggaagagtctacaatgtcacccagcatgccgtgggcatcattgtgaacaagcaagttaaaggcaagattctggccaagaggatcaatgtgcggattgagcacatcaagcactcaaagagcagagacagcttcctgaagcgggtgaaggagaacgatcagaagaaaaaggaagccaaagagaagggcacctgggttcagcttaacggccagcctgcgccacccagagaagcccactttgtgaggactaacggaaaggagcctgagctgctggagcccattccatacgaattcatggcctaatgtatacaaaggaaataaagaacccgaactgc

SEQ ID NO: 4044 - DNA, 1840 bp, Rattus norvegicus
cgagaaactacaggcaaactttcagctttgaagttgtcaccttggagaagtgaagtcgagaagtgtgacaccatgaatggacctgtggatggcttgtgtgaccattctctaagtgaagagggagccttcatgttcacatctgaatcggtaggagaagggcatccagataagatctgtgaccagattagtgatgcagtgctggatgcccatctcaagcaagaccccaatgccaaggtggcctgtgagacagtgtgcaagacagggatggtgctcctgtgtggagagatcacctcaatggccatgattgactaccagcgggtggtgagagacaccattaagcacattggctacgatgactctgccaagggcttcgacttcaagacctgcaatgtgctcgtggctctggagcaacagtccccagacattgcccaatgtgtccatctagacagaaatgaggaggacgttggtgcaggagatcagggtctgatgttcggctatgccactgacgagacagaggagtgcatgccgctcaccattgttcttgctcacaaactcaacacccggatggcagatctgaggcgctctggtgtccttccctggctgagacctgattctaagactcaggtaacagttcagtacgtgcaggataatggtgctgtcatccctgttcgcgtccacaccatcgtcatctctgtgcaacacaacgaagacataacactggaggccatgcgagaggccctgaaggagcaggtgatcaaagctgtggtgccagccaagtacctggatgaagacaccatctaccacctgcagccaagtgggcggtttgtcatcggaggtccccagggggatgcaggtgtcacaggccgcaagattattgtggacacatacggaggctggggtgcccatggtggtggtgccttctctggaaaggactacaccaaggtggaccgctcagcagcttatgccgcccgctgggtggccaagtctctggtgaaggctgggctctgccggagagtccttgttcaggtgtcctatgccattggtgtggcagaacctctgtccatttccattttcacctacggaacttccaagaagaccgagcgagacgagctactagaggttgtgaacaagaactttgacctccggccgggtgttattgtcagggacttggatctgaagaagcccatctaccagaagactgcatgctatggtcatttcggaagaagcgagtttccctgggaggtccccaagaagcttgtgttttagagctgccgggaagcttagctctgtcctatactcaacctcctcaagatctcaactccctggtctcagagagccctccctgcttcccaccctatgcaaagccagcttcctccgattttccccctacccggcaatctgcaaacatcttaatagtggcaaggcaggtggtttctggtgctaggtcatcaggtctccttgcaaggatagtcagtgttccctccctgtctctcagatgacaacaatgttaattttgtgtaaaagttgctcctgtcatcccctcccgtagtctgaagctaaccaggccatctcttcctccgtcctggacatgtgcccagatgaatgttttgtcccatatctctggcttcccctttacattggcagccagaggtcctgagccggggcttcctcagggtccctctgagactgggcatctgctccctaggatatggtcagtgtcccctgaacatctgcattctgtgagggactgagctgtgtgttcttcatcccaacacaataaggtggtatcgtcattatccacagtgacagatggggaaactgaggctcagagagcgagctc

SEQ ID NO: 4045 - DNA, 3269 bp, Rattus norvegicus
ggcaacgaaggtaccatggatcttatacaagaagtgaaccaacatgccgcaacctccttggaagccacaagcgatgaggctctccttgttcgccctcttggtaactgtcttctcaggggtctccacacaaagccccatatttggtccccaggatgtgagtagtattgaaggtaactcggtctccatcacgtgctactacccagacacctctgtcaaccggcacacccggaaatactggtgccgacaaggagccaacggctactgcgcaaccctcatctcttcaaatggctacctctcgaaggagtattcaggcagagccagcctcatcaacttcccagagaatagcacatttgtgattaacattgcacatctcacccaggaggacactgggagctacaagtgtggtctgggtaccactaaccgaggcctgtttttcgatgtcagcctggaggtcagccaggttcctgagttcccaaatgacacccatgtctacacaaaggacataggcagaactgtgaccatcgaatgccgtttcaaagaggggaatgctcatagcaagaaatccctgtgtaagaagagaggagaggcctgcgaagttgtcatcgactctactgagtacgtggaccccagctataaggacagagcaatcctttttatgaaagggaccagccgcgatatattctatgtcaacattagccacctaatacccagtgatgctggactgtatgtttgccaagctggagaaggccccagtgctgataaaaataatgctgacctccaggtgctagagcctgagccagagctgctttataaagacctgaggtcctcagtgacttttgaatgtgacctgggccgtgaagtggcaaatgatgccaaatatctgtgtcggaagaacaaggaaacctgtgatgtcatcatcaacaccctggggaagagagatccagcctttgaaggcaggatcctgctaacccccagggatgacaatggccgcttcagtgtgttgatcacaggcctgaggaaggaggatgcagggcactaccagtgtggagcgcacagttctggtttgcctcaagaaggctggcccgtccaggcttggcaactctttgtcaatgaagagtccacgattcccaatagtcgctctgttgtgaagggtgtcacaggaggctctgtggccatcgtctgtccctataaccccaaggaaagcagcagcctcaagtactggtgtcactgggaagccgacgagaatggacgctgcccggtgctcgtggggacccaggccctggtgcaagaaggatatgaaggccgactggcactgttcgatcagccgggcagtggcgcctacactgtcatcctcaaccagctcaccacccaggattctggcttctactggtgtcttaccgatggtgactctcgctggagaaccacgatagaactgcaggttgctgaagctacaaagaagccagaccttgaggtgacaccacagaacgcgaccgcggtgataggagagaccttcacaatctcctgccactatccgtgcaaattctactcccaggagaaatactggtgcaagtggagcaacgacggctgccacatcctgccgagccatgatgaaggtgcccgccagtcctctgtgagctgtgaccagagcagccagatcgtctccatgaccctgaacccggtcaaaaaggaagatgaaggctggtactggtgtggggtaaaagaaggtcaggtctatggagaaactacagccatctatgtagcagttgaagagaggaccagagggtcaccccacatcaacccgacagatgcaaacgcacgtgcaaaagatgctccagaggaagaggcaatggaatcctctgtcagggaggatgaaaacaaggccaatctggaccccaggctttttgcagacgaaagagagatacagaatgcgggagaccaagctcaggagaacagagcatctgggaatgctggcagtgctggtggacaaagcgggagctccaaagtcctattctccaccctggtgcccctgggtttggtgctggcagtgggtgctgtggctgtgtgggtggccagagtccgacatcggaagaatgtagaccgcatgtcaatcagcagctacaggacagacattagcatgggagacttcaggaactccagggatttgggaggcaatgacaacatgggcgccactccagacacacaagaaacagtcctcgaaggaaaagatgaaatagagactaccaccgagtgtaccaccgagccagaggaatccaagaaagcaaaaaggtcatccaaggaggaagctgacatggcctactcagcattcctgtttcagtccagcacaatagctgcgcaggtccatgatggtccccaggaagcctaggcagtgctgaccacctacccctgcctgtgacaatcaacttgagaatcacattgatccactcgcagcccaccctcgcccatcacccaggctcttccctcctgttctcagaggtgtgctggttcctccctcagtcgtggaagcctggcctacttatgcctgtttaggagagagcgtgaggagttctttttgctgttaaagagtaaggtggaaatgagttgagcccaagaggtgtctctgagagacgagggttcagagcaggggctcatttcaggaggaagagccatttgaagcctctttatacacatatgctaggatgtcaggatagctcttctcctccatctctcctttcttctcttcttgattcagacaacagatccgaaaactcactaggcttccggtgtctactaaatgctgagagtcaggccacagcctttctataaacatcactggaagagacaccacctcgtcccagattctgtcttttccctaagctatcaatcattaccggggattccctttgcctctgcacctcataggcaacaaaagaaacataagtcctgcagtctaaggcatacccaagccataagggcaccacgagactcagatgagaagagatttttctccagagtactcagtgagatagactagtgtcaagccagatggggcaactcctggctcttggcctgggacttgtcttcaagatctctgctcttattagagaaagaactttagcatgaggaaaagtaagagaaaacaagttacatgggcatggtggtgtgctcctgcaatcccaatattaagaggttaaaaaataggaccagaagtttaaagtaatccttggctacctagtgagtgtaaggccagcctggaatcaataagagttggt

SEQ ID NO: 4046 - DNA, 2493 bp, Rattus norvegicus
tgtcccggtgtagagtgaccggctgccacccggcctggccatgaggggtacgcccctgctcctcgtcgtctctctgttctctctgcttcaggacgcccgcctcttcgattgtagtggggttcttccggacaagggcccagcaggtctgactgtgcgattcccaggggactgccgcctggccaacgcagaggagaagctgatggatgacctcctgaacaaaacccggtacaacaacctgatccgcccagccaccagctcctctcagctcatctccatccgcctggagctatcactgtcccagctcatcagtgtgaatgagcgagaacagatcatgaccaccagcatctggctgaaacaggaatggactgactaccgcctggcctggaacagctcctgctatgaaggggtgaacattctgaggatccccgcaaagcgtgtctggttgcctgacatcgtgttgtacaacaatgccgatggcacctatgaggtgtctgtctacaccaacgtgattgtgcgttccaacggcagcatccagtggctgccccctgctatctacaagagtgcctgcaagattgaggtgaagcactttcccttcgaccagcagaactgcaccctcaaattccgctcctggacctatgaccacacggagattgacatggttcttaagtcgcccacggccatcatggatgacttcacccccagtggtgaatgggacattgtggccctcccaggacggaggacggtgaaccctcaggaccccagctacgtggacgtgacctatgacttcatcatcaagcgcaacgcgctcttctacaccatcaatcttatcattccttgtgtgctcatcacctcgctggctatcctggtcttctacctgccctccgactgtggggagaagatgacgctctgcatctctgtgctgctggcactcacgttcttcctgctgctcatctccaagatcgtgcctcccttgaacataccgctcattggcaagtacctcttgttcaccatggtgctggtcaccttttccatcgtcaccactgtgtgtgtcctcaatgtgcaccaccgctcacccagcactcacaccatggcatcctgggtcaaggagtgcttcctgcacaaactgcccaccttcctcttcatgaagcgtcccggtcttgaagtcagcctggtcagggtccctcatcccagccagctgcacttggccacagctgatactgcagccacctctgccttaggccccaccagcccatccaacctctatgggagttccatgtactttgtgaaccctgtccctgccgctcctaagtctgcagtcagctcccacacagcaggcctccccagggatgcccgtctgaggtcctccgggaggttccgggaagatctacaggaagcattagagggtgtcagcttcatcgcccagcatctggagagcgatgaccgagatcaaagtgtcatcgaggactggaagttcgtcgcgatggttgttgaccgcctgttcctgtgggtgttcgtgtttgtgtgtattctgggcaccatggggctcttcctgccaccccttttccagatccacgcaccctccaaggactcctaggctacccggtcgtggcctctttcccgggttgtagtgagatgatatgagaagccgtgtgggaagctgggcgtgtcttggcccgggttgtagtgagatgatatgagaacgggtgtgggaagctgggcgtgtctcgggcccgggttgtagtgagagatatgagaagccgtgtgggaagctgactgttccatttgggccatagctaatgaagccctaagtaaagccggtgactattggcaatcagcccatcaaactagccacagccacgagaaggacagagatagatgccttctgctgatccctctgatgccgtccagtaagtccctgaaggaggaggatgaggctgctgaataccagcctggcctccttccttccacgtgccaggcaccggagtcagacagccgtgtatcatgccgtcacaccccagcccgccttcccacccatctccctctgattcgcagctacccactagattcccccaccatctttcatttccatacacttctagattctcccaagtcagaacctttatatcttctactgctaccgtccaaacctcactgtaaactcccaagcttttcacgtggatgcaccagtcgagctctgctccaattgccaattcttgtataagccttcccatgatcctctgctccagtgtcatttccttgtataagccttccctagtcatgcattgcaaagcagtgtctcccataaccacatcaaatctccagcttccttgagtgttccccgtcagtagctgcagcctttagttggtggcacactagtcaccagcaccttgcccataaaagtgtatgctccataagggctgggtgtgtggattcacattcaccccagcccctgaagggagaatattttaaagtgttttgtttttagaattaatg

SEQ ID NO: 4047 - DNA, 2992 bp, Rattus norvegicus
aattcggcacgagctcggctccccttccaagagaaacaagagaaacctcacggaaggaagggaggaaggaaagaagcaagcaaggaactgcaggaagaaaagagccggcagagcatcaagaagaatcgaagggaggggagggaagaccaaatctatggttggaccagggcttctttttcgccaatgtaaaaaggaatatgccgtacatctttgcctttttctgcaccggttttctaggtgcggttgtgggtgccaatttccccaacaatatccagataggggggttatttccaaaccaacaatcacaggaacatgcggcttttaggtttgctttgtcacaactcacggagccccccaagctgcttccccagatcgatattgtgaacatcagcgacagctttgagatgacttaccgtttctgttcccagttctccaaaggagtctatgccatctttggattttatgaacgaaggactgtcaacatgctgacctccttctgtggggccctccatgtgtgcttcattactccaagttttcctgttgacacatccaatcaatttgtccttcagctacgcccggaactacaggaagctctcattagcattatcgaccattacaagtggcaaacctttgtctacatttatgatgctgaccggggcctgtcagtcctgcagagagtcttggatacagccgcagagaagaactggcaggtaacggctgtcaacattctgacaaccaccgaggaaggataccggatgctctttcaggacctggagaagaaaaaggagaggctggtggtggttgactgtgaatcagaacgcctcaacgccatcctgggccagatcgtgaagctagaaaagaatggcatcgggtaccactacatcctcgccaatctgggcttcatggacattgacttaaataagttcaaggagagcggagccaatgtgacaggtttccagctggtgaactacacagacacgatcccagccagaatcatgcagcaatggaggacaagtgactcccgagaccataccagggtggactggaagaggccaaagtacacttctgctctcacctatgatggtgtcaaggtgatggctgaggccttccaaagcctgcggaggcagaggattgacatatcccgccgggggaatgctggggactgtctggctaacccagctgtgccctggggtcaagggatcgacatccagagagccctgcagcaggtgcgcttcgaaggtttgacaggaaatgtgcagttcaacgagaaagggcgccggaccaattacaccctccacgtgatcgaaatgaaacatgatggaatccgaaagattggttactggaatgaagacgataaatttgtccccgcagccaccgacgctcaggctggaggggacaactcaagcgtccagaataggacctacatcgtcactactatcctcgaagatccttacgtgatgcttaaaaagaatgccaaccagtttgagggcaatgaccgctatgagggctactgtgtggagctggctgcagagatcgccaagcacgtgggctactcctaccgacttgagattgtcagcgacggcaaatatggagcccgggatcccgacacaaaggcttggaatggcatggtgggagaactggtctatggaagagcagacgtggctgtggctcccttgaccataaccttggtccgggaggaagtcatcgacttctccaagccattcatgagtttgggaatctccattatgattaagaagccacagaagtccaagccaggtgtcttctcctttcttgaccctttggcctatgagatctggatgtgtatagtgtttgcctacattggagtgagcgtcgtcctcttcctggtcagccgtttcagcccctacgaatggcacagcgaagagtttgaagagggacgagaccagacaaccagtgaccagtcaaatgagtttggcatattcaacagcctgtggttctccctgggggccttcatgcagcaaggatgtgacatttcccccaggtccctgtccggacgcatcgtcggcggcgtctggtggttcttcactttgatcatcatctcctcgtacacagccaacctggctgccttcctgactgtggagaggatggtgtctcccattgagagtgcagaggacctggcaaagcagacggaaattgcttatgggacattggaagcaggctccactaaggagttcttcaggagatctaaaatcgctgtgtttgagaagatgtggacatacatgaagtctgcagaaccatccgtgtttgttcggaccacagaggaaggcatgatcagagtgagaaaatctaaaggcaaatacgcctacctcctggagtccaccatgaatgagtatattgagcaacgaaagccctgtgacaccatgaaagtgggaggtaacttggattccaaaggctatggcattgcgacacccaaggggtccgccctgagaaatccagtaaacctggcagtgttaaaactgaacgagcaggggcttttggacaaattgaaaaacaaatggtggtacgacaagggcgagtgcggcagcgggggaggtgactccaaggacaagaccagcgctttgagcctcagcaatgtggcaggcgtgttctacatcctgattggagggctgggactggccatgctggttgccttaatcgagttctgctacaaatcccgtagcgagtcgaagcggatgaagggtttctgtttgatcccacagcaatccatcaatgaagccatacggacatcgaccctcccccggaacagtggggcaggagccagcggaggaggcggcagtggagagaatggccgggtggtcagccaggacttccccaagtccatgcaatccattccctgcatgagtcacagttcagggatgcccttgggagccacaggattgtaactggagcagacaggaaacccttggggagcaggctcaggcttccacagccccatcccaagcccttcagtgcc

SEQ ID NO: 4048 - DNA, 5482 bp, Rattus norvegicus
tctagatgagaccaataaagttcagaaagttctgagatttgcacttttgccctgggagaaccaagctcgccacctctttagtcagtcttaaggggtagagggtggagggcggatagcagaaccttagaaaagaaacaacttacatgtgtctagcgcttcctagaggccgcacaggatatgaatccaccatcgagcggggaggggatttttcagtctttctaccaggactctgcttaagcaccgtgactcggggcgagtccgcagctctcaaggcttgttttcccagaagcaaatcagggagggcggaagggcgggcgcgaactgagtgtgcgcggggctgtgtgtatgtgctagtgcaggcgagcgctggggtttcctgagtttcgaacctttatatgttgctttccataccccaaggagccggggtggcatctttcacacctagaagggggtccctccgaggtaaagcgaacccctcccggcacgtccccagaaaatgaagtgttgtgccggggaccctggtgaattcattccgagcacagcaaatctctggtttccagcacagcacactgcggcgcagatccttctccgaaactaaacttccatgcgcactcggcgtgggagggccactctcaaacccgctcaacttcaacccacttgccgctcccgcacccggggcgaacacaaccatattaacgccgtcgctctgtctcccggaagtgcgggggtgcggagccagcttcaatcgcccagatcattcagccctttcacgggtgtgttcgtgtgttcgtgtgtgtgtgtgtgtgtgtgtgtgtgtgtgtgtgtgtgtgtgtgtgtgtaacctctactcccacccaagccctccgccccaggccaccagcgcgtctccccagctttctggatccccgcgtctcggtctgggtccccagccctgaacttgagcccgcctccgacagactccgcaaggtccagcggacccggcagcctccgtcactagacagccaaaccaagacgtcagcccacaatgcaccgggcgggccgggaaagacgcgccggggagggaacccgggaacacaagccggagcaacgcgcgggagggggagggaggtggagaaagaagggcccaactgtaggagcgcagcggagcattacctcatcccgtgagccttcgcgggcccagagaagaatcttctagggtgaggtctccatggcgacgggtgggcccgcccccttgagagcgacgcaagccaatgggaaggccttggggtgacatcatgggctatttttagggattgactggtagcagataagtgttgagctcaggctggataaggactcagagttgcactgagtgtgcagagactgcctagctggagagcgctcaggcagacagacagacggacggactcggctaacctggtcgtccgcggactccgggctgttcatctgtttgtcttcattttctgaccaactgcctggatccagcgcccgcagctcctgcaccggtgttttggggagcacttggagagtcccttctcccgcttttcccggagaagaagctcacaagtcccggcactgctgacagcatcgagaacggctccggaccgcgcgaggaaataggcgagcggctaccggccagcaactttcctgacccagaggaccgggaacaagtggcccggagcgaacttttgcaaaacctcttctgcgcctaaggctgccaccgagaccgtaaagaaaagggagaagaggaacctatactcataccagctcgcacaggcggctgaagttgggcgagtgctagccgcggctgcctagcgtccccctccccctcacagcggaggaggggacagttgtcggaggccgggcgcagagccgatcgcgggcttccaccaagaattccgtgacgactggtctgcgccgccggagaacctctgtcgctggggctggtccgcgggctccgaggaaccgctgcttcccgagagcgctccgtgagtgaccgcgacttttcaaagctccggatcgcgcgggagccaaccaacgtgagtgcaagcggtgtcttaaccctgcgctccctggagcgaactggggaggagggcgcaggggggagcactgcggtctgagcgcacgctcctaaacaaactttgttactgaagcggggacgcgcgggtatcccccgcttcccggcgcgctgttgcggccccgaaacttctgcgcacagcccaggctaaccccgcgtgaagtgaccgactgttctatgactgcaaagatggaaacgaccttctacgacgatgccctcaacgcctcgttcctccagtccgagagtggcgcctacggctacagtaaccctaagattctgaagcagagcatgaccttgaacctggccgacccggtgggcaatctgaagccgcacctccgagccaagaactcggaccttctcacgtcgcccgacgtcgggctgctcaagctggcgtcgccggagctggagcgcctgatcatccagtccagcaatgggcacatcaccactacaccgacccccactcagttcttgtgccccaagaacgtgaccgacgagcaggagggcttcgccgaaggcttcgtgcgcgccctagctgaactgcatagccagaatacgctgcccagtgtcacctccgcggcacaacctgtcagtggggcgggcatggtcgctcccgctgtggcctcagtagctggcgctggcggcggcggcggctacagcgccagcctgcacagtgagcctccggtctacgccaacctcagcaacttcaacccgggtgcgctgagcagcggcggtggggcgccctcctatggcgcgaccgggctggcctttccatcgcagccccagcagcagcagcagccgcctcagccgccgcaccacttgccccaacagatcccggtgcagcacccgcggctgcaggcgctgaaggaagagccgcagacggtaccggagatgccgggagagacgccgcccttgtcccccatcgacatggagtctcaggagcggatcaaggcggagaggaagcgcatgaggaaccgcatcgctgcctccaagtgccggaaaaggaagctggagcggatcgcccggctagaggaaaaagtgaaaaccttgaaagcgcaaaactccgagctggcgtccaccgccaacatgctcagggaacaggtggcacagcttaaacagaaagtcatgaaccacgttaacagtgggtgccaactcatgctaacgcagcagttgcaaacgttttgaggacagactgtcagggctgaggggcagtggaagaaaaaaataacagagataaacttgagaacttgactggttgcgacagagaaaaaaaagtgtccgagtactgaagccaagggtacacaagatggactgggttgcgacctgacggcgcccccaatgtgctggagtgggaaggacgtggcgcgcctggctttggcgaggagccagagagcagcgcctgttgcgcacgctttgcgaacgggctgtgccgcgaccagaacgatggacttttcgttaacattgaccaagaactgcatggaccttaacattcgatctcattcagtattaaggggggtgggtgggggcttacaaactgcaatagagactgtagattgcttctgtagtgctccgtaagaacacaaagcagggagggctgggaaggggagggaggcttgtgagtaccaggctagattgcggatgaactcccctggcctgcctctctcaactgtgtatgtacatatatttttttttaatttgatgaaagctgattactgtctataataaacagcttcctgcctttgtaagttatttcatgtttgtttgtttgggtgtcctacccagtgtttgtaaataagagatttgaagcattctgagtttaccatttgtaataaagtatataatttttttatgttttgtttctgaaaatttccagaaaggatatttaagaaaacacaataaaccattgagaagtagcccccaacctctctgctgcattatcgatagataatgagagctaggtgaaatgacagctgagtgtctgtatgctggggtgagagcctgtagtccctcccgtctggttgtaggaatagacaccctgcatgctatcattgactcatactctctccccagcaacccacaagtccagactgttgaccagaagatggtgcagtgtttcttaaggctggaagaagagggtgttgcaaggggagagggacagcccactggaaagcagacgcttgagttgagagccatatcaagtagcatgcgctgtgatcgtttataataataataaagacttcagcaattagatgtttatctcaaagcagggacccatggaaggttttacaaaaggtgtctccttccaacttggattctgacgactcctagaaaaagatgacctttgcttgtgcatatttataatagttcgtatcacaataaatgtattcaaataatggttttaaaaatcttgaattccttttccgttgctaatctttgtttcctaagccgcacactgaagattttccaagtttctgggggaattagtgcattctacactttgcaatttagaagccaagcatttaggaagagtcaaaggaggatctggaacctgggtgactcttctcccaaccctctcccaattcccacttggaccctccccatccccccacctctcgctcctaccaaggaagtgaccagtgtagtgagtccttatttattttttaatttgtttcaaaataatcaatctggcttaattattgaggtagtctgggaagttcctagtatatatactatggagcggagtcacaagagaaatgactatatagcacatctgtgatccaaacctcagctccggggagacggaaaacctgaatcgtgtctcagatacagctgaggttatcaacaggtttgtattcaacgagggaatcatttttgcctgctcccttctcatccccatgagctgctgtgattatcaagcagcaacagcaattgatatccagaaacactttcagaaaccactaattgaagcctggctgttaactcattagcactgctccaatgttcaacgggtctgggagtgcctgtggtagtaaatccaaacacacaattcctcaggagtacacctaggtctgcagggcctctcagaggcctttcagacatcccatagaaggcagtcacttggcctggcctctttaaggcccactctggctacaggaaggcaaatgttgataggtcatcatcttactctcaaggaactcactctggagagagggcacaggaaaggaaagagagactattctatgaggcgcatggtataagcaagtgatgccaagtggagaggagaagccattataaagatttcaccgaagtgacatttgaaccaacccaggcacagacatgtagatttgaagcaggaaagcaccatgtgatgggggtaggggttgggatctttttgaagaggccgaattc

SEQ ID NO: 4049 - DNA, 1935 bp, Rattus norvegicus
caaaggaacaaatagcccacagatccgcagaacccttgtccttccacaatgcgcctctaccctctggtctggctttttcttgctgcgtgcacagcttgggggtacccatcctcaccacctgtggtgaacactgttaaaggcaaagtcctggggaagtatgtcaatttggaaggatttgcacagcctgtggctgttttcctgggaatccccttcgccaagccccctcttggctccttgaggtttgctccaccacagcctgcagagccttggaactttgtgaagaatactacctcctacccacctatgtgctctcaagatgctgttggagggcaggttctctcagagcttttcaccaacaggaaggaaaacattcctttacagttttctgaagactgcctctacctgaacgtttatactccggctgacttgacaaagaacagccggctaccagtgatggtgtggatccatggaggtggactggtagtgggtggagcatccacctatgatggacaggtcctctctgcccatgaaaatgtggtggtggtgaccattcagtatcgccttggcatctggggattcttcagcacaggggatgaacacagccggggcaactggggtcacttggaccaggtggctgcactacactgggtccaggacaacattgccaactttgggggtaacccaggctctgtgaccatctttggagaatctgcaggaggtttcagtgtctctgctcttgtgttatctcctctggccaagaacctcttccacagggccatttctgagagtggtgtggtcctcacttctgctctgattacaacagatagcaagcccattgctaagctgattgctacactttctgggtgtaaaaccaccacatcagctgttatggttcattgcctgcgccagaagacagaggatgaactcctggagacttcattaaaattgaatcttttcaaactggacttacttggaaacccaaaagagagctatcccttcctacctactgtgattgacggagtggtgctgccaaagacaccagaagagatcctggctgagaagagtttcaacacagtcccctacatagtgggcatcaacaagcaagagtttggctggatcattccaacgcttatgggctatccactctccgaaggcaaactggaccagaaaacagccaaatccctcttgtggaagtcctacccaacactgaaaatctctgagaaaatgattccagtggttgctgagaagtacttcggagggacagatgaccctgccaaaaggaaagacctgttccaggacttggttgcagatgtgatatttggtgtcccatcagtaatggtgtctcgaagtcacagagatgctggagcccccaccttcatgtatgaatttgagtatcgcccaagctttgtatcagccatgaggcccaagacagtgatcggagaccatggtgatgaactcttctcagtatttggatctccatttttaaaagatggtgcctcagaagaggagaccaatctcagcaaaatggtgatgaaatactgggccaactttgctcggaatgggagccctaatgggggagggctgccccattggccagaatatgaccagaaggaagggtacctgaagattggtgcctcaactcaggcagcccagaggctgaaggacaaagaagtggctttttggtctgagctcagggccaaggaggcagcagaggaaccatcccactggaaacatgttgagctctgatcaggagggtcagccatgtttgagaacctgaagctaaaggggaattattccacagaagattttgtaaagacataacacttcttgtctttgagactataacatcacatggtattttgtacaaatgcattaaagggaaaatacttaaccttattgcttcaacttgtaaaataaaacattgtttagaaattc

SEQ ID NO: 4050 - DNA, 7629 bp, Rattus norvegicus
gaattcggcctcaggcatgaggaggaaattaccttacctctctccatgtggaagactgttgccaggagagactaacccaccatgaaacagagggcgaataagactcagaggccagcatgtgacatccggggccaacgtagggacttcccaagatcctcagaccatttctaagcttcctcacactgggtctgagaaatcccatgttgtgcgtcttgctgctgaccaactggatgaccacagacatgtactgaagatgtcgcatgctccagctgccctaccacactgggcctcactcacccacagggactagggcttccctctcccctggcccttcctctgccataggagctctacctgccttcccccactgcccttcccttgcctataggtgctccaccctcttttcctcaaggcaggagacatcctcccactgcacacacacccagaaaagccacggactggatggcagtcacccctcatgtcctgccgaccaagagctcccttaaggtctagaaggtctcattcctctctaaggcaatgttctcaagctccctcggctctgcatgggtagcataccagacgattgttccacaggcaatgatcagaccatccgtcttgaagcaggggtccactggacatctgcctaccgtgctcagcccaacagaatcacaatgctcagctctagtaggaactgaacctcactggcccctccctacacttgaccaaacaaaacacaggattggccctggaggcagaggacaaaggacaaccctggctctcctttataaggggacaggctccaagcttgggactccctgatcctaggtgctgtattgagtgttggtcattggtctttgggagcctgggcagcagcagggcagtcatggagctgctgaatgggactggcctgtggcccatggccatattcacagtcatcttcatattactggtggacctgatgcaccggcaccagcgctggacttctcgctaccctccaggccctgtgccgtggcctgtgctgggcaacctgctgcaggtggaccccagtaacatgccatacagcatgtacaaggtgagggacttagtggtggatggtgcatggggttatggtgtccaaagtggcaaatagtgggggtcgagccacaagtcagacagggatccgggtccccaagaggggggaggcttagcaatgtttttgtggcagccactggaaatttctagggcaaagtctcgggggacaaagtccaggaggtgaagggggatgggacagcagtgttcagtctctttggacaggacagcagccatagaggtcccagttccattaggatcctttcagagaggaggtgctgtgaggtctactacaccgtgccagtcaggaccctgagcagagagaaggcttgtggctgcctgaatctcttggtactgtgtgttctatggtctccctgcccatctcagtgaatcagagtttcttcaagtgtgctgagacgctaagatgtcccagaatatttttcttgctctggcaaggtcacagctggggtgtcccatctactgtgattcctttgctgcacttaaagggtaagaggccacagtggtaggcatcctcaggctggggatgaaactcactgaagaacatttttccaggatatatgaggaccaaggtatgacaataagcaatacatacacacaaatatgcatatataaacacacacactcacacacacacacggacacacccagacacatgtacatacacatatacacatacactcacttatacaaacacatacacacacatggacacacatacacacggacacacatacacacggacacacatacacacacacacacacatggacacacacagagacaaacatacacaaggacacacccaaacacacacacaatcactttcacatatacaaacatccctgggtaaacatacacaaaatgcacacacacacacacacacatacacacatatacacacatattcacattcacatatacgaacatgcatgggtaaacatacacaaaacagagagagagagagagagagagagagagagagagagagagactgcctgtgcacactcacactttgacaatgttgtgcactgagcctggttctatgatctgtcaggacctccccttcctatgtgctctgtccctctacttcagcttcaacaccgctatggtgacgtgttcagcctgcagatgggttggaagcccatggtcattgtcaacagactgaaagcggtgcaggaagtgctggtgactcatggagaggacactgctgaccgccctccagtgcccatctttaagtgcctgggtgtgaagcccagatcccaaggtgaaaggccatggggagggtggagatcgtttcagagatatggcaaggagcagaggaagcatgggcatcagtgtgggtgggaatgtgatactcaaggaaaagtcactgaagcccaggacgacagcccagaaggcatgtgctggcctgggtcagctcatggccaggacagaccagagaagagaactggggagagcaggaggcagagtagctcggcatccttggtcacacacagatgtgtttgcaggtgtggtctttgcatcttacgggcctgagtggcgagagcagaggcgattctctgtgtccaccctgcgcaccttcggcatgggcaagaaatccctggaggagtgggtgaccaaggaggccggccacctctgtgatgccttcactgcccagaatggtgggtgatgggtgaggaatgcaggtgtgcacagggagatatgggcagtccattgatttgcttgtatctccactccatctccactcccagggcggtccatcaatcccaaggccatgctgaacaaagccttgtgtaatgtgatcgcatccctcatttttgcccgtcgctttgaatatgaagacccttacctcatcaggatgctgacactagtggaagaaagtttgatagaagtctctggtttcattcctgaggtgagaggttcagggcagcctacagagccacttgtgtgcggtccttcttcgctgggggaagctgtgtgccaaggctgtgggagaggtcaactgcaggaggactggcctgttgacaactgttggatgacaggagtggagaagtgaatcaagatcaggatttccagacagggagagacatgggccctctttgtgcctgagagacggaaagtcagcgcttgtccctggggtagaatagtccttctattcagctggggctgtgagagcctgtaggtggcgcttgcaaatttaacagttgaggaggaggcaggtgatgggtgggaacaaccaggctctgggaaggaggctggcacctgaacctggtccaggtgagtacccagcatccctagcaccgaggggccaaccaaatggtgagtggggaagtatcctggcaagcaagcctgccacctgagtttgatgtctgggactcatgtaggatagagacaatggactctacacattgtcccatcacttgttcccacacaccgcggcacaggagccccatacacgatcatgattcactaataactgattttgtgaagaggaagctctgagacttccctctgtgtctctcacaggttcttaacacgttcccagcactgctgcgcatcccagggctggctgacaaggtcttccaaggtcagaagaccttcatggccttcctggataacctgctggctgagaacaggaccacctgggaccctgcccagccaccccgaaatctgactgatgccttcctggctgaggtggagaaggtgattggcagcccaaggaaatggagccaggggccagggctgaggccctgtgagctgtgaggccagagggatggggtcttgtgtatcaccaagtgtctcagcccctgggctgctctggggacaatgggaggccatgttgggacttcctctccctactgagcccatcctttctgcctggccaggccaaggggaatcctgagagcagctttaatgatgagaacctacgcatggtggtagttgacctgttcactgcagggatggtgaccaccgccaccacactgacctgggccctactgctcatgattctatacccggatgtgcagcgtgagcctggctggggctgggagggaggtagaggcacactctccagatgacttgagacccttgtggctctcagagctaacttaacccaaactccagtgctgctcactggtatctttctctcatggactcagcccttagcatggttgtaagacatggaagtccccagtggctgtttcactgaggagatgctgtccctccaggcagagtccaacaagagattgatgaggtcatagggcaggtgcggtgtccagagatgacagaccaggcccacatgccctacaccaatgctgtcatccatgaggtacagcgctttggggacattgctccattgaatttgccacgcatcacgagttgtgacattgaagtgcaggacttcgtcatccccaaggtaggcatgaacctgtcacaattccatcaagacccactatcaaacaaggacaggagagctcaagaccactacatcctattcctaatgtgctcacaagaaccagagtgcatgcaggttgcagccatggagtcttgaaacaaagagaattgtcaaacgaaaatgtccaaagtacactcggagtgctgcacacagggataatggccagggtgacacccatgggagttctgttacagggtcctcgaaggtgctgggaggctctgtggttgaagttgaatgagggaacccagtgtgtgcaggaaagaagttatgcgtgtgatcctgggcaccagggtctcggcagtgccacccctgtccatcttcatgccctgtgccttctgccaggggacgaccctcatcatcaacctgtcgtccgtgctgaaggatgagactgtctgggagaagcccctccgcttccaccctgaacacttcctggatgcccagggcaactttgtgaagcatgaggccttcatgccattctcagcaggtacctctggggggcctgactccctgtctattcccagggtggctgggagggtggagctccaatcaggccccagactgactgagcccctgtcccaccacaggccgcagagcatgccttggggagcccctggcccgcatggagctcttcctcttcttcacctgcctcctgcagcacttcagcttctccgtgccggccggacagccccggcccagcacccttggcaactttgctatttcagttgcccccttgccctaccagctctgtgctgcggtacgggagcaaggacactaattccagtccagctctacagggcaagctgagccacgtttaataaaccagtcttgaggctgctgctgttttctgcttcgaccccagccctgtctctgctgggtcctcacaccacggtctccaaccaactttgtcaccggcctcattcctctctagagacaacctgagtgctgtgccgtgtgctaagcctggtccatgggcacaggctgcatgttcagcactcaagagcccaaatcaggaggattgtgtatgtggagatttcctgggatatacagcaaggcctaggtcagcctgggctatacaacacggacagcctggttaaaccaaaccagagctttgaagaggaagtgcaaagaagacagacaggaaggagggagggagaaagggagaagcaaggaagaaaatgaaaatgtaggctgtgttcaggagtaacaacttaccctgtgttacccaccaaggcctgccactggtgaccagggtggtgacagactgcaggcagaggtcaggtctccatgggtctcaaggacagatataacaggcttccactaagactcagcactgctcctgtctgcagacatgacatggtggtccccaagacccccatgagtgccatgagtgcctggaaaggctcccagggacaggaaggctgctgtcctcccagtagtgactgcagagaaataacagaagaaaagcagcagcaggcaaagtgacagcagagctcagggtgtctgcacactcacagctgtttgtcagatatgtcagagggttggactcccagtcaccagtgtgactcaggctgaggacacatcccacaggggacttcagtgagcctcactgtccaggggcttggtgggtgccacagagatgagcaccccatggctaccccgtctccacaagctctaagtcacactcaggcaaccaggggtccacttgcccaaacccctgctgcaggtgtaaatggtgccgcagctgtgcagagacactgctgtcagtgtgtcatggctctcaggcaaggtctccctcagcctgacaggactcaggcccttgtcctggaatgtgcagacagagctcccccagctgaggttgctctgcgccctggccacactccctgccacaccaggcagcttgatgcgttcatctgagcatcgttttattttatttcagtcaggcatctctaatattcaccagtgttaccattcgatttcctgtggtgttggggatcgatcccagggccttccgctccagcagcaaggaccagtgagccaccctcagctcattctccttacagctcggtgctgcgagtcatgcctggtgtgcagccactactgcaacccctccacagatcactgcatctgctaaaatgtcactctgaaccccaggaaagcagctcctccttctgtcctctgcaccacccccacagttcattctgcttctgtttctgtgacttgacagagggcaatcgcaccctatcttcctgtgactgactttagacttcaaggctcccacatgttcagcaggcgtcacactaactctttacagacaaaccgtaggagtgaacgctgctcacccagaactcactggtaactctctggtttcaattatggtagataatcctgggatatctgagagaagggctcccattcgaagaactttcatagacgtattctgtttcttacaactctcgttcgttattcctgttaatctcttgctgcccctgatttataaaataaatatcatgctgtgtgcatacttttaaagcctatagaggctggggagatggctcagaggttaaacacttttactgctctaccagaggacccaagttccatctcctatatctacactgggactcaggcaaatgcaactctacctttaggggacccaatatccttttctggtctcagggggcactaggcacccatacaagtgtagtgagtgcacacacacacacacacacacacacacacacacacacaaattaaactctaataaattttttttaaaaaaaacctttttattatgatttatttctggggtcacagcatgaaggtcatattttattttctctttttcttttcttcttctttttttaatccactcatctgtcagtggattcttgtgtttcctctttcaaccaatatgaatgatgctcctgtggtcatgggtttataattatctccttggcatccttaaacttctgtgtgtgtgtgtgtgtgtgtgtgtgtgtgtgtgtgtgtgtgtgtgtgtgtatgtatggtcatgtgtgtttgcgtgttttgtgtccatatctgtttgtgtttatttaggggaattc

SEQ ID NO: 4051 - DNA, 3165 bp, Rattus norvegicus
  misc_feature (2992)..(2993): n is a, c, g, or t
  misc_feature (2996)..(2996): n is a, c, g, or t
  misc_feature (3019)..(3020): n is a, c, g, or t
gcagaatttggcaggcccaggctagggtgcaccaacccttaggctcagaatgacgagacagggccgggctctttccctccggctattgccacacttcctgcctcggctctttttccctagcctgtttctaaggaagggagtggggttgggcgaccgcaccccagctatcccgcctcttcggccctccaaaagctgacaggatatcgggcgagcccagagtgactaaggggaggctttggactcaggtacagggtatgtcagtgcctagagaccacttacgaggtacagtctcattcttacaagccccttgtctctgggatcctccaagtcgtcctctcgggtagatctcagataccctcctggcatcgcctttacagctcagaaggaagccatgtcctgaccattttaactttccatcagagttctgcaaataatcacagtgaccccaatctttgctagatatgttcccatcttctactcctattgcctcagcgtttccaggacccttgttcactttctgcatatctaaattgacctccccaaaattactccccttttccacttatgggagaaccctcagactcatctgtgggctttagagcccctactcatttctatacaataggtacctgaccctgcttcctgaaccttctctcccacctgttcttaagcacttgcactcggggcctctagttaattcctaggtcaaatgttaacaattgctcccgttttgtaccttccctgttttctggggtcttctagtatattgtcagttcacaagtcacagctattgtgggtcgccgcgagactattccgggaatatcctgaggcaccccatctaccttgcagtgtacagagatctcatagccaccgggttgtactcccgcagtcctaactcctatgtgcctcggtccctcaacatccctttgcttgagtgtctctgtctctacagcccctccccctgcagccgcgcagagccaccgggctgctggccgctgtttacaaggacacgcgcttcctgacagtgacgcgagccgcctcctccccttccccacgctctaggagggggccgcgggggcctggctcccgcgtcggccaatcggagtgcacttccgcagctgacaaattcagtataaaatgcttggggctggggccgaacactggggaccttgagggtggccaggccagctttggatcctgcagggagcggggagctgagagaagagacgctgagaaagcgggcgcaccacggagggagagaaaagctccagaagccgggcagcgcttttacgcacagctaccaactggccgctgccgaccgtctccagctcccgaggacgcgcgaccggacgccgggtcccgccacagccgaggacagctcgccggtcgccgcaggcaggcccggagcggccttcagggggacctttcccagatcgcccaggccgcccggatgtgcacgaaaatggaacaggctttctatcacgacgactcttacgcagcggcaggatacggtcggagccctggcagtctttctcttcacgactacaaactcctgaaacccaccttagcgctcaacctggcagatccttatcggggtctcaagggtcctggggcgcggggtccaggcccagagggcagtggggcaggcagctacttttcgggtcagggatcagacacaggcgcatctctgaagctagcctccacggaactggagcgcttgatcgtccccaacagcaacggcgtgatcacgacgacgcccacgcctccgggacagtacttttacccccgtgggggcggcagcggcggaggtacagggggcggcgtcaccgaggagcaggagggctttgcggacggttttgtcaaagccctggacgacctgcagaagatgaaccacgtgacgccccccaacgtgtctctgggcgccagcgggggtccccaggccgggccagggggcgtctatgctggtccggagccgcctccggtctacaccaacctcagcagttactccccagcctctgcaccctctggaggttccgggaccgccgtcgggactgggagctcatacccgacggccaccatcagctacctcccacatgcaccaccctttgcgggcggccacccggcacagctgggcttgagccgtggcgcttccgcctttaaagaggaaccgcagaccgtaccggaggcacgcagccgcgacgccacgccgcctgtgtcccccatcaacatggaagaccaggagcgcatcaaagtggagcgaaagcggctgcggaacaggctggcggccaccaaatgccggaagcggaagctggagcgcatcgcgcgcctggaggacaaggtgaagacactcaaggctgagaacgcggggctgtcaagtgctgccggcctcctacgggagcaagtggcgcagctcaagcagaaggtcatgacccacgtcagcaacggctgccagttgctgctaggggtcaagggacacgccttctgagagcctcccttgctccatacggacacccccagccttgaaggctgggcgcccgccccccactggggtgaggggggcaggcgatgggcactcgcccagaggtctggggcgcagctcacacactggactctggcctgcccgcctgcgcccagtccttccacctcgaggtttacatggcccccttccagcgtattttgtatgttttttttttctggaaagagactgaattcatattgaatataatatatttgtgtatttaacagggaggggagaagggggttgtcgcggcggagtggccccgccgcctggtactcagcctgtggggatactagggaggaacctccgccccctgccctccccctctgcacagtactgtggagaagaaacacgcacttcgtgtctaaagtctattttaagatgtgtttgtgtgtgtgtttgactttttattgaatctatttaagtaaaaaaaaagtctttattaatttctgtggtctctttcttccaagctgnncgnatggagggagaagattgggctgnnccaagcccggggcagtttgtagttctctcctttcgggtatcttaaggtccagtacaagcgctcaaacctcccatcccctgaggtcctggcaccagagctgcgcaggcaggcagtggccgagttacaagctatccaggccgaattc

SEQ ID NO: 4052 - DNA, 1805 bp, Rattus norvegicus
gatctggctgaggggaggaagaaagcaggagggtgacctggcatttcagtgaaccataggatgctgttgcttctcccctggctcttcagtttactatggatagaaaatgcccaagctcaacttgaagatgaagggaacttctattctgaaaatgtcagtcggattcttgacaacttgctggagggctatgacaaccgtctacggccgggatttggaggtgctgtaacagaggtcaaaacagatatctatgtgaccagctttgggcctgtgtcagatgtggagatggagtacacaatggatgttttcttccgacagacatggactgatgagaggctgaagttcaaaggccctgctgagattttgagtttaaataacttgatggtcagtaagatctggactccggacacatttttccgaaatgggaaaaagtcaattgctcacaacatgaccacccctaacaaactcttccgattgatgcataatggaacgatcctgtacaccatgaggcttaccatcaacgctgactgtccgatgagactggttaacttccctatggatggacacgcatgtccactcaagtttgggagctatgcctatccgaaaagcgaaatcatatatacatggaaaaaaggaccgctttattcagtagaggtcccagaagaatcttcaagcctcctccagtatgatttgattgggcaaacagtttctagtgagactattaaatcgaacacaggtgaatatgtaataatgacagtctacttccacttacaaaggaagatgggctatttcatgatccagatttacactccgtgcatcatgacagtcattctctctcaagtgtctttctggattaataaggagtcggtcccagcaagaaccgtctttggaatcaccacggttttaaccatgaccaccttaagcatcagtgctcggcactctctacccaaagtgtcctatgcaaccgccatggattggttcatagctgtatgctttgcgtttgtcttttctgctctcattgaattcgcagctgtcaactacttcaccaatctccagtcccagaaagccgaaaggcaggcacagactgcagccaagcccccggtagcaaagtcaaaaacaactgaatcactggaagctgagattgttgtgcactctgactccaagtaccatctgaagaagagaatcagctctctgactttgccaatcgttccatcttctgaggccagcaaagtcctcagtagaacgcccatcttaccatcaacgccggtcactcccccattgctcttaccagccattggcggcaccagcaaaatagatcaatattctcgaattctcttcccagtagcatttgcaggattcaaccttgtgtactggatagtttacctttccaaagatacaatggaagtgagcagtactgtcgagtagtttgcagccaggaaaagctggacactgtaattggttattttccattttcctcgcttacagaacacaaattattgtgttagtataaatggtctcatttcagaaactaaatgtctatattttcataatatggaataagcatgtttgggctaaaaacaataatattactcttcaaaattaaatttagaaagctactgaaaatatgaattttctgtatagtaaaattaataataataataacaataatatcagcatttatgtggataaggtagattcaaaatgagtttgccaacctttgtcttcattgttcaatatttttaattgtcactgtgaataacattttccacaaagcagatatattcagatatgctgacccttctaagctt

SEQ ID NO: 4053 - DNA, 1066 bp, Rattus norvegicus
gtggctgaccgccagatgtctctgctgctccgccgacccccgggtcgagaggcctatcccggtgatgtgttttacctacactctcgcctgctggagagagcagccaagatgaacgattcctttggtggtggctctttgactgccttaccagtcattgaaacacaggctggtgatgtgtccgcctacattccaacaaacgttatttccatcaccgatggacagatcttcttggaaacagaattgttctataaaggcatccgccctgccattaatgtgggcttgtctgtgtcccgtgtcggatctgccgcccagaccagagccatgaagcaggtggcaggcaccatgaagctggagttggcccagtaccgggaggtcgctgcttttgcccagtttggttctgatctggatgctgccactcagcagctcttgagccgtggcgtgcgcctgaccgagctgctaaagcaaggacagtactctcccatggctattgaagaacaggtggctgtcatctatgcaggcgtccggggttatcttgataaactggagcccagtaagatcacaaagttcgagagtgctttcttgtctcatgttgtgagccagcaccagagcctcttgggcaatatcaggtctgatgggaaaatctcagaacagtcggatgcaaagctgaaggaaatcgtaacaaacttcttggctgggtttgaaccttaaagccctgccactgtcaccagacactgctttggttttgtcatttattgtggtaaaatcagcaccatttgtaaaggtttactcttgtactccctgatgtacagaaatcacatgaataaaagttccatattgagtgctagtttgtgtgggacgggctcagatgtatcctgggacttgtggaggtcagagagcagcctgtaggagtcagtgccctcctttccctgggaatttaactcaggttattatttaaagctcgacttcaggggttggggatttagctcagtggtagagcgcttgcctaggaagcgcaaggccctgggttcggtccccagctccggaaaaaaaagaaccaacccgaatt

SEQ ID NO: 4054 - DNA, 16257 bp, Rattus norvegicus
ggtcaacggatctgtgattcagggtcagaagagaatgtgctttgccccactggccccagctccttgaggagaaggctgatcataagaacaaggagaccggagcttttccatcctctctaggggctgagactgcatgtagtgagtgggtctcgggggcactggctgttacttcttcctggatgtcgcaggtcacttcttaagagagcctgagatggagtttagaacacgggcttaggccccacctctatggaagagaaggggtgggcaactagaaccagtatgcagacctcagctaacccaaagcccaaagctgacatgcagttggggtgcccagcattcgtaccaaagtggaccaaccattatatgtggacacctgggaagggccaggtggctttctgcagctaagaccacacccagccactgatggcaagtgtcttcttaaacaggggcctaggtacctggcacggtggtacacccagcactttgggaggcagggggatcgctgtgagttcaagcccagcctagtctacacagacagtcccaggtcaactaagagtctatctcaaaacaaaataaaacgactctggataatgcttctcctttcttttaaatgtttttaggtctatttattttattttatgtgtctgaacgttctgcctgcaagtgtgtaatgcactatttgggtactggctccactggaactgggataagtgatgtgagccaccctgtgggtgctgggaatcaaacctaggacttctgcaagagcaactcaaccactgagccagttctccagccctgagatggtaagatattaagatggggcccagtggaagatcttccagtcactgagggcaagccttgaagggagcagtgagaccttggtctctcctggtgatctgttttcgatttctcagccgtcaaatgaagaggttgaggctcccatgtcttcctgccatggtttgtctgtgtctttattttgttttggttttgcttttgtttttttgtgtagcccaggctggcctggaactaggtctgtagaccaggctggcctggaactcacagacattctcctgcctctgcctcctgagttctgggattaaaagtttgcatcactgtcaccgtggcttaatgtgcatttcattttaaactgtattcaaatgcaaaatcaaggagctggggagatggcttaatggttaagtctgcacactgctcttgcagaattctgaattttgttcccagcacccacataggcctactcatgatcccctttaatgacagctcctggggatacaacatcctcttctggttgccaaggaaacctgtgtacacaaacatacacacaaataaaagttaaaatttaaagcaaaaactgttcccaaaatgtcttgctaccaccatgctggggactggacccaaggtctctcacacactaggcaggcagtctgctactgagctgcatgtagcattcttcccatgcagacctatgcaggcctgcagcccaaccctgaaatgcaacacgagatgcctagttgtatgtactaaaatgggccaccattacatgtggccaccaggaagggtatggccttaggacaaatggctctctgtagctgaggccgcctgttggccacgctcaagcagctgatggcctgtgttttctcaaacgggagtgtaggtacctagcatttgggaggcagaagcaaatagatcactgtgagttcaaggccagcctggtcctcatagcaagttctaatacagagttttaaagagttttaaagttatttattatatataagcacattgtagctctcttcagacacaccagaagagggcatcagatcccattacagatggttgtgagccaccatatggttgctgggatttgaactcagggcctttggtagagcagtcagtgctcctaaccactgagccatctctccagccctaatacagagttgtaagtgcaagtgtgatttttccttttattgtgatttttctttctttttactttattttggtctgtttgttgtgtttttgggtttgatttctactgatattttgttttacgggctagttagaagaagggctgagctgcactcagagattgaacaagatccttttccccatctaagctttagatccacgtaagggcttcctcacccacttgcgctatccaacctcattctgaggtattggatttctatgaaaaaacagctcttggctaggctgcacctctaccccctccaagtctctttatcctcttgtagcttaggcctccccttctaggctgtgtcccttttgagctcaggtcattagctgaggcggtgaccttgaccccagcccagaccctgcaaatgaagggcctgcttctaaacagtgtggaacagtttgacccaagagacctggctgtgaccagtcatgcagtcaccctcttagactgggccccaccatggcagtggacaaggcataaaaaggtcggtctgggctggagaaaccatcaccgacggtggatctcggactgaacaccaacgccatggcctgccccagtctcgcttgctgcctgcttggcctactggctctgacctccgcctgctacatccagaactgccccctgggcggcaagagggctgcgctagacctggatatgcgcaaggtgagtctccccgacgccatcccgtcccgttctggcaaggctaaggaccagagatgctctcccaccttcagagagcatcccctcacacttgccagccctacgcggcctcgcatgggaacccggagctccctcttgacgccgtgaaggcacgctgtccctgccccaccacagtcccgatatggattgtgcacagcgcccatccgcgtctttccccccgcagtgtcttccctgcggacccggcggcaaagggcgctgcttcgggccgagcatctgctgcgcggacgagctgggctgcttcgtgggcaccgccgaggcgctgcgctgccaggaggagaactacctgccctcgccctgccagtctggccagaagccttgcggaagcggaggccgctgcgccaccgcgggcatctgctgtagcccgggtgagcaggagggggcctagcaggaccgaccggcagggagccgtcgggtttgctgctcaggccactgacccatttctcttgcagatggctgccgcaccgaccccgcctgcgaccctgagtctgccttctccgagcgctgagccctgctttgtgatgatacctttaggggcgcttccttcgttccccatggccactaccagaaaaaaattaaaaaaaaaacataaataaataaataaagcagatttccttttcaaacttgactggcgtctaattgtcagaaacgggagggaggaaaggcaccgggaacgccatggacattggcaattcagagggagaacagcccagcaggctgctaggaggaccgaggggtctctacaggttgtcatctccagttaggcccgtttcccactcccgactggggtaagcctgcggcagacagacttaggagcagcatttggaagtccaaacagcaatggtggacttctgtgggaaagggcaaagccaaacaggggcctgggtgatgggaaggcaggcgaggcggcaagggactcatccagtcacttccatatctggaaggagaccttggcggcgacctcagaggttgagggggtaatcccggcctagaagaaagggtcttggccaggggagggtagttgcagaaccataaggtttctacagagctgaattctcacacaggccccaaggaagccacaacggaaaatatcaagaatcaactggcctctccgtttctgtctccagggccgggcctgagctcaggggccctgtgtctgcctctgcaggacagcgttctctgggaagtcatgggatctaagagccagtgggcacaaatgaccacaaagcagagagctcacagacaaacaggaaacccgcaatccagactgcttgggtagagctcaggagagcaagtcttgccccacaaggttaaggtcctgggctccatcccatctagaaaacaagtaaacacgtaaaccagcactttatgtggctctcacactcagcaaatgaacacagatgccccaccgcccccacatgtgggatccacagacagggtggaggccaaagagatatgcgaaagagacttcaagattgatttgagtttttctttttcttttttttctttttggtggtaatagagttcatcactttctgggctttttttttttaaagatttatttatttcatgtatgtgggtacactgtcactgtcttcaggcacaccagaagagagcattacagatggttgtgagccaccatgtagttgctgggatttaaactcaggacctctggaagagcagtcagtgctcttaaccactgagtcatctctccagtcctatggggttttttttgttttttgttttgttttgttttgtttttaatgttccgatgtttattctgttaaatttccatttctgtgcatgtgtctctgtgtgaaagtatttgtaaatgagtgcagtgcccatggggaccagaagagggcatcagatcccctgaaatggggttacaggtggttgtgagtcatcctaagaggttgtggggaacagaactgggggcctctgcaagagcagtgatctctttttttttttttttttttattaacttgagtattcttatatacatttcgatgttattccctttcggtatccgggcaaacatccccctcccccctccccttccttatggtgttcccctcccaaccctccccccattgccgccctccccccaccagtctagttcactgggggttcagtcttagcaggacccagggcttctccttccactggtgctcttactaggatattcattgctacctatgaggtcagagtccagggtcagtccatgtatagtctttaggtagtggcttagtccctggaagctctggttgcttagcattgttgtacatatggggtctcgagccccttcaagatcttccagttctttctctgattccttcaacgggggtcctattctcagttcagtggtttgctgctggcattcgcctctgtatttgctgtattctggctgtgtctctcaggagcgatctacatccggctcctgtcggtctgcacttctttgcttcatccatcttgtctaattgggtggctgtatatgtatgggccacatgtggggcaggctctgaatgggtgttccttcattctctgttttaatctttgcctctctcttccctgccaagggtattcttgttccccttttaaagaaggagtgaagcattcacattttgatcatccgtcttgagtttcatttgttctaggtatctagggtaattcaagcatttgggctaatagccacttatcaatgagtgcataccatgtatgtctttctgtgattgggttagcttactcaggatgatattttccagttccaaccatttgcctacgaatttcataaactcgttgtttttgatagctgagtaatattccattgtgtagatgtaccacattttctgtatccattcctctgttgaagggcatctgggttctttccagcttctggctattataaataaggctgcaatgaacatagtggagcacgtgtcttttttatatgttggggcatcttttgggtatatgcccaagagaggtatagctggatcctcaggcagttcaatgtccaattttctgaggaacctccagactgatttccagaatggttgtaccagtttgcaatcccaccaacaatggaggagtgttcctctttctccacatcctcgccagcatctgttgtcccctgagtttttgatcatagccattctcactggtgtgaggtgaaatctcacggttgttttgatttgcatttcccttatgactaaagatgttgaacatttctttaggtgtttctcagccatttggcattcctcagctgtgaattctttgtttagctctgaaccccattttttaatagggttatttgtttccctgcggtctaacttcttgagttctttgtatattttggatataaggcctctatctgttgtaggattggtaaagatattttcccaatctgttggttgccgttttgtcctaaccacagtgtcctttgccttacagaagctttgcagttttatgagatcccatttgtcgattcttgatcttagagcgtaagccatggtgttttgtttaggaaattttttccagtgcccatgtgttccagatgcttccctagtttttcttctattagtttgagtgtgtctggtttgatgtggaggtccttgatccacttggacttaagcttgtacagggtgacaagcatggatcgatcttcattcttctacatgttgacctccagttgaactagcaccatttgctgaaaatgctatcttttttccatttgatggttttggctcctttgtcaaaaatcaagtgaccataggtgtgtgggttcatttctgggtcttcaattctattccattggtctatctgtctgtctctgtaccaataccatgcagtttttatcactattgctctgtaatactgcttgagttcagggatagtgattccccctgaagtccttttattgttgaggatagctttagctatcctgggttttttgttattccagatgaatttgcaaattgttctgtctaactctttgaagaattggattggtattttgatggggattgcattgaatctgtagattgcttttggtaaaatggccatttttactatattaatcctgccaatccatgagcacgggagatctttccatcttctgaggtcttcttcaatttccttcttcagtgtcttgaagttcttattgtacagatcttttacttgctttgttaaagtcacaccgaggtactttatattatttgggtctattatgaagggtgtcgtttccctaatttctttctcggcttgtttctcttttgtatagaggaaggcaactgatttatttgagttaattttatacctagccactttgctgaagttgtctatcagctttagtagttctctggtggaatgtttgggatcacttaaatatactatcatatcatctgcaaatagtgatattttgacttcttcttttccgatctgtatccccttgacctccttttgttgtctgattgctctggccagaacttcaagaactatattgaataagtagggagagagtgggcagccttgtctagtccctgattttagtgggattgcttcaagtttctctccatttagtttaatgttagcaactggtttgctgtatatggcttttactatgttcaggtatgggccttgaattccaattctttccaggacttttatcatgaaggggtgttgaattttgtcaaatgctttctcagcgtctaatgaaatgatcatgtggttttgttctttcagtttgtttatataatggatcacgttgatggttttccgtatattaaaccatccctgcatgcctgggatgaagcctacttggtcatggtggatgattgttttgatgtgctcttggattcggtttgccagaattttgttgagtatttttgcgtcgatattcataagggaaattggtctgaagttctctttctttgttgtgtctttgtgtggtttaggtataagagtaattgtggcttcgtagaaggtattcggtagtgatccatctgtttcaattttgtggaatagtttggataatattggtatgaggtcttctatgaaggtttgatagaattctgcactaaacccgtctggacctgggctctttttggttgggagacctttaatgactgcttctatttccttaggagttatggggttgtttaactggtttatctgttcctgatttaacttcggtacctggtatctgtctagaaaattgtccatttcctgaagattttcaagttttgttgaatataggtttttatagtaagatctgatgattttttgaatttcctctgaatctgttgttatgtctcccttttcatttctgattttgttaatttggacacactctctgtgtcctctcattagtctggctaagggtttatctatcttgttgattttctcaaagaaccaacttttggttctgttgattctttctatggtccttttgtttctacttggttgatttcagctctgagtttgattatttcctgccttctactcctcctgggtgtatttgcttctttttgttctagagcttttaggtgtgctgtcaagctgctgacatatgctctttcctgtttctttctgcaggcactcagcgctatgagttttcctcttagcacagctttcattgtgtcccataagtttgggtatgttgtaccttcattttcattaaattctaaaaagtttttaatttctttctttatttcttccttgaccaggttatcattgagtagagcattgttcagtttccaagtatatatgggcattcttccttgattgttattgaagaccagttttaggccgtggtggtccgatagcatgcatgggattatttctatctttctgtacctgttgaggcccgttttttgaccaattatatggtcaattttggagaaagtaccatgaggagctgagaagaaggtatatccttttgctttaggatagaatgttctataaatatccgttaagtccctttggctcatgacttctcttagtctgtctacatctctgtttaatttctgtttccatgatctgtccattgatgagagtggggtgttgaaatctcccactattattgtgtgaggtgcaatgtgtgttttgagctttagtaaggtttcttttacatatgtaggtgcccttgtatttggggcatagatatttaggattgagagttcatcttggtggatttttcctttgatgaatatgaagtgtccttccttatcttttttgatgacttttagttaaaaattgattttatttgatattagaatggctactccagcttgcttcttctgaccatttgcttggaaaattgttttccagcctttcactctgaggtaatgtctgtctttgtctctgaggtgtgtttcctgtaggcagcagaatgcagggtcctcgttgcgtatccagtttgttaatctatgtctttttattggggagttaaggccatttatgttgagagatattaaggaatagtgattattgcttcccgttatattcatatttggatgtgaggttatgtttgtgtgctttcattcgctttgttttgttgccaagacgattagtttcttgcttcttctagggtatagcttgcctccttatgttgggctttaccatttattatcctttgtagtgctggatttgtagaaagatattgtgtaaatttggttttgtcatggaatatcttggtttctccatctatgttaattgagagttttgcaggatacagtaacctgggctggcatttgtgttctcttagggtctgtatgacatctgtccaggatcttctggccttcatagtttctggcgagaagtctggtgtgattctgataggtctgcctttatatgttacttgacctttttcccttactgcttttaatattctttctttattttgtgcgtttggtgttttgactattatgtgacgggaggtgtttcttttctggtccaatctatttggagttctgtaggcttcttgtatgcctatgggtatctctttttttaggttagggaagttttcttctatgattttgttgaagacatttactggtcctttgagctgggagtcttcactctcttctatacctattatccttaggtttgatcttctcattgagtcctggatttcctgtatgttttggaccagtagctttttccgctttacattatctttgacagttgagtcaatgatttctatggaatcttctgctcttgagattctctcttccatctcttgtattctgttggtgatgcttgtatctacggctccttgtctcttcctttggttttctatatccagggttgtttccatgtgttctttcttgattgcttctatttccatttttaattccttcaactgtttgattgtgttttcctggaattctttcagggatttttgcgattcctctctgtaggcttctacttgttctctaagggagttcttcacgtctttcttgaagtcctccagcatcatgatcaaatatgattttgaaactagatcttgcttttctggtgtgtttggatattccatgtttgttttggtgggagaattgggctccgatgatgccatgtagtcttggtttctgttgcttgggttcctgcgcttgcctctcaccatcagattatctctagtgttactttgttctgctatttctgacagtggttagactgtcctataagcctgtgtgtcaggagtgctgtagacctgttttcctctctttcagtccgttatggggacagagtgttctgctttcgggcgtgtagtttttcctctctgcaggtcttcagctgttcctgtgggcctgtgtcttgagttcaccaggcggggtgctgcccaagggctctctgtggcggcagcaaccaggaagacctgtgccgccccttccaggagcttcagtgcaccagggttccagatggcctttggtgttttcctctggcgtccgagatgtatgtacagagagcagtctcttctggtttccaaggcttgtctgcctctctgaaggttcagctctccctcccatgggatttgggtgcagagaactgtttatccggtctgtttccctcaggttccggcggtgtctcaggcaggggtcctgacgctcctgggccctcccccacggaacccagaggccttatacagtttcctcttgggccagggatgtgggcaggggtgggcagtgttggtggtctcttccgctctgcagcctcaggagtgcccacctgaccaggcggtgaggtctctttctcacgggttctgggagcagagagctgctgcgggccgggatccgcgggtgtgggacctcggcaaacacaggacgtgcccggtcctagatgaactctgcctctgtgtgtcccaatctcaccaggcagctctcttgcagcagacaagttggtcttacctgtggtcccgaggctcaagttgagcagtgatctcttatctcctgagccatctccccagcctgaaaatggtctaagttacttttcactattgcttcgctgtgtgcttgagggctgtgcacacagcacagcgtctgtgtggaggtcagaggtcctggcatttgctcacaagcctctctgcttctggaggctgaagagaggaggcaagcatctgctgtgaactctgggagtgcccttaaatggctctgtagctgaggaaaggactccctgaaaggaaaaaaatatatattatgtccagtaggcagaagtagggtgagcaggtataattctctcctcgaggaagaggagcctgattcttccagaaacaggtggaggaaagcgagacgcttacaacactccacctgcgcagaggctcgaagtgagaatctgaccttcattctaaagctgcccatacaccagccgtaggggttgaatcaagtgtgcccatgccgcctgccacgcttctttctgtccctttttggtctggcccttccctggccctgccctattggaggtcagaccctaagagggccacagaaggaggaggctgggataggagtctgcctggcccctgtgctacctgtctaaaccggggcatgcagagaggtgtataggcaccgaggagatgggaagagagctggcatctgggtaaaagaccgtgagtctgggcagagctgaccttgctgaaccaccttaagtcaatcagactaatctctctcttctctgtagttgcccctgacctcagaacctgcaggccatcccaaatgaggtaaaccatcctgaccttgctgcagctcgcaggagaggatgcccaggacagatggggcagagagaaaggatgttaacaggagggcgaggagcagggagaccagaggatggaaggatgtctgggagagcagccggagacgggagacacctgagggcctggaggagggacaggctgatgaggggctgaagcctgggtttggatgtgcgggtcagttaagaggactgggattcagttcctagtgcccacacggtaggctgtaaccacctgtaactagttccaggggacccgatgccctctcctgacctctgaggcgccaggcacacacatggtgctcagacattcatacaaaaccaaaaacacccatctacataagtgaataaatctaaaattttagaaaaaagaggaggtaataagaagtgtgggggggggagtcaagtgctgatgacccggatgtgccgaacggaatgaagtatttacgtctgggagctattgcaagcatgtgcgccttgctgctggacttctgtgttcctctgggtctctagctatggttgaggacaagggtcatagaaatgcccctagtagctgctactttttcctcccccccgcccccccccccgctcagtcccccttccgtctccatggtgctggaaccatagctagggaagacttctgctcctgagccacaactccagcctatcttgtctatttccctgcctgagtgtgggtgtgacggtttgaacatgtgcctgtagaggacttgtagctggactcttactggagtctgcctctcagtggctgggtcttgatggtggagcacctggagagaaggcgggtggcattgtcttctttaggtctggggtaatgtctctgtaccttctcctcccatccaagcacagccttggttaagagtccttcacgttgtttttgccttagtctgggtgaaatcagggctgagatggccacccctggcctgtcccctctttctctgtcactcttgctgatcctgtctctcctcatgtcctgctctgtttctcttgtccacaatgtccttttatttcggtctcagatagaaacttgctaagtcaccctgacccttcaggctcctctggatctcagatctttcccttcttctgacttgcctttttttctgagtattatgtgggtatccaggagcagcagaagcttcctttatactctaagacttataggttctgccccttctggcggtgggggcgtatcttatgcacgactttggatgtggggatcagtcagagcagagtagaaagttcccactccaattcctctccccccttttctccccaccccagaaagagagacagacaccagggtgcattttttaaaagtttattttccatgctgtaggggggaggcgtggggggcgatggctcagtagacccggggcttggcagaatccacggactcttgtgtcccagccagctgtaccagcctaagcagcagctcccgggctggcccgtccagctgcgtggcgttgctctgctcccgagcgcgggtgaggcggaaaaaaccctctcgacactcgggctcggccacgcagctctctgaaggaagggctgtgtgaggtcaggcgtcctggggtgggcgcacctataggggcgccatccccacaatcccctttatcctaccctgctacgttccaactctcgacccccttcatactactcaccctccatctccggtcctgattcctcagtcccccacttagcccccctttacctcccacccaccccatccattccccatgctcagcccgcctggctttgtgcgcaccatcgctgcagcagatgcccgcggcagcgcagcggcctccgcttccgcaaggcttctggccagactggcagggcgagggcaggtagttctcctcctggcagcgcagcgcctcggcggtgcccaggaagcagcccagctcgtccgcgcagcagatgctcggcccgaagcagcgccctttgccgccagggccgcaggggagacactgcggggaaggacgcgggtcagctggagccaggccaagaggggcgttgggaacctaaggtcaccctgctgctatcccagcttcaccggccagatgctctggctctatctaggacgaagcagccgtaaagggcgagagtggaaatctaaccggctaggttatcaggaggatcagttctcatgaggtctcaaaaccctctcctgctttgacagagtcgtatggggcggggggcgggggagacaacacttgggggacctcctcagctctgatgtgtcaccggtgtgcagcagtctctcagagacttacctctccgacattcagatggccctacacattccaagatcctctttcctgtacctacggctcgctcactcttacccctgccccacgctggtgggcttttacctcccgccaacctattatgccctagtaggaaggtggcaaggaccgaattaggctgatgggtgcaagacacacctagtgcctcggaagtctccaaaggaactcagcaaacggaaggcagactcggtgaactgcctactgcccatcgagcttgttcaaaactgagccacctgtgacctgaccagatttgagcctagtgactggattcccttcagccctgccggaagggcagactcagagctgaacatacagtacagcagatctgggcacgaggctgaggctagatgtgggacatactccgctcagacacagggcaatggccgtcttccgtggacaggaagaaaccggtgcagctggctaaaaaaggagctaagagagtttgagctgggtgggaaaggctttgtactcaggcgagaacagtttcgtaccatctacccagtcctggtgagccaacataccaccggccacctccagctgtgcagaggaggccagggtacccagtttaacccgttctcatcccaagcccagtgataagtatctctcattttctggcatatcccctgcctggggacactgtcctttatgtggcttctctggcacctggtcccctcttaccgttctgggaaacccatctactccatataagataactgcttccttccaggaacctcccctaaagtctgactgctcagacaaggtttccctctctcctagcccatgacccttcctacggcactgtcagcagccctgaacggaccacagtggtacctgtctcagctccatgtcggatgtggccctcttgcctcctcttgggcagttctggaagtagcaggcagaggtgagggccagcaggctcaggaagcaagcagagagcgtagtgttgagcatcatggcgagcataggtgggcactgcgtgcagctctgctctgctgcctgagcgggctgggctgtctatttatgtctgcaggtgttggctaggaggcgacagcgtggctgctaaccccctccccagtggctccccaggagcccacagctgacaggtcccaagctgtcagcagtgattcaggcatctggggacacacgtgggcctgtcaatgcagagggtggtggaggaggggagccagccatcaggctgtcactggccaccgtgtgacgggagccaccgccacagtgattggtgctgtgcaatcagggaggtgagccgacttgagggtcacctggaaatcatagttgagcatttcagcagctctcaacagactagaggggtccccaggtctcattcaccaaggactagcaggtctgcagcagggtcaggaccaggaggtggggcaggtttgttagttgtggtgtaggataagaggaagcatcgataccaggtgagctttcagaaggaaattcccacgcgcagcctcatgggctagcggccacagtcatggagtcaagactgaacatagagccaaaggcctgccctgtcccaggtgtggctggcgtcttggggcaacttggtgagaccctgtctcgatattaaaagaataaaaaggacagttgtgacacatgcttttaaccccagccattggaaagcagaggcaggagaatttctgtgagtttcaggccttctagggtagagagctagggtaggatatagttcagaaacagtcctaggtgagcccacagtactgcagaggaaaagctatggggagaccccatgccctgaggctggtactatctcagatctaaggcaggagtggaagtggatgttgttaggagaggaaatgggaggagccccagacagacagacacagtctgagaaagcaagtgtagttcctgactttagacggtaagtcatttggttgtttctaaggcagtcgtttagtccaggctgaccttgaccttactacatagcagaaagctggcattgaactcttgatc

SEQ ID NO: 4055 - DNA, 1635 bp, Rattus norvegicus
agaattcaaccattaaatagcccacgcagaaacatctggtgatgggatattgtgtattccatacgctagtaaatgaatattaaaatagtcctacaccttgtgagggcttatttgccagtagttactaaggcagtagtaaagctctaattttgaaatcttagtggctctgaaaagagcctttggatctgttgtgagctctgtgggctcacttggagctggtgtacttggtgactgccttggtgccctcggacaccgcgtgcttggccagctccccgggcagcagcaggcgcacggccgtctggatctcccgggacgtgatggtcgagcgcttgttgtaatgcgccaggcgacgctctcccgcgatgcgctcgaagatgtcgttcacgaacgagttcatgatgcccatggccttggaagagattccggtatccgggtgcacttgcttcagcaccttgtacacgtacaccgagtagctctccttgcggctgcgcttgcgttccttgccgtccttcttctgggccttggtcacagccttcttggagcccttcttcggggcgggacgggacttggcgggctcaggcattcgtcaacagagtgtgaacaccaagaaagaacagaaagagttgttgggagttctcgggttcttcctgctatttaaacaaagctgtagctgttcttgttcggagatttctgagacgttcattgcacgaactgtccaatcaaaatatgtatctttcaaatccacgatactattggcttaggttaaaaaagctgtatgagtagccattaaaatcactccgtttttcgcgccaggagttgagtataagtttagtgctgtggctgcttcactttacaccttaatatttcttttaaagaggtgaaatgtctggtcgcggcaagcagggaggcaaggctcgcgccaaggccaagacccgctcctcccgggccggcctgcagttccccgtgggccgcgtgcaccgtctgttgcgcaagggaaactactcggagcgcgtgggcgcgggcgccccggtgtacctggcggccgtactggagtacctgacggccgaaatcctggagcttgcggctaatgcggcgagggacaacaagaagacgcggatcatcccgcgccacctgcagctggccatccgcaacgatgaggagctcaacaagctgctgggccgcgtgaccatcgcgcagggcggcgttctgcccaacatccaggctgtgctgctgcccaagaagaccgagagccaccacaagcctaagggaaagtaaaccagtgagcgaacgttttatcttttgaaagaccaaaggctcttttcagagccatcacttgttcatgtaagagttggtaaccaaaccctggttttacctactttgttgcaagcccatatcaatcttaaaagcatcaaactaattatatttgctggttgggctaaatctttaatctttaacaggtttgtggttcccgcagagagattattgggatcgtagaaacaggctggtttttatttttatagtcagctcttgcagtactttacctagtattatttctcagtagcagcagacttaacgctgggattgggagaagtacatagcgtttacaggatagctggtagcttacatgcacagcgt

SEQ ID NO: 4056 - DNA, 1653 bp, Rattus norvegicus
ctgggccgccagtcgttttgttgggcgcaagtaccatggttgggcgctgaaggtcagcaatgacattggcaatggtgaaggttttccctgagccagtcaggccaagtaacgtctggtgcgccaaggccagtcttccaagcccctcgttcgagacgtcgaatggcctctggctgtgattcgccagaaggtttaaaagcggaattcggccagggacccttggctttaagtgctgaattactttggggtcatgtggtcctctgaaagccacatttgaaaaacatgcttcaatggcaggcaatacagagccctggacacagctcagccagccttgctagtcaaaagcccgcatgcccaaccgcagtgtaggaacagaagcaagcacaactcttaacaggagatgtgggtggctctgaaaagagcctttgggtctgttgtgagctctgtgggctcacttggagctggtgtacttggtgaccgccttggtgccctcggacacagcgtgcttggccagctccccgggcagcagcaggcggacagccgtctggatctcccgggacgtgatggtcgagcgcttgttgtaatgcgccaggcgcgatgcctcgcccgcgatgcgctcgaagatgtctgtcacgaaggagttcatgatgctcatggccttggaagagatgccggtgtccgggtgcacttgcttcagcaccttataaatgtagatggagtaactctccttgcggcatctcttacgtttccggccctccttcttctgggtcttggtgactgctttcttgaaccctttcttggaaatagtagtcccctttgccgacacctccggcatcgtggaaaaataagtttgtccactggaacgtctcaaaacagttccaactgctgagaaaacacaccgcttgaaggccaagaagagaggtatttatagcgtgggccttggatgagctatgagcacgcgaaagatgattggacaataaatgttccttgtatgcaaataaggggaattcaagtggtgctttctgattggttaattcatcaccaatcagccaatcaggtggtgagtgtaatttgccattagactataaataggcgtggacgcactacctccgctacggctttatggcttttgaagaatcatgtctggccgtgcaaagcagggtggcaaggctcgtgccaaggccaagtcccgctctttcagagcaggtttgcagtttcctgtgggacgtgtgcaccggctccttcgccaagggaactacgcagagcgaattggggctggcacaccagtgtacttggcggccgtgctggagtacctgacggctgagatcctggagctggcgggcaatgcggcgagggataacaagaagacgcgcattatcccgcgccacctgcagctggccatccgcaacgacgaggagctcaataagctgctgggccgcgtgaccatcgcgcagggcggcgtcctgcccaacatccaggccgtgctgctgcccaagaagaccgagagccaccacaagtcccagaccaagtgactcccgcacttgtgacagcagctaacagattaaaacaaaatggctcttttcagagccacctttcgttttcacgaaaagttgtgcatgacaatttttctcctgaacaggtataatcaatgactca

SEQ ID NO: 4057 - DNA, 1880 bp, Rattus norvegicus
gggtggctcatccgctgctgagccctctgcgtgcgcgggaagccagtctgtacctcggcggctgccactgaccatgaccatgacccttcacaccaaagcctcgggaatggccttgttgcaccagatccaagggaacgagctggagcccctcaatcgcccgcagctcaagatgcccatggagagggctctgggcgaggtgtacgtggacaacagcaagcccgccgtgttcaactaccccgagggcgccgcctacgagttcaacgccgccgccgccgccgcggccgccggggcctcggctccggtctatggccagtcgagcatcacttacggtccggggtccgaggcggccgcctttggtgccaatagtctgggggctttcccccagctcaacagcgtgtcgcccagtccgctgatgctgctgcacccgccgccgcacgtgtcgccgttcctgcacccgcatggccaccaggtgccctactacctggagaacgagcccagcgcctacgctgtacgcgacaccggccctcccgccttctacaggtccaattctgacaatcgacgccagaatggccgagagagactctccagcagcagcgagaagggaaacatgatcatggagtctgccaaggagactcgctactgtgctgtgtgtaacgactatgcctctggctaccattatggggtctggtcctgtgaaggctgcaaggctttctttaagagaagcattcaaggacataatgactacatgtgtccagctacaaaccaatgcaccatcgataagaaccggaggaagagttgccaggcctgccggctgcgcaagtgttacgaagtgggcatgatgaaaggcgggatacgaaaagaccgccgaggagggagaatgttgaagcacaagcgtcagagagatgacttggaaggccgaaatgaaatgggcacttcaggagacatgagagctgccaacctttggccaagtccacttgtgatcaagcacactaagaagaatagccccgccctgtccttgacagctgaccagatggtcagtgccttattggatgctgaaccacctttgatctattctgaatatgatccttctagacccttcagtgaagcctcaatgatgggcttattgaccaacctggcagacagggagctggttcatatgatcaactgggcaaagagagtgccaggctttggggacttgaatctccacgatcaagttcaccttctggagtgtgcctggttggagatcctgatgattggtctggtctggcgctccatggaacacccggggaagctcctgtttgctcctaacttgctcttggacaggaatcaaggtaaatgtgtagaaggcatggtggagatctttgacatgttgctggctacgtcaagtcgattccgcatgatgaacctgcagggagaagagtttgtgtgcctcaaatcaatcattttgcttaattctggagtgtacacatttctatccagcaccttgaagtctctggaagagaaggaccacatccaccgagtcctggacaagatcacagacactttgatccacttgatggccaaagctggcctgactctgcagcaacagcatcgccgtctggcccagctcctcctcatcctttcccatatccggcacatgagtaacaaaggcatggagcatctctacaacatgaaatgcaagaatgtcgtgcctctctatgacctgctgctggagatgctggatgctcatcgtcttcatgcccccgccagtcgcatgggagtgcccccggaggagcctagccagagccagctgaccaccaccagctccacttcagcacattccttacaaacctactacatccccccggaagcagagggcttccccaacaccatctgagaac

SEQ ID NO: 4058 - DNA, 1144 bp, Rattus norvegicus
tttcccgcgagccgaccggttctgtcatgtcgaccctcagtcccagcgtcgtgattagtgatgatgaaccaggttatgacctagatttattttgcatacctaatcattatgctgaagatttggaaaaggtgtttattcctcatggactgattatggacaggactgaaagacttgctcgagatgtcatgaaggagatgggaggccatcacattgtggccctctgtgtgctgaaggggggctataagttctttgctgacctgctggattacattaaagcgctgaatagaaatagtgataggtccattcctatgactgtagattttatcagactgaagagctactgtaatgaccagtcaacgggggacataaaagttattggtggagatgatctctcaactttaactggaaagaacgtcttgattgttgaagatataattgacactggtaaaacaatgcagactttgctttccttggtcaagcagtacagccccaaaatggttaaggttgcaagcttgctggtgaaaaggacctctcgaagtgttggatacaggccagactttgttggatttgaaattccagacaagtttgttgttggatatgcccttgactataatgagcacttcagggatttgaatcatgtttgtgtcatcagcgaaagtggaaaagccaagtacaaagcctaaaagacagcggcaagttgaatctacaagagtcctgttgatgtggccagtaaagaactagcagacgttctagtcctgtggccatctacttagtaaagcttttgcatgaaccttctatgaattttatggtttttatttttagaaatgtctgttgctgcgtcccttttgatttgcactatgagcctgtaggcagcctaccgtcaggtagattgtcacttcccttgtgagacagacagatctcttaaattaccactgttaaataataatactgagattgtatctgtaagaaggatttaaaaagaagctgtattagttttttaattggtattttaatttttatatattcaggagagaaagatgtgatattgttaatttagaatagtctaaagcgctcagtttcatatcagtaacagcatctaagaggtttccccagtggaataaacatgtttcagcatgtttcagca

SEQ ID NO: 4059 - DNA, 3219 bp, Rattus norvegicus
agggactggatgatgctgtcccgctggagaggattcgtggcttgagtcctgttccacccgatcaccgatcaccggggtggccgaggccggtaccagcgctgcggctctctcagctctgccacattccctgagttaacatatgagagattggtataaaatggctggcattttgtctggataaatcacacaaccctcccagaaagtgatcaccaggtaaaggtcaagtggatttcgaatagtgtctgagaccaactcaacccagaaaaacaaaatggcccttaactcttctgctgaagatggtatcaaaagaatccaagatgactgccccaaggctggcaggcacagttacatatttgtcatgatccctaccctctacagcatcatctttgtggtgggaatatttggaaacagcttggtggtgattgtcatttacttttacatgaagctgaagactgtggccagcgtctttcttctcaatctcgccttggctgacttatgctttttgctgactttgcccctgtgggcagtctataccgctatggagtaccgctggcccttcggcaatcacctatgtaagatcgcttcggccagcgtgagcttcaacctctacgccagtgtgttccttctcacgtgtctcagcatcgaccgctacctggccatcgtccacccaatgaagtctcgccttcgccgcacgatgctggtggccaaagtcacctgcatcatcatctggctgatggctggcttggccagtttgccagctgtcatccaccgaaatgtatacttcatcgagaacaccaatatcacagtgtgcgcgtttcattatgagtctcggaattcgacgctccccatagggctgggccttaccaagaatattctgggcttcttgttccctttccttatcattctcaccagctatacccttatttggaaagctctaaagaaggcttatgaaattcaaaagaacaaaccaagaaacgatgacatctttaggataattatggcgattgtgcttttcttcttcttttcctgggtcccccaccaaatattcactttcctggatgtgctgattcagctgggcgtcatccatgactgtaaaatttctgacatcgtggacactgccatgcccatcaccatctgcatagcgtattttaacaactgcctgaaccctctgttctacggctttctggggaagaaatttaaaaagtatttcctccagctcctgaaatatattcccccaaaggccaagtcccactcaagcctgtctacgaaaatgagcacgctttcttaccggccttcggataacatgagctcatcggccaaaaagcctgcgtcttgttttgaggtggagtgacaggttcaaagcacactggcaatgtaatgccctgacagaagccagggcagcctctgactaaatggcttacgaccaaaggaccattcaccctgcctcaggatctaagcagaaaaatgcgctcatcagactgtagataatgactaaaactctgagagaagactttgaaggagtaaccaagcaaagccgtcttgcattaatagatgatggctagccaaaggaagagtcaggagctggatggattggtgggtctggaaaacagttcgctggcagaaatgcaatctcatcagtctccctttgctatgttccttttgatttccacacgtaggtatgtggcccatgctaaatatttaggcaagaaacaagagatggaaatcaaggtcacttgttctgttcaactcccaaagggcaaggaacctttgttgtccctgtagtcattagcagtggagacccacttgtcactgttactacacctatcgtgcaaagatttgctaatctgtagttatcaagtttcaggactcctttgtaaaattcagccagtgttttagaaacatgtactgtccccagacaatgctagccagtggtgtacttatgtagcagtgttacccaagtccacacatcaaagtcacactgctttaataacgtgacatactaggtacatctgcgttatttcgcatctgagaaatgtacacagtcagaggtgaatacactatattccatacagtctgccttgctctctaaaaatatatattctccacatacgtgaacatctttatctctaaactgtcatttgatgaaattttggcaatgtatgtttacctctaaataaagtaattttattgtaatgtaaaaaaaaaaaaaaaaagaggcatctaggtctcagccacctaacttcctgcctgcactcttctcaacagtctagggactctgggcagtgctggccgcctgggttctcaccagcaccacggacgtgctgtcgaagatggtctgtaggtacacgaggatgggagtgatgcctgtcagctgctgcagaaaacgcatcagcactgtaatgagaataggccggtacacacggggctcccaggcctccgcccacgacactcggctactctggaacacaaagcgtctgttgagggctatgcaggctctccagccctggccaccctgtcttggcacctgcgggtcgaggagagacctccttccctcatccaagagaggcccaaccaccagaggctgcatgggctctgcatgctagcaggaacctctcctttgaggaaaggcagccaaagcacagagaggcctggtggatgtccaaggctacccagagcttcctgggttggggcccgaccaggcgggtaccacacatgcttcaccgtctccgcacgttgtcctggatctgctcaaactcccagtggacctcagagtccgctcgcagccagatcagcgcctgcagtgcttcctcatcccggctcttagacagtaggaagcgaggcgagttgggcatgaagctaagcagcaggatcatgaccagaacaggcccctccccggccacgcaagccatgcccaaggcagcagaagacctggtgagagaggcttcggtgagcagatgggccctctgttgctctcccagcctagcttcccgactgcccaagtccctgtaggaggggcaatgtgggactttaagaattgcctggggctggagagatggctcagcgattaagagcacccgactactcttccagaggtcctgagttcaattcccagcaaccacatggtggctcacaaccatctgtaaagagatccgataccctcttctggtgtgtctgaagacagctacagtgtacttatatgtaataaatgaataaatcttt

SEQ ID NO: 4060 - DNA, 2615 bp, Rattus norvegicus
  misc_feature (1134)..(1134): n is a, c, g, or t
cttcgagagacagccatgcggttcattcctgacatagccctggctgcacccaccgcacctgccatgctacccacgaccgttatccagcccgtggataccccgtttgaggaactcctttctgagcatcccggccccgaaccagtcaccagtcccccactggtgacagaggtgacagaagttgtggaagagcccagtcagagagccaccactatctccaccaccacatctaccactgcagccaccaccacaggggccccaactatggccacagcacctgctacagcagccaccactgcccctagcactcccgcggcaccccctgccacggccaccacggctgacataaggaccaccggcatacaagggctgctgcctcttcccctgaccacggctgccacagccaaggccactaccccagcagtaccctcaccacccactactgtgactaccttggacacagaggccccgacacctaggctggtcaacacagctacctctcggccacgagcccttcctcggccagtcaccacccaggagcctgaagttgctgagaggagtaccctgccgttggggaccaccgctcctggacccacagaggtggctcagaccccaactccagagtcccttctgaccacgacccaggatgagccagaggtgccagtaagcggggggcccagcggggactttgagctgcaagaagagaccacacagccagacacagccaatgaagtggtggcggtggaaggagccgcggccaagccatcacctccactggggacactacccaagggtgcccgcccaggccttggcctccacgacaatgccatcgactcgggcagctctgctgcccagctccctcagaagagcatactagagcggaaggaggtgctcgtagctgtgatcgtaggtggcgtggtgggcgccctcttcgctgccttcctggtcacgttgctcatctaccgcatgaagaagaaggacgaaggcagctacaccttggaagagcccaagcaggcaagcgtcacataccagaagcccgacaagcaggaggagttctacgcttagcagagagagccacagtgcctcctgcagcctcgactccgccttgcccagtccctgtcccaacaacagcccagnccaatcctgggcctgggcctgggcctgggatggagcctggccctgcttccttctgctcaggctgctagcttaacacagactgtcctaaggagcagaggcgccaccatctgccccagactgtgcccgtatgaccccttctctaggcccattccctccagcctggggcttcaggatcttgagtcccatggacaagaggaaggaagccctggttgctggttgaaacatgggcggggccagggttaagatggcccacagtgctcttcacgcagaggccaccatgctggcttctaaaaccaacacatggtacatctagccctccaattcaacatcatccggatgctgaggcctcgagctgctgtccaaggcctctctcgacaggagggtgtcctttgtcaccagcctgagtcgtcgtggagtcaccgccccctctcccctgcctaatgcacatgtccccaggctgcacctctttctgcacctcctcccagggaaagggcttcctcagtgcacagggcagtcagtggtaagggaggccactctagcgtccctcctgagaggggatgtcacatcgcctttgtcaaccactgctataatcctataatgcattcacacaggagacaaaaacatacccagtcctgaccacccggccagcgagacatcacacacacgcaccaccttcacgcagtctcagacatcctgacgcttctgccacgtaggccactgtcatcgtcaccagtggcaaccacgccaccttcctcccactctctctttacacacattggtcctgcatctggctcctctaaccatccgggtcactgaggaaggcaggaccgagttgtaggcatcagcccatattgggtcccccagagtcaccctattccacttggtccccaccatgacacctataccagccacactgatgctgatcccagctgatgtcagtcacaaccccacacagatgcaggctcgccctccccactgtggctcatagagaagttttgggctagcctctgccagccaagtctgaaggaagaagggagctagggtctcccaggaccaaggagctgtgtgggttgtccctggtctctatgtatttcctttctgctctgagccaggagctgtctctgcctcccaggacacgtgtctccaaagtgcctgcgagggcgggctccgcccaggccctctgtgtcccctgccctgccctggcctggtgagaccgacctcaggcctacctactctgggtcctctctgtggacacaactgaccaggcaacttggcagttctggctacaactggatggactcatactccagcaggctcatcccaatgctgtaggccccaagagtcattgatggggacaagggtgtcacaggcctcaagtctaccaccctgtctctgttattcttagaagtggggctattccagaggtattttaagtgtgggatcaccattctctttgtgagaggggtgtgccgagggaattc

SEQ ID NO: 4061 - DNA, 1339 bp, Rattus norvegicus
ggtgacagagaccagaccagacacacacacctttccagcgccagcgctgtggatggggagctgccaccaggcttgaaagaagcccagagctggcgactgcacacggtgcattttaaatagtgtcagagagcaattcacgtcgccaagggagacatgacccttaactcctctactgaagatggaattaaaagaatccaagatgactgccccaaggctggcaggcacaattacatatttgtcatgatccctactctctacagcatcatctttgtggtgggaatatttggaaacagcttggtggtgattgtcatttacttttacatgaagctaaagactgtggccagtgtttttcttctgaatcttgccctggctgatttatgctttttgttgactttgccactgtgggcagtctataccgctatggaataccgatggcccttcggcaaccacctatgtaagatcgcttctgccagcgtcagtttcaatctctatgccagtgtgtttctgctcacgtgtctcagcatcgatcgctacctggccattgtccacccaatgaagtctcgcctccgccgcacgatgctggtagccaaagtcacctgcatcatcatctggctaatggctggcttggccagtttgccagccgtcatctaccgaaacgtatatttcatcgagaacaccaatatcacagtttgcgcttttcattatgaatctcagaactcaacactccccattggactgggtctaacaaagaacattctgggcttcgtgttccctttccttatcattctcaccagctatactcttatttggaaagccctaaagaaggcttataaaattcagaagaacacgccaagaaatgatgacatctttaggataattatggcgattgtgcttttcttcttcttttcctgggttccccaccaaatattcacttttctggatgtgctcattcagctgggcattatccgtgactgtgaaattgctgacattgtggacaccgctatgcccatcaccatctgcatagcttattttaacaattgcctgaatcctctgttttatggctttctggggaaaaaatttaaaaaatatttcctccagcttctgaaatacattcccccaacggccaagtcacacgcaggcttgtcaacaaaaatgagcactctttcctaccgcccttcagataacatgagttcatctgccaaaaagtctgcatctttttttgaagtggagtgagagggttcaaagcctgcaagtgaagtgatttcctgacagcagaagccagaggaccatttgggctaagcagctcactcactaccgaagagtgttcaacctccagcaa

SEQ ID NO: 4062 - DNA, 1030 bp, Rattus norvegicus
atggccaacaagggtccatcctatggcatgagccgtgaagtgcagtccaagattgagaagaagtatgatgaggagctggaggagcggctagtggagtggattgtaatgcagtgtggccctgatgtgggccgtccagatcgtgggcgcctgggcttccaggtgtggctgaagaatggcgtgattctgagcaagttggtgaacagcctgtaccccgagggatccaagccagtgaaggtgcctgagaacccgccctccatggtcttcaagcagatggaacaggtggctcaattcttgaaggcagctgaggattatggagtcacgaagactgacatgttccagactgttgacctctttgaaggaaaagatatggcagcagtgcagaggactgtaatggctttgggcagtttggccgtgaccaagaacgatggacactaccgtggagatcccaactggtttatgaagaaagcccaggagcataagagggagttcacagacagtcaactgcaggaggggaagcacgtcattggccttcaaatgggcagcaacagaggggcctcacaggctggcatgacaggctatgggcgaccccggcagatcatcagttagaaagggaaggccagctctgagctgcagcatcctgcttagcctgcctcacccacgcctatataggttcttagcccggacagctttgaggtgtcactgggcaaagatgactgcacatgggcagctcccacctatcctcagcctcagccccgcttcttaccccagagccaccactgtcctggcccctgttcccagctgtccccccacctctaccgtttcccccatcctggagtaagcacggagaagtgggctgaggtagcctgactgtaggccagcccactgtccttggaagccaatgtcctttgaaagagaccctgcctctacatctttttctggaatattttttgggttgaaattcaaaaaggaaaaaaatatatacatatacatatatctccaaaaaaaaaaaaaaaaaaaaaaaaaaaaaaaa

SEQ ID NO: 4063 - DNA, 5711 bp, Rattus norvegicus
ttacgaattcgttatagcttaagaggccttgcatggcagtggtgtgcctataatcccacttctatggagtaagaaggagaccaatcccttaggattcctgtgttagattgtctaagctaatttataactttcagcgtcaagaaaattgtctcaataagcatggtaaaaaatgacacaagacccttgtcctatacacaaatgagtaaacacattcaagtaccataaccacacatataaacttagacacatgtactcagatacacacaaacagacccacacacacacaaacaacacacacacaaacacacacacacacacacacacacacagataggagccatgaaaaagaggaaaaagagaacactattgattaacatttcatctttctgaaatgacagtttttaccagcaccagatactcatggttctaggactgaatctgagagcactctcaagatgtagctatgaattacactagtaagcggattataaaggcaaaactcacaagggtatctacttcctgcttatgtgcaaccagccacacatctgacctacatgcagaaaagcacacatctttcatgctgtcagaggcaagcaactttgtttacaggagtgaaaacacctgacttgttatcttacataaacaaatcaggtaattccaggtataattctctcattctaggaaagacatctgtcctccggctagtgagctcccaggttagagccattttgttttatattaattttaaaattttaaacatagtattcaccatcacacaatgttctatttttttcctgatagtttttgtttgttttcaatatgtctaggatatatgtgtctcttgatcgacacaccttagacataaccattatttttaagttaaaacacaaaactaccttccatatttttatttcttgtattaggatccttcgcacataacttgaagcactaaaaagtacaataagtcttaatacatgtcctgtttggggatacctggctgtctctgtcatggtcagtgtgagagaccagaccatctccagcatggattcaggctccatcttaaaggatctgacctgctttcttcctcccttcttaccccctcttgttctatgttcttcactgctcttgtccccatataccaccccctccatgttcccatggctggccaccttttctactcttctctcattaaacctctacacttggggaaaaaaaaagaatctgacctaaggttgaactcaagttaaccagcaagcctgaatctagcactagtttcctattgattaatttgggttcagaggtccatcagaaaaatacataagttctgtgttgtttttcttttcaaaccaaggcatatctctgtggaagctctggctgtcctggactggctttgtagaccaggctctcccctcaaaatcacagagatgtgcctgcctctgcctcctgaattttggggctaaagtggtccaccagcctgccaggcatgagttttatttttttcatcccttacatgcatccattacattcccttctagtatgttctttatttctactcaatgcctcaacattaaaattgatccagcttatgctacacctccctctcaagcctatgtcacagaatctttgcaaaaataaacagccctgtgacctagactagaaattctaatgtggttcctaactcataccttaataaccttccaaaggaatcgagccgtgtcccaaatactgataccccaacaattgacacagtcacctgtagttgcacaggttacacttggtctcctagtaaaccgcagagatagaagcgtgtttctagatcaggtttgtggatttctgctctaacaaagaagatttatgcacagtgacttgtaacaggggagttttttatacacaagacccagaaaagtagatacttgaacaaccagagacaggagaacttaaaatctccaacctggaccactctattgactctcaaacgagaaaggaaagaaacggagatgacacatcccagagcgtgctactagattctgagtgagtagatgagagtgaggaggtaaatgtcacacaatcatagcagagtcacccatggagaagacttactggtcattaagatgagaaagtctgctctaattcagaccaagcaaaatctgtggccttgatcctttaccaacactgtccacagatcccctggcacctttcctgcgactgttgtaatttatttgagttgtgctcgggccaccactgcacacagtgacattcacagagaacaaatattctattttgctttttgaacaccttgggcagagagttctgtttacagagaggactcataaataagccgctgtggattggaggactctggaaacagtgttaaggaagaggacagcataagctctgtcctcctgtcctcctgtcatcctgtcctcctgtccttccatcatgaagaagaatagagaggctcagctgtgccttttttcagctcttcttgccttcctgccctttgcttccttgctcaatggaaactcgtgagtaccaccaagaccctcttccacatcatccctcctccaatcagaaactatccatttcaattcacagtcccttcccctgaaaacctcatgaaattatttttgctttttaattaacaatttatgtgtatatatatatatatatatatatatatatatacaattacaattatatatgtacacatgcagttgttacctgattctaggtgatcttttctccaactttaaagcaaccagtgttactaaactgaggtgtgctgtgattcagaatagtgttgctcttattactgaacaagtagtatctcaaatcccaatcatcagagacattcttagctgttgaaactatttaatcactttgaaaataagcatttaaatgggtggtatccttggttggaaatgtgtagcctatggtttagccttgagatagatttagctgtctggcacatcagaaccctgtggatgtttgtgtcctaaaacaatactcttgttaggatcaaagactttagattaaactaccaatagaacttcttagttgatgaccaaaataaccatataattaggagtatattgttgagtgattttatttgtatctgtgatcataaaaatatatttacggtagtaaaaatgataagaaagctagtgatatttttgcatactgtgatatagaaatgaccagctagattttggggggcaaaaatttctaattataggaaaaggtagagaatgattcctacagatagcctttggcacttgctcaagtgtaacataggtgaattatacaggtttgaatttcacagtcacatcataaaccttcagttgaaaagtacctcaaaataaaaacagggtattgagttatttttacggattaaaaatgttaataaaaacaatcatgataaatttctatgaaaataaaaattattcctcctggattttaatttaaaaaatagaaactttatagaacttaaatgctggttgcttagtgaagggagtacatgccattcaaacctgccctggcaggtatcactgctgcagccgatgattgacaagctaatagttgtctttccactctgctgtgtggcaaactgtgacactgccacactgtcaacctgacatctcagactgttgaaacatggatggtaatggtgactgtgatgaaactccagttatagacaatgagatcagtcgtcagctgtccggaaccctttcctttccaggaagtatatggtgctggtcccttcccagctctacaccgagacccctgagaaaatctgcctgcatctataccatctgaatgagacagtgactgtgacagcttccttgatatctcaaaggggaacgagaaaactgttcgatgagcttgtggttgacaaggacttgttccactgtctttccttcactgtgagtactaagtacccgtcctgatttgtttatatatttatgcacatgcgtgtgagtatgtacatacaatacccatacatgtttccaaaaaaggttaatctaaaaatatatctgtgaactcaaaacaataggaatttagagcatttatccaaaaaacaaatagaatacatcatctcaccccgaactgagaaggttcaatacttgtcccattcaattccctcaaaaaagcccacatcccagagaaagaaagggttctccagttcatagcacttcctggtgctgagttagtaaactttcaaacagcactgataaaattaggaccacagctcctatgcataatcctgagatcctgaataagggctgggtttcttcttcaggacctctcttcaagacttaattcctaacacctttttttttttttttattaacttgagtatttcttatatacatttcgagtgttattccctttcccggtttccgggtcaaaacatccccctcccccctccccttccttatgggtgttcccctcccaaccctccccccattgccgccctccccccatagactagttcactgggggttcagtcttagcaagacccagggcttccccttccactggtgctcttactaggatattcattgctacctatggggtcagagtccagggtcagtccatgtatagtctttaggtagtggcttagtccctggaagctctggttgcttggcattgttgtacttttgggtcctaacacctttaaaacattaccattctctctacctcagtttcaagttagagctaagtttctctcatgtcttagagttaattttcaatgaagattatatttactctgtaaaaatgactgtttttattgttcacataaactcccactgacatacagaaaatgatttttcttttcatccctttcttttcctggcaatttttccctccatgtaatacttaaacagaaactgatggcacctccacctccatcagagaaaaggttaatgaggtaatgtaagaaaggcagagggagatggtgaagggtctgtgttcctgttgttctcagatccctagattgccctcttctgaagaggaggagtcactcgacatcaacattgaaggggcaaagcataaattcagcgaaaggcgtgtggtgcttgtgaagaacaaagaaagtgttgtctttgtccagactgataagcccgtgtacaagccaggacagtcaggtatgaagctccacggtgggcaaaggaattaatacaccaccctaaacatggtgtgaagaaggcctgggtctttggaactcactagaaaattctctttttccagttaaatttcgggttgtctctatggataaaaatctacaccccctgaatgagttggtgagttttttacctatgggtattggtgggttcttcaagacaaaatgtcacagcaacattctaatttccagctccttctgagacatgggttagcccttttttctattctgttcctttgccactttatagcctcagctcttctaccattggccatcctatggcttccttatatgtgactgtccttatttggactccatttgactggataagtatctctgggttttcttcatactctgtggagccttatactgtatagaaccttttaggtttttcagtcatttcttttctagattctgttaccatccctcagaaatccatttctagtgtgacagggatatttttcacacagtctctattatttttatagcctcatatttaacacttgggttcttccctagttgaatt

SEQ ID NO: 4064 - DNA, 2447 bp, Rattus norvegicus
gaattccggcccctcccttccacgctcccctacccttctcttctccaaccttctccttcccctctcacccctccccccatcctggccccccctgcaaaagtggggtgcggaggggggagggggtgagaacccaccgaggggaggaacaaaactccaatgaagtcagagccccctactcgccgccgcggccaggccccccaacatggactgtctctgtatagtgacaaccaagaaataccgctaccaagatgaagacacgccccctctggaacacagcccggcccacctccccaaccaggccaattctccccctgtgattgtcaacacggacaccctagaagccccaggatatgagttgcaggtgaatggaacagaaggggaattggagtatgaggagatcacattggaaaggggtaactcaggtctgggcttcacgatcgcaggtggcactgacaacccgcacatcggtgacgacccgtccatttttatcaccaagatcattcctggtggggctgcagcccaggatggccgcctcagggtcaatgacagcatcctgtttgtaaatgaagtggatgttcgggaggtgacccattcagctgcggtggaggccctcaaagaggcaggttccatcgttcgcctctatgtcatgcgccggaaacccccagccgaaaaggtcatggagatcaaactcatcaaagggcctaaaggacttggcttcagcattgcgggggcgttgggaaccagcatcatccctggagataacagcatctatgtaacgaagatcatcgaaggaggtgctggccacaaggatggcaggttgcagattggagacaagatcctggcggtcaacagtgtggggctggaggacgtcatgcacgaggatgccgtggcagccctgaagaacacatatgacgttgtgtacctaaaggtggccaagcccagcaatgcctacctgagtgacacctatgctcccccagacatcacaacctcgtattctcagcacctggacaatgagatcagtcatagcagctacttgggcactgactaccccacagccatgacccccacttcccctcggcgctactcccctgtggccaaggacctgctgggggaggaagacattccccgggaaccaaggcggatcgtgatccatcggggctccaccggcctgggcttcaacatcgtgggcggcgaggatggtgaaggcatcttcatctccttcatccttgctgggggtccagccgacctcagtggggagctacggaagggggaccagatcctgtcggtcaatggtgttgacctccgcaatgccagtcacgaacaggctgccattgccctgaagaatgcgggtcagacggtcacgatcatcgctcagtataaaccagaagagtatagtcgattcgaggccaagatccatgatcttcgggaacagctcatgaatagtagcctaggctcagggactgcatccttgcgaagcaaccccaagaggggcttctacattagggccctgtttgattacgacaagaccaaggactgcggtttcttgagccaggccctgagcttccgcttcggggatgtgcttcatgtcattgacgctggtgacgaagagtggtggcaagcacggcgggtccactccgacagtgagaccgacgacattggcttcattcccagcaaacggcgggtcgagcgacgagagtggtcaaggttaaaggccaaggactggggctccagctctggatcacagggtcgagaagactcggttctgagctatgagacggtgacccagatggaagtgcactatgctcgtcccatcatcatttccttggacccaccaaagaccgtgccaacgatgatcttctctccgagttcccctgacaagtttggatcctgtgtccctcatacgacacgtcctaagcgggaatatgagatagacggccgggattaccactttgtctcctcccgggagaaaatggagaaggacatccaggcacacaagttcattgaggctggccagtacaacagccacctctatgggaccagcgtccagtctgtgcgagaggtagcagagcaggggaagcactgcatcctcgatgtctcggccaatgccgtgcggcggctgcaggcggcccacctgcaccccatcgccatcttcatccgtccccgctccctggagaatgtgctagagatcaataagcggatcacagaggagcaagcccggaaagccttcgacagagccacgaagctggagcaggagttcacagagtgcttctcagccatcgtagagggcgacagctttgaagagatctatcacaaagtgaaacgtgtcattgaagacctctcaggcccctacatctgggtcccagcccgagagagactctgattcctgccctggcttcggcctggacctcaccctgcctccaccacatgggcccccggtacccaattcc

SEQ ID NO: 4065 - DNA, 1806 bp, Rattus norvegicus
ggggactctgagctcaccggagtcgcctgaggagaggtgcacacacccccaaggacccaggcacccaacctctgccagatgtgggggggtggctacccagaggcatgctcctcacccagctccactgtccctacctgctgctgctgctggtggtgctgtcatgtctgccaaaggcaccctctgcccaggtaatggactttttgtttgagaagtggaagctctatagtgaccagtgccaccacaacctaagcctgctgcccccacctactgagctggtctgcaacagaactttcgacaagtactcctgctggcctgacacccctcccaacaccactgccaacatttcctgcccctggtacctaccttggtaccacaaagtgcagcaccgcctagtgttcaagaggtgtgggcctgatgggcagtgggttcgagggccacgggggcagtcatggcgcgacgcctcccaatgtcagatggatgatgacgagatcgaggtccagaagggggtagccaagatgtatagcagctaccaggtgatgtacactgtgggctacagtctgtccctgggggccttgctcctggcgctggtcatcctgctgggcctcaggaagctgcactgcacccggaactacatccacgggaacctgttcgcgtccttcgtgctcaaggctggctctgtgctggtcattgattggctgctcaagacacgctatagccagaagattggagatgacctcagtgtgagcgtctggctcagtgatggggcggtggctggctgcagagtggccacagtgatcatgcagtacggcatcatagccaactactgctggttgctggtggagggtgtgtacctgtacagcctgctgagcatcaccaccttctcggagaagagcttcttctccctctatctgtgcatcggctggggatctcccctgctgtttgtcatcccctgggtggtggtcaagtgtctgtttgagaatgtccagtgctggaccagcaatgacaatatgggattctggtggatcctgcgtatccctgtactcctggccatactgatcaattttttcatctttgtccgcatcattcatcttcttgtggccaagctgcgtgcccatcagatgcactatgctgattacaagttccggctagccaggtccacgctgaccctcattcctctgctgggagtccacgaagtggtctttgcctttgtgactgatgagcatgcccagggcaccctgcgctccaccaagctcttttttgacctgttcttcagctccttccagggtctgctggtggctgttctctactgtttcctcaacaaggaggtgcaggcagagctactgcggcgttggaggcgatggcaagaaggcaaagctcttcaggaggaaaggatggccagcagccatggcagccacatggccccagcagggacttgtcatggtgatccctgtgagaaacttcagcttatgagtgcaggcagcagcagtgggactggctgtgagccctctgcgaagacctcattggccagtagtctcccaaggctggctgacagccccacctgaatctccactggactccagccaagttggattcagaagggcctcacaagacaacccagaaacagatgcctggccaaggctgaagaggcaaagcagcaagacagcagcttgtactatccacactcccctaacctgtcctcgccgggtaccggccacattgatggagtaggggctggatatgatggagtagccatgctatgaactatgggtgttcccatgagtgttgccatgttccatgcacacagat

SEQ ID NO: 4066 - DNA, 3117 bp, Rattus norvegicus
ccgggtcgacccacgcgtcgcgagggcagcctgggatgcgggcacggtcccggacagccccattctgccttcacgctaatgatgctggaccacaccagagcccctgagctcaacattgacctagaccttcacgcctccaactcgcctaaggggtccatgaagggcaaccaattcaaggagcaagacccttgtcctcctcagcccatgcaaggactggggaagggggacaaacgtgaagagcagggcctgggcccggaaccctcagcaccccggcagcccaccgaggaggaggaggcactgattgaattccaccgctcctaccgggagctcttccagttcttctgcaacaacaccaccatccacggggccatccgcctggtgtgctccaaacacaaccgcatgaagacggccttctgggcggtgctgtggctgtgcaccttcggcatgatgtactggcagttcgccttgctgttcgaggagtacctcagctacccagtgagcctcaacatcaacctcaattcagacaagctggtcttccctgccgtcactgtctgcacccttaatccttacagatacactgaaattaaagaggagctggaagagctggaccgcatcacggagcagacgctttttgacttgtacaaatacaactcttcctacactcgccaggctggggcccgacgccgcagctcccgcgacctcctgggtgctttcccgcaccccctgcagcgcctgcgcactccacctccgccctactccggccgcacggcgcgcagcgggtcttccagcgtacgcgacaacaatccccaagtggaccggaaggactggaagatcggcttccaactgtgcaaccagaacaaatcagactgtttctaccagacatactcctctggggtggatgcagtgagggagtggtaccgcttccattacatcaacattctgtccagactgtcggacacctcgcccgctctagaggaagaagccctgggcaacttcatcttcacctgtcgcttcaaccaggccccctgcaaccaggcgaattattccaagttccaccaccccatgtacgggaactgctacactttcaatgacaagaacaactccaatctctggatgtcctccatgcctggagtcaacaatggtttgtccctgacactgcgcacagagcagaatgacttcatccccctgctgtccacagtgacgggggccagggtgatggtgcatggtcaggatgagcctgcctttatggatgatggtggcttcaacttgaggcctggcgtggagacctccatcagtatgagaaaggaagccctggacagcctcggaggaaattacggcgactgtactgagaatggtagcgatgtcccggtcaagaacctttacccttccaagtatacacagcaggtgtgcattcactcctgcttccaggagaacatgatcaagaagtgtggctgtgcctacatcttctaccctaagcccaagggagttgagttctgtgactaccgaaagcagagctcctggggctattgctattataaactgcagggcgccttctccttggacagcctgggctgtttctccaagtgtcggaagccttgtagtgtgatcaactacaaactctctgccggctactcacggtggccatctgtgaagtcccaggattggatcttcgagatgctgtccttgcagaacaattacactattaacaacaaaagaaacggagttgcaaagctcaacatcttcttcaaggagctgaactataaaactaattcggagtctccttctgtcacgatggtcagcctcctgtccaacctgggcagccagtggagcctgtggtttggctcgtccgtgctctctgtggtggagatggcggacgtcatcttcgacctcctggtcatcacacttctcatgctgctacgccggttccggagccggtactggtctccaggacgaggggccaggggtgccagggaggtggcctccactccagcttcctccttcccgtcccgtttctgtcctcaccctacatccccaccaccttctttgccccagcagggcatgacccctcccctggccctgacagcccctccacctgcctatgctactctaggccccagtgcccctccactggactctgcggcgcctgactgttctgcctgtgccctggcggcgctctgagagaggagaaggatcctctcacccagccctgagctcccttgtaaactgatggatatctcacttcagcacatcttccccagcggccccgccgagccctctgtggtgtgcctgcctgagggaacaggctgagtaaggggcccaggaagccgtccagaggacaggggctaacgatctgctcagagctgccctgcccctgcttctgaacactgccttccacaagcacagacaagttccctcttccctcggatcagcccagccagacttggagctctgacaaggaactttcctgggagaggaccaaggaacaaatagaacagccatcgcactcctacccccgtgaccagaggctggcctggcctcactgccttcagggacactgatgtctgctcctctccttgaacttgggtggggaaccccacccaaaagcccccttgttagttctttggcaattcccctcccctcactcctcagggtggggactagagtaagacagaccagggtaggcctggtgttctctctcattctcaagactctctcatttgatacaccataccccagtgcctctgtggtgttgtctccttctttctgtttcctcagcctggaagcttctttcactgtccctcagaacacacagtctatgcatcccttagaaacctgcccaaaggcaccatttcttttgtgaactcagttaccctgttatgtctcccccagaattgtcgccctctcccctcacccccacagtgtactgtattatatgttcacattcttttgtgtctgcctccctgggtaaactgagctccttgtgtggtcagggatgagatttgctctgttttgtatccttccggtctagcccagtctcccacttgggacgggtaggcaggtactcaataaaggcttgttccatcaaaaaaaaaaaaaaaaaaaaaaaaaaaaaaaaaa

SEQ ID NO: 4067 - DNA, 1854 bp, Rattus norvegicus
ggtacccatcactcaccaatgctgcagacggacattccaggacacaggctgactttcactatgtatacccacacaggtattttaatgcaatttgcagtctcctggtgctttcaatagggtctctgagggctgcaagagttagttacaaagttcctctccctaatctcattttgaattttccttggctgtgtcagagtatctcaacagagcaagtatccatctgctctaaggagagcaggtgtcatgattctgagtcatgcgttcagaagtcccctcccccaacccggtctctagcgattctcgtttgccacttcaaaatactccaaatgccacctccctatttattctagagtctcgataccttcttccaagatcctcctgcccatcttgaatctcttagctcccgaatctcctcttcgaggcagtgacattgagatcattcactgatgtgtgtattagagcttgcaacattaaactgggtgctgtcctagacggacagctagggcgaggaaggtgacacaggagaatgacaccatagagggttgatgtaaatgctgtggggaagtgaaggaagaagcccgaggagccagagttcggcatggaacatgtacacactagcccagccgctaggagaaaacaaactggcaaggtttactcttgcgcactagttaacccgctgcccttgccaaccctctgggacctgggtccccgattctggccacagtttccctatgctgcccggaacttctccagagccaggctttggggactcagaaatgccttcaagactatcagagaggaactttctcccaaaggctacagagaggatgtagagctgaagcaggagtcctagaaggaaccacagtcacttctgaattttctccactttcaggtagtcccagagatacaagggagaagggtcaccttgttcactgctagaacctcgtgaggcacaggaaagcacacacaccatctctccccatcaggacgcggtgtgtctccctgaaacccccatcgctgcagactagtgagtgggctattgccattttgaggttaaggaaattaagagtccctgcgtccttcaacagctgtgcctgcagagtccaggctgggagttcctaccgccttgcattctaagttaggccttctgcctcaacttctcaaagcagcaagtggccgttaagagagttatcatctaaagcagtatagggaccgaatccctccctttttgacacttcattaccagactgattttcagggtgattcggtccgggggtcccttctggagaaggaagcaggtgttctggagacctagggagttaggtgtctccggtggaggagaagggggagaccgccacatgaaccagcaggctaggagcctacaggacgagagggagggcctcggctttccaagacaggcaaggggtcgggggtggagtggagcacggggcgggcccgcgggagccccggggcggtggcgcgggccgagggggtggggagcgcagccgccttgtacttccccttcgccgcttagctctacaacagcctgatttccccgaaatgatgaggcgaagtgggccaatgggcgcgcgcgagcggcccggcgggggcgtggccgagttcgggccggggaatcccgctaagtgtttagatttcttcgccgccgccgactcgccagtgcgcactactccttcgtcgaggtaggaagagctctcactgtctgagccaaaccgaaccgggccgagctgagccgaggtcagcggtggccagaggaacccagcatctcgggcatcattcgctccgtgcacgcatcgtgtacctacaccgcaactccgtgcctcattcccgggtacc

SEQ ID NO: 4068 - DNA, 1089 bp, Rattus norvegicus
gggctcagtaggttggtctatgtggagtgaggaaggggtaagtgtccaggcaccaagaacagcttccagacactgacgatgaagctggaaaacctcaccaatccctggagcccaagtcactccctggtccagcccacactcgagcagacccagtactcccaggagcaccaggctgcattccgcttcggacagactctgcccaagtacctgctctttagcagcccccaaaagaactgctggggtcacaggcgcagctaccgcctgcagatccattctatggctgagcaggtgctgccaccaggctggcaggaggagcgggctgtcacttgggccaggtatcctttggctgtaacaaagtatcgggaatctgagcgctacagcagcagcctctacaaccagaatgacccctgggatccccccgtggtctttgaggagttccttcggaacaacgagaacattgaagatgaggatttggtggcctgggtgacagtgggcttcctgcacatccctcactcagaagatgtccccaacacagccacacctggaaactctgtgggcttcttgctccggcccttcaacttcttcccagaggacccatccctggcttctagagacactgtgatagtgtggccccaggacaagggcctcaaccgtgtccagcgctggatccctgaggacaggcgctgcttggtgtctcctcctttcagctataatgggacctacaagcctgtgtgatgggtcagccccagcctctgcagcacacccagagcctcacaaagacagggaaaacaaacaaacgaaacttctgtctctaccctgtatgctaccttttagctctactcgtgtttcattaccatacctgccacagacttccaagaccattgcaaaggaaggaccacaattttctgccggtggttcggtggtttggagggtggtgttttttaaatatttgaggtgtttatcttcctatcaggagactttagagaaattgtctcacctcagtgatgggagggagtaaggaaactgtcatatgaaaatctaataaaatgacacctttgctctttagacatcaaaaaaaaaaaaaaaaaa

SEQ ID NO: 4069 - DNA, 1401 bp, Rattus norvegicus
aagagcgggcgctggtaccaaggcctgaccatggatgaggaatacgatgtgattgtgctggggacaggtcttaccgaatgcatcctgtctggcatcatgtctgtgaatggaaagaaggtgttgcacatggaccgaaacccctactatgggggtgagagctcttctatcacaccccttgaggagctatataagcgctttcagttgctggaagggccccctgaatcaatgggccggggccgagactggaatgttgacttgatccccaaattcctcatggccaatggtcagctggtaaagatgctactgtatacagaagtgactcgttatctggacttcaaggtggtagagggcagctttgtatacaaagggggcaagatctacaaagtgccatctactgagactgaggccttggcttctaatctgatgggcatgtttgaaaaacgacgcttccgaaaatttttggtgtttgtggcaaactttgatgagaatgaccccaaaacctttgagggtgttgacccgcagaccaccagcatgcgtgatgtctaccggaagtttgacctgggccaagatgtcattgatttcactggccatgccctggcgctctaccgcactgatgattacctggttcagccatgtcttgagactattaaccgcatcaagttgtacagtgagtccctggcccggtatggcaagagcccatatttgtacccactctatggcctgggtgagctgcctcagggctttgccagattgagtgccatctatgggggaacatacatgctgaacaaaccagtggatgacatcatcatggaaaatggcaaggtggtgggtgtaaaatctgagggagaggtggcccgctgcaagcagctgatctgtgatcccagctacatcccagaccgtgtgcgaaaggctggccaggttattcgcatcatctgcatcctcagccaccccatcaagaataccaatgatgccaattcctgccaaattatcatccctcagaatcaggtcaacaggaagtcagacatctatgtgtgcatgatctcctatgcacacaacgtggccgcacaaggcaaatacatcgccattgccagcaccaccgtagagactgcagaaccagaaaaggaggttgagcctgcattggagctgttggaacctattgaccaaaagtttgtggctatcagtgatttatatgagcccattgatgacggttcagagagtcaggtgttctgttcctgctcctatgatgctaccacacactttgagacaacctgcaatgacatcaaagatatctacaaacgcatggctggttctgcctttgattttgagaacatgaagcgcaaacagaatgatgtctttggagaagccgatcagtgattgctgactcccctcctccagcccctg

SEQ ID NO: 4070 - DNA, 1460 bp, Rattus norvegicus
ttggtctttctttcagcgtcgctgtaaaagaacaaccagttgccagtgtaatcaggaaaagagttaggtcaaacttgtgggtctgccggggatccatgattagcacaaagaactctattgctgaaggattcgaagattttgcttgagcgggtgagtaaagctgccctgggaatgtctgatgtaaaaacaggtttcagacgaagcctaccaagttagcgtgcaagcatgaaaaagaagacacttatcccaggctaatgggcaaaggacctgattcacctgacaacaacgctcacctgttcccctgccttctctcacgaggcaaaaagatgagacaggaggacacctggaggagttttccatacccagcctagaacgatcagattttatatgtatgtcaaaagacgctgggtagcagaactgaataataaaagcctcttggtgtccattcacgttccttccaaagaaactaaaaaatcaaactttctggtaagctccatatatatggcatccatacagcagctcctggaaggcacttgtattcaatgaataacaagagcaagatataccgacacagcacctcagaggtgagaatgctgtgcagagggtcccccaaaactccaatgcctgcgatgcagaatctaaagttgatacataagaggagatgtgaggacacacacacacacacacacacacacacacaccactgaaacaaaatgagatattctagatgcctctgagtccaaaacttattggcacactgagtgtagctgcaaaatctgctcagaggacaaacaatgttcaaggctttgatcccggcaccttcagaagccatagccaagtgccagcctatggccactgctatgtatgcacaaagctgtgcccacatgatactctttagagtctcgactggccgtgtggcagaacagacctgtgtttctaaacggtggatgaagatgaatggctcctggcaagtggcctccactggaagccagacctagaccatttcatgactaacccaagacatggcttgagaagctcctttgtgttatttttccccatgtaaagaactgtcttctagcagtaaggcagtgaaaggcggtggataaaagcatcataattaggaagtcgaaagggagatgcttaaataatgaactttgaaaagcttctgtttatttcgttagaataaaatttctgcaatcagacttgagggctctcctttttaccttgggggtgggggacagaagttgtgtgatagaagtgactgttaatataatataaaattactcagctgggtttttaagttaatattttacattaaaatatagtttgaacttcttctgataaaaaattagcagtagatagctcgaccacagctactcaagatagaatttggcaagaaaacatccttaggaagtttacagtgtgttacagaagtgatatgtcttacttggaacgagaac

SEQ ID NO: 4071 - DNA, 562 bp, Rattus norvegicus
gtaagtggataagctggtatagatcatgctgtggtgtccaggtagctggaacccttcagagggaaaggcctgattaatatacatgaagtaaagcaattccatggctttcttctttttctttctttctttttttttggagctggggaccgaacccagggccttgtgcttgctaggcaagcgctctaccactgagccaaatcccaaccccagtctctcctccaacctgcttagtcctgcctcaacatggccaacaagggtccatcctatggcatgagccgtgaagtgcagtccaagattgagaagaagtatgatgaggagctggaggagcggctagtggagtggattgtaatgcagtgtggccctgatgtgggccgtccagatcgtgggcgcctgggcttccaggtgtggctgaagaatggcgtggttgagtggaaccctgcgaagggggtctaggacgtgtatgccaccttacaaactgagacaaacccctgagctgagtgttcagctgtgttctgtacctgtcagattctgagcaagttggtgaacagcctgtaccccgagg

SEQ ID NO: 4072 - DNA, 788 bp, Rattus norvegicus
gtgggacctaggtggccttccagggaagatgaaggtcctcttgctcctgctgaccgtctctctggcccccacgacagaggcaggggagatcatcgggggacatgaagccaagccccactctcgaccctacatggcctatcttcagatcatggatgaggattctgggagtacgatgtgtggcggtttccttatacaagaagactttgtgctgactgctgctcactgtttggggagcaaaataactgtcacgttgggggcccacaacatcaaagaacaggagaagatgcagcaagtcatccctgtggtgaaaatcattccccacccagcctataattctaagaaatactccaacgacatcatgctattaaagctgaagagtaaggccaagaggactagagctgtgaagacgctcagtctgcccagaagcaacttcaaagtgaagccaggagatgtgtgcaatgtggctggttggggaaagctgggcccaatgggcaaattcccagacaaactgcaagaggttgagctaacagtacaggaggatcaggagtgtgagacttactttaaaaaagcttacaacaaagccaatcagatatgtgcgggggacccaaagatcaaacgtgcttcctttgggggggactctggagggcctcttgtgtgtaaaaaagtggccgcgggcatcgtcgcctatggatctaaaaatggttcagctccagaggccttcaccaaagtctcaactttcctatcctggataaaggaaactatgaaaaagagctaactacaagaagcaa

SEQ ID NO: 4073 - DNA, 2462 bp, Rattus norvegicus
gtcgacccacgcgtccgaccaccttagctgccatcactgcacattggagcagctttctaaacaggtgccaccatgccagtgaagaagtacctgctgaagtgcctgcacaggctgcagaagggcccaggctacacctacaaggagctgctagtgtggtactgcaacaacaccaacacacacggccccaaacgcatcatctgcgaggggcccaagaagaaggccatgtggttcctgctcacgctgctcttcgcctgcctggtgtgctggcagtggggcgtcttcatccagacctacctgagctgggaggtcagcgtctcgctctccatgggcttcaagaccatgaacttcccagcagtcaccgtctgcaattccagccccttccagtactccaaggtcaagcacttgctgaaggacttgtacaagctgatggaggctgtcctggacaagattctggctccgaagtccagccacaccaacaccaccagtaccctgaactttaccatctggaaccacacgcccctggtccttattgatgagcggaaccctgaccatccagtggtcctcaacttgtttggggacagccacaacagcagcaacccagccccaggaagcacctgtaatgcccaagggtgcaaagtggccatgaggctgtgcagtgccaatgggaccgtgtgtaccttccgaaacttcaccagtgccacccaggccgtgactgagtggtacatcctgcaggccaccaacatcttctcacaagtgctcccccaggacctggtggggatgggctatgctcctgatcgcataatcctagcctgtctgtttggaacggagccctgcagtcatcggaacttcacacctatcttctaccctgattatggcaactgctacatcttcaactggggcatgacagagaaggcacttccttctgccaaccctgggactgaatttggtctcaagttgatcctggacattggtcaggaggactatgtccccttccttgcgtccacagcaggggctaggctgatgctccacgagcagaggacataccccttcattagagaagagggcatctatgccatggcaggaactgagacttctattggggtgctgctggacaagctgcagggcaagggggagccatacagtccctgcaccatgaacggctccgacgttgccattcagaacctctacagtgactacaacacgacctattccatccaggcctgccttcattcctgtttccaagaccacatgatccataactgcagctgtggtcactacttgtaccctttgcctgctggggagaaatactgcaacaacagagacttcccagactgggcctactgctacctaagcctacagatgagtgtggtccagagagagacctgcctcagcatgtgcaaggagtcctgcaacgacacccagtataagatgaccatctccatggctgactggccatccgaggcctctgaggattggatcctacatgtcctgtctcaggagcgggaccagagctcaaatatcaccctgagcaggaagggtattgtcaagctcaatatctacttccaagagttcaactaccgtaccatcgaggaatcgccggccaacaatatcgtgtggctgctctctaacctgggtggccagtttggcttctggatggggggctcggtgctgtgcctcattgagtttggggagatcattatcgacttcatttggatcactgtcatcaagctagtggcctcctgtaaaggcctgcgcaggaggcggccacagcgaccctacactggcccgccgcccactgtggccgagctggtggaggcccacaccaactgtgtcttccagcctgacacaaccagctgcaggcccaatgccgaggtctaccctgaccaacagactctgcccattccgggcactccacctcccaactatgactccctgaggctgcagccgctggacaccatggagtctgacagcgaggtggaggccatctagatccgcatccccacccgggaactagtgaactcaaaactgaggagtcacaaccattgtcagtgcctcatttcattagcccttgtccaaagagccagggcacagagcccatgtccctctggtcagccccaggctgaggggttcatagggtcaagatgctggtaccagaatattgaacttgtatccttttctagctcttgcccaccctagcccagtctttgctctctgttgacctagcagacaggctccagagacccatagagtccctctcctggtgataggccacttctctgtcttgttacaacctcagtctcccagaatcagtgaccttgccctagttggcattggctgaaccctgttaatagacttgggggtgtgcagaccatagggagggagcatcaggtaagaaggcttgacaggggagcacatgctttgttagaaaataaagagagaaaacaccgaaaaaaaaaaaaaaa

SEQ ID NO: 4074 - DNA, 1267 bp, Rattus norvegicus
ccgcgagccccaccgcctgcagccccgggcggcgcggtgagggccgcaggggctgagcgccatggaactgaacgcgggaggtgtgattgcctacatcagttcctccagctctgcctccagccctgcctcctgtcacagcgagggctctgagaacagtttccagtcctcgtcctcgtccgttccgtcttctccaaacagctccaactgtgatgccaacggcaaccccaagaacacggatgtctctagcattgacggtgttctcaagagcgaccgcacagactgtcctgtgaaaacaggcaaacctggtgcccctggcatgaccaagagtcacagcggaatgacaaaatttagtggcatggttctgctatgtaaagtctgtggggatgtggcctcaggattccactatggagttcatgcttgtgaaggctgtaagggcttcttcaggaggagcattcagcagaacatccagtacaagaagtgcctgaagaacgagaattgctccatcatgaggatgaacaggaaccgctgccagcagtgccgcttcaagaagtgtctgtccgtgggaatgtcgcgggacgctgttcgatttggccggattcccaagcgtgaaaaacagagaatgctaattgagatgcaaagtgcaatgaagaccatgatgagcacccagttcggtggccacctgcagagtgacaccttagcagagccgcatgagcagtcagtaccaccggctcaggagcagctgcggcccaagccccagctggagcaagaaaacatcaaaagcacccctcctccttctgattttgcaaaggaggaagtgattggcatggtgaccagagcccacaaggatacctttctgtataatcaggaacatcgagaaaactcatctgagagcatgccaccccatagaggagaacggattcccaggaatgtggagcaatataatttaaatcatgaccatcgtggcggtgggcttcacagccacttcccctgtagtgagagccagcagcatctcagtggacagtacaaagggaggaacatgatgcactacccaaacgggcataccgtttgtatttcgaatggacactgtgtgaacttctccagtgcttaccctcaaagagtctgtgataggattccagtaggtggatgttctcagactgagagcaggaatagctacctgtgcagcactggagggaggatgcatctggtacagtgaaatcgattctttgctcaccttgtatcaaggaaagcttggaggttttcttttggg

SEQ ID NO: 4075 - DNA, 867 bp, Rattus norvegicus
ctgcagcagtctgggggaggattagtgcagcctggaaggtccctgaaactctcctgcgcmgcytcaggattcactttcagtagctttccaatggcctgggtccgccargctccaaagaagggtctggagtgggtcgcatccattagttctggtggtggtggcacttactatccagattccgtgaagggcagatttactatctccagagataatgcaaaaagcaccctatacctgcaaatggacagtctgagatctgaggacacggccagttactattgtgcaagatcggacagtagctcctcttggtttgcttactggggccaaggcactctggtcactgtctcttcagagagtcagtcctccccaactgtcttccccctcgtctcctgcgagagccccctgtctgatgagaatttggtggccatgggctgcctggcccgggacttcctgcccagctccatttccttctcctggaactaccagaacaacactgaagtcatgcagggtgtcagaaccttcccaacactgaggacaggggacaaatacacagctacctcgcaggtgttactgtccgccaaaaatgtccttgaaggttcagatgaatacttggtatgcaaaatccaccatggcaacaaaaacaaagatctgcatgtgccgattccagctgtcgttgagatgaaccccaatgtgagtgtgttcattccaccacgtgatgccttctctggccctgcaccccgcaagtccagactcatctgcgaggccaccaacttcagtcccaaacagatcacagtatcctggctacaggatgggaagcctgtgaaatctggcttcaccacagagccagtgactgtcgaggccaaaggatcc

SEQ ID NO: 4076 - DNA, 3628 bp, Rattus norvegicus
gaattccattgggcatcgtgggcaaaacttccgaacgtcctctgcagagtctggtgtggaatgacactgggcgtgtagcaccctgaactggccatcttgtttcaggaagtggaagtcacagtctccctccaccgcatgctcgcctgttgcctcacagaacaatttgctaagggggttgaagggagaggttagaggagagagcaggttgaggaagtgtctcttggggttcttcagccacagcaagtatctccacggctgaatggacgacaacgacttttaagcagtattttcttacttacagaaaggagtccaagtgaagagagcaacatggtctctgcccagcttcacttcctgtgtcttctcacgctttatttgactggcgcatatggccaagaagggaagttcagcggccccctgaaacccatgacattctctatttttgaaggccaagaaccgagtcaaatcatattccagtttaaggccaaccctccagctgtgacttttgagctaacaggagagacggatggtatatttaagatagaaaaggatggacttctttatcacacaagagtcctggacagagaaacaagggcggttcatcatctgcagcttgcagccttggattctcagggagctatagtggatggcccagtccccatcatcatagaagtcaaggacatcaatgacaaccgacctacatttctccagacaaaatatgaaggctcagtgaggcagaactctcgcccaggaaagcctttcatgtatgtcaatgctacagacctggatgacccggctactcccaatggccagcttttttatcaaattgtcatccagcttcccaaaatcaacaatgttatgtacttccagatcgacaacaaaacaggggcaatctcgcttaccccagaaggttctcaggtattggatccaataaagaatccgtactacaacctggtggtctctgtgaaggacatggggggccagaatgagaattccttcagcgataccacatctgtggatattactgtcagagagaacatctggaaagcaccagagcctgtggagattcgagaaaacttaactgatcctcaccccatcaaaatcactcaggtgcagtggaatgacccaggggcccactattccttaatcaacaaggagaagctgccacagtttccattctcgatcgaccaagaaggaaatatttacgtgactcagcctttggaccgtgaggaaaaggactctcatgttttctttgccactgccaaggatgagaatggaaaaccccttgcatatccactggaaattcgtgtgaaagttattgacattaacgacaacccaccgacatgtctctctcaagtgactgtatttgaagtccaggagaatgaagtcttgggtagtagcattgggatctttgctgcccacgatatggatgaagctaacaatatcaacagtattttgaagtacagacttgtagaccaaacacccaaagttccctcagatgaactctttctcattgacgaatatggaggaaaggtccagttgggtaaacggtccttgaagaagcaagacagtcctcagtacaacttaacagtagaggtgtctgacatagatttcaagactctctgttctcttcaagtcaacgttattgatatcaacgatcagattcccatctttgaaagatcagactatggaagcaagactctttctgaagacacagccatcggatccaccatcttaatcatccaagctactgatgatgatgagccctttaccgggagctctaaaattctgtacaagattgtacagggagacactgagggaagactggaagttgtcacagatcccatgaccaatacaggatacgtcaagatcagaaagcctcttgattttgaaaccgaaccagttactagcattgtgttcaaagcagaaaaccctgagccgctggtgaatggcatagagtacaatgctagttcttttgcctccttcgagctgaccgtgacggatgtgaatgaagtgcctgtatttccccagcaaatattccaagccaacgttagcgaggatactgctataggcactaaagtgggcactgtgactgccagggatccggaaggcctgactgtgagttattcactgaaagacaataagagaggttggcttaaaatcgactccgtcaccggcgacatatttagcactgctccgctggacagggaaacagaaagtgtgtatcgagtacaagtggtggccactgaagtaggtgggtcctctctgagttctacagcatatttccacctggtcctcatggatgtgaatgacaacccccctcgcctagctaaggactacacaggcttgttcttctgccatcccctaagtgcccctgggagcctcatctttgaagccactgatgatgaccagcagtcagttcggaggcccaagtttacgtttgcccttggcagagaaagcttacaaagtgactgggaagtgtccaaaatcaatggcacacatgctagactctccaccaagcacacacgctttgaggaacaagtttatgacatcccaatcctcatcaatgatggggggcagccacccatggaaggcattgtctccttatcagttactttctgccagtgtgtggacggaagttgtttccggccagcaggcaaccaggttgggatacccaccgtgggcatggcagttggtatacttctgaccacatttctggtcattggtataattttagcggttgtattcatccgtatgaggaaagataaagttgaagatccacagtcccctgagaataagcctctgaggagctgaatttgaacagaaatgttcaaggttgtacaccaagcactgtatcaatgcctcagctgtttaatttcatccaaaatgtgaactataattggtagagtttatgcatcatgtgctatatctggtccccagctgtttaatctcataatttcatccaaaatgtgaactataatttctttgatggcatgccttcttgtcctgcaacacttaacgctacttagatattttatctctgtagacattagagttactctccattcccccataacattttgctcctttacaaaagcctacataacatgaactttcccttctggaaagaagatgaactaggtataaaccctgtgtgctgttgtttcagagacaagtctgttttctcccaactgacttttctaggctccacttatccctttctgtttccacctgcgccccctgatctcagcattacattaaatttaaaatgtgtcacacaaaagaacaaagtgaagtccttggggggggtgttgctaagtggacagccttattctttagcacaaacaacagcttctctgtgttgtcatctttaatagaggtcctccagcttggctatggtgtagaccctggggaggtatcaaatacaactgccgtgtttcaagaaagacctacttcatgaggcacaggaactgacgagctgtctgggtttactcactactccgtgcttacatacatgctgtacatgttttatttgtatattgaagttttgttatatatttatcatgtggaggaaagacgaaagcatgtacgtggtgaagaaatccaaaataaatgttggtttcaggaattc

SEQ ID NO: 4077 - DNA, 1109 bp, Rattus norvegicus
atggagctgctcaagctgaaccgcagcgtgcagggaccaggacccgggtcggggtcttctttgtgccgcccgggtgtctcccttctcaacagcagtagtgccgggaacctcagctgtgacccccctcgtatccgcggaaccgggaccagagaattggagatggcgattagaatcaccctttatgcagtgatctttctgatgagtgttggcggaaacgtgctcatcatcgtggtcctgggactgagccgacgcctaagaacggtcaccaacgccttcctgctctccctggcagtcagcgacctcctgctggccgtggcttgcatgcccttcacactcctgcccaacctcatgggcacattcatcttcggcacagtcatctgcaaggccatttcctacctcatgggtccgtgctactgctactgcttttgttcttcatcccgggtgtggttattgcggtggcctatggactcatctcccgcgaactctacctaggactccactttgatggtgaaaatgacagcgagacccaaagccgggcccgaaaccaagggggcctgccgggtggggcagcaccagggcctgtccaccagaacgggggctgccggcctgtaaccagcgtagctggggaagacagtgatggctgctgtgtgcaacttccgcgttcccgactggagatgacaacgctaaccacacccactcctgggccagtccctggccctcggcccaaccaggccaagctgctggctaagaagcgggtggtgcgaatgctgctagtgattgttttgcttttcttcctgtgttggctgccagtgtacagcgtcaacacgtggcgcgccttcgatggcccaggcgcacaacgagcactctcaggggcccctatctctttcatccacttgctgagctacgtctctgcttgtgtcaaccccctggtctactgtttcatgcaccgccgcttccgccaggcctgcctggacacatgtgcccgctgttgcccacgccctccacgagctcgcccacagcctcttccagatgaggatcctcctaccccctccatcgcttcgctgtccaggctaagctataccaccatcagcacactggggcctggctga

SEQ ID NO: 4078 - DNA, 347 bp, Rattus norvegicus
gtcacccagacacccagacatgaggtagcagagaaaggacaaacaataattctcacgtgtgagccagtttcaggccacaatgatcttttctggtacagacagactaagataaaggggctagagttgctgagctacttccgcaacaagtctcctatggaggatgcaggggcactcaaggatcgattcacagctgagattcaagattcatccatctccacgctgaagattcaacctacagaaccccaggactcagctgtgtatctgtgtgccagcagccccgggactccgatctatgagcagtatttcggtcccggcaccaagctcacggttttagaggatctgaaaaa

SEQ ID NO: 4079 - DNA, 1620 bp, Rattus norvegicus
ccacctagcaggagtggggtgggggatagggtacttgggtacctctgcaggaagcaccgcaggaacccgacgccatgttcccggaacccccgaccccggggtctccagcgcctgagacacctccagactccagccgcatcaggcagggggcagtgcctgcctgggtcctggctaccatcttgctgggctcaggcctcctggtcttcagcagctgtttctgtctctaccggaagcgctgtcggagacggatgggcaaaaagagtcaggcccaagcccaagtccatcttcaggaagtgaaggagctgggccggagttacatagataaggttcagcctgaaatagaggaactggacccctcaccatccatgccaggacagcaggtattggacaagcaccagttaggccgactgcagtattcactggattatgacttccagactggccagctcctggtaggcatcttgcaagctgagggactggcagcgttggacctaggaggttcctcagacccctatgttagtgtctatctgctgccagacaagcggaggcgacatgagaccaaggtgcatcggcagaccctgaatccacactttggagagacctttgccttcaaggtcccatacgtggaactaggaggtagagtgctggtcatggcggtgtatgacttcgatcgcttctcccgcaacgatgccatcggagaggtgcgggtgcctatgagttcagtgaacctggggcggccagtgcaggcctggcgagagctgcaggtggctcccaaagaggagcaggagaaactgggggatatctgcttctctctccggtatgtccccacggccgggaagctcaccgtcattgtcctggaagctaaaaacctgaagaaaatggatgtaggaggactctcagacccttatgtcaaggtgcacctgctccagggaggtaaaaaggttcggaagaagaaaaccaccattaagaagaacaccctgaacccctattacaacgaggccttcagctttgaggtgccctgtgaccaggtgcagaaagtccaggtggagctgaccgttttggactatgacaaactggggaagaatgaggccatcgggagagtggcggtgggcacagcagttggtggggctggcctacggcactgggctgacatgttggccaaccctaggcggcccattgcccagtggcactctctgcggccccctgacagagccaggccaatacctgcaccctgattcccgtcaagcaagcacctgaccccagatcctttgctccctgtcccttacctctctccccacatgactctccctactccccaaacattgcattcattcctacctccacattggaaatgtttccgacttccagtaccactcctatacccagaaaccacagtggtcctgcggggaggtggaaaagttgggaaagtctggcatcccctgccccagagtcctaccctctgctttgacaatcagctgtgaagcctctgatctcctttctcccagtctctgagctcttcccacacagcttgacccctgtgctgctcctggggccaaataaatactcaacagcttggaaaaaaaaaaaaaaaaaaaaaaaaaaaaaaaaaaaaaaaaaaaa

SEQ ID NO: 4080 - DNA, 9176 bp, Rattus norvegicus
aagcttcgcatgcctgagctgctctgtttgcaacagaggaaggtactcatgctagttcgctcaatgaggacctgtaacatttagagagactataaaaacaagtaaaatatttccatgtttaagtttctgatctactggaagagacagatcatgcctcctacaatgataaataccacaagtaatagctgatgcaagaaaagatagagaaactagggaacatttatttcaggaatccaaccaggagcatgcagaatgtccagcaaatatttgggtgctcaataagctgttggtgaccactgttactaggaggggcttcacataggaagcagaatttcagagaaagtaggactggttgccaggtaacagaatatcctgttaagtctgaattccacatgtacaacaacattctagtacaagtatattcagaacatcacaaaagacatgcacgctataagttgtattggttttctgtctgcaattccaatttaactggtcatcctcagcttttactactagtcatagcacacttaagtcacaggcttcttttatgtcactgaatcatgactgatacgtaaatgtcctatatgtttgatgtgaaataacccaagctcattagcacatgtatcacctcatttaattatcttttcctttttcttcctttttgtttccctggtttctcatctcctagcaaccactactgtgctcaaccactactgtgtcccaatctcttgagttacacacttaaggtttcacatggaagtgaaatcacatctttcgcttagcgtgaggtcctcaaggttcctgcatatttccccaaatgcttgattttcttctttccacagcctgaacaatgatctcttgtatctgcccttctgctttatccattcatccattgcattaggctgcttccattgtgtgggattgtgaataatacatcaatattctcttcaaagtccagctgttgcttttgggggccggggggtatagaagtgggtgggtggctggcacgaaagtttcactgcgttcagaagaattgtacaaggaaaggaagagcagaggtcaggcccagaggcacaagaggaaagaaagcacattctccatgacacttctccaatcatggccagcacttactcccaggtgttggtgacaatcattccccaaaggccttgaaatagctctcccatttgtttaccaacatgtgtaggatgttgttttcgcccctgttccttaaatgaggagactgattcacaaggatgagcaggtgaccttcataagtgcacagaaccaggaagctggacctaggattgttggtgtttggcgccatcggttactgtcttgacctttgggtagaggaaaataatctgttaacataaatggcttttaggtcattttgaaattcagatgagctctgaatcctacacctagtctaatgtctaatgtctctgcttcaagaagtgatagccagaatcctctgtcagtcctcatacttcttcagatgtgaaagtgttcatctttgtagcttcaaaggccccacttcctggaatgtagaatctccccgcccacaaatgctgtctacacaatcaaatgctaccatttgcaacaacttatcggaaacaaacaagctacagagaattgagcaagaatttctgggatgccgtggttattatggtcagagcaaaggacacactgtgagctttggctatctgagtaggacaagggtgatgattaacctagtttcctgcaggtttaagtaggataggagcagtgagtgaagtcagtcctccttcccttcagcttcggtgcttcccatgagccatccctgcaatcagaaactatgctttccctgagggtcgcctgcctcatcctgagcttggccagcacagtctgggtatgtgctttctcttctcctcactctctgttatttcttcctcgaggagttttgatttcagagactaccagtcttttgttcttagcattataaatgccagaccaggaggcaaattcctaggtaagcctgacaagtctagggggatgtgacttccagagggaggccctaggggaacaaggcatcttgacacctgtcattcaggccgattcagattcagtctttcaacactgcaggtgtgtttgttagcataatttctcggtgctgggacttgatcatgttgtgatgacctgcaaccataaaattatttttgttactacttcataactttaattttgttacttttatgaaccatattgccaaatattttgggggataaagggttgccacaggggtcatgacccccaggttgagaaccactgggcatgccagtaaatccctctacaactgagctatagtgacagatttccagcctcatgaatccccaccaccaccaccacatctttgtccctctaccctctggagacatcattctaacagaacaaaacatttgataagaactgatctctagctggtaattccagacatttgtctttgatgagcagggtttagtatgatttacctctaggttttgctttatctgtaaacgttttagttttgtttgtaatattgaggactgaagcagaactttctgaagtgctgaccaagcattctacacctgcagccctaagaagaacttgttatatctttttgaagacataaaaggaaaagggcaaattaattgcctttgaaaacatatagcaaattccaaagaaatttgtcatgaggcagtgaggaaggatttgtgttccttttagataacttgtaaatactgacatcttttccaaaattaagctccaaagacaacaaaagaaagaaacctaaattaatggagcttctgaaacattttaatgtataaaatgtgtcaactatgaccaaggacctaagagatatcctaattcgttacccaggctgtgtattattgtattatttcagttgtttttgttggtgagttttttttttttgctttccattcaaaaattttgatatcaagagtaaaaaataacatatttttgagggaattaaacctaaataaccagctgaggcgatatttctggataatttttccttttattgtcttccttatctcttcttattatgtgcactttctgtttgctctattcttgtactatttcattcatacaattgcattttccattatgcttcttatacaaaagggctctacttgttctttttaaataaattgttctctgctgctttaactatgctaattaagattatttgaattttcacaaacaagaatgagattgtgttgataattataaggatgaactatcccacactaacatagtgacaggaaacctgtaagttggcagtgctgagtgaggcatgaagacctcgaaccaatcgaagccaagcattcccatcccttagactaggaagtcttatgggacacaatgtttgtatttcatttggtttatagctgagaacttttagctttgggtttctaattataaggtgtttaaaaaattgctggttgctgactactgtttcaactgttcattattttcatttcaaatgaaaatcttcagttgcatgattgtcctgcaaagcattgccaagttttaactttccacatttgtatacttgataagtgcttgtctgaatcatggaccgtctccaaaggttaccatagaaacctgaaggagaaaggagcatgggcaccaagagggcatagattttcgaatacacagagaggtcttaggagaaaaaactagactttttcagctaacttgtctatggtcatgaaagaaaagtcaacagtgaaatttaattgatgctgttaatcgggataatttttcttttaaaacccctaacatctagcagatgcttatctagagtcaaatcctgttttacaaattcagcctttacagcagcattggctgttaatgtctgtcatttctcctctgggcttttgagcatgacaatgtctcttctgctggctaaccttgttgcctttgctcctttttgaatatttgagaccccttaaagactgcagacaccggcaccacaagtgaattcatagaagcaggaggagatattcgtggcccaagaattgtggagagacagcctagtcaatgcaaggagacagattggcccttctgctctgatgaagactgggtaagcaggggacatgttgatcaggggtccttccttatgtcactgtctgtctgtctgtctgtctgtctgtctgtctatctatgtatctatctatctgtcctataatataaataatatgttaacatattatttgcacacacacatatacatatatttgtttcaaggaggattgttagttatgttgggtctgtcatgggataaacacatgggatgcctgagtagtgggactacaaaattcccagagcatcatgcaagactaagtggaatgtcatttcagaatttccctatggcctgttaactaccttttgagtctgtggttacttggaagagcctggggaggagaagccagccaagggctatgataacattgcccaaccttcctagtagctgaaaggcagacccttcataagatctctcccttcattttcagaaccacaaatgcccttcaggctgcaggatgaaagggttgattgatgaagccaatcaggactttacaaacagaatcaacaagctcaaaaactcactatttgattttcaaaagaacaacaaggattctaattcactgaccaggaatatcatggagtatttgagaggggacttcgctaacgccaacagtaagtgggacatatttagtgcttggactttctaacaaggatggcaacacaattctccagttgagaatgtcttcttgcagatgctgcagttgacttgagcactcgtgtggaaatcattgaatttaagagagaatgtcatttcacaaagttagaaattagcttatatttttaatgttccatatttttcaaacaaagagagggggcacctttcaagtagctattctgcttttatcctacagactaagagtctcagaggtcaagggacttgtcaatgacacaaaatagaggtcaggtacacgttctactgagtcaattacgtctccctacctaccccacccctggactcaccaggtctggggcacactgtggtcactctgggaataaagagcaagtccattgaagtcccagttcttgagcccttgtctgccttattctgtctctctgagacctcaacagtttatgtcaatggtacaacagtagttggcaggtaagggattttgttaacacccaaaagcttagaaaggatttcaaagttcaggtagaaagaaaaactccttggaaaatataagcaataatacattgaagtcccataaatgaagttataatcaaataatcagatgtgattaaactatttaccttctacagttttcaagccctcaagtaatttctggatttatttggattccttgtcatgttagagacagcgtgactaagacccatggatgactcttgtgtggaacaatctaatttaaccggaaacttgcagattagacatccagagaacaaaccacagtagaatgaagaatacgtgtggaaatacttacaagcaacttcctttttcacttttatttatttatttatttatttatttatttatttatttattgtttattttttaattttatgagcaaatcagtctgcagctacccaaataccttgcattttctgtttcagactttgataacactttcgggcaagtgtcagaggacctgaggcgcagaattcagatcctaaagcgcaaagtcatagagaaagcgcaacagattcaggttctgcagaaagacgtccgggatcagctgatagacatgaagcgcctggaggtaagcctgaggcccgggccccaatttgtctttgactaagaaaaaaggaaaaggaacactctagccgctacggaacgtctcctaaatccattatccacccaaaatagaagtgtctccaccctagagaagaagacagaagtccagaaatgtgaaggaaattcttgaagggtcaattgtgtatttgaaaagaacaggggctggggatttagctcagtggtagagcgcttacctaggaagcgcaaggccctgggttcgatccccagctccgaaaaaaagaaccaaaaaaaaaaaaaagaaaagaaaaaaaaaagaaaagaacatagtctgatcggtctgctcaccacatgccgagaccttggccttagcatcacctaggctcttcaggcagggctaacagtaagattagtgccttcctccttcccattccaattctaaaatggatccaaatagctcccattgcacagcggcctccttggcctccacagcttccagtgaggatggcatgagtggcgaaagacaacgggtaggatagatttttctgagagtcaaagaaataaaacccatgcccaaaatgcaaaccaaccaccaggaactcaattatttcaatagatagaattcatttccctgtcttcctctctttaggtggacattgatatcaagatccgctcttgcaaaggatcctgcagcaggtctgtaagccgtgagataaatctaaaggactacgaaggtcagcaaaagcaacttgaacaggtcattgctaaagacttgcttccggcaaaagacaggcagtacttgccagcaataaaaatgtctccagttcccgacttggttcccggaagttttaagagccagcttcaggaggggcccccagagtggaaggcattaacagaaatgaggcagatgagaatggagctggagaggcccgggaaggatggggcttcgcgaggagatttaccaggagattcgcgaggagactctgcaacacgtggaccagggtcgaagatagaaaaccccatgacccctggacatggtgggtctgggtattggcgtcctgggagctccggatctggaagtgatggaaattggggctctgggacaacggggtctgatgacactggaacctggggtgcaggaagctccagacctagctcaggctctgggaaccttaagcctagcaaccctgactggggtgagttttcagagtttggagggagtagcagcccagcgacaagaaaagagtatcacacaggaaaactggtcacttctaaaggagataaagagctcctcattggaaacgagaaagttacctctactggcacaagcaccacacgtcgttcatgctctaaaaccattactaagactgttttgggtaatgatggtcaccgggaagtggtcaaagaagtggtcacttcggatgatggttctgactgcggtgatggcatggacttaggcctgacccacagttttagtggcagacttgacgaactttcccgaatgcatcctgaacttggttccttttatgacagccgctttggttcactcacaagtaacttcaaagaatttggcagtaagacctctgattctgacatcttcacagacatcgagaaccctagctcccatgtacctgagttttcttccagtagtaaaacctcaactgtcaggaaacaagtaaccaagagctataaaatggcagatgaggcagcaagtgaagctcaccaagaaggagacactcgaaccaccaagaggggccgagctcgcacaatgagaggtatccacgcttaactctgggaagttgccctgaccccctagactaagttaaccatttctgcaaagtgcttaccaggcacgctctttcttaacctcttctagtgctttggtggaatctcattttttttcatgctagactgtacgttccttgggggcagggactttgccatgtgtctatttctgtaattcccaaatgcataacagtgcagtcatttctcaataaatatattttaaataaatgaacgaattcttctgaaactcaattctgagtctgtttaaccgaattcattcaaatcgtgtgctactgtaatacccaacccgctaactttaaaagttagtttatgtctccaattgatatttagaatcaagtttaaaaatttgttctattagtattgattgatgaatgcttagtaactgcctttaactatcatttgatgttagccactgcaagtaagctttcaaatccatttgaaggaagtttgctaaagcatgagtgtccttacctgctaaatattacatctcgatgtaggttcgacctttcctgtgggaggagggaagggaggagggaaggcagacagacaggcagtatctaaactgggcaatgcctgtctttgtaattaatgagagtaacttcttccaaccagcttaattttttttttagactgcgatgatgtccttcaaacacatccttcaggtgcccaaaatggcattttcagtatcaagctacctggatccagtaagatattttctgtttattgcgatcaagagaccagtttgggaggatggcttttgatccagcaaagaatggatggatcactgaattttaaccggacctggcaagactacaagagaggtttcggcagcctgaatgacaagggggaaggagagttctggctaggcaatgactacctccacttactcactctgagaggctctgtcctcagggttgaattagaggactgggctggaaaagaggcttatgcggagtaccacttccgggtaggctctgaggcagagggctatgcactgcaggtctcctcctaccagggtaccgctggagatgctctgatggagggctctgtggaggaggggacagaatacacttcacacagcaacatgcagttcagtacctttgacagagatgcagaccaatgggaagagaactgtgccgaggtctacgggggaggctggtggtacaatagctgtcaagccgccaatctcaatggcatttactaccctgggggcacctatgaccccaggaacaacagtccctatgagatagagaacggagtgctctgggttcccttcagaggagcggattattctctgtgggccgttcggatgaaaatcagaccgctggtgggacagtagctgaaggaatggaaagtgggggctctgctttctttgcttggttagccgagaagaatgatcagaagaggaaggtgtcacggatcttgtgaactttttagaaattccctggtgctattccattgttctttgtactgtagctgaacacagctgagatgcgttactgctttgaaaaaaaataaagttttacattttttcccc

SEQ ID NO: 4081 - DNA, 2952 bp, Rattus norvegicus
atgaggcgcccgcggcggcccggaggtcccgcgggctgcgggggctccgagggttccgggggccttcggctgctggtctgcctgctgttgttgagcggccgccccgggggctgcagcgccatcagtgcccacggctgtctctttgaccgcagactttgttcgcatctggaagtctgtattcaggatggcttgtttggacagtgccaggcaggagtggggcaggcacggcccctcttacaagtcacttccccagttctccagcgcttacaaggtgtgctccggcaactcatgtcccaaggcttgtcctggcatgatgacctcacccagtatgtgatctcccaggagatggaacgaatccccaggcttcgtcccccagaacctcatccaagggacagatctggatcggtgcccaggagagcaggcccagcaggggaattgctttctcagggcaatcccactggctcctctcctgctgtccaggggctctctcggcctccaggggatgggaatggagctggggtgggctccccactgtcctctctgcaggctgagctgttaccccctctcttggagcatctgctaatgcccccgcagcctccacacccgtctctgacctatgaacctgcattgctacaaccttacttgttccagcagtttggttcccgagatggctcccggggctcagagagcgcctctggggtagttggccatctggccaaggctgaagatcctgtactcttcagcagaagcctctccaaggccattttggggactcactctggacactcctttggtgaccttacaggtccctcacctgctcagcttttccaggattcagggctgctctacatggcccaagagttgccagtgcctggcagagcccgggcgccaaggttgccagaggaagggggcagcagccgggcagaggactcttcagagggccatgaggaggaagtactagggggtcatggggagaagtcccctccccaagcagtacaagcagatgtaagtctgcagagattggctgctgtgctggcaggctacggagtagagctgcgtcagctgaccccggaacagctttctaccctcttaaccctgctgcagttactgcccaagggcacaggaagacatcttggaggggctgtgaacggaggagccgatgtcaagaaaacaatagaagaacaaatgcagagaggggacacagcagacgctcggccccccacacccttgcttcctggacaccccactgccagctccacctccatcaaagttcggcaggtgctgagccctggtttccctgaacctcccaagacatccagtcctctgggcatctcggctgtcctgctggagaagaaaagtcccttgggccagagccagcccacagtggtgggacagccttcagctcgaccgtccgctgaggagtatggctatatagtcactgatcagaaacccctgagtctggtggctggagtgaagttgctggagatcctggctgaacatgtgcacatgacttcaggcagcttcatcaacatcagtgtggtaggaccagctgtcaccttccgaatccggcacaatgagcagaacttgtctttggcagatgtgacccagcaagctgggctggtgaagtctgaactggaagcgcagacagggctccagattttgcagacaggggtgggacagagggaggaatccgccgcagtccttccccgacaagcccatggcatatctcccatgcgctcattgctgcttactctggtggccctggcaggtgtcgctgggctactagtagctttggcggtggccctgtgtatgcgccatcattcgaaacaacgggataaggagcgcctggccgcgctggggccggagggggcccacggtgacactacttttgaataccaggacctgtgtcgccagcacatggccacaaagtcgctgtttaaccgggcagagggtcagccagagccttctcgggtgagcagtgtgtcctcccagttcagtgacgcggcccaggccagccccagttcccacagcagcacaccgtcctggtgcgaggagcctgcccaggccaacatggacatctccacaggacacatgattctggcatacatggaggatcacctccggaaccgggaccggttggccaagaagtggcaggccctgtgcgcctaccaagcggagccaaacacctgtgccaccgcacaaggtgaaggcaacatcaagaagaaccgccatcctgacttcttaccctatgaccatgcccgaatcaagctgaaagtggagagcagcccctctcggagtgattacatcaacgccagtcccatcatcgagcatgaccctcggatgccggcctacatagccacacagggacccctgtcccacaccatcgcagacttctggcagatggtgtgggagagtggctgcactgtcatcgttatgctgacccctttggtggaggatggtgtcaaacagtgtgaccgctactggccggatgaagggtcctccctctaccacgtctatgaggtgaacctggtgtctgagcacatctggtgcgaggacttcctggtgcggagcttctacctgaagaacgtgcagacccaggagacgcgcacgctcactcagttccacttcctcagctggccggcagagggcactccggcctccacccggccgctgctggacttccgcaggaaagtgaacaagtgctacagaggccgctcctgtcccatcatagtgcactgcagtgatggtgcagggaggacaggcacctacatccttattgacatggtactgaatcgcatggcgaaaggagtgaaggagattgatatcgctgccaccctggagcatgtccgtgaccagcgacctggccttgtccgttctaaggaccagtttgagtttgcgctgacagccgtggcggaggaggtgaatgccatcctcaaggccctgccccagtga

SEQ ID NO: 4082 - DNA, 4301 bp, Rattus norvegicus
gaattcgaaacccactaacacatcagctcctatgcacagtgccgtgaccaatccctaatgaacagacggagcctgcctctgaggacatactcctgacattcaggcacttgggaggctgaggcaggaggattttgagagttccagccaaaaagagaagacaacaataacaacaaacttgctgactcaccggtgggcaggggcgagccgctgcgttggttagagaagctctgagaacaggaaggctgggaggcttgtgcaggataacaaggataacaaggccgagtaacaagtggtgtgggggctctgtgaacgagctgggaacttgcctgaagtttgatggagtagataaatttggtgtcatgcaggtgtgggttggccaggaaaggagggagcccatttgagagctattgagtgtccccatcttgggagaggcagaggggagtccggtacagtgttcagccttcctggtgcacagccttttaatacagttcctcatgttgtggtgacccccgaccattaaggctattttagttgctactccatagctgtgattctgcaactggtatgaattgtaacgcaaatatctgtgttttctgatagtcattcaatttcgccaagggggtcgtgacccacaggttgagagccgctggtctattgataaatcttggagaggaaaatgaacctgaaggactcgttgaattgaaatggaaaggaaacatgagggctaacatcaatgagatctgaggccaggctctctgtcagagtacatgtgaggtatctgcaaatcaaaaggccatgaattggccgggtcctttctccaagagctgtaagcgcagatcagggcccactcaccaccttatggaagatatcgtcctgggccctcaggatgggctggccaagggctgcaaggcagacacacagtcctctgctttcagccatcagactcgcagggttccgggaatggctgacacgggccactctgttcttttaaatctgtgactatgtagcagtagagggctaaattaattaagtaatgctgaagcctcggggccctcccaaggcagcacacaggggaggggttggcgaggccctgagaacactaccccacccccatccccagtgctggaatccagaggctcctgagtgtcattggaaccaagcccgcacttgagtgcttccacggagacaaagaaataataaatcaagtgcaggcaccccgcccacacactgctaaccaccgcaccaacctgcctctccacagacacccaggcagcttgcaactcagaagcgaagcagaataggctgatccctccctccacagcagcacctgcagacccatgacctcaagaaggcactactgtaggatggccattcccatcctctctccagaatccccctcaccagaactccacactctccaaccactccccatggcactgatccagaatggaaaggccacagctgtgtccactgaataaaacacaaagaaaggttgtcatccaaaacccaccatccagtctgaagcggttcaaggtgagactgaagctcccactcagtatccagcattgagccctgagactatgtggtgaggtcaccgttgggcctgtacctgctgtggctgatggtcctgtgactaggagatgaacatggaagccacagctgactgggatgagtcacttcactatggtgtccccaactgtagaagggtaatatgaatgtcgctgagacgactgagttaatacatgcttatcacactccctgacacatcgctagcgctttttacagatctaataaagagatccttccggggttggggatttagctcagtggtagagcgcttgcctaggaagcacaaggccctgggttcgatccccagctccgaaaaaaaaaaaagaaccaaaaaaagagatcccttccttcacttagtcgtcttgtgatcaaatgtaccctgtagtaacagtgtctgtgttttgttttattttttttttttggctggagagacagccgtgggtgctgggaaccgaactcttatatttttggttgtgagcctagcctttaacggctgagccatctctccagcccagtgtctatattttaaatggaaaggaggggggtttctaattttcctccaagactgattaggaaatttccccttgtctgtaagctatgttcaaatacaggagtctccagaaaggagtttgccagcatcagtgtgagggaagccacaacacagaaacacagtaaggaccggcacagtaaacaccggctcctaggaactgtccagcaccacggacagttccgggagccgctctacctcctggctcatctcggagaggaagctttttgctgaaggcgatccttccctgactgtggccccatatccttccgatgtaaagtctctgccttcttatttggaagctaaagaatgtcatttagggacctggaaggagccaaacccatgcctccctcactccgattttatttgcctaggtgtgtgtgccacactgcacatggagtgacacaggcgtaatgaaacacaagggaaagggaggtggcacgaagacctcaaagcaggtcccaacagcctggaaactcaacaagtgaccatctcccttctccatgcctagtttcctatgggggtgtgtgatgggggtggggtggatagcatctacattgtaccaagattgaggaaggacggagtgagctcacccatggccctggcacgaaaccagtgggtctgcaccttatcagagaggaacggaggagcagagagttgggtgcgagtcccagaatgaattggcttcattctcaggaagccatggattattatgtgggctggagggctgagagacaaggtctgcctcttgctagcactgggaagtttctttcctgaaagattctactgtccactaaccaccagaaagaaactgctgcctgcggtgttgtcctgcaccctgattttattcagtcagagcggcaatatatgaataagtaatcacgaccatgtagggcaggaaatacctctttaaaaaccaccagtgggattttcatagaaaagtcagaggaacccagagcgttcttaaactccagtgtctggagagccaagcaggtgacagacagagttcatgaagcaagctgaggaaaaccccatcgctggagtgtgtgctatgaacaaaggcaccaggataatatttaaagttgtttcaccgcactttctgcaaggtggatcttggtaatctcttgatgaacagaggccaagtgggccagggttagtggggaatgtggcttgcccaatgctttccatagccatggctgtccccatagttaggcttcctccctcattttgagggcagctgggccacctgcagggtatgtgatgggcagctctctactcagatgagtctcttcctttcaggagtacctgtgtacaggttgggaggttgggcactagaccacttgattgctgcctctctccctgactctgttctccatcacctcctcttgcaactgggcttaagaacagaagccagccaattttccagctccttctgtatcttccaccatcccagacagagtccaggctcacaatgcctacccaactgaggaagaaatcagagagtcaggatgctcccggtgtctgactgcccttcacaagaccctcatgaacacaaggcagcaagcacatgctataacaacaacggcaaatgctaatgattcacaccacgcgtgtgccacaccctagttgtacgtactcctattccattttacagataaataaaggggcggtgggggcagagggaggaaacaacggctcccttggcactgttatctagtaagtggcagcactgggagccatcctatctgtctgcatctggagctcaaatcgtgatgcctccttcggtggaggaaggctagcttgggatatggaggctactgtgactccggaagacagagaaaagtccaatctcaacaacgtcaccactatccccaatctcagctgactggcatcctctctcctgccagtctgtggacgggaacgcgggcctcacgtgccatctagggtcaaaactcgtctgaggacacacactgggcccaacgcagaggctgatctgttcagcctgtcggctgcaagccaggactctcagcttgtgcagcacccccggaaggaaggtgagccttcctaagcctctactgacagcaaagctgcagaggccctgccgcgtgagacccagaagcttccaagccacttgtgagcccactcagggtttggaggcggacggggtgggggtggggtggggaaa

SEQ ID NO: 4083 - DNA, 5848 bp, Rattus norvegicus
atgcacgggggccagggacctcagctcctcttgctgctgctggctacctgcctgggtgaaatactagggatttgaggcctggggcggggggcgtggaaggaacagatcaggagtacggtggatggagggtctgggggttatcggtgttctgcctagtcctagctccaccccctgcctccactttatccctctgtgcctccctcccctctggaatggtccccctgtctgtttcaggggcccggagccgcaaccaagaggagcggctgcttgcggacctgatgcgcaactacgacccccatctgcggccggctgagcgtgactcagatgtggttaatgtcagcctgaagcttaccttaaccaacctcatctcccttgtgagctgcaggagcaaggggggtggggaagaggcaggggggagggaagctgggggctggggcgaggggtgaggggatgatgggtatcacacggggccccagaaaagggatctaaccttagcactcagaacagcagagtcctacagtagggaagccaggactcatgaaatccctgtggctaccaggtgctgggaggctgagagcctcctggttctctatcagtgttgggtggagacatcagaacctcggggaggaaggtattgggagttttagcctaactctcttctgtaccttagaatgagcgagaggaggccctcacgactaatgtctggatagaaatggtaaggcatcacctgctgtatcggtctgcttattgtgtccccctccccctccccctcaatctcttgggccctctctgctggtctgccattctctagccttgtgtagtgccaggcaaaggcctggcaactgcctcttcacccacagcaatggtgcgactatcgcctacgctgggacccgaaagactacgaaggcctgtggatattgagggtgccatctaccatggtctggcagcccgatatcgtgctgggaaacaagtgaggacctgggtgggcagaaaatgaaggataccagggcgcacggaatgaggaaagttagagaaagaacaaaaagagagcaggggggctggggatttagctcagtggtagaacgcttacctaggaagcgcaaggccctgggttcggtccccagctccgaaaaaaaagaaccaaaaaaaaaacaaaaacaaaaagagagcagggtgctgtagggtgcaaggctgagggtgggacggcacccgactgaagctcggacacgggcccaggaccactagacttgactctagtcctgaattccttgtaacgtgttagccatgtggggaggggagtggtggtgacaggcttttcccatccctgtaacctgcagccaattttaacagctagagaaacaattagaggtcatcaggtcagacacaaaaatggctcaatcagtgtcagtcactccaaaagaatttaatgttaactattttgccgttattgtagtcattaatgcagaggaagagaaacaggggttatgcggtgtttgttggggtgctgtctccctcagacctctctactcatctcaggtccagagtggagatgagtcagaggtttctggggtggtgcatgaatgagattagatgctagaccctcagaaatgtgcctgggggggggactggtgccctcagaccccatccatgcaaagcagagagctagtctggggctgtgggaatctctgcccctagctctatacactgccctatgcacacagtgtggacggtgtcttcgaggtggcgctctactgcaatgtgctcgtgtcccctgatggttgtatctactggctgccgcctgccatcttccgctcctcctgctccatctctgtcacctacttccccttcgattggcagaactgctccctcgtcttccagtgagaccattgatggtgttagggggcttcgggatgctttaggatgggtctgggtggaggtggaagagcagcatcggaggctcctcaaggctgggtggcctggacccaccacctgggcctgcttagatgatgacatctgagcctcctactaaagtcctctcacctgtcctccataactctagcttcctgcctgggtcccaaggggagacactaatgtctttagtgtgagggtgagaacatacaggtatgcctgtatacacagagaaccatacacaggcaggctatcctggaaaagagacacctgaccaaaaccagtatgtcacctgagccaaacttgggcccactgggctcagtttcctcatgcacaagcagtgaagggaggttttgggagaagctggcaggaccccaagtgtcctcttccaataggctcgtatttctaccctgtggtctttgtcttcagagacagggtggctctgaactctttggccaggcagaacccccaaagagcctgtgttcccctggccctgcatgctaacaccagggcttgctggagaatacagagtgtgacactgcatatgtcaaaggccaatgcccatagctgtcttcagacgaccatgtctgcagcttcatgagcaggtctccctgctttacttacctctttccacccttgacccacaggtcccagacttacagcaccagcgagatcaacttgcagctgagccaggaggatgggcaagccattgagtggatcttcattgaccccgaggctttcacaggtaaccccagttgggatcccctgcccattcaaggctatgacccatcccattaggtgcttcaaggtgaaaactattatgtatcatagaatatggttctcaaaagatcccaacagaaatccagatatggtgacacacatatgtgcttccgaccctctggaggattgaaagtttgaggctagcctaggctacagagtaagactgtttttaaagaaaaccacaaggagggctgggaagatgactccatggggataaaaagcacttactgcacatatatgaagaccagaattcacataatggtggttagaaatggacagcctatctgtaatcccagcacaaatcaagatagaaaccaaggattcccggggcaagccttctaagttcaagtgacagcccctgcctcagcaataaaaggtgaagagtgtaccaaggaagacacctaatgttgacttccggcttccatgtctacacacacacacacacacacacacacacacacacacacacacacacatatctatgcacacacatacatgtgagtatatgcatatgtttgtgcatacacgtgcatgcacacatataccacagacaaggatccattgaggctttgactttttctacaatactttaactttgggagggggatcaatagtcaatctccaatcccacttgatccctgtatactgacgcttgataaagtgcatgctgtccctgtgacttggttgttcgggccacacatttatgcaggtcacctcccctctgctccccacagagaatggggaatgggccatccggcatcgaccagccaaaatgctactggatcctgtgactccagcagaggaggcaggccaccagaaggtggtgttctacctgctcatccaacgcaagcccctcttctatgtcatcaacatcatcgtcccctgtgtgctcatctcctcagttgcgatcctcatctacttccttcctgccaagggtacctgggtctgtgggagggcagcagtatagacgctctcggggagtacagggcaggccctgctcatggcacaggacaccaaaatcctaggacaagggcagtggactccctgtgggataagggggtcccttggggtgtaggggtgaaggggtggaggtggagtggggaacctgttctgagagcatcttggtcatgggcagcgggcggccagaagtgcacagtggccaccaacgtgctcctggcccagaccgtcttccttttcctcgtggctaagaaggtgcctgagacctcccaggcagtgccgctcatcagcaagtaaggctagtcctcacgtctgcttcccaccccttgcccttgtttaagaccatggccttgtttggaagtgcctaccaggggggctatatccccaacacaacccttcccttctgaggcttccgacatgacctaggaacccgacggaagcagggtgggtggcatctgggtctgaggtgcctaagggacattcagcttcctgtttgcctgaccctggacaggtacctgaccttcctcatggtggtgaccatcctcatcgttgtgaactctgtggtcgtgctcaatgtgtccttgaggtccccacacacacactccatggcccggggggtccgcaaggcaagatacttacttccctgcccactcgggtgtccatctgtccttcccaatcacttgtgactccctgcacatccctgtccctattctcaaacttagctgcaaatctatgctaacataggcaaatgataacatcagtgcccaggggcattaatattgcgtggctaatttatctactttacataagacgcttaagtgggtactggtgtatcgtctctatttaacagatagggaaacaaagacacaaaggggttaggcagcttacccagtattacccagttctcagaaagcagaaaagggaagattgtgcctcacctgcagcagtcagttgagaatcatgttacagatgtagattccctaggtacatcccaggtagtctagactattctagcaaggggtaaagggtgagagtctgtctgaaataagtgctggtggttctgaaggtcttgaaagcttggacctcaagttctatgtccaggagaaaatagtcaagctgtaccaggccccggctgcttcccctcagcactgcctccatacccattcccaagcttgcccagctgagcaggcaagaccttccacaacatcccctctacaggtgtttttgaggctcctgccccagctgttacggatgcatgtgcatcctcgggctcctgctgctgtccaggatgcccggctgcgactccagaatggctcttcctcagggtggcccatcatgactcgagaggaaggggacctctgtttgcctcgaagcgaactcctctttaggcaaaggcagcgcaatggattggtgcaggcagtactggagaagttaggtgaggcccaaggggttaatcctgaccagtgaatatagagctggttacagcagctaagtgtagggcaagtgttcaagttggagaaagagcccaggtctctgggaagaagtcacatccagtctacctcttccactgactttatttccccatcagagaatggtccagaaatgaggcagagccaggagttctgtggcagcctgaagcaagcctccccggccatccaggcctgtgtggatgcctgtaacctcatggcgcgtgcccgacaccagcaaagtcactttgacagtgtaagctaggacacgggtgggtcaagtacgccaagtgtatgtgtggggaccagatgggatgggggttttcagtttaggttcagtgatagaaaaagcagaggtcttgagaaaaagcagaggtgggaagtgggaggaggaagggtcaacaggtcacagaccataaaagaacacaggttggtacctagacagaggtaagaaggctgaatggagaatggaggccagctggagatttaacaatgaaagagggagccaggctggctgctgcccctggtcacacccctaccacacaatgtgttgttgccctcaggggaatgaggagtggttgctggtgggccgagtgctggaccgagtctgtttcctagccatgctctccctcttcatctgcggcactgctggcatcttcctcatggcccactacaaccaggtgcctgacctgccattccctggagacccccgcccctacttgcctttgccagactga

SEQ ID NO: 4084 - DNA, 1610 bp, Rattus norvegicus
cagctggccacagggaagtaagtgactgatccaaggccacattgtttgttagaatcccagtctaataagaaactaagactcacacacaatggtgcactatctgagaaaaggtatgttcttgcctaggaatacctactctcagccctgagcctgctgctctagtactctgagtatgaaggaatatgaacttacctccccagtgtattgtaaagaccatctaactattgaaagcccttctatatgttctaggaaatgtttttcacagactgtacagcttctgtgcttaaaagggctaacacttccctttctctatgtaagtgcttgagaatcagaggtctgtttccacagagcggatgcccacttgtggatttaaaccaaagccgtgtccatagctcccccttatgaccactcaacggtacacaagccttcatctattcctgctgtttcagacaacgaacagctcactggttaagctttaattgcttccaatgaggtcagcaaaggtatttattgaaaatctctgaataaaagggtccacgcactcacacaagcgcacgctcacacacggagaaaatccttttgcctgttgatttatggaaacaattatgattctgctggaggacttctcagctgagaaatagtttgtagctacagtagaggctcaagttgcaccaggcagacagcagacacggaactcttgtgtacccagctgttccaaacagaacaagtaagttactgttatttgtcttttaaacaatgctgaatcttttctgaaagattttctctctctatggttagagtactgagggaggggtggctttttagctgtgtaaatatctacagaaattgtgctgtagtacgtatggaaagagacgcttgaagttctccagggcaatcctgacacttaacttgaaaaatctgggcagtttcagagaaaataattattaagcacaaatgtaaaagcgtatactcatggatcccaaggagagtgtttcaactttgtcgatagtggctgtaaaactcgatttaacccaatagctgtaagtacacggtgtttcctaacaagatagcaactggaatgaatggtgccgttttcttgtgatgtctctccactaatgcatagctcttctgactctacgtgcaaagtggcaaagatgttgacatcttctgtggaagctgttttaaatgagctttcgacatttggtcacactgagatgttagactatttacctactgaaatttatacatacatttctttttttatctccctttctcctccccctccccattcctaatctttcatttcgaacagaagtcaagcagcaaatgcacggcagcaactggccttgttccgaccggtttctacaaggatatacccatcaactgtgctcctgaagaaggaatcctcttattggcatcagaagctaaaagataaggttaacagtttggaaagagcgaggaccttttctcaaatcaatctccagttcacagacaggaggaggcccatgacctaggagtagcgatcaactcaaggtccagttctcattatgttattcatggacacccggggcactgctctataatgcgcaaatggatactgacacggatcc

SEQ ID NO: 4085 - DNA, 2044 bp, Rattus norvegicus
aggaagccctgcagagcatcagaggcccagctagagggacaacacagaggagtaatttgctgacagacctgcagggatggacctgctttcagctctcacactggaaacctgggtcctcctggcagtcgtcctggtgctcctctacggatttgggacccgcacacatggacttttcaagaaacaggggattcctgggcccaaacctctgcctttttttggcactgtgctgaattactatatgggtttatggaaattcgatgtggagtgccataaaaagtatggaaaaatatgggggttgtttgatggtcaaatgcctctgtttgccatcacggacacagaaatgatcaagaatgtgctagtgaaggaatgcttttctgtcttcacaaaccggcgggattttggcccagtggggattatggggaaagccatctctgtatctaaggatgaggagtggaagagatatagagccttgctgtcacccacgttcaccagtggaagactcaaggagatgttccctgtcatcgaacagtatggagacattttggtaaaatacttgaggcaagagaaaggcaaacctgtccctgtgaaagaagtgtttggtgcctacagcatggatgtgatcaccagcacatcatttggagtgaatgttgattccctcaacaacccgaaggatccttttgtggagaaagccaagaagctcttaagaattgatttttttgatccgttgttcttgtcagtagtactctttccattcctcacgccagtatatgagatgttaaacatctgcatgttcccaaaagattcaatagaatttttcaaaaaatttgtgtacagaatgaaggaaacccgcctggattctgtgcagaagcatcgagtggattttcttcagctgatgatgaatgctcataatgattctaaagacaaagaatctcatacagccctatccgatatggagatcacagcccagtcaatcatttttatttttgctggatatgaacccaccagcagcacactttcctttgtcctgcattccctggccactcacccagatacacagaagaaactgcaggaggagatcgacagggctctgcccaataaggcacctcccacctatgatactgtgatggaaatggaatacctggatatggtgttgaatgaaaccctcagattgtatccaattggtaatagacttgagagagtctgtaaaaaagatgttgaaatcaatggtgtgtttatgcccaaagggtcagtggtcatgattccatcttatgctcttcaccgtgatccacagcactggccagagcctgaggaatttcgcccagaaaggttcagcaaggagaacaagggcagcattgatccttatgtatatctgccctttggaaatggacccaggaactgcattggcatgaggtttgctctcatgaatatgaaactcgctctcactaaagttctgcaaaacttctccttccagccttgtaaggaaacacagatacctctgaaattaagcagacaaggacttcttcaaccaacaaaacccattattctaaaggttgtgccacgggatgaaatcataactggatcatgattttccctcaaggagttctgctgaattcttcagaaatgtggtgtctaagaacaccagaccctttaatttatgtcatgaataaaattcagatgaaattagggcttaatcgactttgttttgattcggtacatctttgatctttctcagtgtctacaatgtacccatctaatataaaggaaatgacaagtcagtgacagaacaggaacttaacctttggtgattctcatgggactacctccatccacatctggttgtctctgttaatttcttttgatagtaaccttgtctctgtaatttgatcaagaatttttcatgaaaatgtgaactattgtgacaactttaattgtagatttggtatcagatgttttagatgcattattctacactaaatgttacatggaaaaaatgtgaataaacacttctttaaaaatccccattttaaaaaaaaaaaaaaaaaaa

SEQ ID NO: 4086 - DNA, 5762 bp, Rattus norvegicus
ctctcaaatcaaggctgtgctggaggccgtgcccgtggtcgtctctggttctagacctgttcgctgagacccagcctgtttacagccgcacagcctccttccatggccagcccttcatctggtgcatgctccacaactttgggggcaaccatggccttttcggagccctcgaggatgtgaaccagggtccccagcagcccgcctcttccccaactccaccatggtcggcactggcatagccctgaggcattggccagaatgaagtggtctatgctctcatggctgagctgggctggcgccaaggatcctgtgccggatttggtagcctgggtggaggcagttttgccagccgccggtacggggtctcccagccggatgcagtggcagcctggaggctcctactcaggagtgtctacaactgctctggggaggcgtgcagcgggcacaatcgaagcccactggtcaagcggccatccctacagatgagtacccgctgtctggtacaacagatcagatgtgtttgaggcttggcgactgctgttaagagctgctccaaacctgaccgccagcccagccttccgctacgacctgctggatgtcacccgtcaagcggtgcaggagctggtcagctcgtgctatgaggaggcaaggaccgccttcctgaatcaggatcttgatctcctgctcagggctggaggcctcctgacctataagcttctgccttcactagatgaactgctggctagcaacagccacttcttgctggggacctggttagatcaggcccgggaagtggctgtgagtgagtctgaggcccagttctatgaacaaaacagtctccgctaccagattaccctttggggcctgagggtaacattttggactatgccaataagcaactggcaggactggtggctgattactaccagccaacgttggtgtctcttcttggggaccctggctcacagcctagccagagggatccccttccaacagcaccagtttgagaagagtgttttcccactagagcaggctttcattaacaacaagaagaggtatcccattcagccccaaggggatactgtggacctctccaagaagatcttcctcaaatttcacccccagcctgactctttgtgacagatcagccatctcgaggacctgctggaataggtcctcaaatccaaacatgcacaggatgcttcccacgatttggagaaggagacagggtctgacagtgacagtaatggcttggagggaaatggggtgctttcttccaccccagacttgggggttaaagtaccattttctgttaataataaaccactgaatccgcctgggtctattaaagtaccttacgttgctggtgtgcctggaagggctcgggcgtacatgtggaccctggggtggagagagttcttcccagccctcacttcaactccattttaatactggtccccaaccttagaaggtttacagcagcaagctggtaactgtaattgtccctgagagtgttgtggtccacacctggaacagccttgaaaagctagaggcaggaggatcagacgttcaagtccaacctcagctccataatcagtctgaagacagcctagagtacaaggcagcctgtctcaaaaaagctcaaaatgaggcccttgccattaatcccgacactgatgggtcaaaggcagatctcttgagtttgaggccagctttgtctacttggttgtctcaaaaccaaacaagaagttccaagaacagaagcagtttccccgtggccagatctgcctgctcagtttgaacctaacaagttgcttcctatagagcttgctacttgtagagcaccccttcctctgaccaactagggtagtttagtgttacaaaacccttttctcttgctttgacccactccaggctaaggaaagcttttcagggacccaactcagccttgagattgccagcagacacaacaaggggtgggggcaccgtgggcaggagcagggtcaagcaattacccaaccctagcctgccactaggacccttcatgctctgagcatcagtaccttttcacatggactccacggtagtgctcattaccggttgctcttctggaattggcctgcacttggctgttcgtctggcttccgaccgttcccagagcttcaaaggtataggaagggaaagatctggggagaggccccagaggtgagcagaatgatgaatcttcatcctctaccaaattttagtttatgccacattgcgggatctgaagtcacagggaccattgttggaggcagccagggctcaaggatgccctcctggctccctggagatactggaattggatgtcagagactcggaatctgtggctgctgcccgggcatgcgtgacggagggtcgagtggatgtactgggtgagcctctctgaaacgtgataggggactttaccctccagtgtccaaactgtgtccggagttcaggggacatgggaggacgacgggggaggggaaagagcagtgcacaagtggggtctgttctctctcccttcagtctgtaatgctggacgcggcttgttcgggccgctggaagcgcatgagttgaacgctgtgggtgctgtactggatgtgaatgttcttgggaccatccggatgcttcaggcctttctgccagacatgaaaaggcgccactccgggcgtgtgctggtgactgcgagtgtgggaggtttgatgggtgagcaaaagggacagagtaaggggttctgagtagagtgaggagccgcggggcctctgcaactttgtctccctttctagggctgccattccacgaagtgtactgtgccagcaagtttgcgctcgaaggtctgtgcgagagtctggcgatcctgctgccgctctttggagtccagtgagtcaccagctctccagaaccctctgtagcttgagaaccccagcaccagatcttgcaaatgctctgcctctgcgcctccttctccaattcatgatgtgtgctagacactctacagggcgcttggcacaggttaactcacttcacaagccaccctagctcttaaggcatactgggatgagtaaacagaccgagtaggtgactgggccccaaatggacacgggagctcttccatagcagctctcgactctgccagcgctatggttctgccagtatctgcttccagcgttcagtcccctttcggtgtcttccctttgcggaactagggccaagcttgtggtcccgcccctaaccagtcgctgttgccctcaccccttcccctcagcgtgagcctcatcgagtgcggggcagtgcacacagccttccatgaaaagctggagggcggcccgggcggggctctggagcgagcagatgcccagacccgccacctctttgcccactatcagcgtggttatgagcaagccctgagcgaggcgcaggacccagaggaggtgacggaggtgggtggcaaacgggtctcggggccgcagtctgtgggtggggccgtggtgatacaacccaggggtgcccggcagacacatgctgctcttccgcttcagctcttcttgactgcgatgcgagccccgcagcctgcgctgcgctacttctccacaaaccgcttcctgccgctggcccgaatgcgcacagaggaccccagtggcagcagctacgtcgaagccatgcaccgcgaggccttctctgatctgcaggtccaggagggtgccaaggctggggcccaagtttcaggggatccagacacgccccccagagccctcatttgtctccccgagtgtgcaatccctagggtgacagctgaattgggatggtctgcatcagataaaccgggtcagaacaaatcatgttaccagcaaaagatctaagctagaatctctttttattattttagaatgtgttttgttttaagacaaggtttcactatgtagccctgtctgaactgtaactcataaagatccacctgcttctccttctgtgtgcaaccgcacacttctcagaatcatttgaaatagtgcaaacatcttcatgggtcaagataagagggctgtagtcggggttggggatttagctcagtggtagagcgcttgcctaggaagtgcaaggccctgggttcggtccccagctccagggggaaaaaaaacctaaaaaaaaaaagagggctgtagtcaaggttaagggtttttccttccaataaatgtacttattaattattattatcctgcatggtgtggaggggggcacattctatcatcacacagagtacagagatcaggtgacaagtttgtttcctcttccaccattgggttcagggattggaactcaggcttgaactggaagtgcttctaacccataagccggccgaggttgggatgggctttaataaccaccactgagtttggttgaatagtgtcttatgtagcccaggctggccttgaacctgcctatgttgctgaggatgactgaaatgtctaattctctgtcctcctcttgtggaaccaggtctaggctttggtccccaccactaacacacaatccttgttcccatgtatatgggcaggtggtttgtgtgtgtgtgtgtgtgtgtgtgtgtgtgcgcacgcgtgtagatatatgtgtgcacctgtggaggtccacagttaaagtcaggagtcttgacttgctccttatttgttgacttcggggtctcactggcctgggagcttatgcttccagattgtctagactaacagcttgtccccaaggatcctaggtctctgtcaccctagtgctggcattacaagaggacaccaagggaacacctgggttctggggatctgaatggggttccctgggcttttttccatggagcccctgcttcctttctgacctcttatgccatcttcttcatctgtatactcgtcgtcttctctcatggcctccgaaaaagctttgctgactgttgttgtttttgttgttgtttttattatgaaaacatcatataactttctgccggcatgtatgctgcaggccagaagagggcattacagatgttgtgagccaccttgtgttgctgggaattgaactcaggacctctggaagagcagtcagtgcctcttaatccgctgagccatctctccagcccaacagttgtttttgttgttacttgtttgtgtttgctttttgagacaaggtttctctgtagcctggctgtcctggaactgaaactgtagaccaggccagcctcaaactgtgcctgcttctgcctcttagttgctgaatcaaggtatgcaccaccagcacccggctatgacacttgcttttttttttttttttaagatttattttatttatatgagtacactgtagctgtcttcagacacaccagaagagggcatcagaacccattacagatggttgtgagccaccatgtgttgctgggaattgaactcaggacctgtggaagagcagtcagcgctcctaaccactgagccatctctccagcccatgacacttgcttttaactggttcactttccctggactatgaccgtattgggttgtcaggtctttgctattttcctgagctacccaacttaaacaagtatcccttccactccagcatgatctttccatctgttttaatcttctttattgactgatcaccaccaaacgtattctggatttattatttattcaagcccttcactaatctacttcagtgaatttgttctctgttcgtcttctacctagaacagtgcctaatag

SEQ ID NO: 4087 - DNA, 4849 bp, Rattus norvegicus
  misc_feature (647)..(651): n is a, c, g, or t
  misc_feature (1142)..(1142): n is a, c, g, or t
  misc_feature (1948)..(1948): n is a, c, g, or t
  misc_feature (2011)..(2011): n is a, c, g, or t
  misc_feature (2148)..(2149): n is a, c, g, or t
gaattcacagagctcctcctgtctctgcctcccaagtgataagattaaagctgtgggaaggtcaccatgtctggcaagaccctgcctcttctaggaggaagctgatattggagggaacagaattaccctaagctccagggaaacatttttggagtctcctgggactgagacacattctggggagcaggagaggtcacaatcactaacaagagttcaaggtatttgactggcattaacttattaaaacctgttcaccggtgcctagtgttgagttatttttgataacgatgtcacctgctgtagtcatatgaactcttgcccccttaagacctgaaggtgaagggccatctttagaggggctgtcaggaggatttggcctcctctgaagcccaatcttgaagcccaatgagccatcagggaaaggatgtgggggagccaatctttcaaccaacccatattaccaatatgagagagaggaaggagggaacagtggcaaggggtgttgaatggttaaaggacatgacagaatctcaggtgggccaagcactccaaccaagacccactgtgcgcgaaatggagatgacttcgcacacagggaccaaagaacgaagttaggaaaccgaaacccattccaaagaatcaaggannnnnctagaagtgtccatcccactgccagtaacaactgagtgggtctgagtcacctggctggatggcaccttgagggaacaccctaatccggacacccttcctgccactttgccatgctatgtttaggttggggggatgggtgctgggtgacccccccaaaggccgagtgtcagctttcctcctaaatatagctcggcctaaatatagctcggggtaggggaaactggagtcctagagtgggggcatggcagaggaaagggccctgccaccctggggcccttctctgcaggcacactctgcttgaggtctcttcagcatcccgcctttcgttctgaggtccaccccttggggtgttttctctcctagggctgtctctctggctgggtttttctcccccccccccccccgccttccttgtggtcacagctgtttcgctagggaggtcacagttctgaaaacccatcatggtctcctccgctctaattacctttaantttttctatccaccccaagacttgctggtccccggccaagaaattccaggatagaagactatgtgggggagcccggacagtcactgtctccaagcattgagccttatcactgcacaagcccagcctggctaatgtctggctaatgtctggctgggagacccagaaggggagacaggagcggagggtgggaaccagcactagacaccatagcaattccacgccttggaatccaggtctgaagggaagggttggggttctgaacactgagtccaagggaggaggactggggtctcgaccccctgtgtctgaaggagggcctgaagcctggaccttcgggctcaacgtaggaggggttgggtgtgaacccccagtgtctgatggaggagggttacagcctagacttctagaactgaagtggccaaggccggggccttccgaaggttgccggccccgcgtgctaggcgggatccgccgcccctcctccgccgtcgggcccgcccgcctcctccagacccaggccctcccaagcgcaaacggcgagcagccggcgagcagcgggcgttccgagctgctagcgagccggaggaggagccgcagcggggccaggggcagccggggagcagagaaggggcggcccaggtaagagctccgcggcctcctctggcagattcggtccaggtcgcccgggtagggagggacgggggcggggccgacgggggcggggtttggcgaaggaaactgaggcaggacggaagtctcccagagttggagcgggtccccctccaaccgactcaagagcagggacncccagcccaattttcttggatgtgaaagcagggaatctccatttatgagtatcttggaggagnggcgcaaccctagaacctgtgggtctgagggaggaggcgatcttgaagtccaagaaacttagtctgcaggaggaggcatctggggaaccaggtcaccctcgctgagggaggaggatggttcaggggccttgggctgnntcgaggaaggagacagctgtggacctgcacacagtctgacggaggaggcagcgggtaccctcactccctgtagtggtgtggtaaacctctgcccctgatcacactcaacacttcccattcccccacctcggagcctggccagccaagacactccaggtatgcgcagtcggagtcttgggcgggccctggcctgtcctgcgaggagcgaacattccaggaagcagcctcagggacccagagcgtgggtcggcggggacccgggtgtccaggccagctccacccccgccgcgtttagtagaggaacgggaggaggggatgtaatctcttccagtgccttcacctgcccctcctctctgcccccatctgcttcccatccctccaaagctgtcacctgcacgggggagggggggcgtcctctggaggtggcggagcctctactccagggtaccctaggctttcaaagactctggaaagatatctttttatggcggttgcacccttccccctaccgcctatgtaactggaaaccttcctcccacaggtggttgccccctccttctcctgagatgtcagggaggagactacctgtatcctacacaggggccccacacagcctgggggcccccagccccagagtgaggaggtggaggtgctgttgacaggtctggtattcattcacctgctgctttccagtcctggcccagcttctagaatgttctgatctctccatctccctcccagcatctcccagcagccgagtcagtctcatactcagggaaattaaagccttgaaaaccgcaggattcgagggctcctccaggttataggaccacgaaggccaagtggcattgcacagagttcaaatctgacccacgccacttcccccggctgcgtgacccggaggaagcatttctccttgtgtttgactgtactgccttagctgacgtggaactcatgtaaacgggacaggcttcaaacttgtggccaccttctgccagagcctcctggttgctaaggctacaggtgtgcatcaccaccccaattttgtctatttatttacattaactgaatacttatcattaacctaaaagctaagcattccaccagttctagagcataaggtacgcctaaggtcctcccatagtctaccaagctgatatctgcccacgggtggggcaggaggaggggtccctgacttctgtcactagtgttgtccttctctaacaacaacctctttctccatcttcaggtgtgcaaagccatgctccctcgccactcctgctctctcctccttttccttctcctcctccccagcgtccccatggagccccaacccccctcctccaccctgcccccttttctggctcctgagtgggacctcttgtctccccgagtggccctgtcaaggggcacccctgccgggccccctctcctcttcctgctggaggccggggcctatggggagccggcaggggccccagccaaccgcagccggcgcggggtgagtgagacggcaccggcaagccgccggggtgagctggcagtgtgcgatgcagtgagtggctgggtgaccgaccggcggacagctgtggacttgcgtgggcgcgaggtggaggtgctgggcgaggtgcctgcggcaggtggcagtcccctgcgtcagtacttcttcgagacgcgctgcaaggccgaaagcgctggggaaggtggcccaggtgtgggcggagggggctgtcgcggcgtggatcggaggcactggctctcagaatgtaaggctaaacagtcctatgtgcgggcgttgactgcagactctcagggccgcgtgggctggcgctggattcggatcgacaccgcttgcgtctgcacgctcctcagccgaacaggccgtgcctgacgtccaggcttgggaaccgctcaggttgaggaggaaaaaaaaaaccctggatgttgaaaggaccacagggatggttcgactgctctaccgtgccttctgactgtgaactgaaataaccacagaatcaaatctctctcattttgagagctcagtctgtgtggaatgtatgaggaaaccaaatggggtttcaactgatgaataggagttctcccgaaggaacttgacattaataatagccaatgtttactatctactgtgtatcagacctatgtgtgactctgctaaccattttaacatcagaggaccctgacttaccctggcaagagagacgaggaaagactacgtgaaaaatcaatgtatgagctggggctaggctcgatcagtaggctgtttctggttgcctagcttgcacacagtcctgggctctatcctgagcaccgtatcataaaccatgcacggtggtactcatctgcagtgccagttcttggaggaaaagacaggtggatgaggagtttgtggccatcctcagctacatagggagctttgaagccagtccttgtcctatattgagggtcctatccttaataaacctaaaaaagacctgggacctgggtgttattgacatgtacctgtagtcctaataccttgagaggctgcagacagagagtgcctggaggtccagggcagcttgggttacatacttttaaactgacctgtctggggcaagggcaaatgggtcatatgggaaaacaaaagaagcgactagccctggaacagtgaggatgtgatcagggaaaggcagtgaattc

SEQ ID NO: 4088 - DNA, 2178 bp, Rattus norvegicus
atggctgcgcacgcctggccgacggccgccttgctgctgctgctggtggactggctgctgctgcggcccgtgctcccgggaatcttctccctgttggttcccgaggtgccgctgctccgggtctgggccgtgggcttgagtcgctgggctatcctgggactaggggtccgcggggtcctcggggtcaccgcgggagcccgtggctggctggctgctttgcagccgctggtggcggcgctgggtttggccctgcctggacttgcctcgttccgaaagctgtccgcctggggagcactccgggagggtgacaacgctggactgctccactggaacagtcgcttagatgccttcgttctcagttatgtggccgcattgcccgcagctgccctgtggcacaagttggggggcttctgggcgcccagtggccacaagggcgctggagacatgctgtgtcggatgctaggcttcctggactccaagaaggggcgtctccacctggttctggttctcttgatcctctcctgccttggggaaatggccattcccttcttcacaggccgcatcactgactggatccttcaggataagacagcccccagcttcgcccgcaacatgtggctcatgtgtattcttaccgtagccagtacagcgctggagtttgcaggagatggaatctacaacatcaccatgggccacatgcacagccgcgtgcatggagaggtgtttcgggccgtccttcaccaggagacaggatttttcctgaagaacccaacaggttccatcacatctcgggtgactgaggacacctccaacgtgtgcgagtccattagtgacaagctgaacctgttcctgtggtacctggggcgaggcctgtgtctcctggcgttcatgatttgggggtcattctacctcactgtggtcaccctgctcagcctgcctctgcttttccttctgcccaggaggctggggaaagtgtaccagtcactggcagtgaaggtgcaggagtctctagcaaagtccacgcaggtggccctcgaggccctgtcggcgatgcctaccgtacggagctttgccaacgaggagggagaggcccagaagtttaggcagaagttggaagaaatgaagccgctaaacaagaaagaggccctggcttacgtcaccgaagtctggaccatgagtgtctcgggaatgctgctgaaggtgggaattctgtacctcggtgggcagctggtggtcagaggggctgtcagcagcggcaacctcgtctcctttgttctctaccagcttcagttcaccagggccgtggaggtcctgctctccatctatccctccatgcagaagtccgtgggcgcctcggagaaaatattcgaatacctggaccggactccctgctctccgctcagtggctcactggcacctttaaacatgaaaggcctcgtcaagttccaagatgtctcctttgcctacccaaaccatcccaacgtccaggtgcttcaggggctgacttttacgctgtatcccgggaaggtgactgccttggtgggacccaatgggtcagggaagagcaccgtggccgccctgctgcagaacctgtaccagcccaccgggggcaaggtgctcctggatggcgagctcctggtccagtatgatcaccactacctgcacacgcaggtggccgcagtgggacaagagccactgctatttggaagaagttttcgggaaaatattgcctatggcctgacgcggactccaaccatggaggaaatcacagctgtggccatggagtccggagcccacgatttcatctctggattccctcagggctatgacacagaggtaggtgaaactgggaaccagctgtcaggaggtcagcgacaggcggtggccttggctcgagccttgatccggaagccacgcctgcttatcttggacgatgccaccagtgccctggatgctggcaaccagctacgggtccagcggctcctgtatgagagccccgagtgggcctctcggacggttcttctgatcacccagcagctcagcctggcagagcgggcccaccacatcctcttcctcaaagaaggctctgtctgcgagcagggcacccacctgcagctcatggagagaggagggtgttaccggtccatggtggaggctcttgcggctccttcagactga

SEQ ID NO: 4089 - DNA, 2319 bp, Rattus norvegicus
  misc_feature (1213)..(1213): n is a, c, g, or t
tctagacacctagaggggagcttctcgttttgtatcttgagcaaccaggataatgtgtactacaggtaaagaaaacacacagggaagagctgtccagggagtggcagtcaatgcatcttctaaggaggttcagaaaccaggcagagtctgtctctcttttctttttttttttttccggagctggggaccgaacccagggccttgcgcttgctaggcaagcgctctaccactgagctaaatccccaacccctgtctctcttttcttgaccggatgttccagtgagttgctgcacggaagtcagactctctattcaagacgataaagacttccggtctcacctggaatgccatctgaagggcccatcgctctaccactgatccaacctttctccaagttgcttacctaacacactccagtactgacgatgcgtgttacatccttctgcatgtgtgttatgtcattcattgttttcctctgcatggttgcagctcccgcctgaagccgtgccacgtgcggaagcaatgcttgagaagtatttttgaaacggacgaactcctcctgagttcgagtcactcactagctgtcagacactggaaaaagcactcgacccttctaaggctcagtttccttctctgcagtgtcgaacacaatacagagtccacatcctagagaagggaagggtagcattaaagctcaggatgtagcgattgattgattgttcccagagctggaggagggagggtgtagcccccttgcaggcaggaggaattgtgaccccatcagcgcctctaagagcagctctccttagtgtagaccggaggcatactgagaacccccacctcccaaggtggggacatgcttctgtactggccggtcacaggcctgcattcgcctaggctacgggaagagaggatacagtaccttgcctggaggagtactgggaagagctaggtacatggatggtgggaggtgggattaattcttagagggactgggggatgacattcagtgtagtaggcaggaaagggggtcgggctctctgcggcggaggtagcaggggcgtgtctggccctggaagaccttggaactgaggcataggctctccctcctccctagagagcccccagttcatctggctccggagttgaggtgcgggggcagcgagggtgcctatcggattccgccctcggagcggggcgacagcggccccgngcccaggtaagggtggattgttcctggcttaggagagcagtccctggacactgacccgcctctttccttgcccctccgggtcggcttgcagagctggggtccggtcatcctcccagggtgaacgtgctccctagaggagggggccggggcatcgagggcgttccgttctctctcccgggagggggcgggggcggagcctagctgccggcgggggacccccccagggaggggctccgggccaacgctgcggggcgtctccttcacagtctcgcccgcccctctggccgcctctgccgccgcgccgcagcagcgccgccttccctgcgcagtcggtgtctcggcgttgctgggtgagtgggggccgctcgagccggggtcggggatgaggggagggaagcctgggagccaggaacccaagtccagtgttccccagcccgctcctccccgagcttcgtggaattcctcccacccgcgcgctgccagcgggctgccccggggaaatcgcacggggctctccagggtcctgaccgccaagtggccggctcccgggagtcgcgcgtcgaccgtcccgggcgccccctccaggaggtacctcgaacccagtgcggaaggatggaggcgggggctcagggccggcgccggggaggtttggaggggatgctagggcgggtttctcagatcgagctgtgagattcctcctattttgggcactgggggtctttgaggagaaaacacatttcttccagctgggaaaggaatgccgagggtggccgagaggaaggggcacctagaggagcgctcctgctcagcgcatcactctgcccccgccccgctgacccagttccttggaccttgaggaggggagtaagggacacgctcccttgttcagccctgcgcatttcctcagtcccttcccacacacttgttccgtgcttctcagcctggggcagaagaggctgatccagaaaggagggagcaccaacttacaggaacatgcatgacacacactactgaggacagacacaggtcccctcacattcctggggaacgttcctctctgtgacaggtgcatgcccgctcaacacgcatatagaattcacatgcag

SEQ ID NO: 4090 - DNA, 1936 bp, Rattus norvegicus
  misc_feature (1865)..(1865): n is a, c, g, or t
  misc_feature (1914)..(1914): n is a, c, g, or t
  misc_feature (1918)..(1918): n is a, c, g, or t
atgcttctggcacgaatgaagccgcaggtgcagcctgagctcggcggggcggaccagctgcccgagcagcccctgaggccctgcaaaaccgctgatctgctagtggtgaaggagcgcaacggtgtccagtgtctcctggcatcccaggatggtgacgcgcagccccgggagacttggggcaaggagattgatttcctgctgtctgtggtgggcttcgcagtggacctggccaatgtgtggcgcttcccctatctctgctacaagaatggtggtggtgccttcctgattccatatacactgttcctcatcattgctgggatgcctctgttttacatggagctggctctggggcagttcaaccgggagggggcagccacagtgtggaagatctgccctttcttcaaaggagtgggctatgctgtgatcctcattgccctctatgttggcttttactacaatgtcatcattgcctggtcactgtactacctcttcgcgtccttcaccttgaacctgccctggaccaactgtggccatgcctggaacagccccaactgtaccgaccccaaactcctcaacgcctcggtgctgggcgaccataccaaatactccaaatacaagttcacaccggctgcagagttttatgagcgtggtgtcctacaccttcacgagagcagtgggatccatgacatcggcctgccccagtggcagctgttgctatgcctgatggtcgttatcgttgtcctgtatttcagcctctggaaaggagtgaagacatcgggaaaggttgtctggatcacagccaccctgccttactttgtcctctttgtgctcctggttcatggcgtcactctgcctggtgcttccaatggcatcaacgcctacctgcacattgacttctaccgcctcaaggaggccacggtatggatcgatgctgcaacccaaatattcttttccctgggagctggatttggagtcttgattgcatttgccagttacaataaatttgacaacaactgttacagggatgccttgctgaccagcaccatcaactgtgttaccagttttatttctggatttgccattttctccatccttggttacatggcccatgaacataaagtcaagattgaggatgtcgccactgaaggagctggccttgtatttgtcctgtatccagaagccatttctactctgtcgggatccacgttctgggctgtcctgttcttcctgatgctcctggctctggggctagatagctcaatgggaggcatggaggcagtcatcaccggactggctgatgacttccaggtcctgaagcgacaccgaaaactcttcacatgtgctgtcaccctcggtacctttcttctggccatgttttgcataacgaagggagggatttacgtcctcactctgctggacaccttcgcggcaggcacgtccattctctttgccgtgctcatggaggccattggagtttcctggttttatggcgtggacaggttcagcaatgacatccagcagatgatggggtttaagccaggcctgtactggagactgtgttggaagttcgtgagccccgccttcctcctgtttgtggtagtggtcagcatcatcaacttcaagccactcacctatgatgactacgtctatcctccttgggccaactgggtcgggtggggcattgccctctcatccatgatcctggtacctgcctacgtcatctacaaattcttcagcatacggggctccctttgggagagagtggcctacggaatcaccccggagaatgagcaccacctggtggcccagagagacgtgagacagttccagttgcggcactggctggctatttgaacctggccctnaggaggaggaacccacgtgccaatgtccaggacaaggacctcttttcgncccngtgggacactgccttggg

SEQ ID NO: 4091 - DNA, 2228 bp, Rattus norvegicus
atgttgcagcccgctcacccgcatcacgatgaacgcacagctgaccatggaggcgatcggcgagctgcacggggtgagccatgagccggtgcccgcccctgctgacctgctgggcgggagccctcacgcgcgcagctccgtggggcaccgcggcagccacctgcctcccgctcacccgcgttccatgggcatggcgtcgctgctggacggcggcagcggaggcagcgattaccaccaccaccaccgcgcccctgagcacagcttggctggccccctgcaccccaccatgaccatggcctgtgaaactcccccaggtatgagcatgcccaccacctacaccaccttaacccctctgcagccgctgccgcccatctccaccgtgtccgacaagttccctcaccaccatcaccaccaccatcaccaccaccacccacatcaccaccagcgcctggcgggcaacgtgagcggtagtttcacacttatgcgggatgagcgcgggctggcctccatgaataacctctataccccctaccacaaggacgtggctggcatgggccagagcctctcgcccctctctggctcgggtctgggcagcattcacaactcccagcaaggacttccccactatgctcatcccggcgcggctatgcccaccgacaagatgctcaccccaaatgactttgaagcccaccaccctgccatgctcggtcgccacggggagcagcacctcacgcccacctcggccggcatggtacccatcaacggccttcctccacaccatccccatgcccacctgaatgcccagggccacggacagctcctgggcacagcccgggagcccaacccttcggtgaccggcgcgcaggtcagcaatggaagtaattcagggcagatggaagagatcaataccaaagaggtggctcagcgtatcaccaccgagctcaaacgttacagcatcccacaggccatcttcgcgcagagggtgctctgccgttcccaggggaccctttcggacctgctgcgaaaccccaagccctggagcaaactcaagtccggtcgggagactttccggaggatgtggaagtggctgcaggagccggagttccagcgcatgtcggcgctccgcttagcagaaagcgccatgggtggcagtgtgccttctctgaggatcacatctggaggcccccaactgtctgttcctcccttacctgcctgcaaaaggaaagagcaagaacacgggaaggacagaggcaacacccccaaaaagcccaggctggtcttcacagacgtccaacgtcggactctacatgcaatattcaaggaaaataagcgtccgtccaaagaattacaaatcaccatttcccagcagctggggttggagctgagcactgtcagcaacttcttcatgaatgcgagaaggaggagtctggacaaatggcaggacgagggcagctccaattcaggcaactcttcgtcttcatcaagcacttgtaccaaagcatgaaggaagaaccacggactagaacctcggtggaaaagctttaaattaaataaaaaaagtttttaaagaccaggacctcaagatagcaggtttatacttagaaatatttgaaggaaaacaagtggtatttatagtccaaagaaaccaaagactaaaaagctcacctgcattctgactttgttcagagacacatacttcagcggggcaagactcggcaagaaagatgatggagaaaacgtcggatctcgcgccttcaacccctgcacctcactgtgctcggctgctcagtggctctaagcacagtaatgtttgagccatcgagtggacatcttttaagatcagacgttcttatctgttccaccacactgcaagggtgtgtagtgtctcaatatcacgtgtgagtatgtgtgtgcatgcgtgcacacgtaaacacacagcaacaccagtgtttagggactcaggcacggctggtcttcaggaagggttgcaccatatgacatgaccaagctggtgtgggatttctaagttcattggatctgagatgtgagttttctcatctaagcctagcgtttgaacctgccaggcccacaacctaaatgcagattcaaacccagcaaagaaaatttgaatggcacctaaaccagtacgctctctttgtttgttaagaaatgttcagatatttttaaaaaaaaatgaaacaagagtccatccattaaaaaaaaaaaaa

SEQ ID NO: 4092 - DNA, 2790 bp, Rattus norvegicus
cgggaacctcctgggaccagattcattttatgggcaagatcaaagacagcaacgcagggtggactttgggctacatgctgaacttgaccaacatgatcccagctgaacagccattatccccgcctctccctcactccacctacatcagcctcatggttctcttctccctggtcttggtcgccatggtcatcacagggctgttcatctttagcaagccttcgtatttctggaaagaggcagtatagcaggagcagttgaaacttgctggctggagagagaaaacagcctgcccagggagtggattcctccctgcaaggggggcctgagtcacccttccctgctcacctgggacagtctaggccagcgtgaagcttctgaagcttcctgaggcctttccttggggacactcaacaccctcttcctcgaggacttcctggtgagcctctcttgccttctccagttaaccctctttcttctttgtcccctgcgcttgggatcacaactttcatgatctgtgcttcataaaagaacaatgtcaactttgtctccaagaactaagagttctgagtgtcaccctgcccaagctgagctggctgaaaggcgaaactcagaaaccgtctcagccatagctgtgggacaccccctcctccccaggtctcctaataaagccatgcagtgccttcggagagaggagacacatacccatccaagcctgccctctgcataggaggattttctgaagcagatgagtatgtgctaacgtaagagtcttcgcagaggcgcatacgtgcagctaatgtggctctccatccactgaaaataagaacggaagcaagcaattgcccgttcctgcgtgatgccaaaatgctaccatgtagaacacgaaggccagagatctttgaagagcagatgcgcacattggcattcaggggatagattgtgacgatagtatacacaactaggaagaaagccacggctaccacccaggactgggaaaatatatcctctaatgcatcttttagagttttgtggggtttttaatgttaaaatacatataatataaatctcgccacatttacattcagcccagcaccactgaatagaatttagtacatttacaatgttatacagcagtcactattttgccttcagttatgtgtgtatgtgtgggtctgtgcacatgagtacagggaacatggtggccagaaggcggcatcagtccttcagagctagtgttttaagcaaccagatgtgagctggccagttgtgggggctggaaatcaacctggggccctctgctcttaaccgctgagttaagaggtcaagttaacctctcagcctctattccactgttacttaacattctatagccaagaagttggctggggacaagacatacactggttgtctcaaaccacaaacctgtccaccgatgtccaaatagactctgcaacacagagattgctcacggggtttgaaagccatgccacatcttatggtcccgagactttgtttagtgaggggaggcaggcttttgctctgtgtttgtatttatacatcaggtgttgctgcttctcctcaggagttaagaaagtgcacaccttatttccccatttgatggagtgttttgtgggtagtgaataagtgactgtggatgtatgctatgggaatttaaagagaccttgtgagtattgactcaagaagtaactgtctggcagaatcgagcactattgtattcttgcctcaactcaaactctctctctgtctctgatctggagactgactacttagagaggagagtttccagcaagctaaagctaagtgtcctgaatctcgtgggcagtcgagccatttttccgttttatgtctcttctgctattcacagctggacacgctgtcgaaatcgctggggctgccattgactgagcatctgtggtcatgctctccgtgcttaggcgcatggtgtcttctccttctgttgtcacagaagtcttctgaagaaggtggtccttaccgcccccagtgcccgtggcagagctgcattcaaactcacatctgcctcgagtcttctttttcttttgtttttgatttttgttattgttcttttcaagacagggtttccctgtgaagctctggccgtcctggaactcactatatagaccaggctggcctcaaactcacagagatccaccggcctctgccctgtgctgaggattaaaggtgtcaccaccacatctggccatttttttttcttttctaaacacccttccaccaccactgctgccaatatgctggaattcaaaattacaagtttcttcagagaacaaaaatatttttaattacatatttatcttgttgcccaagtttttaaccaaccaaccaagcacaacatccaactcaatggagacaattaggtgccacctaatctcaattccattagactgaaggttaatcccggggtcatctttgggtcctctggatggggcaggccaaataaaatgagtcactaccaatatttcaatgttgggttgcccactggttatagttaattattacttatctctagactttcactcaggactcagaatcaggttctgctagccttgttccttcaaaagttggtgattttttttctacgaacccgatcaggcaaccaatcagcagaagtggcttcatttgcatataaaaatgaaactttgtgtatgcacatggatgtgtaagagagagaaatgtttcaattcatctaaataaacgagtaagaaatgtaaaaaaaaaaaaaaaaaaaaaaaa

SEQ ID NO: 4093 - DNA, 1198 bp, Rattus norvegicus
  misc_feature (839)..(877): n is a, c, g, or t
tggtgtgtgcgcgtgtgtgtctgtttgtgtggtatataccataatagactgcagtactgagagagggactaggtctttttttttttcccctcttttttctttttttagagctggggaccgaacccagggccttgcgctcgctaggcaagcgctctaccactgagctaaatccccagccccgggtcttcttgacaacaaaaacatgacagtgtagccctttattagtcctaacactcagagacaggcagatgtctgcaagtttgaggccagcctggtctataaaacgagttttaggcctcagggtcagctgaggctacgtagtaagacctcagctaaagaactaaaacaaaacttaatcttctcgtggtaaaccgtttgttgaggaccagtgctcaggaaggagggacatggggattccagaggcttcggagggagccctgctgtgacttgctgtgtctatgaggttctgcttgatttcacttgacgaaaagtttccacagctaaaccaggcaagtgagcaacgcaattacagccaacgaggccaccaacaggtttccttctgctgctcaaaagcttgtctgaagaaaccctctgaaggggactgtggttgtgagtgggggtgggggtgatgagctgaaggttgactgtaaggagttggaacctctcagcttcagtagctaggcaggggacttgtactgagaagggacagacacccttcatggtagaggtgagtggaatgaaaatctaggtttcccccagagcttggcaaagtgtgtgtgtgtgtgtgtgatgtctcccagggtagtcccccaattggggactagcagagctgaggaggnnnnnnnnnnnnnnnnnnnnnnnnnnnnnnnnnnnnnnnacggcggtttgcccttcccaggtgggagggtggggaccagccttggcctgagcctcctgtgaactcgttgcttgagggctcggagtaaacccagtggaaactagaattccacttttcagctcttctgtctacggccaatgggggcctctgagctgacaatctcaggtagtttttgtagtttcctgggctgtgctctaggatgtctgatgttgggggaactggcttagggggagctccttcaggcctctctacattccttcagggatcatgggctgtgtctgcagctcaaaccccgaagatgactggatggagaacattgac

SEQ ID NO: 4094 - DNA, 3093 bp, Rattus norvegicus
aaggaggatcggcatcggaggatggaagttttccccttgctcttctttctatccttctggtggtctcgaacctgggacctggcgacctccgattccatcatccacatcggagcaatttttgatgaatctgctaaaaaagatgatgaagtattccgcacagcagttggtgacctcaaccagaatgaggaaatcttacagactgagaaaatcacattttcagtgacatttgtggatggcaacaacccttttcaagctgttcaagaagcatgtgaacttatgaaccagggcatcttggccttggtcagctccattggttgcacatctgctgggtccctccagtctttgggcagactgaccatgcatatccctcacctcttcattcagcgttcaacagctgggaccccaagaagtggctgcggcctcaccaggagcaacagaaacgatgactataccctttcagttcgtccacctgtctacttgaatgaagtcatcctaagagtagtcacagagtatgcatggcagaaatttattatcttctatgatagtgaatatgatatccgtggcatacaggaatttttggacaaagtttcccagcagggaatggatgttgcccttcaaaaggtggaaaacaacatcaataaaatgatcaccacgctctttgacaccatgaggatagaggagttgaatcgctatcgagacactctcagaagagccatccttgttatgaaccccgccacagccaaatccttcataagtgaggtggtggagactaatctggttgcttttgactgtcactggatcatcatcaatgaggaaataaatgatgtggatgttcaggaacttgtcagaaggtccattggaaggttaacaattattcggcagacatttccagtcccccagaatataagtcagcgctgtttccgtggcaaccatcgaatttcttcaacactgtgtgatcccaaggatcccttcgcacagaatatggagatttctcacctttgcatctatgacgcggtgcttctgcttgcaaacgcctttcataagaagctggaggaccggaagtggcacagcatggcgagcttgtcctgtatcaggaaaaactccaagccctggcagggagggcggtccatgctggagaccatcaagaagggtggagttaatggattgactggagatctagaatttggagaaaatggaggtaaccccaatgtccacttcgaaatccttggaaccaactatggagaagaacttggcaggggtgtccgtaaacttgggtgctggaatcctgtcacaggtctgaatggatcactgacagacaagaaactggagaataacatgcgaggtgtggttctacgcgtggtgactgtattggaggagccttttgtaatggtctctgaaaatgtcttgggaaaaccgaagaaataccagggcttctccattgatgttttagatgccctatctaactatctgggttttaactatgaaatttatgttgcaccggaccacaaatatggaagcccacaagaagatgggacatggaatggactagtaggagaacttgtttttaagagagctgacatagggatttcagctttaaccatcactccagaccgggagaatgttgtggattttacaacacgctacatggactactcagtaggggtcctactgcgaagggcagaaaaaacagtggatatgtttgcctgccttgcaccatttgatctatctctgtgggcctgcattgccggcacagtccttcttgtgggactcctggtctacctcttgaactggcttaatcccccacggttgcaaatgggatcaatgacatctactacactctataactccatgtggtttgtgtacgggtcctttgtacagcaaggtggggaagtaccatacacaactttggcaacccgaatgatgatgggggcttggtggttatttgctctgattgtcatctcatcttatacagcaaatcttgccgctttcctcactatcacccgcattgagagctccatccagtctcttcaggatctgtccaagcaaacggatatcccttatggcacagtcttggattccgcagtatatcagcatgttcgcatgaaggggctgaatccttttgagagggacagcatgtattcccagatgtggaggatgatcaaccgaagcaatggctcagaaaacaatgttctggagtcccaagcaggcattcaaaaggtaaaatatggaaactatgcttttgtatgggatgcagctgtgttggaatatgtggccatcaatgaccccgactgttccttctacactgttggaaatactgttgctgaccgggggtatggcatcgcactgcagcatggcagtccctaccgtgatgtcttttcacaaaggatcctggagctgcagcagagtggcgacatggacatcctcaagcacaaatggtggcctaagaatggccagtgtgacctgtactcctcagtagatgcaaagcagaagggaggagccctggacatcaagagtctggcaggcgtgttctgcatcctggccgcggggattgtactctcctgcctcatagccgtcctcgagacatggtggagtcggcggaagggctcccgagtcccatcgaaagaggatgacaaggaaattgacctggagcacctccatagacgtgtaaatagcttgtgcacagatgacgacagcccccataaacagttttccacctcgtcaattgacttgacccctctggacattgacactttgccaacacgacaagccctggagcagatcagtgatttcagaaacactcacatcaccaccaccaccttcatcccagagcagatccagactcttagccgcacactctcagcaaaagctgcctctggcttcactttcggcagtgtgcccgagcaccgaactggcccttttaggcacagggcccctaatgggggctttttcaggagtcctatcaaaacaatgtcatctattccttatcagcctactcccactctggggctcaatctgggcaatgaccccgaccgaggcacgtccatatgagcagcagacagctcggcctatatcctaggactgccccaaaggagc

SEQ ID NO: 4095 - DNA, 13187 bp, Rattus norvegicus
tctagacaccaaaagttcatgggggcacagggtgggtcccattccacctcagccaattcctggttgccgctgagcctccttccttctcacctttcagcttccctctcaggctgtgcggcaacacaacaggaagctcgctcctgggagcagtggccggtaccagcacccacgttcactgctgtctagtaatgtccaacagcttcctcagtccaaacactgcatctctgtgactcccctgtttctacctgaggcacctgatgggggcccagtgctttactagagctcctgtaactctgagaccctctggatttatatgtcaatgcccgggctggggctttccataatttcttataaggtcaagttccttcaacagcctcctctgggcagtctgaagaggtgtgttttttcacagttgagttttgtgtgactgtttcacccaccttggtggccttgggttatctgtcagggtctagcctggaagcaggggtgtggtgggcactcactagcacctaagctgagtgactgaatgctcaggcgggtgctatccttgtcacttcttaactgtgacacaagcaactcctgatgccaaagccctgcccacctctctcatgcccatatttggacatggtacaggtcctcactggacatggtctgtgaggtcctggtcctctttgacttcataattcccaggggccactagtatctataagaggaagagggtgctggctctccagccacagcccacaaaattccacctgctcacaggttggctggctcgacccaggtggtgccccctgctctgagccagctcccggccaagctagcaccatggccagataccgatgctgccgcagcaaaagcaggagcagatgccgccgccgcaggcgaagatgtcgcagacggaggaggcggtgctgcaggcggaggcggcgaagtgagcagagggctgggtccagggggtccagggtctatagggatcgggcccagtctgggattccctctcaccattttcctcgccttcctagggtgctgccgccgccgccgctcatacacctttaggtgtaaaagatactagatgcacagatagcaagtccaccaaaactcctgcctgagaattttaccagacttcaagagcatctcgccacatcttgaaaaatgccaccgtccgatggaaaacaggagcctgctaaggaacaatgccacctgtcaataaatgttgaaaactcatcccactcctgcctcttgatccttgtgctcggggaggggtgcgcggatgtggtaagggggcatgactggtcaaatgaaaagggcttcaaaaagaatcttcaatattgactacgcagccacctgtacagatccctccccagaaaggcgtagggaagacatatgtccaagggcttctatgcacagacacaaggtttcaccaatggcagacatgagggctgcctaccccgaggggtcttgagccccaaccacggaaagactttgagacaaaaggctacctggtcagaagctgggtatggtggtttgaatgtttggccagggaagtggcactattaggtgtggccttgttggaggaagtgtccctgtgtggggatgggcttagagagcatcctcgtggctgcctgaggatgtcagtcttctgccttcggaacaagatgtagaactctcagctccttcagtaccaatctggcctggatgatgccatgcgtcccaccataatggactgaacctttgcaacagtaagccagccccaattgaatgttagtgtttgcattgctgtgaaagaggcaccatgggggctggggatttagctcagtggtagagtgcttgcctagcaagcgcaaggccctgggttcagtccccagctccagaaaaaaaaaggcaccatgaccaaagagaagttggcaccgggattggttcctgtgataggcccgaccatgttttgtttggaggagtatggacttagggatgttggattataaaagcagcggaatgctttgtggggagtagcagccatcctcgtaggactatggaagacattggtgctgagggtgatttgaatatatatactgatattttggtgaagcattgagaaaggaagcctcaaaaagcccaccatagacgtgcatttgatcgagcataccaaagagcgaaggggcaccaggaagtaaataaagctgaatcctgcattccaggaagataccaatgaggaagtggcgatctcagagcacgatcccggccagcagtaaccacctggacttgggaccgaacccagggccttgcgcttgctaggcaagtgctctaccactgagctaaagccccaacccctcatctggactttttaatctggagtgatttacaatccagaaatggagggcacacttgtgatccagatttttgtttaggtttatttattttatccatatgagtacattgtgttttcgacacaccagaagaggacatcagatcctattacagatggccgagagccaccatgtggttgctgggaattgaactcaggacctctagaagagcagtcagtgctcttaatcactgatccatctctccagcccctgtgatccagatcttgaggctgaaagacacaggctttttggatctggatctcgaggaacagtggccatgaagagcttaggtccaggcatggtagcacaaaccttaattccaggagacaaaggcaaacagatctcaattcaaggccagcctgggacagtgcaagtttgagatgaagaaaaggttaagtctggtggtttgggccacacagatctcttgagttcaaggttctacagagcaagttctaggacgaccaagcctaggcaatgaagatacaacggaacaaggggaccatgttccagccccagcaaacagcggaacttggcagcttcagccatgtggctctggctttagagtcaagagaaggaggagactactgggacaatcgatgctgggtagctggagttaaggaattagtggtgattaagaagagaccagcacaaagctgcagtgttccagagtatagccaaggttgtaccttgtgctatggctgaacttggtaagagtcacccctgtggtactggtttagggggcatgaaggggtcacggagagcagctgaggcttggcactgagagaggccatggaaggtcattggtgaaggtgcagcctcatttgcagttgagggcacaggactgaaggggtcatgcttggcaaggtgaggcttggcaccacgaagggatcctattggtgaagcctagttgccgtgtgttggagataccatcaccgtaggatggccaccaataacagcagcagcaaaatggggtcaaccagagcctagagtgctagagaggagctggagaagtgactccaagccctttggaggaactcagaagatcatgtgtggatcagaacaaatagtcaaagctgccttggagactgcaacatggtagagatgttaagagttgtaggaaatctgccgaggaaaactgctaacagggagtggaaacagtccaggagggtgccagctctgccaagagcagtcaaggatgaaaggagttagagaactgaagagagctttgatttcagacatggagaagcagagtctggaggttttggttcagtattttctgaaacggtaatacatacttttgactttatagggaattacagttaagaaattgcatgactcttagaagagactatggacttttaactttgttgagtctgttataggctatgggacttttgaagttggactaaatgccaccaatattatatttggggataagtattgtccccaaagactcatatatttgaacaagcctatgggggccagggagtggcacaattaggtgtggccttgttagagtgggtgtggcctgttagaggaagtgtgtcactgaggggtgggcttagagactcctagctgcctgagggtgccaatcttctcctgtttgcctacagaacaggataaagaactctcagctccagcaccaagtcagcctctctgctgccttgcttccctccataatggactgaacatctgaaactgtaagtcagccccagttaagtatttgcccttctaagagttgccttggtcatggtgtatcttcaatagaaactcttaactaagacagtgggtgtccaagacttggagcccttgacccaatcctgtggcctggcttgtgtgtgtgaatgcagaagtcagataacctggcatgtgcccaagaaccagacaagttgtgtttcccagtctagtccaacggccacagtaacagtagcaaaccaaagcatctactgggtcccctgctactaggctgtgtagccaaggatacacctcacataaactaggcacacattaccaactgctcattgtactgtcatcggagatccctttttgacattcatggtgacaggtcagattcaggaattatgagagactgagtccctctgtcccactcccacacccatctgattctggacttcaacttcagatataaggaacccaaaccaccatgttgggtcaattcatatttatctatctatatacatacatacaatatacacacaaagtacaaaccctctgagcttcagtaatatggacaactttttctcctgttgggtggagcccaaacccttgcacatactattatgataggctcaaatctctggcttaaaagggaggtagagttgagcggcatgtagaaatgtttcagacatgtctcaagataggtccaagtggtgagaaagatccaagacagtcagttacaccaaacctcaaccctgcttgctccttaatctgcgcctcagtttccctcatgggaagatatgttatgaagctttggccagtgcctggcaggctgacagcacagactgggctaagagttggtagagtgcttcctcgaatgcccaaccaacgccatgggctggtagcaaacgtgcaattccagcccttggaggtgaagagaccagggttagaagttcaaggctgtctcacattaaataagtcagcatgctacaggacctcaaggcaagacgagtaacttggaccctactcccaatctgccagccagtgctgcaaactctgtgttgccctcacagaggagactgggcagggtgggaacaatcaatcaggggtgggccgacaggtcacagtggggttcacctttatatatgagccctctgagagccccccacacacacaccagaccatcatcaccaccaagagcaggtgggcaggctaccgtccctcctcttccaatccaggtcagctgcagcctcaacccagaacctcctgacctcctggcactatggttcgctaccgaatgaggagccccagtgagggtcagcaccaggggcctgggcaagaccatgagcgcgaggagcaggggcaggggcaagagctgagcccagagcgcgtggaggactatgggaggacagaaaggggccaccaccacagacacaggcgctgcaagaggcttcacaggatccacaagaggcgccggtcatgcagaaggcggaggagacactcctgccgccacaggaggcggcatcgcagagtaagcacccagtagccaagtcccccgctacctctgctgctgcccacgaaggcagggtgcccctctccaaaccctgttgccttccgggcagcctcgcaaacctgaacttttctctacccaggctgcagaagatcccgaaggaggaggagctgcaggtgcaggaaatgcaggtggcactattattaagcctccccaggccgatccattctgcctggagctaaggaagtcacctgcctcaggaagtcacctgcccaagcaaagtcatgtaaggccacaacaccattccatgttgatatctgagccctgagctgccaaggagccacgaaatctaagtaatgagcaaagccacctgctaaataaagcttgtcatgagattaactgactgccgttttcctttcgtgggtgccgtgggcctgagggaggggactggggaacaagggctactcttgcagtaaggaagtgacgtgaaccatgcataggtggccaaatacaagcatccttacaagtagagaatgaagtgctgggggagggggaggtagggtagggtagaatggggtggggtggggagcgcagtagtgtgctgtggtgggttggggcatggcaacacgtggcgtggtggggctggactgagacctggaagtgcgtctgacctggaagtgcgtccatcttcctatcacactgagttcatgagttccggcttaagacaacttgttcagctcttgcccttgcccactccagcttctgatccacccaatgatcccagctcatgggccatctgagccagcaggattcctggaaaatgttagcctagctccaaattctggggtggggagggtggtgccttggagcctttgtgaggtcagtgccacacccactggcctcacatcctctcactcccaggctgcctccctcctagtccagagagacaggagtgggcgatgggttcccgctgtgccaagctcagcaccggccacggcccggcccagaacacgggtcacagccgtggccacgagtcctccatgaagaaactcgtggcctgtgtgagtcaagacaacttctccctgtcatcagagggtgaggaagaggaggaggatgaggaagatgaggaggaggaagatgatgatgaggaagacgaggaggaggagcagatcccggtgaaaggcaagctgctgctgctggagcccgaaaagcaagatggtgctgaggatgctgtggcccagccaagcccggagcccaagcagaagcactcctgacccatcaaggcctgcccggcagtgggtgcccattgccatgccagaggaagaggacattcagaaaagaataaagagtctccatggaactctcctgggctccctctttccctttatgtgcatgtgtgtgtgtgtgcatgtgtgtgtagaagcaccaagggagcctctgtagactgagacgtctcactgggggcactgtcagggctggctgtgcttcgaggcaggctctatgaatagaaagtagatgaggaggcaggatcctcatcttctgaagaacaaggatgtggctgtaggcaaagaagcgcagaggaacagtcccaggtcctggttccgtctcttattaactcaagtgatttgtgggtggcacatggaggaaggcaggatggaaggtcctcttagtccttggctttcacccaccctgtcaccgaggcctcctccagagtctgaccagtcactgggactcgggaagggaaagccagttcttaggggcaagtgggtttggggaaggttaaatatgtcctttagctgtggccagttctcccctaggagctgcagagcctcagggctgtgtagcagaagcagagcctgttttaggtgtacaacaatggtctgggtgtaggtgtcaccagccactcctctagaaacgttgggcttatggctacagcaacccagcccgtacatcggcatggcttgtacgtgccaggctctagctgtgacagctcttctaccctttgtgagaacacttgtcagtgtacagtaccatgattcttcaaagctatgctattagaatgtggacacaggtcttgggaaggggaagctaccagacaaagctggttgcaaaggatgaacagagtaggcagggctcattaaatcggagttttcacttggcatgtttattaaaaaatgaacttaaaactggaaccccagaactggaggaagagtccttgagctgagactgtctcagcaggtacaggaacatgtcatcgagctgagttcaaggagagaaaacccctcccgagagtagtcttctgaacacacacacacacacacacacacacacacacacacacacacacacaagcatgggtggaaggggcagttcttcaggagtacagaagtgtgcgcagggccatgcaggcaggatcatctcagtatgagtggcagggtgatcagaggtggctctagtaaaatacaacttgaccttttctttcccaggctgggtactgaagcaaagaccaccaggacttgaggcatcccaggctgatgagaatgggggtcatgtaagactgagggagcccttgggatatgcaagatcagaccagatctgtgaacctaaccctcaacctcccacctgctgagctcctaatcgctcaagcctttggtccaaggcgctatccaatcagggtacactggctcactgcccacacattggctattacttcctatggtaggccaggcactaggtggctgggtggaaaagaactctgcagctgtcttgaggccttcaagcgcagaccgcagctgatctttaacttcacgatataacttctctgtcactaccctcagcatcgatgtcaccatgaggagggtacagttattaggagaactggaatagaaagaaaggacacacacagttgaaaacaaggaagctgcaggtctgagatgtgggctcagcacaatctgacctgacccacaggaccctaaaagctgccccgccctgggtgagggtgaggggcaggctttgccatacctgtcaccctctgtggcctgtgccatcataattggcccagctatataactaggggctcagaggactccccaaagcgaggcctgctgggagaagaggaggaggaggaagtctctgcccctccgagtgtggcctcccatggacaccaagatgcagagccttcccaccactcatccccacccgcacagctcctctcggcctcaaagtcacaccaataaccagtgtgcctgcagccaccactgccggagctgcagccaagcaggccacccgagctccagttccagccccagccctggcccgccgacgaagcaccccaaaacacccatgcactctcgttactcaccttcaagacccagccaccgcggcagctgccccaagaacaggaagaccttggaaggaaaggtgagcaagagaaaggcggtcaggaggcggaagcggactcacagagctaagaggcgtagctcaggtaccgaactgccagtggggtcgtgggagacactctgctgtaccctaaggatgcaggcaagctgcccgggagccagccggcttccctgagccacaagcattaaactggtttctagaggaagggcagaatgcagaggagtggaggggagcagacaggtattaaaagcccttttcccattcctattttttaggacgaagatacaagtgacacactccaggatgttcctgtgtccatttgatcccaaaaggagatagccatcactaggggaatgttgggatgacagtacaggaacatgtcactgcagcaatttctatgcaacatggattaaagcttgtaccctggaagcctagtcttgagtcttttttttttaaataaagcattcctatccaacacttaatgtggcacagagatgccacatgtgtgcataccacagactgacagcagggaggcactgccggctaacaaagttcagggaattgaacaagtactttcccataactcactgcacaatcacccagtcgtccccacccctctcccatctgtgctgccactttcaaaatcacacaggggcatcgggcagtgcttcccaagctgggaatgtggctgcaggaggcaccacttgcaccgaagcctgcaagacctacaatggcagctgctgtgggcactgggctctctggcctgggggggtgtgtgtcaggaagcggctatactgttcagcctgtttctttttcacaactcttagaaactgaaaccaagttgtccaaagactcagcttgactcactctgtactttggaacagggagtttatgtgccagccccttgactggatccaaaccatcagagtggggcagtaggcagtgggtagggtcaaagaaacagacccctggctatacacttcagtaaggctaggcatcattggaatatggtggatgggagagggctagccagggaggggtgtggaaggggtgtgggagggggtggggttggagtggggatgggggtgaggtaactctcctgagagttggtggaggaggtggtggtgaagcctagagccatctgctaaccaagagccttggcagggaagcaggcctgcaggagacagcccagccttgctacatcagcgccaaccctcctgccaagtcccaaagggatactgtaccccaagaggctttcttatacactttgcctggactgggagcacaggctggggatggaattcaccaaccccagtactactaaaataggctggtacagggtcctgtgttcagtcccctgcactgcaaaaaccaagcacggtcatgcttgtaattccaggaaggcaggaagacctgatgccagcctggggaaaccgaggcggggagaccaggaggccttggcctcagagcttcagagtcgcgtggcagcaaacagagaaacctgtagagggcagtgtgcgtcacttagctcagggaagctgcacgcgaaactcacccgccttcattcataaacatcgtcagctaggcacctactcctgggctttcaggacaaactgaatcacgaaaccacagtgtccttaaaataggtctgaccgcctgaatccctggccaaggtgtgtacggggcatgggagcccttgtgcagagatgcttgcaggagccttgaggggctctgtaagacagaggctaggaagacaaagttgggggctacagcttcttgtcctgcccggggcctcagtttcttcggttgcccacgtaggagtgcagagagtccagcccctggggacccaacccaaccccgcccagtttccgaggaactcgtccgggagcgggggcgcccctcccgcaccgccttaggcttcctttgaagcctctgcggtcaggccaccgcttcctgggaagcccaagccaaggccaggccgagtggccaacgggaggggcccgcgcgcgattctggaggagggcggcggccccacaggtctccagggctggctagccgggctcctagagcggagactgccaaggccttcgggtcctgggcaggaaggatcctggcagggaggagttgcttggggggtgggggggaaaggctccaggcgcggtggagctctgaccaggagaatgcacacactcggaggggaggaggcgtgtcagccccaagctagcatcccacccggggagcagcgatgtggggcgaaggtagccagagcaaaagagcaggcaccaggtgacacgaaacagaagattccgggtagagccagaaccccagaagtcccattcagggaaggtgcgaggcgagaacgagttaggtggaccctctccaggggcagccaaagaaatctaaagagaacccgaaggacttgccggaaagagaaaccgaaagcggcggtgggcgggatcggtgggcggggcctccctggtttaagagcttgatgcaggggcgggcagcagcagagagaactgcggccgtggcagcggcacggctcccggccccggagcatgcgcgacagcagccccggaacccccagccgcggcgccccgcgtcccgccgccaggtgagccgaggcagctgcgaaggagcaggcgggaggggatgggaggaaggggagcagagcctggcaggactatcctcgcagactgcatggcggggtcgtggatgctatgcctctggcgcccgccccaccggctggcccaggcggcccctcgcgcgcgcggggcgccgtcagcccctcctctccggccctgagcccggatcgtccgcccgggttccagttcccggcgtggccagtaggcggcaaccgcgaggcggcaagccacccagcggggacggcctggagtcgggcccctctccacgcccccttctccacgcgcgcggggaggcagggctccaccgccagtctggaagggttccacatacaggaacggcctacttcgcagatgagcccaccgaggctcaggctccgggcggattctgcgtgtcaccctcgctccttggggtccgctggccggcctgtgccacccggacgcccggttcactgcctctgtctcccccatcagcgcagccccggacgctatggcccacccctccagctggcccctcgagtaggatggtagcacgtaaccaggtggaagccgacaatgcgatctccccggcatcagagccccgacggcggccagagccatcctcgtcctcgtcttcgtcctcgccggcggccccggcgcgtccccggccctgcccggtggtcccggccccggctccgggcgacactcacttccgcaccttccgctcccactctgattaccggcgcatcacgcggaccagcgctctcctggacgcctgcggcttctactggggacccctgagcgtgcatggggcgcacgaacggctgcgttccgaacccgtgggcaccttcttggtgcgcgacagtcgccagcggaactgcttcttcgcgctcagcgtgaagatggcttcgggccccacgagcattcgtgtgcacttccaggccggccgcttccacctggacggcaaccgcgagaccttcgactgcctcttcgagctgctggagcactacgtggcggcgccgcgccgcatgttgggggccccactgcgccagcgccgcgtgcggccgctgcaggagctgtgtcgccagcgcatcgtggccgccgtgggtcgcgagaacctggcacgcatccctcttaacccggtactccgtgactacctgagttccttccccttccagatctgaccggctgccgccgtgcccgcagaattaagtgggagcgccttattatttcttattattaattattattatttttctggaaccacgtgggagccctccccgcctaggtcggagggagtgggtgtggagggtgagatccctcccacttctggctggagaccttatcccgcctctcggggggcctcccctcctggtgctccctcccggtccccctggttgtagcagcttgtgtctggggccaggacctgaactccacgcctacctctccatgtttacatgttcccagtatctttgcacaaaccaggggtgggggagggtctctggcttcatttttctgctgtgcagaatattctattttatatttttacatccagtttagataataaactttattatgaaagtttttttttttaaagaaacaaagatttctaga

SEQ ID NO: 4096 - DNA, 3573 bp, Rattus norvegicus
gaattctttagccttaagagagaaaatgttgggcaaaggagatggctcatcaggtgaagagcattacctcctaagactgatggtaggagtccttggggaacctacatgggggaaggtgaaaaatgcctaaagtttctgacacccatgagtggggcactgccacatgtgcacccacatactcatgcacaagaatgagaattagtgcaatatagcatgcaaaaaaaatgcctattggggtcaccgatgtaatgagaattagcataccatttttgggaaaactaaggtcttctaccctctagctttgacaataggacaaacatgctctcaaagtctgaagctctttgtcattaaaacctagaatgtgccttacggagatagcctttttcttgactttttatctgctaaggtctttatcctcaggatgcaagaatactctctcttcctctgtgaggtgctgagtcacaaacagagccgcgagcctttcagtcagtccagggtgcagagctgcttcaggtaaggccaaatattcttacattagtatgcaattagaggctcagtctgtataggagcaaacggagacctggtacaagaaacagtacacattttacttgggaaacattgagtgaactctgtgcttcctggacaactcaatgcccagagtagttttattaagcagcttggcttataagcgaaacagtagctccttatttaaatgtgtgagtcagagagactgacttcaaattctatttatgtgacccttaacctcacgtgcattggagcgcccagcctactgtccttgtgttactgtagcagtgcaaagtttggagaagcatggtatagaacagtgggcatcattgggtaccggctccattgggcttagggatgggggtgcggttacagaagggtgtagtgtgttgtgggatgttagtactttgaaaatatgattgtaagaaactgaatctagtggaagtggcccttgctgttcccttgctgactattggggataaagtttccctgcttaagttgttaaagtcagtgcacacccagtcccagtaggcactgctttctattctctagaaaagaccgtgacaattttaattcgttctgtcacgattctaaggtattgttcatagtgcccaaatgtcaatactctaaactggggagatggttcagtggttaagaatgtgtacccagaagtctgatctagacttccagcactcacataagctgaatagaatattttttaatccgcctttgtaagaacagaaggagacttggtgtatctgacatcccaaggcagcgagagtgctggtccaagaactgtgcttgcggcaggtgcagggccgcaagatctgctctgagccttatgtcatgctcttgctttcagacatgctaaggagcgtcctactgtccgcggtgctctcactagtaggcgcccaacccttcccctgccccaaaacctgcaagtgtgtggtccgcgatgccgtgcaatgctccggcggcagcgtggctcacatcgctgagctaggtctgcccacgaacctcacacacatcctgctcttcagaatggaccggggagtattgcagagccacagcttcagcggcatgacggtccttcagcgcctgatgctctcagatagccacatttctgccatcgaccccggcaccttcaatgacctggtaaaactaaaaaccctcaggttgacgcgcaacaaaatctctcatcttccacgtgcgatcctggataagatggtgcttttggaacagctgttcttggaccacaatgcactaagggaccttgaccaaaacctgtttcagaaactgcttaacctgcgggatctctgtttgaaccagaatcagctctcctttcttcctgctaaccttttctcgagcctgggaaagctgaaggtgttggatttatcgcgaaacaacctgacccacctgccccagggattacttggggcgcaaattaagcttgagaaactgctgctctattcaaaccggctcatgtctctggattcggggctgctggccaacctgggcgccctgactgagctgcggctggagcggaatcaccttcgctccatcgcaccgggtgccttcgacagcctcggaaacctgagcaccttgactctgtccggaaacctcctggagtctctgccgcccgcgctcttccttcatgtgagctggctgactcggctgaccctgttcgagaaccctctggaggagctcccggaggtgctgttcggggagatggccggcctgcgggagctgtggctgaacggcacccacctgcgcacgctgcccgccgccgccttccgcaacctgagcggcctgcagacgctggggctgacacggaacccgctcctgagcgcgctcccgccgggcatgttccacggcctgacggagctgcgcgtgctggccgtgcacaccaatgccctggaggagctgccggaggacgcgctgcgcggcctcgggcgcctgcgccaggtgtcgctgcgccacaaccggttgcgggccctgccccgcacgctcttccgtaacctcagcagcctcgtgacggtgcagcttgagcataaccagctgaagaccctgccaggagacgtgttcgcggctctgccccaactgacccgggtcctgctcggtcacaacccctggctctgcgactgtggcctgtggcccttcctccagtggctgcggcatcacctggagctcctaggccgagatgagcctccgcagtgcaatggcccagagtcacgcgccagcctgacgttctgggagctgctgcagggtgaccagtggtgcccaagttctcgcggtctgcctcccgaccctccaaccgaaaatgctctgaaagccccggatccgacccagcggcccaatagctcgcagtcctgggcgtgggtccagctggtggccaggggtgaaagtcccgataaccgcttctactggaatctttatattctacttctaatagcccaggccaccatagccgggttcatcgtgtttgccatgattaaaatcggccagctgtttcgaacattgatcagagaggagctcttgtttgaggcaatgggaaaatcgtctaactaatcaaactgtgaccagagcattgtggacggggccccaagaagaatccagtcaggatgctgtgtgccattcctccatttcccctctcccagttcttcctctcagtgtcccttctcccctctccccagaaggaccttttgtaaaatcgctactgctttctagcctggcctggttttcctcctctgttgttaggttcgggagctggggggtgggggtggggtgacaggacttagcttgtgtttggctcatcccgtcccattgtgcagcgttgggtgcctggtggagagaggagctctttcttggtttctgagtctgaggccacatcctgccaggtgggcaagacctctcctgcaccgagcaaggattgagtaacatttgtggaaggaacaccggcctaaagcgaaccctagatcccagagatgaaggctcttcccaggaacaagctggagtgttcttgtccctttctacctgaaaggagaattc

SEQ ID NO: 4097 - DNA, 600 bp, Rattus norvegicus
gtcacatacatagcccmttagcccgttgwawattattcwtgtggtdtgkggcccraaaaaytcvwacttgaaawacgcttwaaaaaaatcgatggggratgcttcgtgtgaacgtgggcgttwagstgcttctcctctcttaagtattctyttcstgatcactakgcaybhtggacatttktgagtattccaaatgatttagaaaarktcgttwtycatgaytscwtcttactgwmcagattgsyrckwbkgctctctttgsgatataggamtacgaggatacmcattgattyctttgtgccyghwttatgtgcacacattaggcattgaggatttgaayttttttttgyccatgwaycttkggatctttgataaaaaaaawwhwaaammwmrwrwmmmwrwwmawmrtawgcacyttkrcggsyggggggagggagtgttytgytggtmtccaattamcaagaattctccaaaaataattttytgcaggatgattgtacagaatcattgcttatgccatgatagctttytacmctgtwttacataaataaattaaattawwtwmmwmmarrmmaaaaaamaraaaagaaaaaaaaaaaa

SEQ ID NO: 4098 - DNA, 349 bp, Rattus norvegicus; identical to SEQ ID NO: 2

SEQ ID NO: 4099 - DNA, 600 bp, Rattus norvegicus
cagccrtkgmtmksmaysrbggratgccccaggaggagaggctctctcggtatcagcagttcaaggattttcrscsgasrabdmkkgtggctaccaacctsktygsccgwggcatggayattgwgcgygtgaacatygctttyaactwtgacatgccagaggactcsgacacbtacctgmacagggtggccagagcggsccgrwwtgscaccaagggmttgrccatcacatttgtgkcagabgagaaygwykccaagatcctgaatgacgtkcaggaccgtwtsgaggtcaacatcagygagckgcmygakgagatbgacatttcctcstacattgarcagacacggtagaggaatcaccyattytggacygtggcagtctkytgtakmmsmgkmcgmmkgsdtyrkrgakswraywhwrhhgmyccacyycyrwcdcbtcwgcccacccthtcyatgcytbthtbtgcgtcaccwycamtyytaaacytagtcytgatttatcasmkytgtttgtktgyttgtktgkttktktttwytaacaaamctwagwwtkrammmmmhrwvaaaaaaaaaaarwwawmwtatgcggcctcttgcc

SEQ ID NO: 4100 - DNA, 1066 bp, Rattus norvegicus; identical to SEQ ID NO: 4

SEQ ID NO: 4101 - DNA, 927 bp, Rattus norvegicus; identical to SEQ ID NO: 5
  misc_feature (521)..(521): n is a, c, g, or t

SEQ ID NO: 4102 - DNA, 765 bp, Rattus norvegicus; identical to SEQ ID NO: 6

SEQ ID NO: 4103 - DNA, 600 bp, Rattus norvegicus
acagggaaggagactggmtmccaagcccmtgacmgcccgttaccagrrggatggtggwtttgactttcttcactcaaaaccagtgcagytgacacagtggctgctggttmactgtcccatgaaactgcttctggtgtgktgcgscmmgagcgmcatcktgccacscwskwkrcctggwgcctccyytggctcgrgcttacaachtgagggacgscagcagctctccagaaaaatgatbccacgaggcctcaggacccgrbtgagtyccacctcttgaagccagaytccaccktttgygcttyyttgcttgggaaaaaggagtttytctttagrmacaktsccawgawtgmtaaagatdtmaamactacttttaaataaaatgcytgtcaggtttktaacccaggcctccctgsgtctccactytatccccggttcwttgtttccggctcaarstgcattctytaactcaaactgtgaagacaacggggtttttgattamaaaaaatatatctacatagtcttaatttgtaaaaaataaagaaaattccttammmwwwhaaaaaaaaaaaaaaaaaaaaaaaaaaaaaaaaaaaaaaaaaa

SEQ ID NO: 4104 - DNA, 600 bp, Rattus norvegicus
cagaaggtccttagcaatgtcccagaaattcaccatacacttctcagtgtcccggatgatgcctgtcaaggtcccacctcccctccggctgttctcatgacagctgtttggttctccatgacccctatctagatgtagaggcatggagtgagtcagggatttcccgaacttgagttttaccactcctcctagtggctgccttaggggaatgggaagaacccagtgtgggggcacccattagaatctttgcccggttcctcacaatgccctagggtcccctagggtacccgctccctctgtttagtctacccagagatgctcctgagctcacctagagggtagggacggtaggctccaggtccaacctctccaggtcagcaccctgccatgctgctgctcctcattaacaaacctgcttgtctcctcctgcgccccttctcagtcagccagggtctgaggggaagggcctcccgtttccccatccgtcagacatggttgactgctttgcattttgggctcttctatctattttgtaaaataagacatcagatccaataaaacacacggctatgcacaaaaaaaaaaaaaaaaaactcgagt

SEQ ID NO: 4105 - DNA, 600 bp, Rattus norvegicus
aaraaaarakgaraymagkgttgacagtctggacyttakcaaaaagmkmkkgcatacagcttggcatccttcagaaaatattatagcagtggcggctacaaataacttatatatattccaggacaaggktwattakgaggacaagktactacttagtctcacatactgaatactagtcaaacaagtttttaaawgtttctttgggtcttcattttgatgcakkgackytcatwtycctctgcataaaacaattggaatagaacttaaaaggagttcaatgktctcaactccccaawtctwaraaacskctgtywaactcggtaggcttgggacacytytgtttagagktgagagctgbcmacggsagkwactcttycacagkmcmctgaatgtctgatgcgttcgttcattgsccagtwctctctggtgggktctgtgkttwgtktctaggwgwytgctgcgataaaatgagattgtctgtagtatttaasgagraaaagagataaggttkkwkttttaattaagcaattccatttgtttgaaaaaamtcaacaacamaaaaataaacactgtttactcttaaaaaaaaaaaaaaaaaaa

SEQ ID NO: 4106 - DNA, 600 bp, Rattus norvegicus
  misc_feature (145)..(145): n is a, c, g, or t
  misc_feature (217)..(217): n is a, c, g, or t
  misc_feature (262)..(262): n is a, c, g, or t
ccacctksctycarggstggactgaggcytgaacaccccgscacagagctggctgstcccaataatgtctctatgagactcaagaacttttywttttttttycaggcaggttcaggbcwgggrwkgwwtstgakwkddgytvhsntgmskymsvrdyytccmmacccmscyttttttttwaswggbrbdwgkmydtaattvktcagccckcachtynkggccththatktttraatcaacrktbttthwttytgtccctwtnwmmwwmwvktggkyactatysdccrasbytaggaacaggkwtkkwsdwwwwkyyctrkgcbtgagatttvatytgckstyctttytkaatctyavargarggtmggavaagggggtgstatyttcchtscccccarmaytgargaaraakggggskyttcccctttytcccttgyccccaggactgggccatttgtggggcasccagttytagcacagctcacaytgrgagtgtaagaastmcaaacamaatttbtattaaattaarktttgtgthddmhmwaraaaaaaaaaaaaaaawraaaaaaaraawaaraawawmaaaaaaaaaaaaaaaaa

SEQ ID NO: 4107 - DNA, 600 bp, Rattus norvegicus
  misc_feature (58)..(58): n is a, c, g, or t
  misc_feature (78)..(78): n is a, c, g, or t
  misc_feature (168)..(168): n is a, c, g, or t
  misc_feature (557)..(557): n is a, c, g, or t
  misc_feature (564)..(564): n is a, c, g, or t
  misc_feature (571)..(571): n is a, c, g, or t
  misc_feature (579)..(579): n is a, c, g, or t
ctaaagtgatataaagtcgcgggcctacgaccggggcwsgmrsgtarrrgtyrgcdmnrkggvhtwbsgshhhvbdknyydvdbwvbtykkydmvddghhbbhkgywydmkgymrmawtsggmmmgwbkwkgahacmsggraaagtsktgykkswcswrghtgracgntactmcrrrcgcaaasccktmwtbstaaaraacattgatgatggcacctmcgaccgcchtwacakbcatgcchtggtggctggaattgmcmghwatcccadaaaagtkrcarmtscmawgrrmawdmrkrvgakckccaagcgayccaagatcwagtcctttgtraaagtttmtaastrcaaccmcbtcatgcccacaakgtactytstggawatmcccttgghcawamctgttgtcahcargrwtgtgttcaragacccagcaytgaaacgcaaggccaggcgggagkccaaggtcmakywygmrgagcgmtmcarkacagggragaacaaatggtttykccagaagctyskctyttmgatswayktytvbywwcgycmtkmmvwaanwdhwwrnwdamrvndwrdhdrnmwaraaaamaattgcggccgc

SEQ ID NO: 4108 - DNA, 600 bp, Rattus norvegicus
  misc_feature (21)..(21): n is a, c, g, or t
  misc_feature (332)..(332): n is a, c, g, or t
  misc_feature (350)..(350): n is a, c, g, or t
  misc_feature (366)..(366): n is a, c, g, or t
  misc_feature (483)..(483): n is a, c, g, or t
  misc_feature (585)..(588): n is a, c, g, or t
ccytysygshgrakkmkdsdngrsvsgacgwkcagaaatgbmacctyghaagggsaagvrmamsaargawgaacaggtcwycagccttgsacctcasgtgsytgaagraragraksyaydwsgwgtctsycacatctktgmatycyycaatgatmcckytghscmtgwtactratctttstggcaaggaaaccatytvccgagtaaytggtggmaygarggygadbkchbmbsgvdadgarwycdsbmsrwrbgvrsccmwswtgsctsyccmgratktgsccymrrggtgcaaggaactggkcmtcahtsycbtgmatawyaaayhccgsncchsvggrggaamcasgnccaaghcccytggrcntggagcccmgycmsscctyaragytbdtgctcgcthtgsgatgaagawtgsgcrgwttgaggatdycmcccccatccyctytgacagcmctbgaaggaagggwgswyktcggvrwcnccgwctkwgaacmggmcttyycaashhrtttthtgtkaawaaaytgctttgtargctwmammamaaaaaamawaaaaaaaaaaaaaaaaaaaaaaaaaaaannnnctatttagtgag

SEQ ID NO: 4109 - DNA, 560 bp, Rattus norvegicus; identical to SEQ ID NO: 13
  misc_feature (521)..(522): n is a, c, g, or t
  misc_feature (525)..(525): n is a, c, g, or t
  misc_feature (530)..(530): n is a, c, g, or t
  misc_feature (533)..(533): n is a, c, g, or t
  misc_feature (535)..(535): n is a, c, g, or t
  misc_feature (541)..(541): n is a, c, g, or t

SEQ ID NO: 4110 - DNA, 600 bp, Rattus norvegicus
  misc_feature (9)..(23): n is a, c, g, or t
  misc_feature (199)..(199): n is a, c, g, or t
agtcccccnnnnnnnnnnnnnnngtagggaggatgatcagcggrtgacsagttgctgcaaggctksaggcagtakcagtggrmrgcagwrratgacagtagatggcctccactctmtcaggtggctgcagagcagagagcgctcactytaaacachtggccttccmtggcaagagttttctatccatgaagcagagcanccgcagagggctgkggctcggacghtggccaaagaagttcctascctttccytttyccbtaaactssatcagggaagaatcyttatcgstrgcttggytttcacawgaggtttyytgagraagsgrahtgsgatargaagtmtgtcatgtmgtaawgtagmcaagaaatcytattaatccagttgtatttcagagctgtttgtccmtatgatttytaaagtcaagtttaatttcacaaagrmtykykkyckgaaattactyttggggtaatatytaaaatgagagacattytgtaaccytgtwaaatacmtagggaatmtwacattccaatktacacamcgaaggcaaattctttaatcaaataaaagagthttmtaaahwrrrmaaaaaaaaaaaaaaaa

SEQ ID NO: 4111 - DNA, 417 bp, Rattus norvegicus; identical to SEQ ID NO: 15

SEQ ID NO: 4112 - DNA, 519 bp, Rattus norvegicus; identical to SEQ ID NO: 16

SEQ ID NO: 4113 - DNA, 600 bp, Rattus norvegicus
gtcctatctgtcctatgttcaagctgtgcctatccacaaagtccaggatgacaccaaaaccctcatcaagaccattgtcaccaggatcaatgacatttcacacacgcagtcggtatccgccaggcagagggtcaccggtttggacttcattcccgggcttcaccccattctgagtttgtccaagatggaccagaccctggcagtctatcaacagatcctcaccagcttgccttcccaaaacgtgctgcagatagctcatgacctggagaacctscgagacctcctccatctgctggccttctccaagagctgctccctgccgcagacccgtggcctgcagaagccagagagcctggatggcgtcctggaagcctcsctctactccacagaggtggtggctctgagcaggctgcagggctctctgcaggacattcttcaacagttggaysttagccctgaatgctgargtttccaagaccaccgggctcccgaggatcatgttgagggaagaaaccttggctcccaggtatcctcaggagaagagagccatgtgttcacacccctcatccaggaccctgtccgtttctcctactcctctag

SEQ ID NO: 4114 - DNA, 600 bp, Rattus norvegicus
  misc_feature (367)..(367): n is a, c, g, or t
tkaraacacgcagggctttgatggggttsattagattacaaaravccaagctgtggwgtcttatacmccatrgttcytaagcaaaagcaaaaacaaaatcacatttdagcaydwksmasatamyttytaaaagatgsccaytggctykkcamgagtccagagsacagtttgwtkatccatgatttcagccaccmccrykstgacktgwtsswkygbmcrgttgwtggggttcatgtgyacgvcagdatgtgagtcctgtgtgcctgagtyctgacygtatttcatcttgmtaggcacatccttmtaaaaykabtgagatkccamctgtgaaatatctgtmatgagtagctggysgsmvvmwwwgrynctwtkwtaagatgaaatytggwcmaagaaagtcytyaatgattgattcataaaccgsgacacacttrktrccacktgtcgcwtacttactctgtagacmtgcswagwgtacsttatcgcctagacmccttkaakccgcktkggaagatgwhtccacatgtgttttaagtcacttaagtaagtcacktgtgtttwaaaaaaaaaaaaaaahhmtctyrtgcsgcccctcgtgcc

SEQ ID NO: 4115 - DNA, 600 bp, Rattus norvegicus; identical to SEQ ID NO: 19
  misc_feature (121)..(121): n is a, c, g, or t
  misc_feature (212)..(212): n is a, c, g, or t
  misc_feature (220)..(220): n is a, c, g, or t
  misc_feature (276)..(276): n is a, c, g, or t
  misc_feature (385)..(385): n is a, c, g, or t
  misc_feature (438)..(438): n is a, c, g, or t
  misc_feature (446)..(446): n is a, c, g, or t
  misc_feature (454)..(454): n is a, c, g, or t
  misc_feature (496)..(496): n is a, c, g, or t
  misc_feature (537)..(537): n is a, c, g, or t

SEQ ID NO: 4116 - DNA, 662 bp, Rattus norvegicus
ctcagacaagctgatggtgcatctggtggagcgtgtgcagaggttctcacacagsaramaccwcctgacatctacccgctkaccaaccaactgaatgcactaskcwysasagagagggagaagaatgctttttgttttragctctaarmggactgacttggaagccctyttgtgttgtgttgcaactgtacagaccamccagcttcacaagccaggttaccttcctthtgcccwacacagcagcccctygacacctgtgvtcacctccttggttgamtgaagytwtgrgsmaccmaggagccyttacagwcytggkhtsgaacktgggagkctggbgtgmccgtytrtwgaccccacagcccytrcagtggggrgvccmcggrgcacaggamvtabtgggcarccytggbtyttcctcctcwccaggaacatttyttkagggctyacaggggsccaarwtkgtmawaatttkccytgtggtgtcagttyaggtactgtgtktttttcaaatcatccmrrawawtttgggswyttytytwyttyyttywwwwaaasaaaattgaacttcctgagtattytgmcagtgttagttttyatagagcattgaaagccctmccmyttcaataaawdcmtggrtkgrddmmmaaaaawaaaaaaaaaaa

SEQ ID NO: 4117 - DNA, 600 bp, Rattus norvegicus
  misc_feature (377)..(377): n is a, c, g, or t
  misc_feature (491)..(491): n is a, c, g, or t
tcgttccytttctcggtatcggcctcstgtactccctgagcggaccggatctctctacagccctcattcacttcaraatctttgtgggcgytcgratytwccacaccattgsttacttgactcccyttcbtcagccaaacaggggcttggcattttbtgttggmwacggagttaytttgtcaatggcttacargytgctcakgagcagactgtacttgtaaakagatttgtgaccgtcaccctbtgatwgawttmrrmamdtarrggwttytwtwtytstrgtgtawwaaaaaamwwwmwaarrwhttatgtatgaaaggwgcagagaaatcaggaatcagggaaaattctgtttgaagactaccatccacaggctntacccttttgtacstgggttagacatttmacatgaccggccttagvtatgctgtctaactcstaaagtactttgtcctaagtcttgrgtkccttrtaaattgtaacattccttntacatttcctgtggtgyatctataaaagagtgctcacacctgtgtgaagcctgggtttcattggcayctgaattaaaaamrkkvcarrtgraaaaaaaaaaaaaaaaaa

SEQ ID NO: 4118 - DNA, 600 bp, Rattus norvegicus
tcctgtccgttggaaaytgggcccctgtgtgtctccagggcaagctctcagggraagctcacatctgcstgctttacagagtgcttcaggygtcagctccaagtcaaacagkatgtgtttccwtctgtttttcccctctaattatagaaaatrgtaaggmawaatatcagtttcattgagattagtagtacattttactatcttcttttttaacgattaagtacttgaattttatatcaggaaaatagtttttgagcctgttctwacctttggccgtagttggwagttggtctctttgtttttcctggaggaggggcatttcttttcctcatcataamckactttctcattcttagtctwgwtatwacttttcctstaccccactktttaaaaattcccacagcaaaattttkatktgaatttttaatatttststgartgrggtttaaatatcttkattmgagctactgtykttaatttaaaggttaaacttgaagaaagtctttattcatggtgccaaaatgcatttttctaactctgtgtgttagaaaataatgmmaaataamataacktrrmdtaaaawaaaaaaaaamaaaaaaa

SEQ ID NO: 4119 - DNA, 600 bp, Rattus norvegicus
gcggaacaggaastggaatwggcatacacasagcaggarstggcacwratacgamcagaaatggaggtgrtaagtgctgatcagctcatctcactttcwtgtattaagatagctgcatgattactttctrakkgtwwtataattcacatttcatgatgtgktgdacatgggtrycaagatstgaatatgaagtgarccykccagtgttgtagtgctagtttaaagcagttctgtgtggmgatmmagccwtaaggwygaagatgtgkacaytctstacacggaagatkttgtrcakrgamtktktaactttataaacctatgtgaaaatgtaaatctttawgaatgtrcataaamyactgtawktktwtacsttgtstgtgataatbtgstcagwgcatgtaaatataatttawygtgwatthtatrttatgttcaaacagtgatgayktactttttattagtaagtcaacacccamtgaggtkkttkccaaagkmgattttkttgaattcrgaatmggtcwtaattcaaaataaaaatwwtawtgaattytcmmwammwddwwwmawaaarrrargtatgagagaaaaaaaaaaaaaaaa

SEQ ID NO: 4120 - DNA, 563 bp, Rattus norvegicus
tttttttttttttttttcccctgcaatagaagtctggttctttggcataatggtgtaaagttaascagagcatcwtgggagttaacctttaccctacctttgacactgactgtccyccgattttgcraagctcttcagtttctcaragcagtttttaaatsccaaccaggggggkwctgtcaggagwacaaattactttytatatgtcacgatcagttkactggagctgctcttatagttaaartgatcytgtatttcttaaaactttcaaagtratctcacctgwcaggtttttttttykkttktttgagctsccastacacaggtttggcatcttatatgttttakctsttaagtgcatgtgaaakttgtwaaatagagacagtgcagtawgtatattttgkwaatctcccatttttgkwagaaaayatatattgtatttatacmttyykackttgratttttgttttgttmtacctttaaagatctacaatgragccccactttatcacgtgtacagatcacaaataaattktttmmwmrdkaaaaaaaaaaaaaaaaaa

SEQ ID NO: 4121 - DNA, 479 bp, Rattus norvegicus
tcatgtattaagctcccgtagcytatgtgttactgtgagcatttwtagcatgccatttggtgagggtttttctcstttgtatttcsgtaaactgataattgcctttgaaggctgaccacattgagwttcyytttggtytggstagactactgtrgggtgrtgtctcttgcattagtcaacacatagtggctgttgytgaattgtcctcacttrtgacaagtactgtttcagattcagtcwtaggcacactgkccagtmtcagccaccagccactkacagwtgamcagttamtatgtggcttgtytgaatgcagatatgcgtaaatgtgcaaacwtgttggaaytcrggtacttabtartacaacacaaaatawtgttaaaaatctcaatttgtttataaccattatgtgttttaaatgataatattttggatacwtrgaattaartaaaamattgttaaawtaaaaaaaaaaaaaaaaa

SEQ ID NO: 4122 - DNA, 600 bp, Rattus norvegicus
gaggatgaagaggaggaagamrgyrsgarrsrygavragakmaasagmgrmacagakgmcsarggagaagatsacywasccccgggacagcctgcaggacacagaactgttgmgtatggttggactgykcatggatttggtagctsttktwaaaaggtasctgtgatacaagccycaggacacccccacccaargagccaaagaatagttcccgcgacathccgccttcctccgtktagccccktggtamtccaccaccaagcctggggacttcgccccaacaaaattgwawkcgkyrykaggttttcgtgtaagactcwtgctgtatmgtgacasctgtgattggtgagktgrccgtcctggctgccagtkacamtgcgattgtaayaacatttttactttcygtrcaacaaggaaaagctttgtaaataaaatcttarcatttwrrvwvhwwwmwmawrmwwwdcykwwttctttctttctttctttttttttttttttaaagacattaggacattttgtgtgataactgccaaaaccgtattttctaagactaagcaaaataaatgcattactctttggtaaaaaaaaaaaaaaaaa

SEQ ID NO: 4123 - DNA, 600 bp, Rattus norvegicus
  misc_feature (549)..(549): n is a, c, g, or t
gaaagggacggtttttttttttttttatcggatggtcacgccctgttcccatcgtgcmckrkkcccatcctagcccatcagttacctgttttacaccaaaagtagtctttagggtgtagttagcaatttcttttgtgccattttaggktgraragggtgggcatgatkaarccagtcattcasgacttaattcttcchtgygbyryggkgkggytttcttccbttvwtstgkwkkttkktttwawttyytktttttttsccattgcvccmgrgtwtgaaatagsttccaggttytccggstcaragctggscggstgattgtggtcacaccctgacaacrbtwgggatytcaacggactcctyttgtagccgcaccamtatttttagcmgyttaatgkgtacattatarrgtcttccattktgtgtggaattagctmctccccttcaaatgctgtaattaacmtcmcttaaaataaaacttgaataaaatrctrwwammwmmraamwwwawmaarrwaaaawmaraawramwwraarmttkaggrrrgngcccggccccggttcgccctatacccaagtgtatcccatattaagtgccgt

SEQ ID NO: 4124 - DNA, 600 bp, Rattus norvegicus
aggtacaactagcccagtggcagaaaacmctgccacagcggcggaccyggaacatcgtsmccssccygggcatsggrgccctggtgttagctatttatggttacmccttytactcagtgscccaggarcrkttccttgatgagctggaagatgaagccaaaghtgcccgagcccgmgytcttgrragagagmgagcatcaggmccctwamtgyacggaccatyttcaaactgytggagccccccgtacatgttgaatgatgcctggtggtctcrcagcatcactggcatagkaactkyggaytatgattgarcccaagaagccacagactatgyatttggctactgccaaggggagattgctcacrtcacatgcagtttgtacatttactcarcccctttttattwccttgtttgaraggtatgcrcgaccttgcctttccccaaactytgtggtttacctyttcamctcccaggggcccaatkttaagggggagggtktggcctaamtgcagagttkgracctaaagtgggaaagatagggtcaagtaaagagtaatwaaawrarwmawhwhwmmmhwarmmaaaaaaaaaaaaaaaaa

SEQ ID NO: 4125 - DNA, 600 bp, Rattus norvegicus
  misc_feature (154)..(154): n is a, c, g, or t
  misc_feature (199)..(199): n is a, c, g, or t
cgtgtagcaaaactgtctttagtctatgcaaatagcgagtcactgagtgtgacagawtgcaacttcactgktaaacttcacmtgaggkdyyctcattykggaatccagactgcaagattwtaaaggraargacctawrgcaattcagtkcktynwgcaaatcaattgaatccmcgagagatgtctmccagcgagatgtntaccagcccagcsgcstgcagyctgcagcmtgctstgtgtgcttawttgtgcgctsrataaaatggggcagctaaattykycagktccatatgcctccraagtycmaakraavraaagcaargtaacatgttagactkgmcttgtgtgscggsgtaaagaaatggcatyttcscackargrwcrvacyawcmakttcttybktcasyywcmctrtkwmmyagkgwrrstgamrrgamgaamtggttatgtgtgcackmatcgctttgcatkgtytcawgagatggytgcattcsamckgttttaaraattgtaaggatcttgacttttyyacatttggaaacatcmawtaaaaacaaacataatctgwrraaaaaaaaaaaaaaaaaaaaawmwcgcggcc

SEQ ID NO: 4126 - DNA, 600 bp, Rattus norvegicus
  misc_feature (300)..(300): n is a, c, g, or t
  misc_feature (332)..(332): n is a, c, g, or t
gctyttcaggtatcaaggttacattggtgcagccytagttttggggggagtcgakgttactggacstcatctstacagcatctatccgcatgkatyaactgataaactsycttatgtcaccatgggttctggctccttggcagcaatggctgwgtttkragatarktttaggccwsatwtggrggaggawgawsccamkaagctwktgagygaagctattgcrrbtggcatmtttaawgactyggggkctggawrcaacattgwwctgygygktmtcascarragcaagytgrrsttthncmgtccatastyaktgcccaacaagaaagggnccasgtttggccsrkacaggkgksrgaaagrcactrccgctktystyasggagaargkcrcycctytggagctskaggtgctwgaagagattsttcagrcamtsgacacttcgtgaatggtgctgcgggcagttggwtagctctytgggtgastsggtgtacrtgccacccctgccccaccccactvtaccccaatcagaaaacatscayytggctattgctcaattaaaacaamccvgaaammwwmawawaaaaaaaaaaaaaaaaa

SEQ ID NO: 4127 - DNA, 600 bp, Rattus norvegicus
tstgytgcmagggygagtgccagtggctgcacytggacctcatcaagragatraggcayttctgcaartctytyttcccygtggtgrrctaygcctactgtascattccyacctatccmagyggcmmgakcggcttcatgctgtgtagcaaaaacccgagcaccaacttccgggagccmgtgcagcagytkacacaggcccaggtrgagcagatgcagctgaartamtrtaaytcrgacatgcaccgygcsgccttcgtrctgccdgmrykmrsccgraaggccctsaatgacataagytgaawccaggtgccamtgtracaccacccgagacctcartyggattggaccaaggakctwcmaarytgthtgggaccaccagtcctggaccaaactcccagatgactcttgcccaccaaccaagtgttacaggccccagamtgstgcmtsgcmtgccvtgmtgggtggactcartcwytgtgtctgymwatctmtrtggcgttcagccccacgcytataccagctctgtacascmccacstatgccytgtgacccaacaaaawacaygtgtayttwtamcaadhwmaaaaaaaaaaaaaaa

SEQ ID NO: 4128 - DNA, 600 bp, Rattus norvegicus
csscwcgaggvhbrvgscagacacagaggcagactcacaggacasscgrsacrwsrtgaagagcytgctycctmtggccatcctggctgcgctggccgtggcagccmtgtgsyaygarksksaygaragcawggaatcytatgaagtcagtcmyttcaccamccggvbamrwgscaacacstttatakscmckmrgcagarwtgrcacgctaragcycaggmamgagkccggsaaskmrrcaagcytgcccaggagatcahmaggraggcctgtgatgactacaagctgwgtragcgmtacgccctratytrcgggtacaacgccgcctacaaccghtacttcaggcagcgcsgaggagccaawtaagagcgcaagkaaacagtcgctttgtwacggrgtctggtttcatattcccctgcagwagcattmccgatacacagawtcgtgtkykttgcttgttcctcacatratytyctgtctggvtggsccactcyttmcttccgcgggwtgaamgtaatgaaagagyagtattaagaaatgtgtttatatataataaaattckggtttgwtmmwwwmmmaaaaaaaaaaaaaaaaaaaaa

SEQ ID NO: 4129 - DNA, 600 bp, Rattus norvegicus
actatataaagagctttttctgyccaaggtgtctcattccamcyctswaacacacyttgatgccaatactgccactttayttdgaagctcagagttaaaggatttgacgmccatacaamcggtggagratctcagacaraaatcaactgaacgggctactcacaaaggttactcacytacttytgtyatccbtaaatgtmatcgttagggaasccactcggagtttgsaaatagggactggasagatacctctgtggtcaagagcactggctgywycamtagaggacscakrttcaattcccagtaccctcacagcagctcacaacggtctgtwyccagctmtaggtggwttgacaccccacwsagatagacatgtcggcagaacaycaatgcacataaaattmaaataaggagwttggaagtaaaacatcggcaaaatgagagctacttggcattattttggtktgtggmtrytaagatkttttkractatatgaaaaatgtagaacatcactaagattggtttacccttytccgaaagmwtwtcaatattkyawkawaataaaraactgtwtgttrmammaaaaaaaaaaaaaaaaaa

SEQ ID NO: 4130 - DNA, 600 bp, Rattus norvegicus
  misc_feature (573)..(573): n is a, c, g, or t
tdcgatagrasctgatttrtctcttcadttttcttcatgcatcatggtaaagcattgsmatcgmgtbgttttaatcgaagtkcacactgtatggtacgaggcgtttattwtacccaagcagwtggsmatyagtcgwccgwgcmdkascacagagaaamccttycargagbtraggtgtwmcaaawccacktgagaattcatgagcactttaaaatctgaatytcaaagcttgatattaagtcatttagaatgtyyacatttactgtgktgtgctggatcctgtctcttttgactaatattttcataacaattaggctggagcaaggaaggwaacaatggcttccttagataacyacaraagttatatwggtctcygtgattactctmtcagctgtattaaaatgaatttgtactttgaaaggwatgatatygacrctaaaattttaaacacttaaattttttcataatctttcataaagaagtttaataataggtatattarctgaatttcattagwwtkktaaaataatattttgtttgtgtatayattacatattaaaataaaaacatttncmmcmawdwaaaaaaaaaaaaaaaaaa

SEQ ID NO: 4131 - DNA, 593 bp, Rattus norvegicus; identical to SEQ ID NO: 35

SEQ ID NO: 4132 - DNA, 600 bp, Rattus norvegicus
aaacctgtccttcctgtgcttggctggmttgctcacaggtgctctctggctacccaaacatttcccatcctcagaacctactgtcttctgcctcmttcmttgttccctttgsttttgtagggagagggatagtgtcaasggcygtgccagcagcttgggkccgcagggagaggttggataatgtgcctgtttkttaactcgataaaaaagcstacctccaaaatccccttttcgttcktcctggacstgggcattcagcctchtgcccttaamtgaatcaggagcytctgcctcstgcytgtgcatcstggctcccaggtcayaggttggtcccctttccttgcacgmtagytagtarctggtaaggycttcacaccstgatttttytgtttcytgcttagtgscactgacattaagtaggagsggmcagtccatsccaagatactytggagtgggcttyccccttggytgtgggcaggcaggccctaactgttgttttytgcmwmgtksmggccccctcttcacatatttagttcctgtaktcaaaacattagtaaaaataaacrttkttrcrgrrmmmwmaaaaaaaaaaaaaaaaaa

SEQ ID NO: 4133 - DNA, 600 bp, Rattus norvegicus
ggraataggctttgktgagkctgcataatgcttcatgattcgkttagggacctasaaatattatgtgaaaatgkataaatatcatccaaaaggctttctgccctatatttttaaaatacagaagttatatttgaagtagtcctggccctagttytatagggcttggcyatttaatatttttatggaasaaatgkttagttctggaaaaggtraatgcttgtatatatttttgcagscytggagtctyccaactccactttttcctttaatttaattgatcacatgkatatgtcttccctgctgtgttagaaaaacgggggctggatatyccaagaatcagagagkwtataagakwatgcacctaaacagcagrcataaatattaccaaatgctttcaaattttggtccaaaatgagtattttggaatagatttattgtgagtgtttaattagcgattttccttaaatytggastaagttgcttttaagacctttttctctgtaagcatcataaatgctaatcaacctgttaagttttttttttcttactgcatgttacattgaaataaaaacagagtwaaatgagaaaaaaaaaaaaaaa

SEQ ID NO: 4134 - DNA, 600 bp, Rattus norvegicus
  misc_feature (256)..(256): n is a, c, g, or t
  misc_feature (311)..(311): n is a, c, g, or t
  misc_feature (365)..(370): n is a, c, g, or t
  misc_feature (442)..(442): n is a, c, g, or t
  misc_feature (450)..(450): n is a, c, g, or t
  misc_feature (500)..(500): n is a, c, g, or t
  misc_feature (545)..(545): n is a, c, g, or t
tttccccaagaccasctggccacactcaccgggaggatccaggaggctgscactgaagtcgtgaagsccaaggctggagcaggctctgccactctgtccatggcttayscysragsyygctwtsbchhmkvccwgstggmcvcmmtsamygggaaggaaggagtcatcgagtgctcttttgtycagyccaaagagacaragtscmyttatttykbhacassvhtgmtgttgggraaaaaaggmvtggagaagaasnwaggyaytrrsaaaatyastyyttttgaggagaaaatgattrcmkagvcmatycntgaghtgaaascmyscwtcaagaaaggygakgactttgtgaagaacatgaagtnnnnnnatgtcattgaactacttgagagtctaatttgcttgttsyskrwvktrttcagcatcatgtcatysaaytwcnwgagagtntaawdkgcytgttgrakrrtgwyrwkwmarcatcwgcatcyctksyddanwahrrrhwrwwrawaatgmcaataaaacwgkhtgattttbhwwwnhhrrrwmaramammarraaaaaaaaaaaaaaaaaaaaaaaaaaaaaaaaarraaa

SEQ ID NO: 4135 - DNA, 808 bp, Rattus norvegicus
  misc_feature (770)..(770): n is a, c, g, or t
tgtttttttttttttttttttttccaggtattccattatggatactggttttgttaattataatttttctctctctctctctctctctctctctctctctctctctctctctctytytytytytctytyttagaatgyassagkaatcgccattactgaaatgartgattttytttttttttgaaatataatcattgatgmttgaatgakaragttttagkactgtaaacgggctttagwcattaatgtgagagayttagatggggaytgcctagagtggactatcaagtgagcykaaaggaacywygwrgkmahwggtaatytkwyttttttttkkktktcmtactwaactacasataactcagaacttgtattytgagtttaacagtcttttagattgacgagcaacttggatgtytgcavtaagacyttgtttraaacactaaggggcgaggkaggtttcaacagtgcacatgtaactaatttmytyrwrcygwatgctaaagacaccagtttytycaaatgacttttyttaaaaawramcaaaaacaaaactcatcacrgatgattgaaatgtcsagttatcatgtgtttccctcttgygcgtcagctacagaaaagagtttttgtacaatgagaaactaatgtgtttgacatkcmacgttaaactgctgtcgtgttcggcttmgtagcatgtaatgtagacctagcccatccartcatgtgctcggragagtgttctttatccaayaaagttttaatttmgtmyntwwwaaaaawammwmrwraaaammmwrtkccgcaagcg

SEQ ID NO: 4136 - DNA, 585 bp, Rattus norvegicus
  misc_feature (44)..(44): n is a, c, g, or t
ccattctgrtgkysrwgamtkhrgmahgarrwgmaarwmracsnbkdkgatwmgsmasgtakrgattttacatyyttgtcsktgctcccaatgaaatggataamcaaaaataaaatctgacaatgccgtctsttcacggaatgttgttgtgttagccggactgaaagcccacyttaatttttatataacgtctttagctcttccwttgacaggrcagsccttgttytgaactgtttgcgcttytkaskgttaracaccaatgacgcawgcmctgtcccymtcattctmtykkgcttcccytctggcmtgagttthttgtgmatcctccstacccccacctytgttagggtagatatatcagctatgtaaataragcaaggaaacggtattgkgcatttgtggcatttacgtaragttkcagttgtacgmtgctgaaaacgcaggcttttgtaacatgtggtcctyccataagtacccaatgtattttagctattttagtsgtatttgttcaataaatatrcaagctwtarrrwwraamawaaraarmwrrwgtgtgaagcacaagcatattgctctaatagtttg

SEQ ID NO: 4137 - DNA, 533 bp, Rattus norvegicus
aatgaatgtgataaagtttttcagaccatggtaacattcggaggcatactgargacaarcsgyacrarkgtarkgamtgtgrtraagccwttwywcracmcartagactccwgatwcawrawagrgttcatastggagagaaagcstacawatgtaatgaatgtgataamrcyttttcacaacccagtagactscagrtacayagaagaattcatacaggagcaaaacccgtcaaayktartgaatgtgttaaacccttttcacaacaaaatagtctctagacacatagagttcmtaccararagaaaccctacaammktaarcaatgtgrtaaagcctttcacaacacagtaatctscaaatacattwaagaacaymcasaggagrgatacyctccaaatktaaccaatgtgacaaagycttttcccaacataataktctccaaatacatagaaaaatacatactrdagagaaaccctacaarttaawmakwgtrataaaagyttyccaatccmcawwmaaaaaaaaaaaaa

SEQ ID NO: 4138 - DNA, 600 bp, Rattus norvegicus
atcatagcttaagctgttttaaaacaaagsccttagrctaattttcagtttcmwttctkkmamkargctratggswkgbgyaaagsttttttattaaaagaaaaattttaaaaawmwwrwammwarmamarwawwgttatagagtttccatgtaacattttctatggtagtttaagtctgtcggtttcttacttgtgaagagattaacagttggctytggcccttgactgtaccatccytgcgccgctcaagtcaccctgccgtcsgtccgtccgtccgtccgtccttccgtcygcagacacaccggtwtcagttcttmtgtcatttgacattcaggctcgcatgaactcsccaggtagstctgatacctggtgkttgtttccttthtcattctttttccttttctcccttttttctctttttcttttttagttgacatttaarrrrgaaagtwccmgtgttcagakktgarctataatagtttgtatattcaacatttkaagtatattytawtttgttgdactcttgtttcaragtgtattcaagtaggttttgaaatatagaagtgaaatttmaaaaaaaaaaaaaaaaaaaaccttt

SEQ ID NO: 4139 - DNA, 536 bp, Rattus norvegicus
  misc_feature (81)..(81): n is a, c, g, or t
aattcggcacgagggccatgagcaaagcccaccctcccgaactgaaaaagtgagtagagtcggcwcgakcswgvcwmgmvnkcgbbhsbkmrscckckcactsyktssmygdksdssdrwsvwsabtsvmsartcsccatgwscaaagccsrmmstsscgaamtgwraaagtttwtggacaagaagttwtcattgaagttaaatggcggcaggcatktacaaggaatactgcggggctttgacccctttwtgaacctcgtgattgatgagtktktggagatggcgaccmgtgggcaacmgaacaacatcgggatggtggtcatccgrggaaacmgcatcatcatgttwgaagccttggaaagrgtytaaccmgtsttsascmgtgtgtccacatccctccccaaagcgtgcttgattgtgatgtwgaactwggtcatgtacattttcatwtgaaactttttgctaaataaacytttgtgmthtcmvaaaaaaaaaaaaaaaaaaaaaaaaaaaaaaaaaaaaaaaaaaaaaaaaaa

SEQ ID NO: 4140 - DNA, 512 bp, Rattus norvegicus
  misc_feature (26)..(26): n is a, c, g, or t
  misc_feature (60)..(60): n is a, c, g, or t
  misc_feature (71)..(71): n is a, c, g, or t
  misc_feature (86)..(86): n is a, c, g, or t
  misc_feature (485)..(485): n is a, c, g, or t
  misc_feature (493)..(493): n is a, c, g, or t
cattagggaagattatgaagtagctntaaaatcttaagcctggcgtgtggaawkmrhdsnrydmgsvvmsnddgtkcktgmggmsndsgdbwysasrggcaatttgaamgaaaacccarmrgcmrcttccctgacarrdgatsccggtratcaacatcgaggacckracagaaaakgmcwagttgaagatggaggtggaccagctcamkaaggaagtgmccctggaaagagtgwtggtttccaaatkttrtgaasaagtaagagmttatattgaagaaagwtctrgrgaagaccctctastgaaggggattccagaggacaaaaatcccttcmaggagctcaagggaggstgtgtgatttcctaggcaggggtgcagatttcttagamtwgttagaattttartgatamtscaaactgttmtataaaattaaacttgtmyaygttgtttraattgataaacttcaagwtttaataaaadtgavgntgcmhwmnwwaaaaaaaaaaaaaaaaa

SEQ ID NO: 4141 - DNA, 457 bp, Rattus norvegicus
aagagaatgaagaggtttgggatygrswcsagragaaccagtgaccccacygcrmcagtcatgtgrtgtccctcgtgtccccatcaccarcctgaggtccttgatcwytgtatcttcsatrtttggaagaaagaaatcttctccagatttktcggaggccccactgatgytgttctcttcctcatcctgtcaagcccggtsccgacytgagatgkccacctmcatgscaggtcacatgaccggggccaccgccactcccctttacgrgatgaactcagacagaacaaagcaatatttwtggrwrcaacattgtgtggtcaaccytcaggggaaaagctgttaacctaaagtattttttmtaaatgtaagccwtktatattggccatgtctttatatktgtatcaatgytttmttatttmtawtaaatagttstwtaactcaaaaaaaaaaaaaaaaa

SEQ ID NO: 4142 - DNA, 471 bp, Rattus norvegicus
atctcaatgatgagaacagcaatcagagtttccattccgaaggttcmctgcaaaagggcmcggagcccagccctggggggacgccccagcccagtcgccctggatcaccaaytggacctccagaggtgattacagaaratactcagcccccmcaaytggsccaararararatccagggggcacmcstgcaggaggtaytgatgaacccccaaagytgaccaaggaggagcstgttccaraattgytaraarccgaggcccctgaagcttaccctgtytttgagccagtgccmcctgtccytgaggcagcccagggtgacmcaraggactsggagggsgcccccccmytcaagsgcatytgtccaaatgcccctgacccstraraarckgcctgcctcmtgtcctgttgctccaggggcccctttggctttttataaawaaagmcccttttrtwaamaaaaaaaaaaaaaa

SEQ ID NO: 4143 - DNA, 600 bp, Rattus norvegicus
ytgcacatgamskgtcgatatggtgctaaacgtktctgtggaccytgctytcsgtctccaggcagttctacsgtatacktggmccaytgtgtaatagytagccactgctgktgtttatgtgaacattcctatgaattcacattccctstggrattccatgctatgcytgtgccaggcaaaccccgtgtctagaacatmggcwyrasctcacagstactctgtacawttstgcttggktcattcctctgtagttgcatgscttagatggagaaaymwaagtywaamswwhtcatgrccccagtttcctggattagacyttgatgcaattttcttmtaagtcctctgacaaatgatctaattaaaagaaatcagrcccctttcctgtgcacgtcgytgggacaaatgcctccmttaaagaattcaaggaaagtcataatggagaatctttttggtggtcctctaaggcggattatttttcaatgctgttgtcttggagcttggaggtgggattcaatgtttaaaatttttaggaaatttatacaaagaaacttttaaataaagtatattgaatgtgwmawrarwaaaaaaaaaaaaaaaaaa

SEQ ID NO: 4144 - DNA, 600 bp, Rattus norvegicus
tcatttacgagatacctcggagccaggtggaccccacatcggccaacttcttgatctggcccccatgtgtggaggtgaagcgctgcactggctgctgtaacaccagcagcgtcaagtgccagccctcaagggtccaccaccgcagtgtcaaggtggccmaagtggagtatgtcaggaagaagccaaaattgaaagaggtccaggtgaggttagaggagcacctggagtgcgcatgcgcgacctccaacctgaacccagaccatcgggaggaggagacgggaaggcgtagggaatcaggtaaaaagcggaaaagaaaaaggttaaaacccacctaaggcggcccgaccagatgtgaggtgagatgagctggctgccctctcccgggacacggatgtacgtggcgtgtgacattcctgaacatactatgtatggtgcttcattgccaatgtgcgtgcagtctttgttctcctccgtgaaaaactgtgtccgaggacaaagagacagtgtccgtttgttcagtgtgacatcaaagcaagtactgtagcactcggagagacagtgagaaagcttccttgtcacagagagcgaaaacaaaacccc

SEQ ID NO: 4145 - DNA, 600 bp, Rattus norvegicus
ttcactgagggtgaagatggtytgaccccaaacytcctacatccgagggggtcatagaccactgtgtggatcytgcagtctggagtcctgtagcaccaggacaytaaattgcttcccaaaggctgtcatagtkwkscagagtagccttataatttaggcagbtgccagacacttggaaragtggctmgctactaccatagrcygtgtttgctggtattaaaattcttcaaaattgaaacttccatttgaaattgtgttttgcttgacttaagtttgagagacagttytaaaaytgatgtaragaytcattcaacarcaatgaccttttacaaacttacattaagtaaaactgccrgtrgrttaaatcatccccmtacggaagaactttctstacttastactgtggaatttgagcattgttgrgrggctrcaattggtsgacatgktkttaagtgtgcttttcktaaatgcttgtgtaagktttgtaattcagtatagaaaaggttgaccttgtaatgtacatttttgtatgtatagtcttttaagtagccttgtccttatttaaataaactgrrtwaaactwaaaaaaaaaaaaaaaaa

SEQ ID NO: 4146 - DNA, 600 bp, Rattus norvegicus
catacgttttctaacctgmamrdkgaaacaaatcatacttgktctgtaractgtgtctctcttacctkktgamktymggatyayswkktaaatatgtcagaaasacamaattacttktkktgcatgtcatgggttactgktcctgkatttgcagtggkgwaaaagctwattaaagktcytcwtttgswwtgvcmcvsaamaawrrmawmawwwrrwwwwrwytgaaattgygrymscargtaactctaaatttrtccsttgcatttgcaacaaaagtmwtgkgtttcagtgttctcacctbtrgaaaaactagttttcactwgaaatgctcatcakaacaccaaamwwcttctttaataggaataaggtgtataattgtctgctgtagagaaaagattgacttaagagaggaaaacaagtgtggaaaaaaaaccacagagaaacagtggttaaaaaatgaatccaaagtgtacaggtgaacatgttcaaatcacctttkagaaaaagaaactgtcaaaatggtaaaartaataaaamtaahtwaaaaadwwaaawwwaarrwmwraawrwrmwwacacatcttaaaaaaaaaaaaaaaaa

SEQ ID NO: 4147 - DNA, 508 bp, Rattus norvegicus
attgggaagaggctttataatsgatamcaggrrgggtttttaatatccagactmataaagctgtcagttgaggggtttgcagttgataaaatggctggagaagttaaggctttcttygagagtcacccagctccttcagcsgaasgtaccawccagcagtgttgtgmgaatatcytgctgaacgctgmttggctaaagcgggatgctgacagcattcaccaatacctcbtgcagcggaaagcctcccctccctcggtgtgaagcctytgcaccayggtcggtyttaccgcctsgcagggatgaggcggagctacccaacagytgattcacatgccaagaatttggagtyttagaccagtgggggktggacaatgaatgtagttaamtggttcctgctcacactcywgaattaaattytwttgraaaaaarraaaawmmvhmrtkcagcaaaaaaaaataaaataaaataaaaatgtaaatatgatagtaataaactagagcattccgg

SEQ ID NO: 4148 - DNA, 600 bp, Rattus norvegicus
  misc_feature (323)..(348): n is a, c, g, or t
aggttaagtgttggttcagtttctagtagacctagtactcccmcactaggcacaccaactccacaarccatgtytgtgtcaactaaagtaggcamtccaatgtccctcacagggcasaggtttwcagtrcaratgcctkcytstcagtcycctgctgtaaaagctyccattcmtgcaacmccagcagttcagaatgttcttattaatccatcattaattgggtccmaaaacattcttattacyastaawatggtgtcacawaatmcagccaatgagtcggcaracgcactcaaaaraaaacgtgaagaagaagatgatgaagnnnnnnnnnnnnnnnnnnnnnnnnnnaatttgtaatstagccttgtcgcmtgwaactgtattcttggtcktgrayccabtgtactgaaattgaaaaagcawgttarytgtwttaaagctgtactttrraaaktggtakttaatacgkacacttayhahmctyytgsaytgaaatgttcagttttacwagaactagtaatggtttttcatmgmcctttatgcataaaaaataaaattgtcatttatcagwwwrrwwmwwrrwaaaaaaaaaaaaaaaaa

SEQ ID NO: 4149 - DNA, 600 bp, Rattus norvegicus
caccttcagaaaaggcctatgaraagccvcytgagaagaaggagggrgaggaagrggargrgaacmcmgawgdvccvcctcmrggrgargmwgamgaaagcmtggrgactcmggrktgmccttccccaagggaaratgagsctrrsccmsccmccayggggcttyagatggyggcatttctgtggywtagggrgrywgcmggaaggraaacwrrctkwaaaraaaawrwmmwwmwagtgttttgatagtggccaagcagctagaaatctcccatttgtgactgcatatsccahccgtccmtytgtawtgaarcmgatkccacacmttcccmatatttwaacctaaccmctcccaaccmgtaccttttgttgaaatkttgtaaactkttsttgagtgtmtggggattttttttttttttttytargaaaaatgrttaaagtacttcctactdgrrmwwwwrrwwwwrwwwwwmwtcagtatgtagcaaccacctctgccttctatatacttcattagaattcaagttgagtcctttattataaacattgagattgctgtttcaaattatataaattaaaagtaatggactcctggaataac

SEQ ID NO: 4150 - DNA, 600 bp, Rattus norvegicus
ttgagggggcagggagskctctgtggctcmaaggtakgmasgagtccacatacgttcccttamyyyggsamkmkggcggcacagcctythgcmtgtacaagacactcracagggckscagtgtcccagctttcctttcctrgggttagttmtggrraggtggagttytstgmtgamcckgtytggaatwtctgsctctagctgaggtaggagtaytttttagttgagggaagtcaccccaagccccasctcccactttwmggggcahgthtggratgbccatgbtcagtatccyttccaramaggthtttgcytyymcagtgccccctytgtggmtcbtagggctgaacacattctttsgtaaytstcccccagtctcccctccchtgaggdccaggaagaattggggcacdccaaggaagggcaagtgggcagccccattttggkgacgtgaacgttktaataatttbtgctgaattccttkacaactaaataacmyagatattgttrtaaataarattgtaaraaarraaaaaaaavrhwwarrhrdaawaaraaaaaaaaaaaaaaaaaaaataaaaataaagtgagcgcccgcaag

SEQ ID NO: 4151 - DNA, 600 bp, Rattus norvegicus
cttaaattggtcaggtatctagaactttaactatacagktaaccccttagcaaggragaggtggtwtaawacatctctagaaggaaaaagaattcagtttsccctcttcgaktgatagmgcaktcattstgattgcttcatggtgtgaaatgaggacgttagacttcatctttcacagattrtgamgacgtgaaatgaagtascagctctgwgacactgtgacagacatgtgtkttatgggagtgkgattytatgtaagaaaataacycwtgggaatgawcagckwtgwgacatytvttcccaaaaacthtattttacttcatatgacaywytaartactgaaaaattctatcgtgtaacttwtstgvcyttgggactgtgtggytggykttttggttggktgargtwttagggattgaayccaaggcckcytgcatttgagaaaggggaattaatgggagaaggaaagtggtaagaagataacgggtgaatmtgctcagaatacatwatacatgtatgagaatgtcagtgaaacctattattgtgtatamttamtatwtabtaataaaamcatktaaaaataaaaaaaaaaaaaaaaaa

SEQ ID NO: 4152 - DNA, 600 bp, Rattus norvegicus
gaccacagtggtgtccggytcggagaatatgaggacgtgtccaaagtggagaaatacgagatctcaccagaagcttackmmckgmsacagaacwcasttcgatccttcatgaagcgcagcargttaggcccgtacaatgaagaactccgggcccagcargaggcagaggctgcccakcktytcagtgaggaggaggcccaagccagtgccwtytytgtggggavccgwtgtkmggtkcgggcacccggccagtcccttbgsaggggcactgtcwtktwtgtaggactcacagatttyaagccaggctactgggttggtgtccgatatgatgasccwttakgaaaaaacgatggcmgtgtgaatgggaaacgctactwtgaatgccaggccaagtacggygcctttgtgaasccagcggctgtcacggtgggagatttcccaraggaagattacggattggacgagatgtgacactgatggacatgwgaccctatcccttccggccccatccctgacacagccccthtgaatgccagtggcacctttcctytgagatttgtgcattmaattaagcmgatcgrraaaaaaaaaaaaaaaaaa

SEQ ID NO: 4153 - DNA, 600 bp, Rattus norvegicus
  misc_feature (292)..(292): n is a, c, g, or t
  misc_feature (453)..(467): n is a, c, g, or t
gtgctgtgattabggagcctmtggggccacacargaatcysacactggrcaakgwgcargytcvaracacktwwwtgtcctcarscattcadcaccatccggrsaagmtcttcawmdwtaatgcawccrttgctgtcctcatgcccckccacwavcawctcgayttcwtcstykgkcawcktcyccccmwdwrysmcwabgmcatgacggwtttmavcacccatgacagtgccattcccytctktgycraayacacsahggccttcaammwmrtcctcgkargttccttgrnccttgttcttggycacagtctgcagcatgggcargmmgtgcycawagtcsagcaccttcacattcatctcatcrmkcwkggggttccycargaccttgagcacctcggcrttggtarggttctggcccarggcccgcatcacatccccacactggstgtannnnnnnnnnnnnnngcctgttcggycwmryrsctggaaagcctccttgaattctrmggtstrgycmtcgstkaagtcacacmycytggctrcwgmrctrtgcgsswcbtgccgrcaktaatggctccgactcgggacykcgtgsccg

SEQ ID NO: 4154 - DNA, 576 bp, Rattus norvegicus
  misc_feature (24)..(24): n is a, c, g, or t
  misc_feature (32)..(32): n is a, c, g, or t
  misc_feature (65)..(65): n is a, c, g, or t
  misc_feature (70)..(71): n is a, c, g, or t
  misc_feature (81)..(81): n is a, c, g, or t
  misc_feature (228)..(228): n is a, c, g, or t
  misc_feature (278)..(278): n is a, c, g, or t
tgggaccggggctccccttggggntttttgtnaagarrmmgcatwkwktwwtthkkbbkythwhndydknnhbdkhhhydnkcrrkggaagggshmtttatttggtcccggggtcacaggccargtwtggsycadctswatttgaccttcttcttggggcrcavgwwgttggwgtgsbsrmacttyhtctwscgrharttkwcwgcacsgggktgcadgcstscgtancacttgcgrmavatcwtcwtgwcamadttgtacwtytggscaagctgrcnaarggacsgctykatbatgccwccgcraaracscarcwcmarktrcaagswgvacwctttctgrawgttgtavtcgsacagggtgyggbcatcctycwvstgyykgccagcaaagatcaryctctgcyggtcmvdsgkrmygccttccktghcytggatcytsgbsyygacattctcratggbgtcactgggctygamchyaasartkatsstyktkcccgycwsggycttcrcrmaratytgcaystbrgsbkcygymsmtcssycgmmyyksbtgmmgwrmmwsrkgmcagcggaa

SEQ ID NO: 4155 - DNA, 504 bp, Rattus norvegicus
gctcacgtaccttcatcacattcagtgatgatgcmacgtttgaagaatggttcccccaagggcgwccaccaaaggtccstgttcggraggtstgcccagtgacccacsgtccagctttgtmccgggaccctgttacrracatmccctatgccactgytagagcyttcaagatcatccgtgaggcgtmcaagawgtacatcaytgcccacggabtaccacccactgchtcagcghtgggccccgggcccccaccccccgarccactccctggcgstgggccccgagccttgcgtcagaagattgtcatcaaatagaggcacctgacccctacmtaaagtccctstcytgacctggctccactytgcccctcccttcccatctctgtccttgttgacctttgccatggyttttcctcaggtcctccstagtcatktgtttgcttgtgctcttcggttttttktmatctaataaagtggtagaawtgtwaaaaaaaaaaaaaaaaaa

SEQ ID NO: 4156 - DNA, 600 bp, Rattus norvegicus
gccagcagtggagatcaaacaggagaatgatgacactttctacatcaaaacctccaccactgttcgaaccacggagattaacttcargmwcgrggaggaatttgargagcagactgtggatgggagaccytgtaagagtttggtgaaatgggagagtgaaaacawaatggtgtgcgaacagaggcttctgaaggkgkagggccccrrmwymkscwsgagscgagaactgaccaatgatggagagytaatcctgaccatgrcassagrcgacgttgtatgcaccaggktcwacrtccgagagtgagtgcctatgkccaagaacttmttbtggagkccacaaacctccctcccatgtccattttacaaactagctctccccttastcytgagggtcactctmtatgccagagaggggcagmctaccaaagctcagaacccttccatttgcctgstcagaagtcccagctccataccaggatccttcytggaagagactgtctctytggcctstmctctttwtccttgtagtccaagtgatttagaatayytattggtwaattttattaaaatgttktaaratgkaaaaaaaaaaaaaaaaaa

SEQ ID NO: 4157 - DNA, 600 bp, Rattus norvegicus
gtscagcccctgttccgccytgagcaccaatgagagacaagcactgscttgtggaccakaaattgttattaaacttacacgtatttgcttcctatagcaagacatgggcttatggscaagtttttctcataacatttatgagaaaacattttttccccataacatttaattagggckgmackwrstcataattaaggtgcgaaggtgaaaagmmttggmsygaaakgtwytktttktttgcacaggatkctgtgaatgggtscacacmccaaagtataacttgtaatgtttcagaaaatagcgctgttattagcatatttgracaaatatttwcmattwtaaaaaagcmccmaaatakawaaaaarraarwaaaaawytggagaatgagagctgagaatgggctgcggtttaaagggctgtacttagaaagcatcttttaaagactstaaaggctwtgttcattcccaagagtytatgttgattcatttaacgtgmccgacgacttatatckatagwtgtgaatattttcattggttgtctctgtaakcaaaaaaaggtattttaataraamatagaawtgvmamaaaaammwmrwrmmr

SEQ ID NO: 4158 - DNA, 600 bp, Rattus norvegicus
yctggcatggmttaacmcacccaagaamcaaggaggattgkgacccatkaacaykmssttggtatcagatcccaagcgcrccattghtcaggattmtggagtcttaaawgctgatkaadgtatytcyttyargggcctstttawtattgatgatwaaggkatscttcgccagatamcawtaaatgrtcttyctkdkgvccgyyctgtggrtgagatthtrrgamtagkhmaggcyytymagttyahwgvmaaamatggtgaagtgtgcccagctggbtggaaacctggcagtgataccatcaagcmtgatgtcmatargrgtaaagrgtatytytstaagcagaagtgagcaytggwmcagttttytggcakacagctttgrgcagccmgamgaaatttgtactbtacacatsacgtkgtgtgattscagawwagcctttcctacaagggctaggggtggttagcctttcttccactattggtaaggrgcagaccatyttatatcmgtcacagaaaccaacckgtwaattctctctytctyhytttttttyyyytaagtatytattaaacgtsmmtkctgtgaaaaaaaaaaaaaaaaaa

SEQ ID NO: 4159 - DNA, 1400 bp, Rattus norvegicus
ccagccccttctgcagctcatgctggacgtagaggaagacagactggcctctgaaggccgagggcctgtggttgtccactgcagtgcagggattgggagaaccggatgtttcatcgctacatccattggctgtcaacagttgaaagaagaaggagtcgtagatgcactaagtatcgtctgccagcttcgtgtagacaggggtggaatggtccaaaccagtgagcagtatgaatttgtgcaccacgctctgtgcctgttcgagagcagactttcgccagaaacggtccagtgactctgaagatctaccagagcgtcaatctatcacgggtgattcgtcaagttacctactgagggctccgagaaggagctccccacgatggatgaggaggctctaaagccagcctgaggcgtggattgtggaagctatggtaacttgaaagattgccacctttgtgtataggactgtgttctaggcatccccctagttactccgaaggacctgtgctgatggaggtgtgacagtcctcatgcagcctgaggaggattctgttttgtctgtgtcgactctcacacagaacctgtatgtgtaatattcagagtctgtgcttatggtgactggaggagctgcggaagatatcgttatcctgtgttagatgctttaatgttcacaaagcctgtcttgtgactggactgtcagctgttcaactgttcctgtattaagtgctattacctatctcagttaccagagtcttgctgctaaagttgcaagtgaccgacaatggatttttaaccatgacgttttttgtttttgaaaaaaaaaaawmaaargcagtaactattttatatggagatgtgtcttgattatctctaataagtgtgtatttatagtatctcctatggatcaattacagagcacaatgattgtcactggatatatatgtatatgtacattacaggtatatgtasgcatatatattctattattaagcatagaggtagctcstgttttacaactctaastactatatttctacattgtgacttgttttactttaaaaggggataaacaaatttatagtaactataaagtatcaataattttaaatactcatctctcttttactaagaagggatttttgaatatagtgtctacttggtttctctctcccagtaagaagcaggtgcctttggggatgctccaacctgtttcatccccraaagtttttctgaggacaccgtcatgcacgcatgaccttaaatttctaaaaggttttcttcctcaagagaccaatgaaggcaagataaccgcactcagcaaacatgagatgttctgytcagatgtgaattttcaatgcagcaaagttgactttcgtactcccaataaatgactcttaacagcc

SEQ ID NO: 4160 - DNA, 600 bp, Rattus norvegicus
gtcccttatccaatcagttgaaacttggaaacaagtgttaaatccatgttgcttttattagggaaataattcaccatacactatacacccagaacawttttttttctttttctttttttcggagctggggaccgaacccagaacatyttctttttttaaataaaaacaaycyaatygcyggccacacccatcagggaagatactggaatatgtgatctgtttctccagtatcttcagtctggacaatgactgccatctgttggtaacttacagaaagtttagtgttytgccytcagtgacagcaccacagtttcccttactcctgtcagctaatggcttcctcccctggattctcagaccagtgtggccttcccagtgttagtcattcctcactgtgctcatgttttgtgggtgcacggcctttgagctttgggagaaaagaagatgaggctgtgacactggtggccctgtgtttgagataataattattgcttgtctctgaatttgatgaaaactgaartacattctaaagaaagtatgtcttctattgtgttcccaaaccaagaacttgtyaataaattcatataaattgtggaattc

SEQ ID NO: 4161 - DNA, 600 bp, Rattus norvegicus
  misc_feature (520)..(520): n is a, c, g, or t
  misc_feature (564)..(564): n is a, c, g, or t
ggctgtatcttcgcagagaygkywcgmsrsrarsctctyttctgtgggaactctgaggctgaccagctgggcaaaatmtttgatctcattggattgcctccaraagacgactggcctcgaraggtctctmttcctcraggagccttttcccccagaggacctcgsccagtgcagtcagtggtgccggagatggaggaatctggagcgcagttgctgctggaaatsctgaccyytaatccacttaagcgaatytmtgccttccgagcchtgcagmamtbtwacytgcmcaaggrggaaagtbacccggaktkaggaragggrhtbccttttccagtttccvgamgbtgtgtggaaagawccttgbtgaagtsgcagccthtgccttcccctraggvtatggagartcctcmggtttagcswwaamtgacaattccctacctctccttatgaggtttaccccacccccacccycstgtttbthtacactaaagggcaggcwwtawmwrwmwwmwwmmmwmmnwrawttataktgggatcttttttrtacaggaaaacraaacadrnmawvraaddawrrwmwwwaaaaaaaaaaaaaaaaaa

SEQ ID NO: 4162 - DNA, 384 bp, Rattus norvegicus; identical to SEQ ID NO: 66

SEQ ID NO: 4163 - DNA, 600 bp, Rattus norvegicus
ccaaaccagctgagcagccccagcctgggtttcgacgggctgccggggcggagacgcaagaagaggaccagcatcgagacgaatgtccgcttcgccttagagaagagtttcctagcgaaccagaagcctacctcagaggagatcctgctgatygcagagcagctgcacatggaaaaggaagtgatccgcgtctggttctgcaaccggcgccagaaggagaaacgcatcaacccttgcagtgcggcccccatgctgcccagcccgggaaagccgaccagttacagcccgcacctggtcacaccccaagggggcgcaggaaccttaccattgtcccaagcttctagcagtctgagcacaacagttactaccttatcctcagctgtggggacactccaccccagccggacagcaggagggggtggcggtgggggcggagccgcgccccccctcaattccatcccctctgtcactcccccacccccggccaccaccaacagcacaaacccgagccctcaaggcagccactcggctatcggcttgacgggcctgaaccccagcgcaggccctggcctctggtggaaccctgccccttaccagcca

SEQ ID NO: 4164 - DNA, 600 bp, Rattus norvegicus
tgggggacgcgccaacgagagggccttgcctctgccccagtcctcgacmygmkgatcctcgacccsgaagcacgtgcaracagtaacgtgtgtgtgtgtgtgcgtgcgtgcgtgtgtgctcactcggtgggcggaggggggagcagsttgtaacaatctattcacaagcctcctgtatctcrrtggatcttcakaactgcccttgctgcccacgggagtcggyttytctgcagtaaacacacttgggaccttccttttttcaatatgcaagcagctttttttatttccctacccaaacccttaactgacatggsyctctgcaaaccttaatgacagctcttaatmgcaacaggacactcsakaattgagtctcctcattmtytgccttttctmtmtthtgccttccctctctctcctctcccttcccacttccaggctytcctctcttttctccgcttcccagtggaaagcccagcggggaagcctttatttattttttttttaaatcaaaytgacttaatggctgccctggggctcctcatcacacctgcctgacmccatrggtctttmcaaaaaaraaarraaaaaaammaaaaaaaa

SEQ ID NO: 4165 - DNA, 600 bp, Rattus norvegicus
tgtcccytgaggaattcacagaaataatgaatcagagagagcaattttaccacaaggtgaacttctctccccctggtgacacaagcaacctcttcccaggcmcttggtaccttgwacgagtggatkagatgcmccgcakaamakrkgcccggsgtcycgtctaakgagrccamtccatwcaaccattcyccggkgaaaraatgtgagcagagccgytacccaaacggmttccmcttaaaattccacccacagcagtgaacggtgaatagmcmcagcgaccccatargatctgctyygcggtgaargscctccctctgtggatcctgggtgaccctccctgaagcagtgagcmccmcaggttytgctgtggmccakagcccycctgwggaragsgwgaaagamagksbagycgctswccyssavsgmtacrgaccttycccmcagbytsgsadycgsccghtwkykgcagcttattrtcmgmctstsskcymtcatarttcatgctcgkttcttawagtttmccgagaatktctaaaatwttgbatctaaacttttaatatggcgattwaamsgrvmsmasgraaaaaaaaaaaaaaaaaa

SEQ ID NO: 4166 - DNA, 600 bp, Rattus norvegicus
gaacgaaacttggaaaagttggaactattttttaactagctgtagaaataaaccgttcccccaagaaccttccgcctgtttccctaccgcttccccctgctctctttccagcccccgcgggatgcaaggatgctgggggaaccctggggagaaactctccaaatttggggtgaggtgggaaccatgtaaatatgtgagatatgtacacaatggcgggggggaagaaacactttgtgcttggtttttattttttggctttctgggttgttctccctccccaccctaaagggttttgtatgcccgactaaaccgaaaaagatattttaatatggtttcmtaatttctgacccatctctatttattttctggatgtgtttggagcttccccccttcaccatttcttcatctgtttcttaaggtttgagcgtaatttttttttwaattttttgttattctcagaaaaawrwwwwrrwmmattctctttgtatctttattgcaaaaaataataataatgtagactgggaagttccctttatatttatgttatagtaaatattttattactcacataaamawrwammmmarraaaaaaaaaaaaaa

SEQ ID NO: 4167 - DNA, 600 bp, Rattus norvegicus
ccatcccccctttctttccttttcttttctcttcttttcctttctttcttttttaaattctgttttctctgcttcccttcctttgggtttccagagtcgctgggagaagaagggtgggcttgggtggctggggccgggcagtggggctcattcccctggtgccgcaagtcccctcgtgaggagaaactcctgcctgggtctgcccaaggattgggcttggacctggccaaggcctgttgtgtgtgtcgctgccgggcaacgtgcattgctgggaagccgctggaggagcggggtggggggcggggggagggggaaaggcaaatgcagatatatattaaaaacaaataaccgaggtaccagagctgcgtctgtggcaccagctcgctgcaggcgcagaggatggtgggagtgaggctgtgtctgcggatggctggggtcacttctccgcccatgggctccctgctcccccagttttttttctctttgttaacaaatgtgtctgagtcttggaaaacaccccaaacccggaaatgtgtgggaaaaagaaaacaaaaactttccaaawwmmaaaaaaaaaaaaaaaaaaaaaaaaaggaattc

SEQ ID NO: 4168 - DNA, 600 bp, Rattus norvegicus
  misc_feature (47)..(52): n is a, c, g, or t
aaaatttgttgtggggtggggctgaggggaggcagctttcaaaagannnnnngttttcttcttccttgttggagaccctggtmmsmmcatggagagaatmacctgtttgttgatmttsggswcmkkcksaammyttytttwtaattcatgcgtatatgcagacaaaatatgttcttaattgttaacattgtatacaacatrgcccraatatattagaatctgtaytagmtaatcytagataaaaggttwgakatgytaggtgatgtwaccacagacaygccmgaggaaaggagcctgtgtbtgkaggvtggkccgctytcccygaggccaaggccatggtggtctggcaawacagggtgtkaggagactgtaytgcatcccacggggtggacatgcgctgtacagagctttcsttgagagcacaaaggaatcttgagacattytgcytgcctgtcagcttttctttatttttttaattaagtttttgggggaaaaaatgtatttwtgaaaagtttgtcttgcaatgwatttataaatagtaaataaagtttttwtayymkttrvraaaaaaaarawrmmawwmattaaaaaaaaaacttg

SEQ ID NO: 4169 - DNA, 600 bp, Rattus norvegicus
ctcccagcaagctgatctgagtaggatcacagggaccaagrayctgyatgtstctcargtggtccacaargctgtgctggatgtggmtgagacaggcacagmakswdsygstsyyacarvrgysrmdrcagychkvvdwmgyttacbryrmmctvkamcwcytctgaatttcaaccrgccaktcatgstgkttatcactgacawkratrgtcagtctrtcytctttrtkgscaaartcactaaccccadktragycydaagctccccaaratstgacarttctgcccaggmycytggraywgascytgsatgykratctctgtayatgycctgacatwcatgytctgattggctrttkcaaagttgkcttmgacagtgacatcractatctstatggcycccatgtgcaywggagcctttrgaytgtcagtgtcaggcwcttaggmcccttgggagcatctacmcatgtttctgaacytggaatctwtctttattctycttccctrgtgactcctctttctgtgttcataccccaaaccwagyyattgryaagtcmcagtmmaggyycyrakaacawmwrwwrmwwwrarmamawctgct

SEQ ID NO: 4170 - DNA, 600 bp, Rattus norvegicus
agtcctccwagtccctgagaccttttctctgatttttgawagctcatttatwtactgatagtttaragctgtatgtgagatatccagtacagggtgaawgtatgcgctctttgtttttwacattgttwtywgtatttgcaaaaccsaragggtcagtgtttggcctcarggaagccaataaagataaaatarggtggaarwwwrmaramwwwmagtaagtacccacctcccgccwcacacasyagrbttacaggggaamttmtatcatgcttasgattatttgacgcaktyttacctccacatyttaactttcamgaccctttcacttwcctgacatgtaraaaaatgggtttaatatatggataggaggaaagatggaccagattggaattacagtgggtttttttttttttaaacctgatgttttytgaatagaggcagaaaaaataagacatatgacwctgaattgkatcgatgcatttaaaawaccattgtaattgacagggtgaatacagatttacaaccttgtgtaagaagctgactttttccaaataaaacatttattttatttttaraaaaaaaaaaaaaaamaaactcgag

SEQ ID NO: 4171 - DNA, 600 bp, Rattus norvegicus
  misc_feature (252)..(252): n is a, c, g, or t
  misc_feature (298)..(298): n is a, c, g, or t
  misc_feature (371)..(371): n is a, c, g, or t
  misc_feature (385)..(385): n is a, c, g, or t
  misc_feature (404)..(404): n is a, c, g, or t
  misc_feature (551)..(587): n is a, c, g, or t
agtgtgaatmrrtcaytmctggracttcacaaahtggytwmtgacargratgatccccacttrtgtgamttcattgwgasgcmttamytgvwygrgsrgsygvaayychwtaaagaabtgggtgvycacgtgmscmacttacgsaagatgggagcccytkrawytggcatggcmgaawathtbtkkgacaagcacamcbtgdgacacsgkgwtgaraghtamgctgaygtbcycmagkccatgtgactttmntgktcmctgrggcagdgcatgcatgtbargctgbctttatctttyntataarktgcmycaaamcawbtgyttaaamgttcttymatytgtvccrtttcttymmwtamagaayytybgynsccvvrwrmavvvnhwdvwmrdvaahmavadwnwrvhrrmmdmrrrrrrrrmmrrwmmmatcggcctagaggtggtaaaaacgggggggataaagacggaggaacggggtccaaaagcgggaacctgccgggaaaaagagcaccaccaggcagggggggttaagcagactcgggcaaagnnnnnnnnnnnnnnnnnnnnnnnnnnnnnnnnnnnnngcggaaatgggaa

SEQ ID NO: 4172 - DNA, 600 bp, Rattus norvegicus
  misc_feature (373)..(373): n is a, c, g, or t
krctgtargsctkkgagcasyyrtgakgctggracacgammaccytgtggatgcacgctaagrccgkgtgtytkvgtgcacacycttgmccacagctccaraaktbgkcygwrracaaagttgkracccaattwaytytgwtaagggcaraaacggtwcacrwbscattwtttgkaaagkyamckgckgktygsytwcattwtttkkgckwywhwttwtwtttktwtttwwwwgkttwrggcamtctaagamcaawtgtaaaaktaaakatscrgymcarmcragttgyttggkgttmccgkytcyatgcggwtmaarcacaksggtaaacraaatcccakgkrttwaamtttwtttwtwaarwwwtttgbynkgktkkgkyttkgctkytgwrattyttkttctcttkttgawacwtgccwaacatgcatgtgctgtaaaaatagytaacagggaamtaacttgagatgacggctagctttgttttaatgtcttatgaaattttcatgaacaatccaagcataattgttaagaacacatgtattaaagttcatgtaagtkgaataaaagttttwtgawtgraaaaaaaaaaaaaaaaaa

SEQ ID NO: 4173 - DNA, 600 bp, Rattus norvegicus
  misc_feature (14)..(24): n is a, c, g, or t
cactaaagattttnnnnnnnnnnnttcataatcaaaggtcatgatgtgtatagacatgctttgtagtkaagtatagtagcaataatttctgcacatgatcmagagtttattgcagcatttctttccctgttctctcttttttaagggttagcattaacaaatgtcaaggaatagcaaagtcaacaargactttaggaggtggaattaagaacacacagayttgtgattctttggatgtgacacttattggatgttattctaaagtcttattgaacattgtcaaatttgtaagcttcatggggatggacataatgtttatataatgcccttcttatgtgttaccatagatgtgaaaccttatattgtctttgaaaatgttaaattgagaactctgttaacattttatggattggcacattatattactgcaagaaacatttgattttsagcmcagtgcaaaagttctttaaaatgcatatgtctttttttmtaattcaattttgtttaaagcacattttaaatgtagttttctcatttagtaaaagttgtctaattgawamraaaaaaaaaaaaaaaaaaaaaaaaaaaatggaagcggcc

SEQ ID NO: 4174 - DNA, 600 bp, Rattus norvegicus
tgascgaaatgcagaagctgracgcgcaggtcaagkagctggtactgaagtctscggtgsagscagagagsytggtggmtggcaagctcaaraaggacayatacatsgrgaatgaaaagctcagstcaggaaaacgccaggagctggtcmccaagatcgaccacatyctrgacgstctgtagctcttgtctccagagcaggcytgggtkgcmtacacttytggatggaataggtagagggaggaagttgtgattagcctaagacctcaagaaaaaagstkrggcccayccatggctgygkmavragsktgycsctyayttbtkwwtgrttstcktttttacaaaaacaaaaacctaaacaaaaatcstgyyyaaaaaacaaacttggttgtgttttgagcaaaagcattttsagtagktgawtgctgttttgttttgatacctgggwattttttctgtctgtaagccctgttwtatggscttmtgattcctaatgtytggttcttttgtgagcgtatgcatggtttwttaaaagtgtgtatgrccaaataaaaataaaggagggackgtgrmmvwwrdaaaraaaaaaaaaaaaaaaaaa

SEQ ID NO: 4175 - DNA, 600 bp, Rattus norvegicus
gatgcactggagcctgtccagtttgaagatggacagaagattgtggtgcaaggagaaccgggggatgagttcttcattattttagakggcacgbccgctgtgctgcagcgkcsgwsrgaaaacgaagagtttkttgaagtgggacgcctgggsccttstractattttggtgaaattgccctgmtgatgaatcgtcctcgggctgccmctgtggttgcgcktggccctttgaagtgcgttaagttggaccgmcctcggtttgaacgcgtccttggcccatgytcagatwtcctcaagsgaaacatccmgcmgtacaacagctttgtgtcactgtccgtytgrgadccscctcctgtgcctytcctccccmgthtwtgcttcmctcacgcagahtgctttytcctccctctytgcagcgccaagtggccmctggsttcacagcttyttgtytytgtwtahtaaaggttgctttwttgcmccmttttccmttggrgcgttactgaatgctcmctcmcaaataaatrgrgttgtwtggmmaaaaaaaaaaaaaaaaaammwmrwrmmraaaaaaaaaaaaaaaaaaaaaaaaaaaaaaaaaaa

SEQ ID NO: 4176 - DNA, 600 bp, Rattus norvegicus
aaatktgacrcagttrawwwmmaarwmmawwrraaaaatkytgaratgtggaaaggaaaacttarctttaaaacctgkgtgccattgkgagttacttgatcctgtaactcccaacscbttytytttataaatycaagcttggatwaargyackrggaacttytmkgstaaaaagtccctgacttascmctattwacataaggccataactttagtagcattgkggagcagggrcctgtymtrcywkgtttttytttaattcckgrbgmkscttwatcmccyctaatytmtaatgkgkctgkttgcaattkgggggtcmgactctattatamccttttyttttytgkggctgwacwtttgcctttttcmcaaatactgtaavccgtcctgmtgcttgcargactgtarggcctgggcagggcccctcagcagcaattygrccactgkgcacytcctgcasgtgccttycctgctgkgctcgccctgactcaagbtagtcmccmccttkktttaagkgccttttaattttgmcmgtgctkttaactgaagttatttwttaaaataaaaggcctaaamtvcmwwwaaaaaaaaaaaaaaaaaa

SEQ ID NO: 4177 - DNA, 600 bp, Rattus norvegicus
  misc_feature (248)..(248): n is a, c, g, or t
tgctgcatgggctaagratctgaagcaggaagactyccagctgctgtgccctgatggtaccargargcmygwrrcsgagttcgccacmtgccacbtggcccaagywccammscatgwtgwggwctyamgwmawkagaagscagcmckkkttrkywytgtsswgactscccagaaggakwtattttggaaasgtgacaaggactgcactggcaatttctgwytgtyccggtctwccaccaaggaccttntgkkcagagrwkwcvscamgwgtttgamtaaactwccagaaggtrccacatwtgaagagtacttrggagcagagtacttgcaagctgttggaaacwtamggaagtgttcaacctcacgactcstagamgcctgcactttccacamaagttaaaatccmagaggtgggtdccactgtggtggaggaggatgcccccgtgatccatgggcttctcmtgkccyccatgccctgagcggytggggctaactgtgwccgwmtkcactgctgtgtgttwccacakacacagagcacaaaataaaaartgwctsttsvmwwwhaaaaaaaarrmmaaaaaaaaataagtgtggctggcg

SEQ ID NO: 4178 - DNA, 600 bp, Rattus norvegicus
agtaccagtaggggtttataataaaggactgtaawactatttagrwagytgagttgtagtacatgatagatggtaggattgaggtaagttytttttttttktythtkytttgttttggwtwtggtttgtttygcttttcaaagttatgtgatatttcacatttaaatctttttttttacatttccaaaccttgtgsahsrrkktaaatgttacamccatgtaaactacttsccttattagatagattytcacctakwyttttttttyccaattcagaagaaaatatacactaaataaagcagcaataagatwtaatcawwmwawwrrararawatgcattgctctytsccagtggatdcwttctttgaaagttagaaaaccaggrgaagwagagaggmagagcaacggtgtagtgaaatgttgawtttttgtttttttaagaaaaggattaaaacatgaaatcctttcacttyggcagaaaaaaccattbkttttcttgacaaaattatttttacvtccgaggaaaaaaatytaggaaaataaatcaaagtgatgytgdadmaaraaaaaaaaaaammwmrwrmmraaaaaaaaaaaaaa

SEQ ID NO: 4179 - DNA, 600 bp, Rattus norvegicus
  misc_feature (548)..(548): n is a, c, g, or t
gatwacattysscatckwbbtgtctyttatmatgctcgtggaggtggcggkggccattgstggstwtkygtttagagaccaggtgaagtcaragtttwktaagagyttycagaagcagatgcagaattacyttwcagacaacaaracggccaccattttkgmywrwytgsakaaggrrmmyrarkkykgdsgagcctytaactmcacagrytgggrgsscwtccccggtwtgsccaaggmcmggbyccccrattcttbskgcatcaacmycactktggsctgtggaaaygayttcamggaatccmccmtccwwacccagggstgcgtggaaamtatmscggcatggctrrggaagaamgtactgytggtggctggarcasccctgggcattgcttytktgraggtcctgggcatwatcttcycctgctgtytsstdmwrrgtatscrragtgsctmcvaagyaatgtagggtgkgsgsgtgtytragctcgtctgtcwtttcatggagtggmctcyccaggttttcaattaaacggrttattttttcngmcctdraaaaaaaamaaraaaaaaattaaaaaaaawrraarmrrccgcaag

SEQ ID NO: 4180 - DNA, 600 bp, Rattus norvegicus
  misc_feature (432)..(432): n is a, c, g, or t
  misc_feature (535)..(535): n is a, c, g, or t
caacctksccaccattgytctttgwaacacrgattbyyccbtkcgmtatgtggmcatksmcatyccatgcamcaacargdragyymactcagtggkyctcatgtggtggatgctgsccardraagtacyccgcatgcgaggaaccatctcccgggrgcacccatggraggttakrmytsrkcwydavktmwacrgrgmcccagaggagattgrgaaggrgkagcmggykbccscwragaagbctgtgmccaaggaggwattycagggtgaatsgacggcaccagcgcctgagttcmmtkstgmtcabcctgaggwkvccgactggtctgagkgtgtgcaggtgccmtstgtgcccattcagcagttccccacaraagactggrgtgyacagccggccamtgaggamtggtcagcagctcccacagcacaggntactgagtggsktbgagccmccastgagtggtcmtgakswcctctgcaggtgcctgascgaaggraaaaaaggtkgaaggaaaataaagttccykmrhgcyrnmaaaaaaaawamrarawrraaaamamaaaaaaaaaaaaaaaaaaaaaaaaaaaaaaaaaaaaaaa

SEQ ID NO: 4181 - DNA, 600 bp, Rattus norvegicus
agctccaccctcctgagtggcaggccatctttggacscagcctttctgtgctcattcttcaggcaaytktcagycccttactatagctatttmtagatgcccttyaayattgtgaacaaatagaccgtctggtattwtaaarmmwrwrwrwrmrrvagcctgatcctctaarawwwawrrdrwawrctgctgtattwacagctcatcctytctccattgtgccstgacccatttytgkrtgccctccccctttatttmcaagtsacgtymtcattcwytmrmahrwrvwrmmwwwrhratgtgattattyaagytcayttatttcagccttgggwtaagctgagctattttgcytcmtgggcagatctttggcaatgytgaatattcacttggggagagaggaggagttwaaawtacagagacacmtaccctagctcctcacaataggaatgtggyttcagaaccctgacctmtgctcstagtaacctmttgttcgcgtgctmtaagcaccaagaaggcacccaaggcccagccagthtaagaaaatttagcaaatartaaataacccmtwctcgarwmawwraaaaaaaaaaaaaaaaa

SEQ ID NO: 4182 - DNA, 590 bp, Rattus norvegicus; identical to SEQ ID NO: 86
  misc_feature (33)..(33): n is a, c, g, or t
  misc_feature (37)..(37): n is a, c, g, or t
  misc_feature (453)..(453): n is a, c, g, or t

SEQ ID NO: 4183 - DNA, 600 bp, Rattus norvegicus
ctacctgtgtgggcatgaccacaacytgcagtatcttcaggatgagaacggtgtgggctatgtgctgagtggggccggcaacttcatggacccttcygtgcggcatcaacgaaaggtccccaacggmtacmtacgctttcactatggatctgaggactctytgggtggcttcacatacgtggagrtaggctccaaagaawtgrgcmtcasgtatstggaagcctctggaaaatcactcttcaagaccagcctccccaggcgacccagaccctgaagacytacaagggtcctgcttatcccctmatgggtctgagrgagggagcctctgcaagcytgatgggtgggccctgtgaggacctcacccaccrgcagctttttctbtgccctggtactctggcagagtgggaagggggaaccacagaggctyacatataggaaagaagtacactcacaccaaytggsccccacagscaggcttaccctgtggttttggggtagacctttyttgggagtggggcttthttttaaatcaagcatctcactgtcactsctgttcaataaaaacawtagttghcaaggmwraaaaaaaaaaaaaaaaaa

SEQ ID NO: 4184 - DNA, 600 bp, Rattus norvegicus
cctkgctcggktcttagaatttaggkttcatctcccaccagmcagccaattggaacattgtwggtscatgcaamcggtctttwcaggtscaamcccgkcccccgaaawtcagwksacsakgacggrbtsyyyarkckmgmctrrvvarbccgkcwttcctcccacttgggggactagattgaccttwgcccacaagcacagttgstacctggaaacccaggaacyrrskwccawtcrgtcscyagksgtagayytycgyamtytatagytsyrtcctytsksaatccaagtcccctaccccaaagaaattaacatattgttgcctgaatytggaaatcttcctmatytccctagccccggagtccagggcatgaaggtcggactyttatctrtgaatactgagcctygcccccttcytgaccaaamtggccggagaacagagcaggacctyttccagccctytgggaacctccttgaggtcccaggrggaaatctgcacggggtgggggagggccagtcttttcctgttttgtacatagatttatttttcagttccaaggaagataaatacrttttsttwmgaaaaaaaaaaaaaaaaaa

SEQ ID NO: 4185 - DNA, 600 bp, Rattus norvegicus
gagatcagaggaaaagaaaccactgaattcaaagagagagagcgcctttgatttcaaaggaatgcccccaagtgtctgccatcttccgctgaaagtattcccaacagttggaggacgcgtgcaccaacaaatgtttgactggatatgacattttaacattactataagcttgttattttttaagtttagcattgttaacattaaaatgactgaaaggatgtatatatatcgaaatgtcaaattaatytyataaaagcagttgttagtactctcacgacagtgtttttaaaggctaggctttaaaataaagcatgttatccagaatcagttaggatttttcgcttgcagcaaaggaatgtatatactaaatgccacactgtatgtttctaacatattattattataaaaaatgtgtgaatataagttttagagtagtttctctggtggatgccttgtttctgaaactgctacgtacaacctatcctgtgtataacatttcgtacgatattgttttacttttcagcaaatatgaaaaaatgtgttttatttcttgggagtaaaatataccgcatamaaawwrrraaaaaaaaaamwmraraa

SEQ ID NO: 4186 - DNA, 600 bp, Rattus norvegicus
agatgtctcaggcactsarakamrkaaaygtctcacaccatcatgrtcctgatraactcaatggctgcratgaattcwaytgctgyayccattagytcccagwaaataggagagaraktaattgcagttactaasaayatgactgttccagaaaarycttwmyccmsytttgrraaagttttgtttagcatgattcaraatagtaaygattyttttaraaagatcatagacaasttccaacaagttgaacaaacttawcaagagttaactatggttaywwwwgyttccttmytawtctgaggggccataaatatawwgagtttaaaytttatymhvvyraagrtaaatgatgamtrcatacytggtgcccacmartctggcrgtataactgcagttttytaaactattgtttwcagytgagaaytgtttyctagactgtatgttymgctttcctcyytrcaagggacatttggtgrggwratraataagagctagatgattgccaattatgatgtayctgttctamctgyttaartmtrtsccaaraagtaaagcttyttacamcarmamaaaaaawaaammamaaaaaaaaaaaaaaaa

SEQ ID NO: 4187 - DNA, 600 bp, Rattus norvegicus
aytcascaatgacctgtggggcgggggsccytgggscattbwtaacatagggtttggagtctggamkargckccatccacgtcactcacaagtttctgtttmtatttmtagctttttttaataaaatatatatatatatwtatwtaaaagmcagaaamcaggtgttttcatggcccaggggcttggcacsccggtytgtgcccamycgcycsgccccaccbtggcccaccggccccattccttagacwcagagtcacgcccwctaaccctbttacmaacagagcaggtcacacacacakcagcggtcactgtaacagactsccacatacacagtctcacatttacctgtgggtttttggttctgttcagtttgggttyttaactttacagggtcagtyccgcttcatcccccttttgtatggagttccatmtcggggctttcaaccccctgctccagtcctgaggcctcctkaccctgacgttgtgatacaccccacagagatctatgtttcttataktadtaktattaataataattattataatattatgtwataaatttwtaagaadtgraraamaaaaaraaaaaaacctttgcgg

SEQ ID NO: 4188 - DNA, 600 bp, Rattus norvegicus
  misc_feature (575)..(575): n is a, c, g, or t
tctgayyawgtttctcgaakagcatcytggtggggaaraagtcctaagagagcamgckgggggtgatgctactragaactttgaggacgysrrkmaythkrcrsawgsdcsaraactgwscmrwmcwtwyayywwmgrggwkctmsatccrgatgvsagmtswmagatagccaarcchtcggawaccctwawcactwytgtmrwgtbtmwttcyagttggtggaccaactgggtgatcccagccatytcagccmtgbkggtagctctsatkwatygcctstacatggcagaagrttaacctgtctgtcygmagccmaggaagrraaakrctgycccadagagrsgwgaaaagaasccmgtgktaatcmcttycabtgacagaaaccctccccytgagaawgtaattgtaatawawctgyctccctytcctcytwtgmtmggagaacamasatkggactctttgwmctcttaaactttmaaadrwrmmwwwwwamwcaactthwtttkgacwtytyttcactacgkamtttacytatkgkaaacatgayctttytaaawwatatctggyttgkaangwhmammaaaaaaaaaaaaaaaaaa

SEQ ID NO: 4189 - DNA, 600 bp, Rattus norvegicus
  misc_feature (574)..(574): n is a, c, g, or t
  misc_feature (577)..(577): n is a, c, g, or t
tgattccagtgacactggtcgggagtcagamccttgtctattaraytsrrsarykmggcacgcargtgaatttgccggtaacaagccagattyytatgratcktgtaaatattgtggataaatatatatatttgymcagtwatctaagttaatttaaagacgtttgtgcctaytgttctygkhwyragtgcwtttggaattttwaaactgatagcctcaaactccaaacaccatsgataggacataaagcttgtctgtgattcwaamcaaaggagataytscagtggaaactgtaacytgagtgactgtctgtcagaacatwtggtacgtagacggtaaascratgratcagaagtcagatttytagtaggaaatgtaaaatcactgttggcgaacaaatgscctttattaagaaatggcttgctcagggtaactggtcagatttccmcgaggaagtgtttgctgcttckttgactatgactggtttgggrggcagtttatttktkgwsaswstswcmaaaarwwamawgtttgcacctttctagttgaaaataaagtatatatatwttttwwnwrnrmaarawaaaaraaaaaaaaaaa

SEQ ID NO: 4190 - DNA, 600 bp, Rattus norvegicus
  misc_feature (363)..(363): n is a, c, g, or t
  misc_feature (403)..(403): n is a, c, g, or t
aaaggaggccgacaaggcggcggccaaggaggaggcgcccaaggccgagcccgagaagagcgagggcgccgcggagsrgcmgcccgagccmscgmsgkcrmscgagcaggmggmgghsrmgcmcrrgsmcgckgybgrcgrbdakgyyyyyamkgvcgscgabgyvavhgvrkdbmrsamgrssgcggycgackgyrcgccccabgakgagggcgagrycaaaaagactgaggctccckccgccggccccgawbcgaaaagcgacgcggycccggcggcttcagactytaaacctakcadcgcggagcccgcgccctcgtccaargagaygyccgcggbctcmgadgygyccagttccgcvgncaadgmccccgcgcccgccgmgcctgccgmcgakccccangyygakgcacccgtcgccagctccgakcaaagcgtggkcgtcaaagagtaaccsksdywgcckakccagaaccgacgccactcgcawacgacctgtctcacsctmkykcygyckctcamtctgycswmtytctstctcyswatyctmywcwrmybwvktyyvmhyyggmagtgagsmtrtgtattgcccaagggatt

SEQ ID NO: 4191 - DNA, 600 bp, Rattus norvegicus
ggtcactatgaaggaattgaarcgggcactggaggagggcysggtgcgaraagtcttcggctcaggcactgcttgtcaggtctgcccagkgcaccaaatcctatatgaaggcaagcarctccacattyctwccatggaaaatgggccsgaactcatcstgcgcttccagaaggagttgaaggctattcagtacggaaccagtgcccmcgattggatgcttcgtgtgtgacgttagggaggttgtgccctacctggttggatccgctgacgtgcagcatccagttyagcgtcctcgcctcccarrgactcaagrgaagtgcaatagggrrggtcgttccagactsctggctctytggcaccctcmcgtggaagttacactccmmmsccttaagggcggacccatgtaatttggaccccmcctcagwwcagytsstccgcgtcctggtgttcaararagaaccttggcttcttctcgatctccgttctcaggcggatccccggtgctcttcatgtctyttttttttttttttyccgtctctctctccttgctgcaattttgaaataaaaatgccaargrmcaaraaaaaaaaaaaaaaaaaa

SEQ ID NO: 4192 - DNA, 600 bp, Rattus norvegicus
ctyayttgcyccttggtctctttatgctgctggmtccccctttcctgccctccctggctactgggtcrmtaatctttcaggccatgratcygggaggagagtggtctrtargctccaycagccctgtcctgagacarcaggggggraggacactggagactttcyygtggggcttacttagccttctrgttacagactatttccayrctagaaaatacrtattttwaaatmgawggaaaaacacagaawcaaracaaaacaaggcattststacccytccayyttaaacatayattaytaaagacmgaagagmaaatccaacccattgcaagargctctttgtgggtgcctggttrcwtmrgmgcaggaggagccycaaayccacytttggagcykccmctgtgtgcaytaggaacccyttctyycctcyrakaaagcycagagsgagcactgcctcacmaactgtgagactgcgtttttttatactkggaagtgstgaattattttatataaggtcatttaaatatctatttaaaaaatmggaagctgcttttatatttaataataaaagaagtgcacaagcwrmmraaaaaaaaaaaa

SEQ ID NO: 4193 - DNA, 600 bp, Rattus norvegicus
mgtgytgctccagtccatgtgggctttggtragttgagataaaggtggtgaaaacyttgacatttcctactctttggatatrgattttagagcaaccggcttcgktagaattcaragcttcggtcactttaacaamccayaactctgatttyttttkttttccaccytaaagcaaagtagacatttatacttcgtgrhtgcataaaakayagttcadasttaatttaatccracaattttgggytgggttgaaaagtggttattatytaaattccraatwsaatttaatctrgactcctratattttccttagatatgaaggaagtttcttttaaaraattatgactratcagrmwygtaktgcttctaattataatcaacagatacgagcagctastagtgctcaaaagaatttcttgtttyttagatgaaatttawatttggctatattaaggttaatatcactaaaacagaaarccagcatttttccttwttgtttttawayggcctcatcaagtttttgtgagmttbtatactgatcatgawtaataaaatmcaaataaaaaagccttaggaaaaawwamarwwwwraaaaamrwr

SEQ ID NO: 4194 - DNA, 600 bp, Rattus norvegicus
tccccagaggcgggccccagcagcagtattggaggggctgaaggcagmggsagarrggggcccagctgctkmccsgcwcasksaggrcctcacccmctagccccgctttgggccccctcctgtgmcctcagggtttggcccakkgggccctcaggggccccttcccccgtgattctgcccggataatcgtytctcmtgssycactkcagskgcyyytgtcmcsmwtgwktycatggccccggrkmmctwgctgctbtmrgctkcctgstgmtgggcargytgktcmrtgaggaggtagagtccmtcaggggcctcccytcagcccctccccacagrggggvtgggccctgcctccccatgsccctttyttgcasgcctggagcctgcmgggytggattgaggttcaagggcccccaattccctgctgtctcmccccccmttwtgtccccccttagsgccasggagstggtgsgrgaggaghtdtgtyttrkckwmtgtcttcatgtggtyktgggtgtttttmttgttttgtcctggattccgataaamttaaagaaattgcytcmamwmwmmaaaaaaaarraaaaaaaaaaaaaaaaa

SEQ ID NO: 4195 - DNA, 600 bp, Rattus norvegicus
  misc_feature (233)..(233): n is a, c, g, or t
atattttatacgccttttgagctatgtaacttaataattggatacttgatcatttgttttatwatgtaatcgwtaaaatggtratgtgtattaatgttagttcaaccatatatttatactgtctgggaatgtgtggttatagttctgtgggagaaatagtttgtcagtgttcmccagsttgtaaaaacttagtgckagagcttcawcatctaaataaatgrtgaaacgcawwndwmamwrarrwmamtttgcttaaaattaacttaatttgtwgaaaacmgtggattcaattattatcatttcagtttwtggacaaatttgttagggttwccaagtgcgtttaaaaattgctctttaaaggtytagrtaattgtgaatcaattgaatgttgggtwccaagggaaaacggtttgtaatagttgatgmccttgatttttaattcaattccmccagtcacttgtagctttatgcagttwccaatccacttttctcrtttttaagtttattacttacctgtmymtattttgaaattaatttgaacctgvgtatttggcacatgwtggyttaataaattttaactttcaataawmwraaaaaaaa

SEQ ID NO: 4196 - DNA, 600 bp, Rattus norvegicus
carggttgcccaagcacrtcttgttgagcccggytcttgctctgctgctcagatgggcttcagayrcmrgakvvkyctgcttctgcctctaggaakgcwsgrrkcawacatgttcactgcaatgcccatttcccatgggagttttggcattttttacattttamctttcctttgtatacatctaaggctgscctcagacgcaagacgttcttccaccctatacacccttttaatctcactgtgtgtgkgaggggggtmgtttrmacaygacgcacggtggatgtytggtgtgctgktgsctgggccacytgtggcttrtacagtgtgagygyatggagktaggaagggtctragrgcagagayactkctgtggcttayggacaggcccaggctstgtccacgcacwttatttmtmmggaakkmggctctctcaggtkctgtcagcaggcytgkgacwccattcctbktccmtrtaatcagagaagttgtcsttgtagcaaaggcagggttagcttttccttttataagggctgtgttgaaatgacctaggwccamacattaaaagamwtaattytttaaaaaaaaaaaaaaaaaaaaaaa

SEQ ID NO: 4197 - DNA, 757 bp, Rattus norvegicus; identical to SEQ ID NO: 101
  misc_feature (105)..(105): n is a, c, g, or t

SEQ ID NO: 4198 - DNA, 600 bp, Rattus norvegicus
gaaggccttttctcatctctggggcgssttcgctacctcagcctcaggaataactccttgcagaccttttcaccacagcccggcctggagcgcctgtggcttgatgccaacccytgggaytgcagctgtcccctcaaggcgcttsgagactttgccctgcagaaccctggtgttgtcccccgctttgttcagactgtctgtgagggggacgactgccagccggtgtacacctacaacaatatcacttgcgctggccccgccaacgtytcgggcctcgacctaagagacgttagtgaaacacattttgtgcactgctgacactggctacttactggcccggtytggccgaacaytgyctcatggccaggacggkgtctcattgttaacagaataagctggctctcaaattcctacccatctytaggggacaggtcctggctgctcacttcctggaagcaggctgtactggaagctatgtggcctagaaagggtgggctcaggccaagtgtccaagggcccaaaggagggaggtgctcrswgrmtytmmgcatrytagycarcrgakkaaarsaaactaayyargrtwmmmwmarwaaaaaa

SEQ ID NO: 4199 - DNA, 600 bp, Rattus norvegicus
cgaggttcctttccctgaaccacagcccaaacttgtggggccaccagaaattgctgtggtgttcagggggtacttgaatttagcaccgtaatcctgtcctcccccagggtcagttctaggtacttggtctccctttccatcccatttgggcacattctctattgatcagaacccaggcttgaagtggaaagtgctgttcttggaggacaagctggcacccttagctgaggtgtgtcatgttgtccagtgccctgcatcgtaggctgccgattcagtgtggacctagaatgttcgacctaggactagcttccaatactgtcctgccatcactctgatttgactttgtggtgagcgtcaccacatgacaggggtgtgccagcccatcgaagcaggacagacacaggtggattgtgccccagggtgggatttgtgtgctctatgctccatgtcaagccatgtgaaggtcaggacccttctgaagcttttcttccaatggtacgttgtttgaagatgctttcctgtcacacctaaacatttggaaatatcccactgacaagaacacattgtaaaacaaaactttaattaaagagtaatatatgg

SEQ ID NO: 4200 - DNA, 600 bp, Rattus norvegicus
cgaatccggagggagagaaacaagctggccgctgccaagtgtcggaaccgtcgacgtgagctgacggagaagctgcaggcggagacagaggagctggaggaggagaagtccggtctgcagaaagaaatcgctgagctgcagaaggagaaggagaagctggagttcatgctggtggctcacggccctgtgtgcaaaatcagtcctgaggaacgccgatctccccccacctccgggctacagtccttacgcggtacgggcagtgctgtcggccctgtggtggtgaaacaggagcctcctgaagaggacagcccctcttcctcagcagggatggacaagacccagcgctctgtcatcaagcccattagcattgctgggggtggtttctacggggaagagcctctgcacacccccatcgtggtgacctccacacctgccatcactccgggcacttcaaaccttgtcttcacctaccccagtgtcctggagcaggagtcgcctgcgtcgccctccgagtcctgttccaaggctcaccgcagaagcagtagcagtggggaccagtcatcagactccttgaactcccccacactgctggctctgtaa

SEQ ID NO: 4201 - DNA, 600 bp, Rattus norvegicus
  misc_feature (167)..(167): n is a, c, g, or t
  misc_feature (428)..(428): n is a, c, g, or t
raaatgctyccgbtraaggtcvgraggssraaggtaccgraagcmcagtartcmccgktgttgacattgtcatgamcmatcayttwcawkwaaccagbttcaymmraragryytmshrmmrsthkwkcrarkrskdcaygrratcactmaagggcaaacttgaagrncasravbmrgaaagrgtaragccttttatgmctggrgctkcagagcarattargcacwyccttgctaakttcaataaytvccaktktttthttggtgaaaacmtgaatycagatggyatkgttgctbthctggacymccgtgaaratggkgtgacyccattcatgattttytttaaggdtggcttrvagwtggarraatkttamcaaattgkwtctwtcvscygkcvccataatkgkstgytgyttwccmtccmwwcmacnscaggacttwsgrcaaatgrgmytrawvtcatcytgmgcytttattytgmccgtsatttatttsgvstggwggcattgtttttttktybtttttwarsaaaawwmaacatgtcatrtgggttgtytaaaaataaagkgcatttaamtycmmwmraaaammwmrwrmmraaaa

SEQ ID NO: 4202 - DNA, 600 bp, Rattus norvegicus
ccctaaagagtgggccaccccggacaccttcaacccagagcactttttggagaatggacagtttaagaagagagaatcctttctgcctttctcaatgggaaagcgagcatgtcttggagaacaactggccaggtccgagctgttcatttttatcacttctcttatccaaaaatttaccttcaagcccccggtcaacgagaagsttagtctgcaattcagaatgtccgtcaccatttccccagtcagtcaccgcctttgcgcaattcctaggctgtgatgtcgaagaggaaagtatgaagaaatggcatctgcatggaggacactggtgtctgctcacattgaggggatagaattaaagatgactgagggagtgtgtgcaatgagactaaggaaattgaatcaagttatgggttcattaagtagaaagccacttgtgagctcaatggtacagcttcacgactgacatcttgcagagaaaaatgattcttccagaaaagaaaatgattacgggaycatggagaatggawkmmgtraytmygtaaatcataaaaacgatcataaaatttatacctttactttgaaaaaaaaaaaaaaaaaaaa

SEQ ID NO: 4203 - DNA, 600 bp, Rattus norvegicus
ttgagaggtagggacccasaccctattcagatcctsaccatcactagaccctkgrattggctatgggaaagcatgcctcagccactcaccttcctcccctacctagcgttcccagctatarggggaccyagaaytaccagagaktgggagatggacatggtggggcmtactttttccytccttcagtcccgtagccagggcctcsttccttmtcagggtcttcccagcccagctmtgchtagccctcctgccctgtcmtactcggtgctgtwgagtaggggctyygscwsgartcgagcagcttagtgaggagccatatawaatatgtatatgtgcmcaagcasgaggacatgtgggagcttgtgcccaattgttacaccccaatccctaggagggtcaggcaggccaaggrcagtctcctggatgrawggwttgstccccttmctccaccttaagccttgkgamccttaagcagggtgggagggcaagggagggtgccctcctagyggggtttggggggggattgggttcctgaatgcmccataatcgctgtatgaaatattaaaaaaaaagtctaaagtgammwmrwraaaaaaaaaa

SEQ ID NO: 4204 - DNA, 1400 bp, Rattus norvegicus
gagcatgacagacaagtaccggctgcacctgtccgtggctgacctcctctttgtcatcacactccccttcagtgacgccatggctgactggtactttgggaaatttttatgtaaggctgtgcatatcatctacaccgtcaacctttacagcagtgttctcatcctggccttcatcagcctggaccgctaccttgccattgtccacgccaccaacagccagagcgcgaggaagctgctggctgaaaaggccgacatcatcttcgccgatgtcagccagggggacggcaggtacatctgtgaccgcctttaccccgacagcctgtggatggtggtgttccagttccagcacatcatggtgggtctcatcctgccgggcatcgtcatcctgtcctgttactgcatcatcatctccaagctgtcacactccaagggccaccagaagcgcaaggccctcaagactacggtcatccttatcctggctttctttgcctgctggctaccgtattacgtggggatcagcatcgattccttcatccttttggaggtcatcaagcaaggatgtgagttcgagagcgtcgtgcacaagtggatctccatcacggaggccctcgccttcttccactgktgcctgaaccccatcctctacgccttcctcggggccaaattcaagasstccgcgcagcatgcactcaattccatgagcagaggctccagcctcaagatcctttccaaagggaaacggggtggacactcttccgtctccacagagtcagaatcctcaagttttcactccagctaacacttwcgcaaagrcatatatmatatatatatatatatatatatatgmcaaagaactttttttatgttacacatttcccagatataaaagactgaccaatcttgtacagttttttttattgactgttggagttwatgtttctctagttwttgtgtgtgtgtgtgtgtgtraggtttgayttaatttatataaatattggkttttttcygktgkttgtctgtttcacgtgaatgagtgtctaggcaggacctgtggccaagttyttagtcgctgtgtgtctgtgtgtaggactgtaragctgtaraggaaggaactgaacgctccrgaatgtgtggtaaatcggataaagctagaagtgaccctcagctgtcgctgcataatctyttygccccgcccaccccgttcctgaattgtttggttgtgctgtgtggtttctctgtaraagatggcacttaaaaccaaagcctgaaatggtatagaaatgctgggttttttytttcagttttcaagggtggattgatttcagtacctacaaatgtacagtcttgtattatgttgttaataaaagtcaatggtaaacttrmaaaaaaaaaaaaaaaaa

SEQ ID NO: 4205 - DNA, 600 bp, Rattus norvegicus
ggtgatcaaaaatgcagmcatgtmggwagagatgcaacaggactcgrtggagtgcgytayycaggcgttgvakaagtmcaacatmgagaaggatatygcggcccatatcaaraaggagtttkacaavaagtacaacccyacytrgmahtgcatygwggkccggaayttcggtagytaygtgacacaygarrccaamcacttcatytacttctaystgggtcaggtggscattstyctgttcaaatctggtwaawagcatgkhytgtgccaaacacycagtgatcymtccaaaaacaakgdctgcatsctaaattccaaataccakagaytgaatcttcwkcbttgmtaagggracacstcgtttgmatctkktgtgttttgwayaksgcaccatkstytgwacaygyytgtrrkwataaamwtaktaaamcmgcwwammwwwrdawwwawwwwvwarwmmatacttctgtmcccccatttttttctccsttaggtcattcckktaaamtaaatctgttgragrtgtwwwmmaaaarmwaawwwaaagcaaaaatgggaaaggaaaagactcacataaacatcgtcggaattggacacgtg

SEQ ID NO: 4206 - DNA, 600 bp, Rattus norvegicus
accagctcggccacagccggaccagagaccctttgcggggctgagctggtggacgctcttcarttcgtgtgtggaccaaggggcttttacttcaacaagcccacaggctatggctccagcattcgragggcaccacagacgggcattgtggatgagtgtwgctyccggagctgtgatctgaggaggytggagatgtactgtgctccgctgaagcctacaaagtcagctcgttccatccgggcccagcgccacaytgacatgcccaagactcagaagtcccagcccctatcgacacacaagaaaaggaagctgcaaaggagaaggaaaggaagtacacttgaagaacacaagtagaggaagtgcaggaaacaagacytacagaatgtaggaggagcctcccgaggaacagaaaatgccacgtcaccgcaagatcctttgctgcttgagcaacctgcaaaacatcggaacacctgccaaatatcaataatgagttcaataccatttcagagatgggcatttccctcaatgaaatacacaagtaaacattccgacattgtctttaggagtgtttgttaaaaaaaaaaaaaaaaaaacaaaaac

SEQ ID NO: 4207 - DNA, 600 bp, Rattus norvegicus
aymrgmacagsagctacttcgtggartggatccccaacaatgtgaagacgsccgtgtgtgacatccytyctcgtggcctcaagatgtcmgccacmttcattggsmacagcaccgscayccwrragctgttcaagcgcatytcggagcagttcactgccatgttcmggcgcaaggsyytcstgyrstggtacacsrrcrmgggywkrgacragatggagttyaccgaggcggagagcaacatgaatgasytggtgtytgagtaccagcagtaccaggaybccacggytgatgagcagggcgakttcgaggaggaggaggsygaggwtgagscttgagttccccaggccaagcaggttagggaaasytgaggygawaggagggggtggggggtcttaatctgtgaaaataccttgscagttggaagaaggagaatggtcttaggtttgtgmtgggtctctggtgctmwtcactgktgcctstcactyttttctcttyttgtaatatcgatracrtcratgtrayrcttgagatctttytgaacycctgttgtratggctraaatcrcmtramcctttgtgtcctaaaaaaaraaaaaaaaaa

SEQ ID NO: 4208 - DNA, 545 bp, Rattus norvegicus; identical to SEQ ID NO: 112

SEQ ID NO: 4209 - DNA, 600 bp, Rattus norvegicus
  misc_feature (238)..(238): n is a, c, g, or t
ttttcmwsmwtymsmrvwbsgkyaccgdvrysakswtgratgrcwcggbvhssakscggmccagraagttcatgasrmacbrkstgcttcagaggmaacmkawggtsmywgatgtccttmakcctgggmaggccwyrsyacsaaagacagaaattcgggaaargcygrssaagatgtacaaaaccacvscagakgtcatctttgtatttggakycagaayycrbywygrtggaggmanrmsrmctgsctttggcatgatstatgattctytmgrttatgcaaagaagawtgmgcctaaacacmgacttgcgrgacwtggcctttdtgrgaagaaaamgmcctycsgcarmcwgcgaaaagaacgaaagmacmgamtkargwwkgtcmgggggactgcaaagkccaatgttgstsctkscmawwagtgagtggmgactggatacabmmraagrdgwarktytacrgtgaskkgatgtwctsctgwkryakssaaakkwstgrgkstamrrtarmctwrawrwbstdhwrhrrdwhdvraawwwmwrarrrwaaaawaaactaaaaaagcttctgcgagtctggaaaaaaaaaaaaaaaaaa

SEQ ID NO: 4210 - DNA, 600 bp, Rattus norvegicus
  misc_feature (498)..(512): n is a, c, g, or t
atgtatgatgagtttgtagaagactatgaacctaccaargcagasrgctacaggaagaaggtagtgctggatggggaggaagtgcagatcgacatcttagatacagcagggcaggaagactacgctgcaattagagacaactacttccgaagtggggaaggattcctctgtgwmttcksyaysacagagatggagtcctttgcagctacagcggacttcagggaacagattttaagagtaaaagaagatgrgaatgtcccatttctcctggttggtaacaaatcagatttagaagataaaaggcaggtttctgtagaagaggcaaaaaacagagctgaccagtggaacgttaactatgtggagacgtctgctaaaacgcgcgccaacgttgacaaggtattttttgatttaatgagggaaatacgagccagaaagatggaagacagcaargaaaaaaawrraaaaaaraagaggaaaagtttagccaagagaatcagnnnnnnnnnnnnnnntttataatcaaagcccaaactcctttcttatcctgacctgaccatactaataaatataatttataagcawwaaaaaaaaaaaaaaaaa

SEQ ID NO: 4211 - DNA, 709 bp, Rattus norvegicus; identical to SEQ ID NO: 115
  misc_feature (19)..(70): n is a, c, g, or t
  misc_feature (125)..(125): n is a, c, g, or t
  misc_feature (151)..(151): n is a, c, g, or t
  misc_feature (236)..(236): n is a, c, g, or t

SEQ ID NO: 4212 - DNA, 600 bp, Rattus norvegicus
tggcragaascsrkacgagytcsagthwgscrwmkctcakgydcwgctcgagctgkagatgaactcsgawytgaagdcgcagctgygggaactcaacatcaccgcggcaaaggaaatcgaagtcggwggtggtcgaaaasccatcataatytttgtmccagttcstcagctgaaatctttccagraaatccaagtccggywagttcgygaattggagaaaaagttcagtgggawacacgtagtcttcattgctcagaggaggattytgcccaasccaacccgaaaaasccgtwcrvaaawtwagcwaaagcgccccagaasccgcaccctgasagcagtscacrackccatccttgagrattygswckksscamgwgraattgtgggcaagrggatccgtgtgaaahtggwwggcasccggstcataaaagttcatttrgacwaagcacagcagaacaacgtggagcayaaggtcgaaactttdtytsgcgtgyacaagaagctcmcmsgcamggatsttaactytgrmttcccagartttcmgttgtaargaaaatgactgawtamwhtgkmattcwwwdwwawmwwawrmrrmmrmaa

SEQ ID NO: 4213 - DNA, 430 bp, Rattus norvegicus; identical to SEQ ID NO: 117
  misc_feature (6)..(6): n is a, c, g, or t
  misc_feature (15)..(15): n is a, c, g, or t
  misc_feature (63)..(63): n is a, c, g, or t
  misc_feature (66)..(67): n is a, c, g, or t

SEQ ID NO: 4214 - DNA, 600 bp, Rattus norvegicus
  misc_feature (566)..(566): n is a, c, g, or t
acatagcatgcaagtktgccgagcttaaagaraagatcgatcgtcrtthtggyamgargbkggrmrakgsscccmmwytyttgaagtvtggtgwtgcysccaktgttgamatggtccytgsmaagccmatgtgtkwtraaagyttstctgahtacccyccahttggtcgwtwtrmtgttcgtracatgaggcagacagttgctgtgggtgtcatcaaavccgtggacaagaaggmtgcagrrghtggcmawgtcmccaagtytgmccagaaagytcagaargbtwaatgaatattatycytaacaybtgscamcccagtyttmatcagtggtggaagaacggtytcagaactgttkgtytcahtkggscatttaagttyaatagtmaaagaytggttamtgataamaawrmwwmrwmramccttcagaaggamagaatgttttgtsgaccwtwttykktgtgtgtggcagtkttaagtyaykastttksmhmvkcmrkactttttaatggaaacaacttgrccaaaaatctgtcmcagaattttgrgrccattaaaacaagtttmnygdraaaraaawaaaaaaaaaaaaaaaaaaaaaa

SEQ ID NO: 4215 - DNA, 807 bp, Rattus norvegicus
  misc_feature (623)..(623): n is a, c, g, or t
  misc_feature (775)..(775): n is a, c, g, or t
tgtttgttgatgtgcggtacattcaccggraswkrkrswggakcsatyawamgrsmwtrtrggaawwgsctyswkccagwwtcgcwcbasgsmrscatcaggtgagccragrtgggtgcatacaaatacatccaggagctgyggaggaagaagcagtccgacgtgatgcgctyccttctaagggtccgctgytgscagtaccsccagctctytgcgctgcacagsgcwbsccgccccacccggyctrataaggckcgaagsctggkatacaagsctaagcaaggkyaygwsrtktacagrwtccgwsyccsmcgcgbwgktcgcaagcgcccrgttyctaagggtscaacytacrgcaagcctgtccaccacggtgttamccarctgaagtttgcccgaascmttcagtctgytgctgaggagagagctgrscsccattktggagctytgmgasycctgaaktcmtactgggttggtgaagatyccacatataawyyytwtgaggytatcctcattgayccatbccataaagcyatcasaagaaatcysgacmcccaatggrttaccaamccagtccacaagcacagggagatgcgtgggctgacatctgmtgsccgyaaganccgygsycttkgraaggsccmcaagttccmccacmccattggtgggtctcsccgtscagcctggagaaggmgcaacaytyttcagcyccmccgttaccgctaattgacgtaatatytgtraaawtcatayccawtaaacaamytaggmcmrnmhmaaaaaaaaawwaaaaaaaaaaaaaaaaaa

SEQ ID NO: 4216 - DNA, 600 bp, Rattus norvegicus
aggacttcatgcagctcactgaargtgaaatggaaagttacttatgcaaagtggattttgtraacaaaaaacaagagagccacycacgcctcadgaccsgagtgtgagtgttraggragggtragragtactctagtaatactctgtagwcagtgcmtacgtgctgcactgraagatacttacgtggrgagggasywtcatratgtggggatacttctgtsctggagatacatgtsccctmtyctctatggctgcaagwvttccactgtcttacgtwtggcatggttcaaagkcaactytagatacaatgatatatyagactggrgtgggcatccttmatcagagtggraaggaaacagwcgtgttccttwatgcarcttctgcattggccgkgtwaawcttaargcttggktgctctyttyargattagmtttgktggkggmtatggstgracaaaactaaacaccagtwgaagtrggracayyttyatgagkactythttcagwctgkmmtccaccaarmtaaacggktttkgctgybtttttggtcawtggtkgamwaaaatkstctttgcacatctawwaarrrrmrwaamwwttg

SEQ ID NO: 4217 - DNA, 121 bp, Rattus norvegicus; identical to SEQ ID NO: 121

SEQ ID NO: 4218 - DNA, 600 bp, Rattus norvegicus
  misc_feature (42)..(69): n is a, c, g, or t
gggccatggstgaccctgaggtacagcagataatgagtgacnnnnnnnnnnnnnnnnnnnnnnnnnnnntgcaaaaggacccccaagctytgagcgaacacttaaagaatcctgtaatagcacagaagatccagaagctgatggatgtgggtctsatcgcaattcggtgataacttgcttttcccctctccccttcscmgatgaggaaaggcgagytgggacggtggcaagcagtactgggcagaggggggagaagaaargcttatctktatattkatacrtgccyacaaggaagacagactcatccagtsccacckcgsrcsmksccagcacasgcatggtcttttcaytgytgcccccaattccgaatatccttccctgcccattcccagcytccccgtcactgtytcagctgcttccctatagttggttatwtttyatttggggcagtgggtgcatacggggaggggagggtattyttcccaacctaaggtccsaactgtcytacktgttmwtacccatgtcccccctcaataaaacaarccwgtcaggcgtggttawawrwwdamamaaaaaaaaaaamaaaaaaaaaaaaaacat

SEQ ID NO: 4219 - DNA, 600 bp, Rattus norvegicus
gkattggsrwattcayccacacaccttmakatgtgksytcrggcgctmtaccattcaactkgggamctmmaaskaackcycmaacagsctcatwtttataatcgggaacamraaaaccaathygtcaatattattgctaaaamraaaaaaawawwwtgaaaaagaaagaatgctagattctggaaattcaagtatagcgcggatgcctttcccgtatgacttatcatgcatcaasccaaatatacagattgaataattacytacaatmmmmmyattttatytswarwahwmaraawmmmwwwtaaaatttyctgtagatgtgaactgaggtatcgaagtmtgrtgtaatcmtagatgtcaacatttaataaagctaaaaggamcmgaawamaaarwmwwmwrwaattcatagagctaaattgactcttttgacataaagtcaaatgtagaactcyagcaatgtattaatctcctttattattggwaaagtcytatytgaatatctaagttcaacatgggctatgtaaaattttcactgtcatactgaaaaacaataaaatttawwaawtgcawwmaaaawrraaaaaaaaaaaaaaaaaa

SEQ ID NO: 4220 - DNA, 1400 bp, Rattus norvegicus
agagtctgagatggacatgagtgttaaggcagagatgggtctgggtgacagaaaaggaagcagtggctctcttgaagaatggtatgatcaggataagcctgaagtgtcccttctcttccagtttctgcagatccttacagcctgctttgggtcctttgcccatggtggcaatgacgtcagcaatgccatcggccctctggttgctttgtatcttgtttatgaaacgagagatgtcactacaaaagaggcaacacccatatggcttctgctttatggtggtgttggcatttgcatggggctatgggtttggggaagaagagttatccagactatggggaaggacctgacaccaatcacaccctccagtggtttcagtattgaactggcatctgccttcactgtggtcgtcgcatcaaacattggccttcccatcagcacaacacattgtaaggtgggctctgtggtgtctgttggctggctccgatccaagaaggctgttgactggcgactgtttcgaaacatttttatggcctggtttgtcaccgtccctatttctggggttatcagtgctgctatcatggcagtgttcaagcacatcattctgccggtgtgaagctgarctcagaattgtgtcagtgtctgggaccatcgcacacacccctkttyytwwwkwwtkstmakwrwwrytgwwkatwgvmcrrggwtytvdrrygbbggagctgtgggaaggaagtgtaatttatactataattgcttttgtgctwaatatgacytatctcaaaattagctgkgtaaawwasccasgtttccatkgattcattctarggtcccttttctcytkggctatgacttcctgtacatawttctcwamytttgkatmargcatmaattcmatwwtgytytaatgkcgkstgkgagatamcttaatgtggattcyttttaaacrgycwmgcasagmcmyttgrtggsrtatacygstttgttggsctmamcarcttcttccccagcgtgcacagggatttaacaacatgtaactgaagcttcccttgtagtctctcatagaaatagtcacggcactctgctccctgtcactagtggcaggttctgttgacatgtgacaacttcttagagggccgagaatctttggcacagtgaaaawttaagkttgtagtaamttctttgcaaacarttcgtggacgtgttkctaagaagtaggaagacaaagcctggtggktgtggktattcttttgagawttctggcagtgtgggatgggtgaatgaagtggaatgggaactttgggcaaattcaatgggacagccttccatgttcawctgtstacctcttaactgaataaaaagcctacagtttttdraaaaaaawaammwmrwrwtcgcggccg

SEQ ID NO: 4221 - DNA, 600 bp, Rattus norvegicus
cagcttccagtccagtgctactgtgcctgggctagctagaccagaccggccccaggcacctcctggcgctttagcctggccgcaccctcttgctagtccctagatgggggagggtagaagccggataaggcgggaccctgagatttagagctggcggtgaggccggaaagttgaagccacgtgatctcagccccatccagttaaaaggaggtgctgggctctgactgcgctacagcggatttttgagtccaatatcttctacagtatgtctgctgctcggctctccgcggtggcacagtccaccgtgtatgccttctccgcgcgcccgctggcgggcggagagcccgtgagcctgggctccctgcggggcaaggtgctgctcattgagaatgtcgcgtccctctgaggcaccacgacccgggactacaccgaaatgaatgatctgcagaagcgtctgggccctcgtggcctggtggtgctcggtttcccgtgcaatcagttcggacatcaggtatgtgagacgggatgggtagccttgggctccaggcttccaggggcgggacaccgcttactttccctctggtactacagctggaattc

SEQ ID NO: 4222 - DNA, 600 bp, Rattus norvegicus
aagggttgccttaaactggcaggtggtcgagtgcgctgtgtccttggaactctgacctatgtccctcttccctaagccattcccgtgggtgttatcatccctgagggctgataagtcaaccctgtctcagggtcctgaggctggcacccagataggcaaggtcaccttgacactggtaccagagtaaccttggctctttagggctggtgcagcctytcccccatgctccacctccttcccagccctgtccamctgaccctggcaccgacctccacagagaggktggggagggcgtcggcaccacagcctaagctggagagaagtgaggttgcagcaggtttgatcctgacagcctcatcctacatccccagggaaggcacccttcctctgtactcccctcctgttytagggtctccccaacatttggctgaacttgaagggcaaaggtcaaagggaggtcaagctccatgccatcctaaccccttggagcstgggttctccctaaccccctttcccactgactgtgaatgtcgtgactcagagcaaagacagagaatatatttaattcatgttgtacaaaaaraaaaaaaaaaaaaaaaa

SEQ ID NO: 4223 - DNA, 1400 bp, Rattus norvegicus
tcgtgagcatctttgggctctgctgggcgccgtacacgctcctaatgatcatccgagctgcttgccatggccgctgcatccccgattactggtacgagacgtccttctggcttctgtgggccaactcggccgtcaaccccgtcctctacccactgtgccactacagcttccgcagagccttcaccaagctcctctgcccccagaagctcaaggtccagccccacggctccctggagcagtgctggaagtgagcagctgccccacccttytgaggccaggcccttgtacttgtttgagtgggcasccggagcgtgggcggggccytggtccatgcwccgctccaaatgccatggcggcctcttagatcatcaaccccgcagtggggtagcatggcaggtgggccaagagccctagttggtggagctagagtgtgctggttagctctgccgccacattctccttcaccacacagaagagacaatccaggagtcccaggcatgccttccacctacacacacacamwymcacamacwcacayamaywccayaktkmarwrmmarwrawrwmmccttttgcatatttagtggttggtgtcctccctaatgcaaacctcggtgtgtgctcccggctccggccctggcaatgcgtgcgtgcgccctgcatgtgctcacacccgccacacacccgcccgccacacacttgcaacacctcctctctcccagaagagctggggacgatgccctttgctgccactgtctcttgcttaatcccagagcctggctccttatcccccactctcccttcaactctgccccacrrmrygwsgagcgcctcgggaaacttgaagcttctctgctccttccactctggatgttttcaggaagayggasgagragaaaacacgtctgtgaacttgatgttccttggatgtttaatcaagagagacaaaattgccgaggagctcggggctggattggcaggtgtgggctcccacgccctcctccstcagtgctgcagcttccggctgagccgcgccagctgcttctgcmtgccccgcccccaggcttgggacgatggccctgccctgcttgccccgtctgtacaatcagaatttgggggtgggtggttatggggtagagcggctcttcactgtgccctaaaggtcctgaggctcacaggacagtcagcaggagagcaggcaggcccgcgacacctgggaggaatgctttgcctcgtcctgtgtactcacctcaggcttctgcatgctctgctgcccttgtgccctggtgtgctgcctctgccaatgtgaaaacacaataaagtgtatttttttamrraaaaaaaaaaaaaaaaaaaaaaaaaaaaaaaaagggcggccgcatacatatgtagtctggtct

SEQ ID NO: 4224 - DNA, 1400 bp, Rattus norvegicus
  misc_feature (1342)..(1342): n is a, c, g, or t
tatattgaagtgttcaagagcagtcaggaggaagttaggtcatactcagatccacctctgaagtttatgtctgtgcagaggcctgggccttatgacaggcctggcacagcccggaggtacattggcattgtgaaacaggcaggcctggataggatgaggtctggtgcctatagtgcaggctatgggggctatgaagaatacagtggcctcagtgatggctatggcttcaccactgacctgywygrgrgagacctcagctattgtctctcaggaatgtatgatcmcagatmcggagacagcgagttcacagtgcagagcaccaccggccaytgcgtccacatgagagggctgccctacaaagcaacggagaacgacatttacaacttcttctctccactcaaccctgtgagagttcatattgagattggtcctgawkkmrgmrygassggagaagctgatgttgagtttgctactyatgaagaagcagtggcagctatgtccaaggacagggccaacatgcagcacagatacatagaactcttcctgaattcaacaacaggagstagcaatggggcttatagcagccaggtgatgcagggcatgggtgtgtcagctgcccaggcaacttacagtggcctggagagccagtcagtgagtggctgttacggggccggctacagcggtcagaacagcatgggtggatatgattrgtwttgtaggaacatttgggttatttcamtcagaaaatttcacaggsagccaataaacagkcaagrgcagtttataactytagaggaagctgggggacccactttgcaccatgagtttgtgaaatctggattaaaaaattacmwyttcarwrwwwmwmawrmaaamwwwwmwtctrgcatgtratattgagtwaastwaawabkattttsttccgcttttctcrattaacrtttttggtagtatasttaagagtgwtgthatctgagttaagtagtttaagtatkttgagtggatctttcagcacwccacagtgaacacactgrgggcatgtacttwtmtggagaactcaaggtgctagatccctgatgcaaagagaagcatttytcatgttchttvtagkttawattttcatttaaaatctttaggttaagtttaagcttkttaaaagttagktttsaraattgrgachcaatwctaatactgtaggaattggtgagsccttgacwtaaagctttcyttskactgtgatttccttttgggtgtahtttgbtaagtgaaacytgttaaattttttgttaactaaatttttttcttaaawtaaagactttttcvcvdhmrvvwrdhmmwrmhnmhmdrvdsakccamwggtagcaacctgggtggaagagaaagacttgtaacgtcatctt

SEQ ID NO: 4225 - DNA, 600 bp, Rattus norvegicus
ttgggtttgtaacagkgttyctgtttataaratactaacgaccctratgtattttactgrcccattaaagcaratgttttattywtwmwrwrrarwrrwwwrrattctgggaggggagcagtgcataggaagttccctccagggagggtggcatccgtgtcagaccaggcaggtgtggctctcatgaccggtggcatgtctgacaggatgtcatggaaacccatcactaggctgaggggcagcactgagcacccaattccctctcctctcttctccctttggttttcactcttcaccgttagattttaattccactgggagtttaatgggagtcagacccattagaagaaaagtttggctttgagagcactgatttttttttcctctggggactttctggggccaagaactcaggccagaaggccacccaggacagggtgaagctggccgtgggtcgctggtcagtctccactggccacaaaggaaaatggagtggaacaaagaagatagggccctgctccttggctcttgtctgccagggacctcccgggaatggaatgtagggtgtctgctgccacaggcatctgttagtctagtcag

SEQ ID NO: 4226 - DNA, 600 bp, Rattus norvegicus
aaatccacagaagatcttaattttgtaattgttaaaaacagtgacctttgcctttgctagataaggaggaaaacccatgtatgtctcctctctaaatgtttcagaactgagttgtgaaggagcaggaattttatacgatgaagaaattcttgaaatttttttcagttgctatatcataagtatttttaaagtttcttttctagcttgacactgtattagcttcctgaattgttcgaaaatactacttaaatatacgtcaagaggaaatttatataggaaacattttcattccacttgtataatttaagtcttgactcttttcagatgcaagaaactgacagcgctgtacgtgctcttcgctctgctgctgcttggagcctgcagcctggcatttctgacctacaaatactgccggcgctccaagcaagggaacgcgcagccaagccagcaccagctgagtccaatttcctccttctgaaagttgtacagagtgcttcatacccattgtactagaaatagtgcctctaaaatatttcgaaaactgatcagcttctataatttaaactaaaaaaaaagaaaaaaaaaaaaaaaaaaaaaaaa

SEQ ID NO: 4227 - DNA, 1400 bp, Rattus norvegicus
ggagggctgggaagagccccctgttggggctgagcaccagggcttccagctggctatgctgaggcgccctggtgtccacaagcccctcatcatcggcatttgcctcatggtcttccagcagctgtcaggggtcaacgccatcatgttctatgccaacaccatctttgaggaggccaagttcaaggacagcagcctggcctcggtcactgtgggcatcatccaggttctgttcactgctgtggcggccctcatcatggacagagcagggcgaaaactgcttctggccttgtcgggtgtgatcatggttttcagcatgagcgcctttggtacctacttcaaactgacccagagtggccccagcaactcctcccatgtaggcctcctggtgcccatctccgcagagcctgctgatgttcacctggggctggcctggctggctgtaggcagcatgtgcctcttcatcgctggttttgcagtaggctkgggacccatyccctggctyctyatktcaragawcttycctytgcacawyaagggkgkggstaccggsgtctgkgtcctcaccaactggttcatggsctttytggkgaccaaagagtttaacagcatcatggagawyctyaraccctacggcgccttytggctcamcgstgycttytgtatyctyagcgkccttttcacgctcacctttgtccctkrgactaaaggcaggactytggaacaaatcacagsccatttygagggacggtgacggaccctttctgtgactggcarccctgagctgagctggcttcgggtttcaaaaggagtggagtggcctyagtgaccacagkttgagcccaggggccccctgactyctcagatctccgggccagctttgtycagatctcaacccaratccacacccatgagcttcaccagattytgaggstctgsagmctgsttgsacacacarcacatctgsggagscatgcagkctcgccctracccacsggtctycttccctaagaactaaagcaacctggacgagaactgcgggctcctggctctagtgctctggctgggcatcttkggggtgcttggwcctaagcaactkgcccataacctcacttgactgggggatgagaaagggacttagccacataagatttgggctcagaaacaaggtcaggtgagtccaggaagaaaagagaatgttcttgtcttgtcaaccaagtccttytcagagtgcccagagacctccggattcaccttggggttagccagcttacccatcacttacaggttctctccarctcttccctggtctcagtgtcctggatcattagtcaccaggtcttgttgagtttcagaaaataaaaggcctctttccgttcaamwwwaaaaaaaaaaaaaaaaaa

SEQ ID NO: 4228 - DNA, 600 bp, Rattus norvegicus
cccagggaaccaatgagctgcgggtggatcttgcagacttcgacrssarscatgactttgccaagtacagctccttccagatccagggagaggccgagaaatacaagctsattctggggaacttcctcggtggtgstgctggtgactccctgacttmccaaaacaacatgcttttctccaccaaagaccaagacaacgaccagggatcctmcaactgtgccgtgcgttaccatggagcctggtggtactctgattgtcayacttccaacytgaatggcctmtaccttaggggtctccataagagytatgcawacggtgtcaattggaagtcatggaaagggtacaactacagctacaaggtttctgaaatgaaggtgcgcctcatctagctccccacaaagagagtgcccctcccaaactctagcataccagcaacaggagtcttctatctwtcttcagccaaggaaggagtgtgccaccccgcccggctctgmtcattgcccacattccacacagcccatgacctctgacctggctctmttcacatacctatattctcaccacaaagaaaaaattgaatttacaaaaaaaaaaaaaaaa

SEQ ID NO: 4229 - DNA, 120 bp, Rattus norvegicus; identical to SEQ ID NO: 133

SEQ ID NO: 4230 - DNA, 1400 bp, Rattus norvegicus
aacctgtttcaggacatttttctacacctggacaaagcagttgagcagaagcaaaggtctcagccggtctcttctycagtcatcctccagtttggtcatgcggagaccctcctacccctgctctcgctcatgggctacttcaaggacaaggagcccctgacagcatacaattttgaggagcaggtgcatcgsgagttccgaagtggtcacatcgtaccatatgcttcaaacctaatatttgtgctttaccattgtgaagacgcacagacccctcaagaaaaattccagatacaaatgctgctgaatgaaaaggtgttacccttagctcactcgcagaaaactgttgccttgtatgaggatctgaagaaccactaccaggacattcttcagagctgtcaaactagtaaagaatgtaacctacccaaggtgaacatcacgtccgacgagctctgaggactcatcagtgctctgctgagggcgcttgttgccaataggtagccactctaaaggcagcaacaggaggatctctgtgagctcaargccaacctgttctacatagtgagttccaggccagccaaggctgcgtagagaaataaagtttggtccttttgtcttttcacagaaaawrawarwwwmwwwtagaatctggacatacgggtaagacatgactctccctggagcagctctcttcagaaaaamkaattcrgcamrasagctgtccctcccagtgtttgcagagctgaaattttcctaatgacctaagaaaatgctgatgtagaatggtattagaaaataacacttcaaaagtgttggataccaaagcacagtggcagctgggtgagccgcagtgagtgactgagatggggacttgagtratcatgttgggttctttccttctccttcacgaaggacacaaagaaggaagtctaataamktmkscatcsagrcaggaaatcaactsgatattaagamccaggctgaagtaaaactgaaagtgtgggctatttkwswygakgttatttmcaaaaagatttaaacactgtcagtaatygcctttaacctccamgtaggtcttgcagaaccacctccatccctcggacctgtttgaggcgcgcagttataatggggcccagcctggtacagakccgacttccttgactgttgcctggttatctttcgttccatcatggctcccctttttatatcttgatattacataaagtttatcttttggtggyttggwtttttttttaaataaagacttatctgcytaawwwaawwrwararawtcgaacctgattcaaagaaattttgagttctttcaaataccataaaartgtttgctacaataaataaataaaattcttgtggctttmmhmmmaaaaaaaaaaaaaaaatgg

SEQ ID NO: 4231 - DNA, 1400 bp, Rattus norvegicus
ggatcggwaatatgaactacccatccaccagccccgggtctctggtgaaamacatctgtgccatctgtggggacagatcctcaggaaagcactacggggtgtatagctgtgaaggctgcaaaggcttcttcaagagaaccataaggaaagacctcatctacacgtgtcgggataacaaagactgtctcatcgacaagcgccagcgcaaccgttgccagtactgtcgttaccagaagtgcctggtcatgggcatgaagagggaagctgtgcaagaagaaaggcagaggagccgrgagcgagcagagagtgaggcagaatgtgccagtactggccatgaagacatgccggtggagaggattctagaagctgagcttgctgtggaaccaaagaccgaatcctacggcgacatgagtgtggagagctcgacaaatgaccctgtcaccaatatatgccacgctgcggataagcagctyttcacccttgttgagtgggccaaacgcatcccccacttctcagacctcaccttggaggaccaggtcattctgcwccgggcagggtggaatgaaytgctsaytgcctccttctcccaccgctcggtttcygtccaggatggcatcctgctggccacgggcctccacgtccacaggagcagcgctcacagcgcgggcgtcggctccatctttgacagagtcctcacagagctggtgtccaagatgaaggacatgcggatggataagtcggagctcgggtgcctgcgcgccattgtgctgttcaatccagatgccaagggtttgtccaacccctcggaggtggagwctcttcgagagaaggtttatgccaccctcgagccctataccaagcagaagtatccggaacagcctggcaggtttgccaagcttctgctgcgcctcccagctctgcgctccattggattgaaatgcctggaacacctcttcttcttcaagctcattggggatacccccattgacaccttcctcatggagatgttggagacccctctgcagatcacctgaaactcctcggcwgtagcttcctcacccagagtgacccctgggctggtgtgtgtgtcgccytacccctgcacactgtcctctcccactctgacttcccttcctgtccccaaaatgtgatgcttgtcccgaataactacaacctttctacacatgagacttttctaggtggagttttgtatggttgttaaaggtgacccttctttgctacttaaggggctgagtctggcagttcttggaagagtagccaagcctctgtacatataattatcttggtttaaattattttttcacttgccatggaaagcaaacaaatggaaaagaaaataataaatacgatactggcmmwrmwaaaaaaaaaaaaaaaaa

SEQ ID NO: 4232 - DNA, 785 bp, Rattus norvegicus; identical to SEQ ID NO: 136

SEQ ID NO: 4233 - DNA, 88 bp, Rattus norvegicus; identical to SEQ ID NO: 137

SEQ ID NO: 4234 - DNA, 600 bp, Rattus norvegicus
aggcttcagccaggcctcccatcttctggcccatcagagaggccacacgggagagaaaccctacaaatgtagcacgtgtgggaagggattcagccggagttcagatcttaacgttcattgtagaatccacacaggagagaaaccctataaatgtgagaggtgtggtaaagccttcagtcgagtctcaattctccaagtgcatcagagggtccacagtgaagacaaaccgtatcagtgctcagagtgtgggaagggcttcagtgtagagtctcaccttcaagcccaccagaggtcccacgctggagagagaccctatcagtgtgaggagtgtgggagaggcttctgtcgggcgtccaactttctagctcatcgtggagttcacacaggagagaaaccgtatcaatgtgacgtgtgtgggaaacgcttccggcagaggtcctacctccacgaccaccacaggatccacacgggagagaaaccgtacagatgcgaggagtgtgggaaagtcttcagttggagctcatacctcaaagcccaccagagagtccacacgggagagaaaccgtacaagtgtgaggagtgtgggaaaggcttcagctg

SEQ ID NO: 4235 - DNA, 600 bp, Rattus norvegicus
acctaggagcaggtgagttctgaggacaaaacgacaatccctaatcttgagattgccaatccatctctgtgtatttttccttgtcaaggccccttcttgtctgtattcacatcttttgtttttcttctcttctagtaacctgttgaaatcaaaactcaataagcttatcatttatcagatttatctcagtaaatttacactccacaaaacgtctatacaataaactcagagccaattgatattgatataaactgcctacctagataagacaaattgtcctataaaaattcatcccttaagaaatatccataactaactgtggccatttaaggctgcatggatctgcccccatcttgattcttctcctactcttctctcctcccttcaactctatgccccccttaattttttcactgcccaatcacgggctttgtcttaacttgtgccagtcctcaccttaatataaacaacaatctacagacatgcagttgttttttggtatcaacaaaataataacaatgagtttacatttttgattaactttctgaattgagaagttcttcagcaaatagacatgaccaaaaagtgattctctgctga

SEQ ID NO: 4236 - DNA, 1400 bp, Rattus norvegicus
atgaggaacctcctctctacccagaaggatgctatcttggcccgccatggtgtggccctgttgtgcaaggagagagagcagaccttggaggccctggaagccgagctgcaggcagaagccaaggccttcatggactcctacacaatgcgcttctgtggccacctggccgcggtagggggcgctgtaggtgctggactcatgggcctggcagggggtgtggtgggcgccggtatggcggcagcagcgttggctgcagaagctgggatggtggcagccggggcagcggtgggtgccactggggctgctgtagttgggggtggtgtgggtgctgggctggccgcgacggtgggctgcatggagaaagaggaagatgagagagttcaaggaggagaccgagagcccctactccaggaagaataacagctaggagatgtcgaagcgggaaatatgtggaaggcaggaggaagggtgtggacatgccagggactcagacaagaccacgtatatactgsrcgartgccccatgccaaacattggctgagctggggttttaaggtcggtcccgaaccctgaggaggcctctggccatgaggctgtgcttggagtgcascrgatagggtgtaaggcctgtttctgactatggctaattgctattcactggaacctaggatctcccaccacataaggctccacctcccctacccggctccagtttatttgccctggtgggtctcagcctggaagtttggccctggatcccgaaccccatccgttttacagttgggataggtcccagcataactcgctttggagctgggggcccctaacagggaagacaaagggatgggaatgatagagctataactctagagtggccacttgttcccaaaactgttccggaaggccagacttggctggcctccmtgctyttcagttgggtgtccagatgtgtgtcctgaaccgccctgtrmcccagcctcytgcagtcctcmtaagcctgtgccctgtsccaagcccatttggatggatcaacacagattacatgccaaagaaccacacctctgattgcattctgtgctaaagcaggccctgccaggctctgccaaagtgtggtaaagggaagtgcaggacatgggctccgtcttaaatacatccttccccttgagctgcggggcctctgtgccacactgtaagaccccttggatgcagccctctgaaygacaaacccccagagagcttgcgaacagggagcctctttcggggaatggagatttctaaagagacttctgggctattaaactataaaggatgttgggcatatgaccctttattttatataaaaataaaatgtgtgtgtgtgaatggcaaaaaaaaaaaaaaaaaaaaaaaaaaaaaaaaaa

SEQ ID NO: 4237 - DNA, 1400 bp, Rattus norvegicus
ataaatgtggcaaggctttcaagcaaatcgagggccttactcaacaccagagagttcatacaggagagaaaccctatgagtgtgttgaatgtggaaaagccttcagtcagaagtcacacctcatcgtacatcagagaactcatacaggggagaagccctttgaatgttatgagtgcggaaaggccttcaatgcaaaatcacaacttgttattcatcagagatcccacactggagagaaaccctataaaccctatgagtgtgttgaatgtggcaaggccttcaaacaaaatgcttctcttaccagacatatgaagactcactcggaagaacaatctcaggaggaagattaatgtgggaactctgacaggtgactggtttgaaatgtttaaccctcaagatgtatttagtttgatgatgttagagtctttttttaagagtatgaatctttacatgagatcattagatggtaataaagtttaaacttcatcctaaactttctttccaggaaatagtgtgttttactgtacaatggccatattgataatgattggccaggtagtctcagggattctcttagcctcactttcccagttatgaggttgcaagatgcacagcagcaaaatcaaaatcccacccctaggaaccacatcaaaatctaaatacgacgaagcgctcacggaacatcataactacgaaactccagattaaagaataaagaagaccacatgaccaaaatatggtttaatttacaagccaaagggcaaaacaaaaacttccaaaaaaagggaacaggactcaacaaaaagggaactcgtgttacacacacacacacacacacacacacacacacacacaaatttgtgaaaatgttaattagagcaacaaacagtaaaatacagtaattcatgtactttttacgcgtgtgcttagccaccacaattagtatttattttgcatttatgtttactgaaatactagggcctgtgtaaaatacaggcgagggtatcctctggtatcgcctagcttcctttgttaatgtcttcgttaggttctgaagtaataaaaaattttagggaggtcttttgttttgttttgtttgaacagaatcttaccatattagtgctggctaaccaagaacttgttatgttaaaccatgctgaccttgaagtttttatgttaaacaggctggccttgaactccccaaaaatgtgcctgtctctgcctccccaagttgcctagaattaaaaacttccaaagaaaaacttggaaggaatttttcctaaaattttggtttaaataaaaaattcaaattaaaaatgttggaaaaacaactgggcaatgttttttgttaatgaaatggtactggtttatatcggtttaaacttccaaaaatcccaata

SEQ ID NO: 4238 - DNA, 600 bp, Rattus norvegicus
tctgccttcctaggcatcacggacgaggtgactgaaggccaattcatgtatgtgacaggggggaggctcacctacagcaactggaaaaaggatgagcccaatgaccatggctctggggaagactgtgtcactatagtagacaacggtctgtggaatgacatctcctgccaagcttcccacacggctgtctgcgagttcccagcctgaggaaaccagtgcctccatcgtctccttggctctcagtcgcttccaaagaaaattcagttactggtttctcaagtttagtgttaagtgattcttttgatgggagagaatgtatttgcttgtggcatgaggacacgaatagaagctgaccgggaggcaccaggatctggttgagcacggagcaaaggtcacatccattttgctaggaacacagcaagaagtcaactatggaaaacctacaataaatatcccctgcccttttcaccagaggaccaaaggtggtccttatctgtgccagagtggcagctgatctcagccataaaagcacccaattccctttctccatgaattgtcactaagtggtgtcaaacgtgcctgtttgaagtcatcctcagt

SEQ ID NO: 4239 - DNA, 600 bp, Rattus norvegicus
ytytgtgctgcatgtttctyaagaacagggaawtaaggackacagctcccaggkacaaggttaatacaggataccatcagtccttcctcataataaccctggaagggctaggaggacacaagggacacaaacagccatgtgctgggctctggawtcacatggtccagatatcaataaatattttgggggcttggttttttttttcctgtcaggaaataattttgaaaagttcctgaggaatgtccagtagaatgagsatcaaagggactagcatagatgaaggtagagagggagaagctctgtagtgcagcctgtgtcaytgtcagtcatgatccttccctctcaggtctgcggaaaayccaccactgagctgggatcactgtytcatggggcttttctgcttctttgtgaatgccaaccagcttgcccaggagattgggggagtgtatgtggtagtggacaggggtctaaagtacactggaatttatcgagagamtatagttmwctmttgcattytcttatmmagwatmytytggmaaatsgtacaccgtcaattaaaatgcttttgtgtaadmwdrawaaaaaaaaaaaaaaaaaaaa

SEQ ID NO: 4240 - DNA, 600 bp, Rattus norvegicus
tgagggctgttggggtcggggggcaggggtttggggagaggcagatgcagtttattgtaatatatggggttagattaatctatggaggacagtacaggctctctcggggctggggaagggcagggctggggtgggggtcaggcatctggccacaaagggrtcccctagggacagaggcgctgcaccatcctgggccttgtttcatactagaggccctggctttctggctcttgggtcctgccttgacaaagcccatgccacctggaagtgtcaccttcccttgtccacctcacccagwgccctgagctcatgctgagcccaagcacctccgaaggactttccagtaaggaaatggcaacatgtgacagtgaggaccctgttctcatctgtggggcctccggcagskccgaccyccagcctggccagcacgctgaccctggcaagcttgtgtgttcaaagaaggrgagggccacagcaagccctgcctgccagggaaggttccctytcagctggccccagccaactggtcactgtcttgtcacctggctactactattaaagtgccatttcttgtctgrraaaaaaaaaaaaaaaaaaaaa

SEQ ID NO: 4241 - DNA, 1400 bp, Rattus norvegicus
gaagacctgttcagccttattgagacccatgaagcaaagcctcttaagctctacgtgtacaacacagacactgacaactgccgagaagtgatcattacaccaaattctgcatggggtggggaaggcagcctcggctgtggcatyggctatggttatttgcaccgaatacctacgcgtccctttgaagaaggaaagaagatttcccttccaggacaaatgactggcacccccattactcctcttaaggatgggtttacgcaggtccagctgtcatcagtcagccccccatctttgtcaccaccaggaactgcaggagttgagcagagtctgtctggactgtccattagctcagctccaccggctgtcagcaatgttctcagtacaggtgttccgactgtaccattgttgccgccacaagtaaaccagtcccttgcttctgtgccaccaatgaacccagctgccacattaccaagtctgatgcctttgtcagcagggctgcctaacctccccaacctccccagcctctccaacttcaacctccctgctccgcacatcatgccaggggtcggcttgccagagctcgggaagccgggtttgccacctcttccgtccttgcctccccgaaacktacctggcattgcacctctccccatgccgtccgacttcctsccgtcattccctttggttccagarggctcttctgcagccagcgcaggggaaccactgtcttcccttcctgccatgggcccaccttctgaccctgtcatgactactgcaaaggcagacacctcctccctcactgtggatgtgatgtctcctgcttccaaggtccccaccactgttgargacagagtgagcgactgcaccccmgscayggrgaagcctgtgtctgcagttacrgatgcaaatgyttckgrsgmkkcttaacttggaatcaaccttcagaactgatgtggtctgtctatttaaccatgggatcatatctggaatcgcaaactrccattgatttcatctagtttgtacgtatctgtaggggtcctgtacataattctaaggsgaaactgcacaagagtctgarggcttgtctcccaccaagttgggggaattacagccaaggargggaatctgasaatgtgcytgtatyttaaacaaccaaaaaaagttgttatgggtggcttgctgccargcatctgctgccattytgggatgtwcgtctttggaagaracgssgggggcctgctaraatccctgtrccactggctacrccttstgtaaggaratraratattytatgcctagtgcccacacscaacatttcttgtwctktgtaagtystttgcaaraacacarcaccwcctcctraactgttaaaaggaaamawraawwwrawrwwrrwmtca

SEQ ID NO: 4242 - DNA, 1400 bp, Rattus norvegicus
ttctctactggtgaaacctgcwtccaggcccaacctgtcaacaccccagccaagaatgcatamagccgtgcccaggccaacaagcatgtctggttaggagagaccatcaatggtggcagccagtttgaatacaacgcagaaggggtgtcctccaaggaaatggcaactcagctcgccttcatgcgcctgctagccwaccgtgcttctcagaacatcacctaccactgcargaacagcattgcgtacctggacgaggagacaggccgcctgaataaggctgtcattctgcagggctccaacgacgtcgaacttgttgctgagggcaacagcagattcacctacactgtccttgtcgatggctgctccaaaaagacaaatgaatgggacaagacartcattgaatacaaaacgaataagccatctcgcctgccattccttgacattgcacctctggacatcggtggtactaaccaagaattccgtgtggaggttggccctgtctgtttcaaataagtgaactcaacctwaattaaaaaacaaaaacccstgaaaaaaackkyykcwwkgyywtttcttcctttaaaaaaaaaaaaaaaactgaaagctgaatccttscgtgttttctatgcrcctacatcttaaactktgggcaaaagrgaaggattggtcagrgcagtgtgcamkwkgatscagataagtcccstccmtcaggccctccycrwrmsgtttscagtgkyakwkcwskrgktttttttwtaaacactctgacacctgttgtggacattgwcaacctytgtwagaraacccaaatraawttttraaaataaaataaaaagaaacscwygarsatttgsdccamwwrwrrmwwmwramwatcttccacaragggragkttawaaccsrmwckwbbaaaggtttgaactacskcamgasrcgttyccgtgagtgtwgmccaccccaatgggggttgatgcagacaghsatkaactgaggkacttgktttgbtttcsacacaaaggwgstwattagkagtatttyakacacttgragratgtggatgsagctwgaakaattacagaagactcgatcctycataghgryrygmrshgmrdrggwttyttwwtttgrcttassggycbtytvgttcaccttatycmcaactwaaggratgrrgaacacttgccccagatwctytyctctytakawwmasmattsgwtkhttdgcsarcctcrtttthsttcctccccgkggttccgaagaaktcytgtttmttggacaagcagaaaaaaaattgaattgkmcctwttgtgkmtatgtkagaygtttaaataaawtgtgwrgrrtaaawwaaarmawrwwwrgttttccaaaaaraaaaaaaaaaawwaaaaaaaaaaaa

SEQ ID NO: 4243 - DNA, 600 bp, Rattus norvegicus
  misc_feature (455)..(455): n is a, c, g, or t
atycrktcacmmsrctththtgstcbmtagtcascarcstcagtcsccatyycsgmmmstcrwkgtcacacrrwtarcytgtcacacggatagcacagttcadacawgaykcbwtcagattccrrracgcctaccggttgtttttggcktwtgtwytghhtghdtgtttktkkacracagcamtrytcacagcacattaktactatkagctctttgtagtgttgcsttcaggcmscahagmwmtgttywctyttmkktytwrdkkycsamwdhammaaaaaaaawrvwwawamhwwwwrmwrrwraaacggattgaaaaaaaaattcaatwgcaamccmgtttktgggraaaaawcaaaaarygawatgtgggaaaaaaaatcaccccaatgtkgagggctcagctcctstktagcattttgtacttmaggraatwaawaagaaaarcctgmaanadmwmamawwwwawwamaarrwgaagattgctgtattctatttattcaactcataatttatgttactccctgatctttgtctkttgtcgtgacaaagcatttatttaataaaattatgcattcrgttaaaaaaaaaaaaaaaaaa

SEQ ID NO: 4244 - DNA, 600 bp, Rattus norvegicus
gtagttttacagataccttttagctcctggscatgagccataatgtccaaaattactcttgagcactgatataagtcacttagaccttctttgaggtcagaactcagctgttgctatcatgatgggcagtgcctgagtacaggaaagggttctggtatgtcttcaaactgaatcttaacgagtttactgagtggttaccggtacaggaacataaactataatttctgatcagaacagggtacccctttacatgagctatatagactctgggagagaaacagtggcccagactctcacctgtgtttatacttcgttagacatgtgaactagtcaagtctacagtctcccaaatttacatgtccaatctggcatttaggaacaacaaattgacgtttaagacgtactccctatatgtctcaacacgacaatacagaatgtacaaagtcgctcaactcccaacacgcgtagaccgcgtagtgacatcaagtcacatgcccgcagaacccacagagaggaatgcaccttaccgggcgaaactaattgttttgttctttcttattttctttctgacgatagaagaactcaaagtgaacacaacaa

SEQ ID NO: 4245 - DNA, 600 bp, Rattus norvegicus
gaatacatgrtcagattttttttggaaaaaatmcaaaaacaaaaaaaaaamcaaaaaaawttaaaaaaaaaaagtcaagttcaaaaaccgtcaaatgagaaaatcgcaaggagtgtgacagctgattgattytgttgcttttcttgatttttttttttgtttccaaatgggtttactaaaaagtacatgacttacctgcctcctcmttcgtctgaaaacaaaaaamaaaaaaacaatgccaacstatcccacagcattatrgcaagccttataagccctaaagcattaagttgcactttggtgaggaggggtagcgcagtattctctctggccagtatgagtgaagtttatacttaacatttgatagaaacatagatcaaactgtggcacagtaactcatcagatagctagcgttgactctgggcacaattgaaccaattcccatcstaaatctttccaacaattgactttggtgtacagtgcagtgaacacatagaactcctacttaagtattcgtcagcatccttttgtctctaactcggttctgttttgacagccacacaatcttggcatgtattaagtaaaaaaaaaaaaaaaaaa

SEQ ID NO: 4246 - DNA, 1400 bp, Rattus norvegicus
cctaggatggagtgaatgggggttcacgacgtgtttggcacattgttggtttttctatgcctagggctgggactagaataggagacattgttgctacatatttctgatggacttgtaagacctgtgtcccagccctcctctccattgctactgcctgggtcatctgctggtgaagggtctgcctatctttctcttttgtgcaaggagactttccgggccagcttttcatgctctgtttcatccaccccctcaccctcctgctcatgtattcatatcaaacccatcgtcttacacagatgagcttcctaccccttccatgcctacaaagttccaagggattgcttaggagggaggagatgggaaatggctaaaatgcccttagaatcaagatgaagccagtaagtagggttgggagtgtgcatgtgggagcttgtatggcacaggatgcaatagtcaatacgctgtgctcatgtgcagtccccatggtggctctgcaagcattcccatcccatccccttccccacaagaacgggcctcagcttgacttgggtcaggctgtgtggttccacggccatcctcttccatcatactgccatgggaagaggctgagggccagcccgagcccctctgtagataaacgttcccccaagagccatttatgcggcataatttatrgccatgcatctgtacagaatacttcatwwcttatagtaaatagtgacttgttttatagtgtctcatttggaaatgaggcasggttcttttatgtactgtgaacagaaagaacacctttgtatattttgtaatactgcctttaaacacaactctcgagggtcatgctacacctcmccctgtaaatatgtaaggtacaccccaggaagkkgctttgccctctgttgattactttttttaaaaaaaatgggatctttrwwwmwrwrwwaawwrwatttttttaaaacgggttgagggaagggagaaatacgcaccsccgcccccaagtactgcttccaattgcagggtgctgtaaacaaragaggtgtatttccttactcaaacctcaccatacaccaccatgggaagctgtagtttttggggttcccagwgacaytggracacagagaggmcttagtcccaccttcactcagccttctctttccctggtcttgtggactagctactragagctatgytaagtaaagcatagcattttgtggttwatgaatcttaccgggtttgraagctgatttttgaagctgtatgcaggttatcttttcagtcttgttttaaaaatcaattccacctgtaagaragwaggggagggggscagtgagtgsgatgtaaasysaaaaagaaaaataaaaaatattaattccaatatggtwaaaaaaaaaaaaaaaaaa

SEQ ID NO: 4247 - DNA, 1095 bp, Rattus norvegicus; identical to SEQ ID NO: 151

SEQ ID NO: 4248 - DNA, 1400 bp, Rattus norvegicus
  misc_feature (199)..(200): n is a, c, g, or t
  misc_feature (202)..(202): n is a, c, g, or t
  misc_feature (211)..(211): n is a, c, g, or t
yccwgatttattttggtatcgcaaaaggccagacgggtccttccagttcatcctttatagggataactacaggtcccatgatgcagaytttgttcaaggtcgattttctgtgaagcacagcaaggctgacggaaccttccacctggtgattgctccagtgaggcttgaagacagygctacgtattactgtgccyyarsnnvngstsdcwcnyvyvwkkakggmbrckdkmhmsygaywrastcatctttggacaaggaacccaagtgactgtggaaccaaaaaaacagcctcctgccaaaccatctgtcttcattatgaaaaatggaacaaatgttgcttgtctggtgaaggatttctaccccaaagatgtgaatataagtctcagatcgtccaagaagatarcggaattcgaccctgctatagccatctcccccagcgggaagtacagtgctgtcaagcttggtcagtatggagattcaaattcagtgacatgttcagttcagcacaacagtgaaactgtgcactcaactgactttgaacaatatgcagattctgtcgataatgtaaaaccaacagaacctgcaaaaaatgacacacaaacttcagagccttgccacagcccaagagtcatgattcatgccaagaaggtaaacacgatgtccctcacagtgctgggactrcgactgctgctcgccaagactgttgccatcaattttctcttgactgccaagttattcttttaaggtgggctggcatgaggagactgaaagaaatcaaaagcttagaaagatgctatatccaaggcttctaacttctcagtgcttcaaactgacccttcaccaccacatttacacagctaacaaaactagcttttctgtgatggcaacaagcctaggtaatcctccagtctagaagaaaaacaaaagtcctkgggagtggagtgtgccctggctttacacgctgctttataaaggcaccgaaarytatgaaaacagatccattctactttacccctataactggtatactttgaaaatggtgtttcatccctctctatttacccagaactggaaagtggggaccagtaaatcaccagctycattatccagggggaaaatggtcttgggagagagaacccatacctttttagctaaatgtggaaagctgctcatccctagccagagctcccctcctcctctcctgaggcaggaggtagggcccactctctgtgtttgctccaacagccacataggagagttttcctagtagcactagggtgtgaacaatgttagcactttctgtttctcctgatactttacaaacaaaatcacgtttggcttcctcgaygctctccaagcagacaataaagcttctaaacccgcaaaaaaaaaaaaaaaaa

SEQ ID NO: 4249 - DNA, 1400 bp, Rattus norvegicus
gacttcagcctgaactttgacagaaccttcctgccagtcctctacagcctcctctttttgctggggctgctaggcaatggggcagtggctgctgtgctactgagccagcgcactgccctgagcagcacagacaccttcctgctccacctggctgtggccgatgtactgctggtactaaccctcccactgtgggcagtagatgctgctgcccagtgggttttcggctctggtctctgcaaagtggcaggtgccctgttcaacatcaacttctacgcaggggccttcctgctggcctgtataagctttgaccgctacctgagcatagtgcatgccacccagatctaccgcagggacccctgggtacgtgtagccctcacctgcattgttgtgtggggtctctgtgtgctctttgccctcccagatttcatcttcctgtcagccagccatgatcagcgcctcaatgccacccattgccagtacaacttcccacaggtgggtcggactgctctgcgtgtactgcagctagtggctggtttcctgatgccccttctagtcatggcctactgctatgcccatatcctggctgtgctgctggtctccagaggccagaggcgctttcgagctatgaggctagtggtggtggtggtggtggcctttgccgtctgctggaccccctatcacctggtggtgttagtggatatccttatggacgtgggagttttggcccgcaactgtggtcgagaaagccatgtggacgtagccaagtcagtcacctcaggcatgggctacatgcactgctgcctcaatccactgctctatgcctttgtgggagtgaagttcaaagaacaaatgtggatgttgctcatgcgcctgggccgctctgaccagagaggmccgcagcggcagccttcatcttcacggagagaatcatcctggtctgagacaactgaggcctcctacttgggcttgtaattcaggaatgcaactggagcctgtgcaacccaagtcctaamasamtycmggcwckwskccttgtagttgggctagctctaacttacccataactttgytgctgggactcagtgacagctcagcatatccaggtctcctgagaaccactctcagctccaaggacagcagcacctttastgagccatgccctgcctccgctgttttagaactagttgcctggagccccaccacccttctaaattagcagatagcactcagccatccctgtgtgagaagaggaagagacaaatagcactgaaggccaggccttgctcagcactgaatgtgtttatggtctccaatatctcaacatgtgcccaattttatggctagaaaccctgcttaaactttcaataaacwagatawtgrggaaaaaaaaaaaaaaaaaa

SEQ ID NO: 4250 - DNA, 600 bp, Rattus norvegicus
tyatttttccagthatgatcytggcmctkgtagctgtcagaaaaggyatggactacctcttctcccagcaygacctcagcttcctkgatgatgtcattccagaraaggacaagaaaaagaaggaggatgagaagaaraagaaaaagaagaarggaagtctggayagygacaaygaygattctgactgcccatactcagaaaargtyccmagtattaaaattccaatggacatcayggaacagcaacctttcctaagygatarcaaaccytykgacagagaaagatcmycaacattccttgaacgccacacatcatgctrataaaattcctttccttgagtcactgggtttacccagtcctccaagatctccagtgaaagtcgtgcctcaaattagaatagaacttgagtctgaagacaacgattatctttggaggaacaagggaacagaaaccacgttgtaacctgttagtcattctcaaaactgacagttctgttgttaactgttctaattttttttttgtctatgtattttaaaaacttttgtttggtcactgactgaataatacagtcactctctctgcttctctcttgcataggta

SEQ ID NO: 4251 - DNA, 1400 bp, Rattus norvegicus
atatcccwagtgtctgatamcaaggcttccctgccacccaagccagggaccatggcagctgccagcagtgggccagcctctctctcttcagtggcttcctctcccatgtcatcctctttgggaacagctggacaacgagccagttctccatctctgttcagcgcagaaggaaaagcaaagacggagtytgcagtgagcagccaggctgccatcgaggagctcaagatgcaagtccgtgagctgagaaccatcatcgagaccatgaaggaccagcagaaacgtgagattaagcagttactgtcagaattggatgaagagaaaaagatccggctccgattgcagatggaggtgaatgacataaagaaagctctccaatcaaaatgaatacttgatcattgaaacgccacattattcaccccgagtgcaagamtcagatattctgccccaatcaaaatcatcttgtgccaaaaaaaaaaaaaaawwaaargtttgattcatcgtgtccctgtttgaacattcagcacaaaagtcttcttagcacaacacaattctacccaagagaagactctttcccatggtgttgtcctgggtccggcagtggttgtgatttagagccaaacgtgctaaaggcttttctaccttgagatctccggcaaaatgaaaactcaggcagtttagtccatagtagtactattttgatgatattttccattaacaaaatgtaatttcggattattcgtttataggctttataatgttatggttttttttttttaaatcgtgttttgtcacagatgcccctagtgtttgtgctaacgtagtcagaagcaagtgcctcactcacttgctgcagatggagcaaatgctgcctggctttgtattccccatttaggagtctatcacatatgcaatttgaggtccaatccttccctttccctgccagctgacccccaccactctaagagaaattttagcttatatatgatggtatatttacaaaaagagaaagaaaaaatctggtatttgcaatgatctgtgccttctttctaccacccttttgattggagcttttgtgatgcagctaccaagattccaaataaagaaataaaaatcagccacttttatccctgtccactagaggccactgtcttcacagcttctctcaccctagccaaaggtcctaagaggaatccgctgagaagtctggcctgctctttggtaccagctgtgacttttccgtttctcctgctttgaggttgttcacgagactagaaatgtcattccagcttgattgttttatcatcagccaagttaaacccctgcttcctgccttttacacctattgcgtgaacagaatatgcattattaaagcaaaaataaataaaaataaaatgcaagtg

SEQ ID NO: 4252 - DNA, 1400 bp, Rattus norvegicus
cgytgggaatgcctacgaactyttcaccaagatcgcctccagcctatttaagagcggcatcagctggggccgtgtggtggctctcytgggctttggctaccgtytggccctgtatgtytaccagcgtggtttgactggcttcytgggccaggtgacctgctttttggctgatatcatactacaccattacattgccagatggattgcacagagaggtggttgggtggcagccctgagtttgcgtagagaccccatcctgagtgtagtggtaatttttggtgtggttctgttgggccaatttgtggtacacagattcttcagatcatgaytgccccgggagctccagccacatgactgcytggaytaaactaaacctytccccaacccmcwmmmmwrmaamarwmmwctcctgcctctcagggcaaacaggcacccctgctttggaaagccacggcccgggggtcatggaggcagcatgaccaccccaacatcgcatggtgctactgaaccccatcctgtctcagaggggctgacagatgctctgggggggggggggtcgggcaagaggctgggccaccgcttcccagaaagttagttttagttttatactcccctctggatacaatcctcccttttcatccgctctgcccaaagtcagaacattggggaccagtggctctaacctgccttcccagcacacctgctactttggaaggtcggaagggacctaagcacagtcctgaccctccctacataggaccagctgtaggggtgtgtgatctaccctgccctcccacctcatcttccackryccmmtcctttatcccccctccttctcccctcccctcccccgatccatttttgcctttgcggctggactctcagggattccgagcccagagtgagggcagaggtgagagctcagaccacagctgtctgaacacgtccatcaaggccctccaaaccccaagtgcctccctgaccactgctaccaacctagtgggtaagggaagaccctcaccttctccccagtgcctccctgctggggagggcagtcactctgacaggggaaggggtgggcattcagtgggaggtkctcacgctrgagaactacaccagcaaaagcaactgtggatctggttgcaatgtgaccccccctaaacctgtgaatacttgaaccccaccttcacccatgctcctgttatgcctargtcctcctcgggtggggtggggggtgtttttctctgtcttgcacaacataggggtgagaaaagtcttgattaagccaaatgtagcaagggtggggggaggcagatggattcccccacctcgccctcggtgtytggaaataaacggtgcaatgcccccmmmammmmaaaaaaaaaaaaaaaaacctcgtg

SEQ ID NO: 4253 - DNA, 600 bp, Rattus norvegicus
tccttcttgytcgtatggtggragtggtggccargggaagatgagtggtgtcccggatgatgcctgtcaaggtcccacctcccctccggctgttctcatgacagctgtttggttctccatgacccctatctagatgtagaggcatggagtgagtcagggatttcccgaacttgagttttaccactcctcctagtggctgccttaggggmmtkkgaagarcccagtgtgggggcacccattagaatctttgcccggctcctcacaatgccstagggtcccmtagggtacccgctccctctgtttagtytacccagagatgctcctgagctcacytagagggtagggacggtaggytccaggtccaacctctycaggtcagcaccctgccatgctgstgctcctcattaacaaacctgcttgtctcctcytgcgccccttctcagtcagccagggtctgaggggaagggcctcccgtttccccatccgtcagacatggttgactgctttgcattttgggctcttctatctattttgtaaaataagacatcagatccaataaaacacacggctatgchcraaaaaaawaaaaaaaaamwmrag

SEQ ID NO: 4254 - DNA, 600 bp, Rattus norvegicus
tagaatgatctcctgactggccagggccaggagcaccaaatgagaatgtaagagggcccccccgcccctgtgcgacagtggggttctggctccctcactccccactgctaccttacagggaccgttgtagagagggctggacttcatgtccagggtgggccttggcctttttggtgcccaaagctgagcctgtagggaggctctgctcttatgtggcaagcctctctcctacatggcaccttgtgcctggggtgagtcatagctcgacacctccaggctgcccgcttcccatcctgtccctcaaattacgggtacctgaagggggggtggccataacttctatcagaaaggtttattccagaggaaaatgtacatttatataaatagatgttgtgtatgatatatatagatatatacatacatatatataagaatatctatatggaaaaaggcaaagctgaggcccaagggagcaagacaccccatggggctcaccagtgagatggcacaggcaggccgagaagcaggggccttgtctggcattgcagtgttgtttgtatctggacctgtatatttgtaaagctatttatcaaccctcgg

SEQ ID NO: 4255 - DNA, 600 bp, Rattus norvegicus
catactgggtacctctcctgctgccgcttcctggacgacaaccaaatcatcaccagctctggggacaccacctgtgccctgtgggacattgagacaggccagcagacagtggrwtttgctggacacagtggggatgksaygkccctgtccctggsccccgatggccgcaccttygtgtcaggtgcctgcratgcctccatcaagctgtgggatgttcgggawtccatgtgccgacagacattcataggtcacgaatcggacatcaatgctgtggytttcttccccaatggttatgccttcaccacgggatcagatgatgccacatgtcgcctgtttgacctgcgggctgatcaggagctgctcatgtattcccacgmcaacatcatctgcggsatcamctcggttgscttctcacgcagsggscggctgctgctcgctggctatgacgacttcaactgcaacatctgggatgccatgaagggtgaccgtgcaggtgtcctcgctggccatgataaccgtgtgagctgccttggggtcacagatgatgggatggctgtggctacaggctcctgggactccttcctcaagatctggaactaa

SEQ ID NO: 4256 - DNA, 600 bp, Rattus norvegicus
agaactcgaatgatgaatcagagggcaatagtgggacatgtggacctctacaagggtactttggatggtattttaaagatgtggaaacatgagggattttttgcactctataaaggattttggccaaactggcttcgacttggaccctggaacatcattttttttattacgtatgagcagctcaagaggcttcagatctaagamctggaaayccatcagcccagccctgctgccctttctaccgttcctctttgtgttcctgatgtattttgacaaagatgtgtgtgtttacagaaccagcagtctcgcagggcccctgactgaagagtagtasgrcgackwrrgtttatgcatttgtgttccctcttccctgagaagaagtttcgacattgagagtgtgaccccagattggtgtcttctgtgaagatggatactgatgggtgacattcaaaagggcctcctttttaactgtagcttcaatgtagttggttttcccgagacaggctacagcagcaggctaccggcacagttactgctatgtgtgtttttgacctcagttctcattaaagtatttattgrtygaaaaaaaaaaaaaaaaaa

SEQ ID NO: 4257 - DNA, 1400 bp, Rattus norvegicus
aaagccccactggtgctgctgtgatgaggcccatgctgcagtcccagcaggctttctttaatgcccaaatggcagcccagcagaaacgagagctgatgaaccatcacctgcagcagcagaggatggcgatgatgatgtcacagccacagcctcaggccttcagcccacctcccaacgtcaccgcttcccccagcatggacggggtcttggcaggctcagcaatgccacaagcccctccacaacagtttccgtatgcgacaaattmwsgarkgggacaaccgccagagccagcctttggtaggggctctagtcctcccagtgcaatgatgtcatcaagaatggggccttcccagaatgccatggtgcagcatccccagactgcacccatgtatcagtcctcagagatgaaagggtggccatcagggaacttggccaggaatggctcttttccccaacagcagtttgctccccaggcgaaccctgcagcatacaacatggtgcacatgaacagcagtggtagtcacttgggacagatgaccatgactcccatgcccatgtctggcatgccgatgggtcctgatcagaaatactgctgacatgtccctggtgggacactgtacagatgacactgcacaggaccattgggacataaggagtcattgtctatgyatccagcttggaagcaaggccagcgtgaccaccaccgggtgttcccaagtgctgtcatctgagcagaactgggtctcaagctgaagcgcactgtctacctgatgccctgcctctgtgtggcatggkgttctscctcatgtaggatgtgatctggagatgggatgttcatgatcaccaytctcttacgtcacttccttytgccccmccagccaaagtyttcmcataaatctagatggctagggtttctgtcctgcagcactggaaggggagcmcagactgccttgaggcagcaagtggccctgtgtcctctcctgtcagtgcaatcagtgtttstacgctcgtgtcctttacaggggtagtccccagagtctgttgtcctggatctcctcctgaggaggtccccataccccgtaattctcaaggatttgtcattgatgtttaatggctttgcagaagggaaaatgaggtggcaatattgaattttcccgccccaatgtgcarmmaarwrmmmwwwamtgaggaagtcmcagagaaatgcaatgttcttgagggcatgaggaatggtgaaccmcattcctggtttttgtctgcmctaatctgttaggacaagaacatgattgttttttktttgtttgktgtttctttcaagtactggcgtcaccctttgcctatatggtagagcaataatgctttgaaataaacttgtgaaacccaaaaaaaaaaaaaaaaaa

SEQ ID NO: 4258 - DNA, 600 bp, Rattus norvegicus
ggcagttcgaagaattctggctacagaagataggtcagatcacctgattcaaacagacacagtcaatctgcaccgaaagcccaagccaaactcttcttgctgttgatggcattaaagggatagctggtgcattttaaccaaccaacacacacacacacacacacacacacacacacacacacacacacagacacacgaatgagagtggagaacaaattagtatgcagaagagttcatctaytaataaaattcawttaacgcatattgttscctcattagtccwtggragaagggmccwctcactytgaaggaatctatttastcagtawtggcacattacatttataaactgtaatggttgtctattrtttsttaaaattaaaacattagtgctaataagatgaccaagaattgayttwwttgtaattcagacataaatcttgactattcttagattgttttgccccacaagaaaatggagaattacttttatatgtgtatatttttatgtaatgagcattctattcttggtccaggaaagtaaattcctacagcaatactattaaagattaaaatctaatgcaaaaaaaaaaaaaaaaa

SEQ ID NO: 4259 - DNA, 600 bp, Rattus norvegicus
tctggacttaatcatgaagagaatggrgaagtgtgtagagaagmcgcaggyyccggacactgtcaatggtgtgaattctgggaaggtcgatggggagaagccagcagagaagaaatgtgcctgctagaccctcagaggaaccagtgatggagagctcacccaaatcctatgtcccaaaacaatgacaaacacagcgtggttgttgagtagtcgctcatgagcgatggcgtgtctttctcccctgaccccaatctattttaacaaagcagaatggtcatagtgttaaaagaactgtcctgtgatcccaagtcccttccaaacaaaactcaaagctgccccacgtgaatgctcagttgtatttttataaggttgtatatatkaaaaaaaaaarwawwrrtcagttttaaatgaaagcacattattactgtcagcctggagaatggaagaggctaactaaatggagatgataaaaggatgatttctgctttcatctatgtatgcggagtatgactcatacaacttctatatttgcactggggaagacatattcctaaaaatagatgcataacaaagatgaaagcgacccaagattattcatgg

SEQ ID NO: 4260 - DNA, 600 bp, Rattus norvegicus
mtaaksatgktmctaccccagktrtggggcttgttccctgctcccatccctaccactgtagccccararagggmtgggctcaragckwtgtcacttrccacwtgmkgtmkccmaaywtkkkwkkkdtbwkyhybkyybkkcacwayarartttwyydkraaammaddmwmawrwddvramarmrrrraaramwaatmsatctgggttgggtggcycargtgaaktadtgcggcttcttcacattgatgccawacycsctgarggcasgggtcaagtcctccatggttasggtgtacwtkcgatscttgctcttgctccgggagctgccagaggctgtacccttcawtttgcastgctgtmkggcatcattggcaatakctgasatgaatttcygggcasctagtgagatgagccgaattatgcgtgggtctgaagcttcaaagccagcacggttcaggtagtrrccagtcactgcwtccgggatcgtaggtgtataaycctycaactgcatcaagaagtccactartggtgtgctggacactacgggcttcacttcwccgttggccgcgctcgstmgdrcstaaaccccgtcctcgtgcc

SEQ ID NO: 4261 - DNA, 600 bp, Rattus norvegicus
tyccaaatccctcccttgtgtctcaagtgccctsacsmrgggccccagmatggcctagaagtactgaggcyccgtcctggtgctgaggcccagccctgggcwccaacccttgcctcttctgcagggatcacctatcatcctgaggcccccaacccaagggtcacatttagtgctgctgctttcactgctgcaccaatgcccttggctggcctgagcagcmtatgcaaygtgcttgctgagggtggaasccccaaccctctggkaacgtggctccagcagcctggacacccaccttgytmtgtgmtgstaggttgtggccacasctargattataaaacctcattttccagaawwrhwrrmamwwrrttttttgataataccctwtactyttggagttkaaataaagggtcttgatggggaaaaagatcarrrrarrrwwaaaaamwcaactytgtttatttacaaaaatagataatgcatatgtaagtatatatattaaaccctccccccagcacccacccacccacagtccccttcacttgtaccccacccaccccctttataaacaaaggctccttggtccaaaaaaaaaaaaaaaaa

SEQ ID NO: 4262 - DNA, 314 bp, Rattus norvegicus; identical to SEQ ID NO: 166
  misc_feature (207)..(207): n is a, c, g, or t
  misc_feature (277)..(277): n is a, c, g, or t

SEQ ID NO: 4263 - DNA, 533 bp, Rattus norvegicus; identical to SEQ ID NO: 167

SEQ ID NO: 4264 - DNA, 394 bp, Rattus norvegicus; identical to SEQ ID NO: 168

SEQ ID NO: 4265 - DNA, 421 bp, Rattus norvegicus; identical to SEQ ID NO: 169

SEQ ID NO: 4266 - DNA, 600 bp, Rattus norvegicus
ctccccattcttcccattgtggaaattcggcccagrgwgtagagctgcccgcccaaggtcatgcaamaaggaggtggtgtccaacacaccctgctttggctgcttctctcggtcagtcccctccgacagtcagccactttcttcctcacagcaagtaaaggaaagaaatacacggagagcaagcaaagtgttcaacagagactcacgtccaagtgtggtttctatggtatgtactgtgtgtgtgtgtgtgtgtgtgtgtgtgtgtgtgtgtgtgtgtacacgtgctcacatggtttgttgagaatctcagctccagagtgtagagacaaccagacaggccattcagcctggtttctatctccctgaagacggtgttcccacaataaccagagtcctcacatctgcaggsrwgsgtcccctttagagatggacacaaaaagacactgatagagcaaaaataatcaaaccaacacataccgattaaaaccccaggggggcccaaaatcaccacgttacctaataacaactagaggccagtttttctaagtgccaggcctctctgaggtatcactgtcccagtgttttcctgtgctgtgaatc

SEQ ID NO: 4267 - DNA, 1400 bp, Rattus norvegicus
  misc_feature (1209)..(1209): n is a, c, g, or t
ttttttggaagctgaaggtatccatctgcagacattgaggcccaagttgaatttggattcragtggattcttaacacttctgcctgtgctgaagagaagcttcataaggaacaagcaagttgaatagagaagatagtgatcaataagaggcatttagtggtctttttaatgttttctgctgcgaaacatttcaagatttattgattttyytyyyycattyyccccaccacactcasacacgcacgctcacactttttatttgccataatgaaccgtccagcccctgtggagatctcgtacgagaacatgcgttttctgataactcacaacccarccaatgcgactctcaacaagttcaccgaggaactcaagaagtacggagtgacamctttggtccragtttgtgatgctacctatgacaaagctccagttgaaaaagaagggatccacgttctagactggccatttgatgacggagctccgccccctaatcagatagtagatgattggctaaacctgttaaagaccaaattccgggaagarccaggctgctgtgtcbcagtgcattgtgttgcaggattggraagggctcctgtgckagttgcacttgcactgattgaatgcggaatgaagtatgaagatgctgttcagtttataagmcaaaamasragrggagcattcaattccaaacagytgctttacttggagaaatmccgacctaaratgcgattwygctycaragatwccaacgggcactgctgtgttcagtakaagcagaggamgsccggctggatcgtggcattasagggaactmtgggtacctggaaatgtgaatctggattcywacctgtgtyatyaaagtrgtgatggattccgtactcctcgactyctcatgattgrgargaaggcaaacgataaagaaatcccyctrtracacgaataaaatgtttwrraaarraaaaawraaarrraaarvrattawtywagtgaaagawgattttgctcctagttttggagttttkwtttttgccaggattgaattatttcraatctcctgtgttttttaagctttttcaaaatagatgtytgaggaaaaccagcagaatattaaccagtgcggagccagttgttggggagcacacacttccattatgcttggsacataggtctccttgwggtgggatttgggggaggtagattttccctykntsskgcctccctcccttbtcctgataracgtmsatsgwrymgaaagaaacccttgttgctgtaratgtgcgtgtgtctggcagccttaagcccacctggscamttttaggaaaaaaaaaaaaccaaaaaayaaatmaatgrataaataaataaaaataaargcaaaraaaaarmaaaaaaaaaaaaaaaaa

SEQ ID NO: 4268 - DNA, 1077 bp, Rattus norvegicus; identical to SEQ ID NO: 172
  misc_feature (686)..(686): n is a, c, g, or t
  misc_feature (922)..(922): n is a, c, g, or t
  misc_feature (968)..(968): n is a, c, g, or t

SEQ ID NO: 4269 - DNA, 600 bp, Rattus norvegicus
  misc_feature (250)..(250): n is a, c, g, or t
  misc_feature (295)..(295): n is a, c, g, or t
  misc_feature (355)..(355): n is a, c, g, or t
  misc_feature (417)..(417): n is a, c, g, or t
  misc_feature (551)..(551): n is a, c, g, or t
  misc_feature (558)..(558): n is a, c, g, or t
gtcattgtttttgatagctgagtagtactccattgtgtagatgtaccacatttttttaatccattcctttgttgaagtctggagtctttccagcttctggctaatataaataaggctgctatgaacatagtggaacatgtgtctttgttgtatgttggagcatcttttggtatatgcccaagagaagtatagctggtcctcaggcagttcaatgtccaattttctgaggaacctccacattgatttccanagtggttgtaccagtctgcaatcccagcaacaatgcaggagtgtncctctttctccacatccttgccagcatcagctgtcacccaagtttttgattttagccatnctgactggtgtgaggtggaatctcagggttgttttgatttgcatttccctatgactaagganactgaacattgctttaggtgctttggccattcgatattcctcagcttggaatgttttgtttaactctgtacctcatttttaatagggttatttggctctctggagtctaacttcttgagttctttgtatatttnggatatnagcccctctatcagaaagtaagatgggtaaagatcttcccac

SEQ ID NO: 4270 - DNA, 600 bp, Rattus norvegicus
caagaagatagcggaattcgaccctgctatagccatctcccccagcgggaagtacagtgctgtcaagcttggtcagtatggagattcaaattcagtgacatgttcagttcagcacaacagtgaaactgtgcactcaactgactttgaacaatatgcagattctgtcgataatgtaaaaccaacagaacctgcaaaaaatgacacacaaacttcagagycttgccacagcccaagagtcatgattcatgccaagaaggtaaacacgatgtccctcacagtgctgggactrcgactgctgctcgccaagactgttgccatcaattttctcttgactgccaagttaywckwkkmaggtgggctggcatgakgagactgaaagaaatcaaaagcttagaaagatgctatatccaaggcttctaacttctcagtgcttcaaactgacccttcaccaccacatttacacagctaacaaaactagcttttctgtgatggcaacaagcctaggtaatcctccagtctataagaaaaacaaaagtccttgggagtggagtgtgccctggctttacacgctgctttataaaggcaccgaaaactatgaaa

SEQ ID NO: 4271 - DNA, 600 bp, Rattus norvegicus
ctcagactcatgccccggagaagcagtccaacagcactttacgctcagtcagtgaactccccatcgtgcaccgggactggctcaatggcaagacgttcaaatgcaaagtcaacagtggagcattccctgcccccatcgagaaaagcatctccaaacccgaaggcacaccacgaggtccacaggtatacaccatggcgcctcccaaggaagagatgacccagagtcaagtcagtatcacctgcatggtaaaaggcttctatcccccagacatttatacggagtggaagatgaacgggcagccacaggaaaactacaagaacactccacctacgatggacacagatgggagttacttcctctacagcaagctcaatgtaaagaaagaaacatggcagcagggaaacactttcacgtgttctgtgctgcatgagggcctgcacaaccaccatactgagaagagtctctcccactctcctggtaaatgatcccagagtccagtggcccctcttggcctaaaggatgccaacacctacctctaccacctttctctgtgtaaataaagcacccagctctgccttgggaccctgcaaaaaaaaaaaa

SEQ ID NO: 4272 - DNA, 332 bp, Rattus norvegicus; identical to SEQ ID NO: 176
  misc_feature (12)..(29): n is a, c, g, or t

SEQ ID NO: 4273 - DNA, 1400 bp, Rattus norvegicus
agaacaagctgatcgccctgggagaagaaaatgccactttaaaagctgagctgctctccctgaaattaaagtttggcttaattagctccacggtgtacgcccaagaaatccagaaactcagtaatcccacagctgtgtattttcaggactaccagacatccaaggctgccgtgagctcttacgtggacgagcatgagcctgcgatggtagccggaagttgcatctctgtcatcaagcactctcctcagagctcgctctcggatgtgtctgaggtgtcctctgtggagcacacacaggaaagccccgcacagggaggctgccggagccctgagaacaagttccctgtgatcaagcaggagcccgtggagttggagagctttgccagggagtccagagaggagcggggtgcctattccgcctccatctaccagagctacatgggtagctctttctccacctactcccactcccctcccctcctgcaggtccacggctccaccagcagctccccgagaacctcggaggccgacgagggtgtggtgggcaagtcttctgatggggaagacgagcagcaggtccccaaaggccccatccattctccagtggagctgcagcgggtgcacgccacggtggtgaaggttccggaagtgaacccttccgccttaccgcacaagctccggattaaagccaaggccatgcaggtcaaagtggaagctttggacagtgagttcgaaggcatgcagaaactctcttcaccggtagatgcgctagccaaaagacattttgacctggagaagcatggcgcttcgggtacggcccattcctccctccctcctttctcggtgcaggtgacgaacattcaagattggtccctcagatcggaacactggcatcacaaagaactgggcggcaaaactcagggtaccttcaaaacgggtgtggtggaagtcaaagacagtggctataaggtttccgaggctgagaatttgtatttgaagcagggggtggcaaacttatccgcagaggtggtctcgctcaagagattcatagcmacacagcctatctcggcttcggactccaggtaaatggctactgactgagctatgcgtggaagaggatgctcttggtaccatactgaatttcccactggacctctaaagtcatttcactgtagtgtgcacaacggtgtctgtctggtgtccttgtgtacacaacgytgaagacttgatgccctcactctgcytggcgtgtagtcagatagcccttccctccccaccccccagaggctgtacataccgaacgttatttttgctctatgataaagtgtgtacgttgccagtttcaataaaggattggtggcaaacamaaaaaaaaamaaaaaaaaaaaaaaaaaaaaaaaa

SEQ ID NO: 4274 - DNA, 600 bp, Rattus norvegicus
gcaccttcataagtgatggctgccatcaggaagaaactggtgattgttggtgatggagcttgtggtaagacatgcttgctcatagtcttcagcaaggaccagttcccagaggtttatgtgcccacggtgtttgaaaactatgtggcagatattgaagtggacgggaagcaggtagagttggctttatgggacacagctggacaggaagattatgaccgtctgaggcctctctcctamccagacactgatgttatactgatgtgtttttccatcgacagccctgatagtttagaaaacatcccagaaaartggactccagaagtcaagcatttctgtccaaatgtgcccatcatcctagttgggaacaagaaggatcttcggaatgatgagcacacaaggcgggagttagccaaaatgaagcaggagccggtaaaacctgaagaaggcagagatatggcaaacaggattggcgcttttgggtacatggagtgttcagcaaagaccaaagacggagtgagagaggtttttgagatggccacgagagctgctctgcaagctagacgcgggaagaaaaagtcggggtgcctcatcttgtgaagc

SEQ ID NO: 4275 - DNA, 1400 bp, Rattus norvegicus
tgaatgagggcgacagtgaacagctacagagggagctgaaggagttggccttggaggaggagaggctgatccaggagctggaagatgtggaaaaaaaccgaaaggtggtggcagaaaacctggagaaggtccaggctgaggcggagagactggaccaggaggaagctcagtaccagcgagaatatagtgaatttaaaaggcagcagctggagctggatgatgagctcaagagtgtagagaaccagatgcgctatgcccagatgcagctggacaagctcaagaaaaccaatgtcttcaatgcgaccttccatatctggcacagcggacaatttggcacgatcaataatttcagactgggtcgcttgcccagtgctcctgtggaatggaatgaaatcaatgctgcctggggccagacagtgttgttgctccatgctttggccaataagatgggtctgaaatttcagaggtaccgactygtkcsskatggaaatcactcgtatctggagtccctgacagacaaatctaaggagttgccgttgtactgttctsggsskywrmggtttttytgggacaacaagtttgaccatgcaatggtagctkttctggactgtgtgcagcagttcaaagaakakgtggawaaaggagagactcgattttgtcttccgtacaggatggacgtggagaaaggcaagattgamgacactggaggcagtggcggctcctattccatcaaaacccagtttaamtctgaggagcaktgracamaggcgctcaarttcatgctgacgaatmtcaagtggggtcttgcttgggtgtmctcacagytctmtaacamgtgacttgctccttavgggatatttgcctttaagrttktacattttgtktggtttggaaagatgctttaaattaaatttgggtaatattaamccacatkttdmcawtmmmaraawmmmmaraarcywcktkmykttacaatatgacagttttcagagcacagcacgccatgtatagcaaagagccctsccgtagtttggctcaaccccatgctgtcctttccctcttcsctggaamcaactaatttaaathkgcykwgktttyttttytaagttgaattgacattaatgtgtytycactggattttatctctctcaacttcctgtacttaaaatttgaaacagaaaagttttgagatgagatgcttgtggcacacagttgggtaatgtggggaarggacaagaggtamaggtttaactctgtcctcacttctagtattgaacgcttactgtgctaactattggaatyacaaaatgctgtttgmtactgtttgagatgtggaaggayttaattatttgtaataaaggatttgctatggtctwttaawwammaaaaaaaaaaarmww

SEQ ID NO: 4276 - DNA, 600 bp, Rattus norvegicus
cttgacttactgtgamwwwwrwrwarmrwmmaaggtgtacagaggaaaatagtggctgaagtgttccctaggtatcctcactgactagctccatgtgatacacactacccttggcactttcttttctggactgtatctagacatgcattgacccttgtcagtaacattctgtgctsatttaaggaaattagcattattttaatatagtccatagttatctgatcagaggattagatctctaagtctacctgtgtcttcaagatggttatatttttctgttggttgatagtataccattttttctcaattwccaaaggacatatgaaatgttctctattgttatttgttgatacagtcaaatacagaaattaaatttgggctctgtgtgataacatgacttgcttgaattattaggttttatagcagacattaaattggatgattttatatacccaaactatggtctctatcttaggagtgttgtgggtccagaatgatgtctgtcttttctctttcccatctgaaaaattgtcaattaaaaaaacttttcaaaggtttcaaccacaaagcacttctttttctaaaaaaaaaaaaaaaaaa

SEQ ID NO: 4277 - DNA, 600 bp, Rattus norvegicus
gctacctgcctggaataaatataagaaatggcgtgctcccaaatccaggcaaggactttcttccatcaagttcatggtccagttctggtttgtctggaaaatcttcaggaacggtatcagtagtgagcaaaataacttcagttggctcvggctccacgagctytrstggactgactggargctacatccytycctttctgaagaaggaagtcggctytgtcatgcagagggtccagctggcgcctctcgcagcccyttcccccggmtactcttccctcaaggccgtgagacctcacccagggaggccattctttcacacccagcytaggagcacgcctggcttgattccacgacctccagctgtgcagcctgtgcacggcaggatagactggtcttccaagtacccatctcggcggtgactgtcccagctgactccgttgtacccccacaaccacgtggcggtgtaaaagcacccacacttacagcagttctgaactaacacatttcaatatttcttttaaatgtttttttaaacattgatttgaatgcaataccctctttttgtataaaattattttattctaaaaaaaaaaaaaaaaa

SEQ ID NO: 4278 - DNA, 1400 bp, Rattus norvegicus
  misc_feature (1159)..(1159): n is a, c, g, or t
agaagaactggaccggggctgccgggaatgcaagcgcaaggtagccgagtkccagcgcaagctgaaggaactggaagtggctgagggtggtggccaggtggagcttgagcggcttcgagcggaggcacagcagctgcgcaaggaggagcgaactgggagcagaagctggaggacatgcggcaaaaaggmgaagaacatgccctggaatgtggacacactcagcaaagatggcttcagcaagagcatggtcaataccaagcctgagaaggcagaggaagactcagagsaggcaagggagcagaaacacaagaccttcgttgaaaaatacgagaaacagatcaaacatttcggcatgctccaccgctgggatgacagccagaagtacctgtcagacaatgtccacctggtgtgcgaggagacagccaactacctggttatctggtgcattgacctggaagtcgaggagaagtgtgccctgatggagcaggtggctcaccagaccatggtcatgcagttcatcctggagttggccaagagtctgaaggtcgacccccgggcctgcttccggcagtttttcaccaagatcaagactgctgaccagcagtacatggagggcttcaagtatgaactggaggcctttaaggagcgtgtgcggggccgcgccaagstgcgaatagagaaggccatgaaggagtacgaggaggaggagcrcargaagaggctaggccctggtggcctggaccctgtggaggtctacgaatctctgcctgagsasswgsagaagtgctttgatgtgaaggatgtacagatgctgcaagacgccatcagcaagatggatcctactgatsccaagtatcacatgcagcgttgcatcgattctggcctctgggtccccaacyccaagtctggtgaggccaaggagggrgaggaggsgggccccggggacccattgctggaagccgtccccaaagcgggcwwcgagaaagacatcagtgcgtgacccttctccagaaaaggaaaccmagccassatgkmsctwgmkcccgacttyttcactthtgstgctcctcacgtcmtggcycrtggcctgccccatgtcccctytcctccggsmtgtssmsrkcamtcakcagattctmtgswtcgggttraggggstntghkryhysyagcccccccacccccatcagcgttatgccaaagtcctgkgggtytggrraggggcagcagctsccaggttggtccaccgggttgggrrtacacatrtccccatbtgggcagggtctgtccctatgggtytatggtcactgtttythttctgtstagctttytgtcctgcaamtgkcaacaatgwccaataaacagttccaggtgctgrrarmmaaaaaaaaaaaaaaaaaa

SEQ ID NO: 4279 - DNA, 600 bp, Rattus norvegicus
caaaagagttttcctcatcctattgataaatgggcaattgctgatgcacagtctgccatagagaaacgaaaacgaagaaatcctctcttactacctgtggacaaaatccatccttccttgaaggaagttttggggtataaagtggactaccatgtatccctctacattgtggctgtattggagtatatctcagcagatattttgaaattggctggtaattatgtttttaatatccggcattatgaaatatctcagcaagacattaaagtgtcaatgtgtgcagataaggttttgatggacatgtttgaccaggatgacgatataggcttggtttctctctgtgaagaggaaccttgttcttctggtgagctaaactattatgaccttgttagaactgaaatcgcagaagaaagacagtatctacgggaactgaatatgatcattaaagtattccgggaagcctttctttcagacaaaaagttgttcaagtcttctgaaattgaaaagattttcagtaacatttcagatatacatgaactgactgtgaaacttttaggtttgattgaagacacagtagaaatgacagatgaaggcagtccc

SEQ ID NO: 4280 - DNA, 600 bp, Rattus norvegicus
ttggagaaatgctcatatctgtgaactgagaaggctttcatctttttacttaccattaaattgcaatgggtagtccttgctgcccacttgactacatctggaatgaactacatatagtccagagatggagggctcgcctgtgatccagatcttgaggctggaagaaacaggcttctgacctggttctttttttttttttaagtttttttaattttatttatttaatgtatatgagaggtctatctacatgcctgcatggacacttgcatgccagaagagacttcattatagatgtgatttgccgggaattgaactcaggacctctggaagagcaggcagtgctcttacctgctgagtcatctctccagcccccaggccagaatttatattggaagttgacgggatcaccaggatgtacttacccgggccttttatttgtttgtttatttggtgttttggaggttgatttttgccacagtgcttgggcttttcactcctggggtcacatgatctttttgcagagacaagtatataccacacagcacccaggttttttttgttttgtttttttttgttgttgttgttgttgttgacaagctt

SEQ ID NO: 4281 - DNA, 600 bp, Rattus norvegicus
grgaagtgagcatcttgattagaagcaagactaaaacgaacaagaacggcgggaaccaggaggttgagattgcccactgccataaggggcagtactttggagaacttgccctggtraccaacaarccaagagctgcttctgcttatgcggttggagacgtcaaatgcttagtcatggatgttcaagcatttgagaggcttctgggcccctgcatggacatcatgaagaggaacatctcacattacgaagaacagctggtgaagatgtttggctccaacttggatctattggaccccgggcagtagatgtgatgaatctcggagccttctcagtgtgataccaaatccttccagtcagccacaagaacacacccagaaaacagacacgacasarctrcrccwscygctgtctctgctgctgccatcgctgtggtaaagggcacttagaagtcttgaaagatggacagaggctctacccacacccaccttccactttgcttctgaacgccgtcattagaccacttatgtcacgattactccagcccaggtttcacgtttggttcagaatggcatgtctctccagcaatttaagtgcctgata

SEQ ID NO: 4282 - DNA, 1400 bp, Rattus norvegicus
agatctgcgtgggccagaaccactccgaggacggaactcctgcgctactcaccaccgcgccaccgtctgggctgcagcctggcgctggtggcaccccgggcggccctggcggtggtggcgcgcccccgcgctacgccactctggagcaccctttccactgtccccgcgtcctcaaggtgccgtcctatctcagctataagtttctgggtgagcgcgattgtgccgcgccctgcgagcctgcacggcccgacggctccatgttcttctcgcassassasactcgttttgcccgtctctggatcctcacatggtcggtgctgtgctgcgcttctactttcttcacggtcaccacctmtttagtggmcatgcagcgattccgctacccagagcggcccatcatcttcctgtccggttgctacaccatggtgtcagtggcctacattgcgggcttcgtgctccaggagcgcgtggtgtgcaacgagcgcttctctgaggacggttatcgcacggtggggcagggcactaagaaagaaggctgtactatactcttcatgatgctctacttcttcagtatggccagctccatctggtgggtgattctgtccctcacctggttcctggcagccggtatgaagtggggccacgcggccatcgaggccaattcgcagtacttccacctggccgcctgggcggtgccggccgtcaaaaccatcaccatcctggccatgggccagatcgacggcgacctgctgagcggcgtgtgcttcgtgggcctcaacaggctggacccgctgcgaggcttcgtgctggcgccgctcttcgtgtacctgttcatcggcacatccttcctgctggcgggcttcgtgtcactcttccgcatccgcaccatcatgaagcacgacggcaccaagacggagmmgctggagaggctcatggyrcgtaksggcgtcttctccgtgctctacaccgtaccggccaccatcgtcatcgcctgctacttctatgagcaggccttccgcgagcactgggagcgctcgtgggtaagccagcactgcaagagcctagccatcccctgcccggcccamtacacgccccgcaygtcgcccgacttcacagtctacatgatcaaatacctcatgacgctcatcgtgggcatcacgtcgggcttctggatctggtccggyaagacgctgcactcgtggaggaagttctacacgcgtctcaccaacagccggcatggagagaccaccgtgtgaagcggtctcgytgctgggcgcccccctctcccaggtccggactgcaaccgtgccctccttcactcgggaggggggtgcaccctacggactcctattttatttttttaaataargaacagtgaaaaccaaaaaaaaaaaaaaaaa

SEQ ID NO: 4283 - DNA, 600 bp, Rattus norvegicus
  misc_feature (580)..(580): n is a, c, g, or t
cgctcaaccccagatctacccctggatgcgcaagctgcacattagtcacgacaacataggtggcccagaaggcaaaagggcccggacgtgctacactcgctaccagaccctggagctggagaaagaattccacttcaaccgctacctgacccgccgaagaaggattgaaatagcacatgccctttgcctctccgagagacaaattaaaatctggttccmaaacaggaggatgaagtggaaaaaggataawwagctgaaaagtatgagtatggccgcggcaggggggsccttccgcccctgaggttytgagcggccaaagtactggscagtagtagcgcscgravsaactctccgtagtgtcagtactaaggtgactttytgaaactccccttgtgttccttytgtraaraagccctgttctcgttgcccwaattcatcttttaatcatgagcctgtttattgccattawagcgcctgtataagtagawcagcttctgttcatctctttgcwgawgcttgtcgaaaaaaawakagatgttttaacttatttatatgaagcaagctgtgttacttgaagtancttaaccaaaaaaaaaaaaa

SEQ ID NO: 4284 - DNA, 936 bp, Rattus norvegicus; identical to SEQ ID NO: 188
  misc_feature (234)..(234): n is a, c, g, or t
  misc_feature (332)..(332): n is a, c, g, or t
  misc_feature (341)..(341): n is a, c, g, or t

SEQ ID NO: 4285 - DNA, 381 bp, Rattus norvegicus; identical to SEQ ID NO: 189

SEQ ID NO: 4286 - DNA, 411 bp, Rattus norvegicus; identical to SEQ ID NO: 190

SEQ ID NO: 4287 - DNA, 600 bp, Rattus norvegicus
  misc_feature (465)..(465): n is a, c, g, or t
  misc_feature (525)..(525): n is a, c, g, or t
  misc_feature (538)..(538): n is a, c, g, or t
  misc_feature (574)..(574): n is a, c, g, or t
atggaaatacaggcagaaaacatcccgtgccagaagagccattgccttttcaacacatttacctaggacctagttcaaagtggatttcagatcccataatttatttattaatgttctaattagaatgaaagttgagatcctatgtcacacttcgggaaacctttgatttagatattacatagagaactatttctacggatgcctcaggatgatcagagattaatattgtcactcaaatatatgaaacagctaaacctctggcctggtgctttaggagagttgaacccctgctagtgtaattggaagcttgacacacaaacacacacacacacacaccaaatattaccctattactccactcagtatttacaaaactgcaaaccctgagtgacaagaagtcctgcaatgatgtgattttatgtaataaatgcacctgtcaacatatattgttagagaaattggttntgcacttactttcttaattttttaagattatacatccagtcaggaagcctctacctactntacaacataacanaatcaaggaaaatatatttttcattcacccagcatncatggctgtgaaagtttccacgtact

SEQ ID NO: 4288 - DNA, 600 bp, Rattus norvegicus
cccccgcagccgctgtccccgaggggggaggggcgggagaggcgcaggtggcccgggccggggttcccctgttcgtctctgatcgccgcgggtctcctcccgtcccctctccttccgggttccccgtgcgctgtcgagggccgggggatggggagcttcggccccagccccgggaccatcgctggcgcagactcgccaatgggctgagattgggacccggattcccgaggccggagaccccaaggtcagagcagcgacaaggcgcgcggagaatgtggctctcgagagctgggggtgaaagggttgagcgggcactgaccaggactagggagcaggccgagcgctcgttttccctgggccccgggggtggaggaactcggcacccgggttgtgccctcggttagacgagatcgctgcacccttgcaaggaatctgtgcactctattgggggtcagatctaagagtcgccctgtctttgggcgctcccactacgccgagatcttggtgccctgttgtcgccttgaagcggtcggatctcctcttgtctctgtgcgctcggagaggggagagatctctggacttggaaattcggcagaattc

SEQ ID NO: 4289 - DNA, 929 bp, Rattus norvegicus; identical to SEQ ID NO: 193

SEQ ID NO: 4290 - DNA, 600 bp, Rattus norvegicus
aactggcacagttgctcccactaggggaaagattgtggagttctcctatgtacctacagaaaggtattctgggctaagggcgcacagaagtgcgcactgtcggaatctgcgatctcagagaacccagatagagtccagataaccaatgagatagggagacagtcctcattcctctgtaatcagtaaccccaaactaacccaagacacctttcgcttaggcagagtagcatttttagattctgtgacttttgctacagacagatttcatgaagctcagagagatgaatacacctgcctgggatcaaacagccagccataagacccagacagggtttgggttcactggctcaaagttcagtcataaagtaagaatttctagataagtactcaccaacccttaggttgtggggaaatagattcccacagaggagggaggtatccagacatagaccagctgcagaaaaaagggacaattgtgttttaggagactgaatcctggagttgtgcgaggggaagagagatgaataggagactgcaaagaaagtctgggaaccagggtgaaggggaaaagaccttcttgccatggggctgcaggaattc

SEQ ID NO: 4291 - DNA, 468 bp, Rattus norvegicus; identical to SEQ ID NO: 195

SEQ ID NO: 4292 - DNA, 946 bp, Rattus norvegicus; identical to SEQ ID NO: 196
  misc_feature (365)..(366): n is a, c, g, or t
  misc_feature (373)..(373): n is a, c, g, or t

SEQ ID NO: 4293 - DNA, 600 bp, Rattus norvegicus
gggtgcattatgggagaaatggtttgccwcaaaatcctctttccaggaagggactatattgatcagtggaataaagttattgaacagctcggaacaccttgtcctgaattcatgaagaaactacaaccaacagtaaggacttacgttgaaaacagacctaagtacgctggctatagctttgagaaactgtttcctgatgtgcttttcccagctgactcagaacataacaaacttaaagccagtcaggcgagagatttgttatctaaaatgctggtgatagatgcgtccaaaaggatctccgtagacgaagctctccagcacccgtacatcaacgtctggtatgatccttcagaagcagaggccccaccaccaaagatccctgacaagcagttagatgaaagggagcacacaatagaggagtggaaagaactgatatacaaggaggtcatggatttggaggagcgaactaagaatggcgtcataagagggcagccgtctcctttaggtgcagcagtgatcaatggctctcagcatccggtctcttcgccgtctgtcaatgacatgtcttcaatgtccacagatccgactctggcctcggat

SEQ ID NO: 4294 - DNA, 600 bp, Rattus norvegicus
ggatcagcggatcaagatraaaaagatccagaacatctctcatcactggaacaaaaagtagggcaagtttaagaactgagggagtgggggagggccgaccgaccwgssygmmtwcykctcagcacctactacacacaccaggacacacccccgaagtcatgcagctggcactactgtggctgaccctgagagtcaaagtgaaatttgcctgagatccctcttggtcattttgttatagatgcaccagtcactacatttggagtcaatcaagactccagcaagaagctagtaaatggtagacttatttgattttactttgtaggcctttaaaagtcttaagttgcaatcaaattaaaaatgatatatcttatcctaaaaaataaaattcttcccactgccctgttttcatccccaagagatgatttacctttacatgaacactgccttaaaactgtcaggggtacgaaatgtacttttaaaaataacttttccaattaaaatgatgttattttgtgaaattaaaatataaatataccattttttctttcattttcccttcttccaaacctttacatatacatttgttctctctcaaaagcg

SEQ ID NO: 4295 - DNA, 600 bp, Rattus norvegicus
gcggctgcaagaactgcaaatgcacctcctgcaagaagagtgagttgggaccctcgggtggtggtgggggaactcctacagagctggctctgagaaacgtctgaggccattcggtttggggcaagaagcaggtcttctgccagacctgtgcgaccggaggactaggaagcctactctgacatcttcctctatctttctttccaggctgctgctcctgctgccccgtgggctgctccaaatgtgcccagggctgtgtctgcaaaggtgcctcggacaagtgcacgtgctgtgcctgaagtgacgaacagtgctgctgccctcaggtgtaaataatttccggaccaactcagagtcttgccgtacacctccacccagtttactaaaccccgttttctaccgagcatgtgaataataaaagcctgtttattctaactctggttttcttggtgtcgtttagaaataagaaactggggcgacacgggttaacttgatagtctggggatctggttttggactcgcccgtgccttttaactcccgcctctggctcccaaagaggggtaataatgtctttgggtaaagccaagttatcccataagctt

SEQ ID NO: 4296 - DNA, 600 bp, Rattus norvegicus
tctgactatgttgccattaaggtmmyatgtttkcamtgkccccgactgagggatgctgatcctattctgagatgtgagatggcttamtmctrrasaggtggcgtgttttggtgagggcattcatacagccttcctaaaggcaatgctgtccacagggtttaagatacctcagaagggcattctgattggcatccagsartcattccgtccaagattccttggtgttgctgagcagttaywcwatkwwrrwtkcaagctttttgccacagaagccacatcagactggctcaacgccaacaatgttcctgccaccccagtggcttggccatctcaggaaggacagaatcccagcctywyytyywtcwwbwarrwwgataagarmcgraagcmttgacctagtgattaacctccccaataacaacaccaaatttgtccatgataattatgtgattcggaggacagctgtggacagtggaattgctctgctcaccaatttccaggtgdsywwmctcttttrctgaggctgtgcagaaagctcgtactgtggactccaagagtctgttccactacaggcagtacagcgctggaaaggcagcatag

SEQ ID NO: 4297 - DNA, 600 bp, Rattus norvegicus
tatccagaatccaccatgatcagccagtgaagcccctggaccgagccgtcttctggatcgagtatgtcatgcgtcacaaaggagccaagcacctccgctcaactctgcatgaccttagctggttccagtaccactctctggatgtcattgggttcctattgctctgtgtggtaggtgtggtattcatcatcacaaaattctgcctcttttgttgccgtaagactgctaacatgggaaagaagaagaaagagtagcatcataaaggctgaagcagagccctgagagatgagcctctgccagctgcttccagaggaacctgttgtcatgccagtgccttccctctaaaagaagacagcgttgggacctcattgaacatggctccaatgaattcactatgttctgaagacatgcaagatttcatgccaaatatatattcagtgctaaaaaaacaaaatcctgtgttcagtttagaatgttttgatgtagctgagaagctttgcccaacaacaataactgaagctactgtagttcataaagttcacatggctttatagcctttgcaaaacatatctataaatcaattagtttttgaaaataccc

SEQ ID NO: 4298 - DNA, 425 bp, Rattus norvegicus; identical to SEQ ID NO: 202

SEQ ID NO: 4299 - DNA, 600 bp, Rattus norvegicus
gaggctggagatgtactgtgctccgctgaagcctacaaagtcagctcgttccatccgggcccagcgccacactgacatgcccaagactcagaaggtaagctggtgtgggggaagtacgaccatgcttcagtctctgttgtatgtggtgcaggggaggccaatgggagttctctccgatgtctcctaggtgacaggtcaaaaagttccaatcctattaatagggtggcttatgggtccacccttccaatcactctttactataaattatcttttccactcccctggacaatctgatacttggaagatggtggaaaatcagaactcaagttgccctgtgaaaactcaagttgcccaatgaggccaattggccaaacaggctatcaagtcttagctatcaataaaattgtgatcatgatagaatgtactgccacaggtcaccagaatttggtaagttgacatactctaagatgtagaccatgtacaagtggaatgtttgcactaagtaactgttagacaagcattaacatttgtcataattgtagctaatacaattatgattgaaatacaggattgcatcaaaagttgcaaatcctggaattc

SEQ ID NO: 4300 - DNA, 495 bp, Rattus norvegicus; identical to SEQ ID NO: 204

SEQ ID NO: 4301 - DNA, 1400 bp, Rattus norvegicus
cctctcacagaaaagcycaaggactctccgggggaagccaagaaggaagaggctaaagagaagaaggcggcggccccagaggaggagacgcccgccaagttgggcgtgaaggaagaggctaaacccaaagagaaggcagaagacgccaaggccaaagaacctagcaaaccctcagagaaggagaaaccgaagaaggaggaggtgccggcagcaccakagaagaaagacaccaaggaggagaagactacggagtccaagaagcstgaggagaaacccaaaatggagccaaggccaaggaggaggacaagggccttccccaagagcctagcaaacccaagacagaaaaggctgaaaagtcctctagcacagaccaaawagacagccagccctcagagaaggccccagaggacaaggctgccaaggkagacaagtaagaggacgagagggacacccagaatagccaaagaaactcaggacggccccggtactcaagggttggtgtaataaagtttatttcttcctttccctccgtaagaagaaacaccacttagatggcgggcccgccctcaccaaacaggatttctattaggattaagttagcaagagaagatcaaccctgagccctgcctycccaacaccaaagccmtycmcaaggkgrkggacaattatgatagcttatmgtagccgaacgkwgatgtmytgctgaacgctccacgtaaaacgcgtgaytaaaaactgccccccctcctttyyaagkaagtgcattcacttyccgtatgtcctaccgacaggtgaccgcagtaatgaatgagcagytagaaatgcattatgcttgaaatgktgtaacctattcccgaatgccttcytgttttccaaaggagcggtcaggcccttgcccggtacacgctyctggaagagctgcagcaggtgaggcagggcgmtggccgctgaaccaggccagggtgtgctgtccactgaagkccactwtcgaytgcttccgygcaatmmaacccaagtgcttctgdrawmmaaaamaaaamaammmammmmamamaamaaaamaaaaamwwmragggggggcccggccccaaatccccctatagtgaggcgaattaaaattaattgccccggggggtcccccggcccaaattgccatatagggggtgactaccaaaaactgcgccggggtttacacctcttgcctggtgaaaacctgtggtaaaccacataaaacgctttcgcttacaaacccttttctcccgggtgggggaataggaaaagagcacccccaatactcttttccaaaaattgggagaactttgtgggaaagggcaatttttacccaaaattttgtataaatcccgcccattttttttaaaacactcccttttaaacccacg

SEQ ID NO: 4302 - DNA, 428 bp, Rattus norvegicus; identical to SEQ ID NO: 206

SEQ ID NO: 4303 - DNA, 1400 bp, Rattus norvegicus
gtgcatgaggttaggaaggtcctgggagagaagggcaagaacatcaagatcatcagcaaaatcgagaaccatgaaggtgtccgcaggtttgatgagattttggaggccagcgatggaatcatggtagctcgtggtgacctgggcattgagattccggcagagaaggtcttcctagctcagaagatgatgattggacgatgcaaccgagctgggaagccggtcatctgtgccwcccagatgctggagagcatgatcaagaagccacgccccacccgtgctgaaggcagtgacgtggccaatgcagtcctagatggagctgactgcatcatgctgtccggagaaacagccaaaggggactaccctctggaggctgttcgcatgcagcacctgattgcccgagaggcagaggctgccatctaccacttgcagttattcgaggaactccgccgcctggcgcccattaccagcgaccccacagaasstgccgccgtgggtgccgtggaggcctccttcaagtgctgcagtggggccattatcgtgctcaccaagtctggcaggagtgctcaccaagtggcccggtaccgcccaagggctcctatcattgctgtgacacgcaatccccagacagcccgccaggcccatctgtaccgtggcatcttccctgtgctgtgtaaggatgccgtactggatgcctgggctgaggacgttgatcttsgtgtbaacttgvccatgaatgtkgsmaaggcmcsagsyttytycardamggkagatgtggtcattgtsstgachgkrtsgcgccytggywctgkmttcaccaacaccatgmgtgtagtgchtgtastcwygatgrycytctggagcyycthttctagmmcctgtscyttyccctcccctatmctwtmcattaggccagcaacgcttgtagtgctcactctgggccatagtgtggcgctggtgggctgkgacaccaggraaaattaatgcctctrwaacatgcaatagagmccagctattwttyakggsctacytgagccaggggtgraggargratgcasgahtkgaaaccctctgactttatcacagaaggscrgcakyatytytgkrktctttgctyctgkagaaagttktccagagaattcscagccctrscctggartmaggagacagcaagaacwgaggytgggggcccagggctcccatgtagatgacttytggccctgkccctgacytgctttcccaacagctttggcctcycymctcctygtgcactccactkctgtcmctgcagayrytccactctccacctygtaytctgcagcgtctccaggcctgttgctatagtgcccacctgaatgtcaataaacagcagckgaagaaaaaaaaaaaaaggctattgaggg

SEQ ID NO: 4304 - DNA, 378 bp, Rattus norvegicus; identical to SEQ ID NO: 208

SEQ ID NO: 4305 - DNA, 526 bp, Rattus norvegicus; identical to SEQ ID NO: 209

SEQ ID NO: 4306 - DNA, 1400 bp, Rattus norvegicus
  misc_feature (862)..(862): n is a, c, g, or t
  misc_feature (874)..(874): n is a, c, g, or t
  misc_feature (876)..(876): n is a, c, g, or t
  misc_feature (901)..(901): n is a, c, g, or t
tatgatatataaaccttaagtgaaaaaaagatctattgcmgmtawmwrawrrawrwarwwttctttttttaaattagaaatgccacttytattgtattgtctcacacatgctctatataaawrrmawwwvwwrawttwwmaawrawaramwawatacacaggctgttcccgttatgtaagtctgttctttaggctcgtttgctgggctggttttgtcgtcatttgttttaatgtataaaggcagtattsscmykwkcaggttgctgagaaatgtaagtggaactsamgwrsattgtatgcagttactgactgttttaggcatagtctccttggaagcctagwgcttccagtgccsggtgtccagtgcctgkcaccaaagcaagggctargtcaccttgagctagctggatgcaaactagatccactgtgytttccttcaaatccagttcttccacagsamccagcccatagttgttctgtgttctwcyacagctgtttacggtagsctcctagscactctcctcagcaagtgcatccaagagtgsamcacccccttctttggackwhtycgkcmcrwgsactgaccctmtgcttgccttsgtacctcayttmmthcrmckywytwyagvsmmtttgmbstcsmskcmragaatwcsgmwmkasrcatggctaargacccaggrgacttcacgggaggcctcattaggtgaaaggacgatgttmtgggctgtacatgaaattgratctgtagacactgtktttccttcactgaydtgkaatgtcacrcagctggagktgatgccacarmccktagwgctytsttgmtgwtdkgtwtttcagggttbtggtaacctgcdamwrndddwddddwrrndnddkkywggthhtktttgtawtkwdnkgtswkttccctcccmyycyccmccatgcctbttcccaytatgcacasatggaaactttacctacaaactccttcgtatgatctgtggagaatgtacagaacttaytacatcaataaaacactttaacttcmmmvrmaaaaaaamaaaaaaamaaactcgaggggggggcccggtaaccaatttcgcctatagtgagtcgtatttcacttcactgggcgcgcgtcttacaacgtcgtgactgtgaaacccctgggttccccacttaatcgcttggcagcaattcccttttggcagctgggtataacaagagccgaccgatcggctccacgtggcccctaagggcatggacggacgggtattggtaaatccgtattggcaccgccctttacacagcgacggaccctataaaacccccgtagtgccctccagaccaaagggccacggactgggggaaaccatgagggaccacagtgcggagaatgtccttccccggtatgg

SEQ ID NO: 4307 - DNA, 600 bp, Rattus norvegicus
atwcagttgatgtgtcttctctgtccttatacacccagaaggtrgagtaaaataaatgaytgktggagtggaggtatgtactgtaagtccttcatctttagtttatttaataaagccctccttaggttctgtttcataataacttaaamccaamcaattccccccacagactggctgtcttaagtatttcacattcgtgtacagtttaagacaataaaagrtggagtgccamrrrmwwwmwrmmwwrwwrawrwctggggcaggggaggaggggtttggtccaggtgtccagttccaatgccagaagtccccacagcctgttccctatattctcagagcccttgcctgacacatatgtcacaaagaagatggcagaagaccagcaaaggcaattagcaaattagtgaattacaaatttgtttaccgttccagtccccaactagttatgatctgttgatgttccaaagctggatctcttggcttttcaaaagtaccgtggtacctggtggcaacctcgatgacctgagtttgagcccagggtcgcacgcacgcacgcacgcacgcacgcacgcacgcacgcacgcacgcacgcacgcatgc

SEQ ID NO: 4308 - DNA, 600 bp, Rattus norvegicus
gtatgtcatgcgtcacaaaggagccaagcacctccgctcaactctgcatgaccttagctggttccagtaccactctctggatgtcattgggttcctattgctctgtgtggtaggtgtggtattcatcatcacaaaattctgcctcttttgttgccgtaagactgctaacatgggaaagaagaagaaagagtagcatcataaaggctgaagcagagccctgagagatgagcctctgccagctgcttccagcaggaacctgttgtcatgccagtgccttccctctaaaagaagacagcgttgggacctcattgaacatggctccaatgaattcactatgttctgaagacatgcaagatttcatgccaaatatatattcagtgctaaaaaaacaaaatcctgtgttcagtttagaatgttttgatgtagctgagaagctttgcccaacaacaataactgaagctactgtagttcataaagttcacatggctttatagcctttgcaaaacatatctataaatcaattactttttgaaaatacccagcctgctttgtcttcatttagtagactatttttctctccttctttcttttttcttcttt

SEQ ID NO: 4309 - DNA, 363 bp, Rattus norvegicus; identical to SEQ ID NO: 213

SEQ ID NO: 4310 - DNA, 1358 bp, Rattus norvegicus; identical to SEQ ID NO: 214

SEQ ID NO: 4311 - DNA, 1400 bp, Rattus norvegicus
  misc_feature (306)..(306): n is a, c, g, or t
  misc_feature (947)..(947): n is a, c, g, or t
  misc_feature (950)..(950): n is a, c, g, or t
ytttggmgaacttgtctacawccagggattgattttaaagattttttttttaatyttacatttttttttmrakcascaaattttgttttcttttaaagcccyctyycccacagatcycwtbtcmaatcattgttaccaccattccgacaggycgakgacggtttakayagcttcctctgccttctwttgtttttgtwtttgtttttwttttcttwacttttaswyhkyttyhtytkscwwcwkkrttwwtgktttttgywtwytttkyatytttattwamwmwwtktwwwytttyttwgbsmrwkntryggasgkmyccrtmtdtgaaggaratggbtgggtcaaaaaggaatmtcaawtgamgtgwtaggggccwctwtgggaaattgaaacaktgcataacattgccaarmtartwtgccastaaaaacgacgskgtaaaggcttaggggkttccttctttcctttttttttttttttarararagttatkacggkgtatwttgkgaggcaggttkacarcacywchcgtkttgratargaaggaammagaaargamttmaaaacvccaatwccywkatttwaammwhrwrmhvahrrtckwmkgmgttcakctaaaccataggaacttcctgcttatctcatgttagctgtaccagtcagtaattatgtagaactacaagttgtataggctttattgtttattgctggtttatgaccttaataaagtgtaattatgtattammarmarrrwrtttttaactgtgattattgtataaaaacaaatcttgatatccttyagmrgcacrwgragtttgcaagtctccamcctgcccatctttttgtaaaactgcagtcatcttggaccttykraacrmrrattttaaacccaaccaagctgtgatacgtggaatggttactgtttatactgtggtahgbyhbbhdbndsndtyytywwwtkywkdktttyytyygatwacagcagacaatgctttcttttccagttgtctttgrgaataaaggaaaaacaaatcttcagatgcagtggttttgcgtagcacctcgtctctcgtgtwttgtaaatactggrggatctttgrccaattkgacatasagctggaatgtaacgttgstwacaaacattgctattcaactcctgcttaaggtgttctaattttctgtgrgcmcmctaaaagcaaaaaataaatgtgaataaratgtraaaaraaararaaaraaaaaaraaaaaaaaaaaasmawwwrmrrmcgcaagcttattccctttagtgagggttaattttagcttggaactggccgtcgttttacaacgtcgtgactgggaaaaccctggcgttacccaacttaatcgccttgcagcacatccccctttcgccagctgg

SEQ ID NO: 4312 - DNA, 1400 bp, Rattus norvegicus
atggtgaggcacaggtaaagatctggagacgatcttacgatgtcccgccacctscaatggagcctgatcatcccttctacagcaacatcagcaaggaccgcaggtacgcagaccttactgaggaccagctaccctcctgtgagagcctgaaggatactattgccagggcactgcccttctggaatgaagaaattgtyccccagatcaaggaggggaaargggtcttgattsctgcccatggcaacagcctacggggcattgtcaagcatctggagggtctgtcagaagaggccatcatggagctgaacctgccaactggyatmcccatcgtctatgaactggacaagaacttgaagcccatcaagcccatgcagtyyctgggagatgargagacsgtgcgtaaagccatggaagctgtggctgctcagggcaaggtgaagaagtgaaggcgaggaggcggactcctrccctgaacaccctctctccctgcttgttcctgcctcctgcaccctcccctgcacctgccacactgactacatctttaggatcttcagtttaagttgtagctgcagatagggacctgtggctcccattctccttttagtattttatccccggcacccactcccttcatagaatctagtcagaagaagacctctggggtgcaggctcttggtccatatccagggacggctccmtgtwmcaggaragttgagagatagtaatwatakyyyyctwagctctttgkkdactaagggtctgcttaggaagaaggtcgggagggactgtatgtggtatgaccartgaggagaagctgtggtccagttttgtccytggaacctgtcstgcactcttcccacaattaggtaactgggggcctagtcatyccagtgvagagtraaakkamcctcatgccgatwaaaagaccbkacwttctctctgaccywamaggmsvtsstggccstaraaggttsrgaacagtcwtgtcaagtctatgtgttacatttatttttvcaaaartaaagkatmtwwacatatatcvscvcaaaagcmmcragsttgctagtgscarytragmgtcctaagtgstcmccmgaaaaaaagccattcctcakatcaaatgggataamctccttgtacctcwtgctgwgyttsrdycschwtsccttkwttygyaragstgaagccccttgatcatgyccaaggytttgwctttcactgtmtgaatcatgtyccagctgcttgaccctactgtgtgggttcagaactcgyttgggcataacaactaagtctctttccagaycmgtmtaataaaggagtgwtgtgchhwwhwaaaaaaaaaaaaaaaarrmaastykwgssgssgcmmgstwcaaattcmctykagtragggttaattt

SEQ ID NO: 4313 - DNA, 600 bp, Rattus norvegicus
agatttgggatacagcasgacagkagaggttcagagctgttacacggagctactatagaggagctgcargtgcgctcatggtgtatgacatcaccagaagaagtacatataaccacttaagcagctggttgacagatgcawggaacctcaccaacccaaacactgtaataattctcataggaaataaagcagatttsgaagcacagagagatsttacctatgargragccaaacagtttgctgaagaaaacggcttawtgttccttkragcaagtgcaaaaacsggagagaatgtagaagatgcttttcttgaggctkscaagaaaatctatcagaacattcaggatggaagcctggatctraatgctgccgarkctggtgtacaacacaaamcctcagccccgcagggaggacggctwaccagtgaaccccaaccccagagagaaggctgtggctgctagtgacctcttkgctctggtccctcattttgacctttcacctcttgyctgttggaagcagtacttttwactgccttcttgtcttctstacatcttactgggktwwmatyammaaaaraaaammmaaaaaaaaaaaaaaaaa

SEQ ID NO: 4314 - DNA, 600 bp, Rattus norvegicus
gaagcgcccttcactctgaaggtcaacactctccccttaaactttgataaggcagaacatcacagaaagttccagatccacatcaacgtaagctacaktggagaacgacccaactccaacatggtcattgttgatgtgaagatggtgtcaggcttcatacctgtgaagccatccgtgaaaaagctccaagaccagtctaacattcagaggactgaagtgaacaccaaccacgttctaatctacattgaaaagytaaccaatcaaaccatgggtttytccttygcggtggaacaagacattccagtaaagaayttaaaaccagccccmgtaaaagtytacgattattwtgrgacagwtgaattcgccattgaagaatacagtgcccctttcagttytgactytgaacaaggaaatgcttaaaaatrggaacctwtagatttcctcagaaagactccyccamasgtgaagaaccaagacagcaagrtaaatggaaaggaattaaaaacccataaaatttatatgttgaataaagttacgacatttacaaaaaaaaaaaaaaaaaaaaaaaaaagtgtggcgtccgcaagcttattgcccttt

SEQ ID NO: 4315 - DNA, 600 bp, Rattus norvegicus
ccagcctaggcaagaagtacaagggccagaaggacttggtcatcgccaagatggatgctactgccaatgacatcaccaacgaccgatacaagswsgagggcttccccaccatctattttgcccccagtggggacaaaaagaacccaattaagtttgagggtggcaacagagatytggagcatttgagcaagtttatcgatgaacatgccacaaagaggagcaggmccaaggaagagctttaaggcctggctgtgtgcasaaggtggagggatcagacactgtagtggacagctttggccmccaagcaagcaagccgtcaytgaatggcaggatcttgaccctttttttgttatattttattaatgccacctcatgctctgatactgatagcatgatgacttgatagtttagatcmgatttttatggaggatacatctatttttmtcattttgggtcttttttttaactayttgctttaatatttcttcaaacaagtaagttttggatcttctgyttaagaatctttttttttttttttwatttaaagtttaaaagtctttgccaaaaaaaaaaaaaaaammgaaaaaaaaaaaaaaaaaa

SEQ ID NO: 4316 - DNA, 600 bp, Rattus norvegicus
gggaacgatgttgcatgggctcgtargcccgtggccgtgggactccaacctgtttcatcagcatttgacgttggcactgtcatcaggcctctgactcgaggctactgctggcccagatcctctctctggccctgttttggggaggcccattcttggtcttggggttcacagttgaggccttctgttccaaacttatgttcccrgcwcagagttcaaswmytcgkcwcargrtyaysvtystgmysttggabtcrkcmkyaraggagcgaagyattaaggccttgmcasttwgcctccacccsaggggctctccgggcctgactgcaaatctttggtcytaaacatttctagytccccaaacwacctaraggcctygggasttcactgcaccccmgcccccgcagcccacaagcctcgccwccstggtcyccaactccccaytgcttgttctagyatcytgttgaaggagcctcasctctggtgtccttgagagagrgaagcctgtggaaaagacagaagaacaaggcattttmtmaattawwawwawwwwwwaaawaaaaaaaaaaaaatctagaattctgcagaaggatcccgcgccat

SEQ ID NO: 4317 - DNA, 1400 bp, Rattus norvegicus
catgtctacactaaggcgctgttggcctatgcatttgcccttgctggtaaccaggacacgaagaaggagatcctgaaatcactcgatgaggaggctgtaaaagaagaagattctgtccactggaccagacctcagaaacccagcgtgtcagtgggcctctggtaccaaccccaggctacctcggctgagktrgagmkgmckgcatatgtgctcctggcttatcttaccactgagccagctccaacccaagaggacctaacggctgccatgctcatcgtgaagtggctcacaaagcagcagaattcccacggtggcttctcttccacccaggacactgtagtggctctccacgctttgtccaaataygggtccgccactttcacaagagctaagaaagctgcacaggtsaccatccgttcttcgggcacattttctacmaaattccaagtcaacaacaacamccaattattactccagagagtcacattgccgactgtgcctggggattacaccgtgaaggtgacaggagaaggctgtgtctacctccagacatccttgaaatacagtgttctcccgagarakgaggagttcccyttcgctgtggtggtgcagactctgcctgrsacrwgkraggatcccaaagctcacaccarmttcsrsakhkvaywcracatcasttayastggaakysgyyctgarkccaacatggcaattgckgamgkgmwgatgktgtccggcttcatccccttgaaaccaacagtgaaaatkcktgmamgakctgtgcatgtgasccgaacagaagtcagcaataaccatgtcttgatttacmtggataaggtgtcaaatcagacggtgaacttgtccttcamggttcagcaagatattccaataagrgacctgaagccagccgtagtgaaagtctmcgattactwtgagaaagatgagtttgcagttgcwwaataywkckcycccwsyascacagattwtggaaatgcctsakgacgcwrtgaataagaagtgtttcgccagagccctgacctcakgacttcccaagaaaaacagtgtatttgtatttccagagatttgatcaataaaccatttttttcwtawhwammmawmammawwmmmwmawwaawwmagtcatcatttttttacattttcatgcttccacatctagtactcaataaaaactgatgaaaatcaggaatggaaggaattttagaataccaaaaggtattggtttcagtgggatttatggatgggggatgggtcaaaaagtattggatcacagctcagagagagtaaagcatgttcagttatagagatacctcaaggaagagccaaagagtgaatgcttatgagccaataaagactgacttgaccaaaaaaaaaaaaaaaaa

SEQ ID NO: 4318 - DNA, 1400 bp, Rattus norvegicus
atgtcccactcactcctaatacaaatctgtcagtcatctccagtatctagcagtcaccctagctgctatgaccccagaactacagattgctaaggtgtccatgagttaaagcaccacctactatttcttatatccattcatgtgacttactttcttacctagaacggtcttcctttgttggattaaaccaatctttgactcattcactggggtccaaagtagtgttgcacctcctccagcgaatttcctctgcagcttctaggttttatttgctctgtcatgacttgcatggtagtctgtattctctgttcctgatgctatccacattattttgacaatatatttttgtattatctttactgtagtaggaaagtctgtagagataagaactgcacattcatggttgtacccttaccaccaaaccagaacaagaaagaggctgttaataaactgctttttaaaatttwwwawwarawawawwwmtttacttacatttcaaatgttattccccttcctagtttcctgtccataagcccccattccctcccttcccctccccatgcaggtattccccctatacatcctccgtatttcccccccattcccctgccctaggggtccaaccttggcaaaaccaagggcttccccttccactggtgccccaacaaggctattctctgctacatatgtggttagagccctgggtcagtccatgtataatcttttggtagtgaataaactggttttgaaccatattgtccaaggcaacctctaggtgagatcacacagtcctgagttgaatgttgggctctgtcatcattattttgatgttctaaataagtcatttcccttgaacttcactttccaagattataaaatgagtataagtatgtaaattaaattataatatcctaaggattagaaaaacaggcataaaatccctggaataccatttttggtattaagtggacatcattgggcatgttggtatatggctatgatctcggcaggctaatgtgaactagatagaagaccccatctcaacaaatgcataaataaactcctgctactcatggagccctactattcttgtatcgttccctgtttaagatcaggagggtgtgcaacctttgctttaccaggggttgctctcttcattgcaaaggatgtattgcattccactgtctcagcaagaagttgggagccagaaggaggtggccgtgtccctgaaaatgcaaaagaagatggagtacattctggggaaattttcaaaaatgtcaagtttgagtagctaaaactttgaatttctatgtaaatcaaagaattctatataatgtgaggataaatgtagaagacacaacctttgagtcatttcattaaataaaatcttactgactttg

SEQ ID NO: 4319 - DNA, 600 bp, Rattus norvegicus
ccccgcgaggaggacgaggcgaagcagctggcgctggccggcctcttcccctatcagcccccgccgccgccgccgccaccgcacccgcacgcgtctcccgcgcacttggccgcccctcacttgcagttccagatcgcacactgcggccagaccaccatgcacctgcagcctggccaccctacgccgccgccgacgcccgtgcccagccctcatcccgcgcctgcaatgggtgctgcgggcctgccgggccccgggggctcgctcaagggcttggctggtccgcaccccgacctccgcaccggcggcggcggcggcggcggggccggcgcgggcaaggccaagaagtcggtggataagaacagcaacgagtaccgggtrcggcgggaacgcaacaacatcgcggtgcgcaagagccgagataaagccaaacagcgcaacgtggagacgcagcagaaggtgttggagttgaccagtgacaatgaccgcctgcgcaagcgggtggaacagctgagccgtgaactggacacgctgcggggtatcttccgccagctgcctgagagctccttggtcaaggccatgggcaactgcgcgtgaaagctt

SEQ ID NO: 4320 - DNA, 600 bp, Rattus norvegicus
tccccatgggcctggctcgcagggtcaccaaggacaccaagtttcgagagttcctcctccccaagggtactgaagtatttcctatgctgggctctgtactgaaagaccctaagttcttctccaaccccaacgacttcaacccaaagcacttcctagatgacaagggacagtttaagaagagtgatgcctttgtgcccttttccattggaaaacggtattgtttcggggaaggactggcaaggatggaactctttctcttcctcacaaacatcatgcagaacttctgcttcaaatccccacaggcaccccaggacatcgatgtgtctcctagacttgtgggctttgccacaatcccaccaaactacactatgagtttcttgtcccgttgagccagcattgcgtgagagtaaagggaagaatgggggttgaaacttagaaagggtcggatgtactgaagaaacagaggaaaaagagtagacctgctgaagatatatatttcaaaggtagagccagagaagggggaaatatctactatgctgtgaataggaataataaaataataaaagtagatattatttatggcaaaaaaaaaaaaaaaaa

SEQ ID NO: 4321 - DNA, 600 bp, Rattus norvegicus
ctcaaggccagatgtaaagagcagccggaactggaagtccagtaccagggcaaatgtaaaarkasktscassgatgttttctgtccaggcagctccacttgtgtggtggatcagaccaataatgcctactgtgtgacctgtaatcggatttgcccggaaccctcatcttcagagcagtccctttgcgggaacgatggtgtgacttactccagtgcctgccacctgagaaaggccacctgcttgctgggcagatccattggattagcctatgagggaaagtgtatcaaagcaaagtcttgtgaagacatccagtgcggtggtggaaaaaaatgcctatgggatttcaaggttggcagaggtcgctgctctytytkcgatgakctgwgcccggacagtwagtmggatgagcccgtctrtgccagcracaatgccacgtacgccagcgagtgkkccatgaaggaagctgyctgctcctccggcgkastgcttgaagtraagcastccggatcttgcaactshawstbkgwwdaamckgagsmakwgrmkswwsagramkwycwgsavtacagcttccctatctcttccactctagagtggtaa

SEQ ID NO: 4322 - DNA, 600 bp, Rattus norvegicus
ccggcccaggggtacagcgacgctcagcaatggcaagctatgtggcgccggggagccggaccaactggcgcagagactggctcaggaggccgccctggtggcccgaggctgcacgcacatccgcgtgtgcccggagtgccgscgcttccasggcctgcgggctcgaccgtcgccagcgcgcagcgaggagagcctggagtgggacaagaccaccaacagcagcgagcctgagtagtggcggcgaaggaccgtggagccaggcggggaggcgggagggctaatgttacaacctccttctctccgattgaagattcagtgactttacaaaghsactgatgscccasckrgggcggatcccgccctatctgagacttgcaaacacgtggcagagacattgtccctcttgggcacaaggaccyatctcctccagasggtctttccctcacattcaaaaacatggattctgggtagtggggccctgctgagagagcagtccaagaaattgatggtrtcatcagttggattaccccctaggaaggggccattgtaccctgggtctagttcttacaggaaaaaaaaaattaaactcaacmsksrwgg

SEQ ID NO: 4323 - DNA, 600 bp, Rattus norvegicus
agaacaacttacaagataacaagaaagacaaagccagagtcattcagagcaatactgaaaccctagttcatatcttcaaacaagagataaaagactcatataaaatagtccttcctaccccaacttccaatgctctcctaatggagaagttagagtcacagaaggagtggctaaggaccaagaccatccaactcatcttgaaagcacttgaagaatttctaaaggtcactatgaggtctactcggcaaacctagtgtgctatgcctaagcatatcagtttgtggacattcctcactgtggtcagaaaatatatcctgtcgatgggtatctaaattatgttgttctctacgaagaactggcaatatgaatgttgaaacactattttaattatttttaatttattgataatttaaataagtaaactataagttaatttatgattgatatttatactttttatgaagtgtcacttgaaatattatgttatagttttgaaaagataatataaaaatctatttgatatgaatattctcttacctagccagatggtttcttgcaatatataagtttacctcaatgaattgctaatttaaatttttt

SEQ ID NO: 4324 - DNA, 1400 bp, Rattus norvegicus
gcagaacgcagccctgcgcggggagctgagccaggcgcggggccaggagccggcgcgcgccgaccagctgtgccagcaggagctgcgcgagctgcggcgcgaactggagctgctgggccgggagcgcgaccgggtgcaggtcgagcgcgacgggctggcggaggacctgggggcgctcaagcagaggttagaagaagaaactcgcaagcgggaggatgcggagcacaacctggtgctcttccgtaaggacgtggacgacgccacgctgtcccgcctagaactagagcgcaagatcgaatctytgatggacgaaattgagttcctcaagaagctacacgaagaggagcttcgagacctgcaggtgagcgtggagagccagcagstsswgcargtgkmggyagmgrcammagtgaagccagagctgaccgcggcgctgagggacatccgtgcacagtatgagaacatcgcggcgaagaatctgcaggaggcagaggagtggtataagtcaaaatacgctgacctgtscgwtgstgccaaccgcaaccatgaggccctacgtyaggccaagcmggakatgaacgagtyccgacgtcagatccagagtctgacgtgcgaagtggacgggcttygtggcacgaacgaggcactgctcaracagttgckggasytggaggagcarktygccctggaggctggagggtacsaagcargcgcagcacggctkgaggaagagcttcgacagctkaaggaakagatggcgaggcacctgcgagagtaccaggagctyctcaacgtymagatggmcctggacatckwkatagccacctacmgrwagcywctggraggggaagagagccsgatctcartgsccgktcattyctttgcttycctaardttaaagacgactgtkcctkakgtggmgcctycccakgacagmcacarycggaakatggttytgatcargactatygagactysggatggggagaaggkggtgacarartctyavaakgagcagsmcagtgractkkrcmagkcttctattyacarstacygaggsctyagctkgwtytctgargctgactkragcccgttcctwagctcgaacsctyccttksaccaktytkswacsasycybbytcaghrtgtgsaccctyctagmcgagctycwgvccgatcctgargstggacctctyccyswtgcawtgatgtgacccatagctttyctgtsctykbragargcgwtgaararamccmrgacagcagatctgstcaagahtgaccccatggactgtggggtgggccagagtgtgagattcactctgagtcaaawaaaatcgstaccsagarraamwmwrwddaaaaaaaaamaawaaaammmmmwrrmmwhmwmwmwwrmw

SEQ ID NO: 4325 - DNA, 1400 bp, Rattus norvegicus
aagtgtcctttggtaaaaaaaaatatatatacatatatatatatatctcctatcagtcctttctaagaaacccaaactaccaaaaaccacccccacggccactttctgaagttggttctgcttttttttccctgcagtattgtttagccatcttctgctcttggtaaggttgacatagtgtatgtcaattaaaaaacaacaacagcaacaaagtctgctttgtaaatagtaattttacccagtggtgcatgtttgagcaaatgaaaatgatttaagcacagtatttactgcatcaaatatgtaccacagttaagtatagtttgcaagctttcaacaggcgacatggtgtcactgggtcccttagagtttgaagctgtcaccgctgcatgtctctcttgctgatgccgctgtatcttaacccttctgctgttcagaagtctaacagggaagccatacgtcggtggcgaagtgaagcaaatcggtccaccaggaactcactcttcgtgacatgagccatgggttgcggtaaacgggaaggagatccttgttcttggttctcccaaaccttaatggaacagccggtgagatgtctgacagtgtaagctgcttagatctgttaaaagtatgtgcttcgagttttctaaggaaatatacatattgtaaaaaagggggggctcattttattttatttcaaagccttttgtacataaaatgggaaattaaaagtatcttcaggttgacgtcacagttctaccgttagtttctgttccccggcactttttaatcaaggcacttcgtcacggaagagataaggcctaagaggcagtgtagggctctggctgtcgttgttggtactgtggacttgcgcgtatttccacttgaaacaattctcattccaagtctaatgtccatttgctttcaatagtgatgccttatcattgacaagagatttcaaggggagcagatgacactcttggcattgcctgagtaggatgtcctcacctagtgtttctcctctactcatccatcttttttaatgttcgtttacacagatagatagatggatagatagaatcttactcatccacatggcaccagagctgtttcaggtatgattcgggaaccaagcgctctctctctctctctctctctctctctctctctctctctctctctctctctctctctgttttccacaaaaccagttagtgaaatgatatcgccaattacagccaaacactttgtttcacagacaaccttcaatgtagattctttatactaaagctgttgacttgtagcgtgttcatgaatgcatgcaggaaaatgctattaccatacagagctaccggtaagccacattacgatcaagccaaaagaataaagatttttttttttgcttt

SEQ ID NO: 4326 - DNA, 1400 bp, Rattus norvegicus
  misc_feature (894)..(894): n is a, c, g, or t
mhwmrrrammvavrarrmamgaawccagwtcccaagysrcmgcattttcccacgtwactcgactctgaggccatagcctatccacagcctcctcgtcccctgcaccgcccagtgtctcactggytgtgttggaaacgggaattgcataagcttgscttcctcaagcaagaaatatctctagctttcatttccattttgastcttarcactcacccagactctgtgchtatttcatttggkgggggrtktkrgmtyccykgggtcttcccctggtagtttggaggtaggcagagggaagtyacrgrcacagvtwcrrmacwkgggcaaggacgctgtgagsscagtcagawccagatggcaagtcttggtagcctaggtcaacgactgacrgaryrakscagagctstgwtgcacaaaacagactcccagcagcccgggacsttgctgtstcctccactcttcaggcagttycttyccatgtttggctgttggtkyyaawwttsgksmrcsarggggaggcatgggcagaccaatacctcactagggattctcttactmaactsmtatrgggctttcaggctcytrmtgggagctbtaggcwctggghtacaggaamgtgmgrcycaagwggadgwsaragamgvytkkaacgtabvgagaktgrrtcataawgyyycaagmatscccccsccmcmtytccccaccvtktgscabttgaaacttahtaatcaagagaaactyccwasccaacggaaggaatggtcgratcycacaggctgagaattkkttccccyccamgcatttcatgaaaaagctsmktbtcattavcsatgcgaactytcmcagtgwtstgaagagcktgacagatytytcraaataaaargtawtgryttndmawwrvvhawmhhdvvwrwwrvhmwmmwwwwrmmwmawmmaccatccccttcccacaaaaacctccacgggcgggcatcggaacccaaattcgcccctatagtgagctcgaatttacaatttcacttggcccgacgttttaaacaacgttcgttgactctggaaaaacctttgccgttaccccacacttacatccctcttgccacaacattcccccttatccccagcttgccgaaaaagccgaaaagttcccgcacccgacgcccctttccaacagtttgcccaccctgaatgccaaatgcccaaattaaacccgtaaaaattttgttaacaaattccgttaaattttttgttaaatcacccccattttttcacccaatggtcccaaaatgtgaaaaatccctttttaactcctcacgaataccacccgcaacagctttcacgctttctctcccactctcgtaaccataagctcccctttttcacgaccttagatcctcccaccc

SEQ ID NO: 4327 - DNA, 600 bp, Rattus norvegicus
  misc_feature (415)..(415): n is a, c, g, or t
atggggcgtcccagctcctccaggccacctactcttgacgattccagtgcagtagtgccaaaaggycmcttmmtttgkccctcaagkycwgtsgscwsgwgkgtcwtagtgactgtcatgtgttccttagtactgtactcccatgtggtstatgtgtaacactactatygkmwctgwgkccagcctgvccgtggctgggtgtctctttggcctgtgaaracgtgctcacttacccatgtgcttgcttgtgagccatgtgcctgtttcatgttctatgtcatgtgaccmtgtgccccrsywcswggggtgcctatgtgccmtggtccatggccttggasccatggtcaggtcacagtccggtgcctymcaccccctatggcaagggcgccctgccctggcmtaccacagctgccwntggghttcggyytgrmttcacsgcattmcaggggctatagscccccvtgyttytcccgccattggcmttaaatggccctsgggccytccctytgcccggaacagggtggcaccagccactytcaggrccmcyttgccaaggagaataaaccggatcctgttgcmvwwwaaaaaaaaaaaaaaaaa

SEQ ID NO: 4328 - DNA, 1400 bp, Rattus norvegicus
ggaaagtaacgcagaactgacagcagattgtgagaccaaacgcctcggtcaaagcctcaactgcaatgctaacgtgtacatgagaccttgggagaacaaagtcgtcccgactgtcaaatgcaaagtactagacatgacatcagtgataagaaggcctccaggattttcacctttccgggcacctcgagtgaaaaagcctaaagaaagtacaactgtaagtccatcctacattgccagggtgcaagaagagagggatccaggaaatgaacaaggacccatccatgggcatggctggttgcatgcaaagcaaataaagaataagaatcaccaaggtcataagcatgggcatggtattggccatggacaccagaaaccacatggccttggtcatggacatcaacttaaacttgatgatcttaaacagcaaagggaagacggctatgaccatagacatccagtgggacatggtcatggtcagaggcatggtcatggtcatggtcatggtcacggtcgtgataaacacacaaataaagacaaaaacaatgtcaagcacactgaccagagaagagcacctttgacaagctcttctgaagacaatactacatctacacagatacaggggaggacagagggcttcaccttgaaccctcccctagctcagccagctgttatctctcgtggttttcaggactcaggtttcactgaaggtgtgatagctaccacatcaccatatgacacggagacccatgatgatttgatccctgatatccatgtacaaccagatagcctttcatttaagctgatatctgactttccagaagcaacttcccacaagtgtcctgggcgcccatggaagccagttagtaggaaggatccaaccatagaaacaacagaattttctgattttgatctcctcgatgctctttcttaacttatacagcgtaggaatctttacaaatgctttcccagcctctttttctactgcccaaacacaaatattgtgacataagtcatcaagccatgaggctcagaacagcctgtcagtaggactttataaatccctgtggactgataataaaactgccatccttctgaattccttctgagcctgcctcacacgctctctgaaccaatacaggaagaagcctaccagaatccactgctcagataatgaaggctcctaaactcatgtgagtacaagggcagactcttaaaggcaggggcaggcccagcgcctgagcgtcaggcagaagcttcatccgtgacaccatagcccggcaaagacccggagtggaaggaccagaagactcctgggatgtgtgcagcatggaagcatgtttcttcatcacctgatcctgggtgaaataaagttcagactcgacgaaaaaaaaaaaaaaaaa

SEQ ID NO: 4329 - DNA, 600 bp, Rattus norvegicus
attaaagtgccccagaacccacatggcaaatctaaagggtatgcatttatagaatttscttcatttgaagatgctaaagaagctttaaattcctgtaataaaatggaaattrrgggcagamcaatcaggctggagttkcaaggacccaggggrtcacctaatgcgagaagtcagccatccaaaactctgtttgtcaaaggtctgtctgaggataccactgaagagaccttaaaagaatcatttgagggctctgttcgtgcaagaatagtaactgatcgggaaactggttcttctaaagggtttggttttgtagactttaatagtgaggaagatgccaaagctgccaaggaggccatggaagatggagaaattgatggaaacaaagttaccttggactgggccaaacctaagggtgaaggtggctttggtggtcgaggtggaggcagaggaggtttcggaggcagaggtggtggcagaggcggaagaggcggatttggcggaagaggccggggagggtttggaggcagaggaggcttccgaggcggcagaggaggcgggggagacttcaagccacaaggaaagaagacgaagtttgaatag

SEQ ID NO: 4330 - DNA, 1400 bp, Rattus norvegicus
gaaacgtcyctacttycccatctagacccaccccgaatgssaaccamaagtccaatgtgagtgaccaggaagagacaggtccacatcaaatcggctgttaccattamctcaacagaaaacaytgagrwtccgaaattcgactggbttaaaggacgsgtgaagggtttkagagctgagagatgccawtatgggatctgctggagttttatgtccgagatgaagacaagsatccaaaattgacgtgatttgctcgaaatgtggcttaagaaatgtggacacttaaaactctcactcgaaatcgggcgtaggtttgatgtakagggwgaaggatggggtgtggratggaggtccattattttcattggttccttcgacctataaggccataatgcagttaggtggtattcaaaagcttctctgatgctatttctgtgtatgttggaaggaactaccaggtgttattttaaatccccgatgtgttgttttgttactactaatttaataggctaaactctaggtgaagtcccacgtcgttgacctctagttcttctctccggaacagaacgttttacaccctccttctgtggctttaggtcacccacccccaaatccagccacccctgagtaaatctgatttcaaaagtcacaacggcaaagcatttcccagtgtcttttctcactcaccacgggtactaagttcacttaggtgagctggttctccagagagcagaattctgttgatctcggctaatctccaaacgctgcgttttattttggcatatgtcgagggcttttcatgatttaaagcgtggtctgttagcaaggccaaaattatgagtcttgaaattctacaggcaaatatgcaacccagcatttgggatgtgaggactggaagctctcacagaattacacaaagtcttttatacaatttctgtaaatacttttttttttttaaagagaaaaacaaaaccatggatcggaataaccacgtttggaatactttggttatcagttcatatttttagatagtttgacattggtcctgtgcctgagagggggtttggttctacagtaagtttttttttcccccaatttccttgatacacacataccttctaaaacacagacatttcctcaaaaaaaaaaaaaaattccttttgttcgcatggtcacacactgatgcttgccattctgggatctaatacggtcacagtagtcttgataaccagaatcatttttttctccgtctttagaaacctacccgggaacaaggagacctcacagacccgaagctactgtgtgtgtgaatgaacactccccttgcctcatacccgaatgctgtacatctatttgattgtatattgtgtttgtgtattgtaaataaaagaaagaaatggctg

SEQ ID NO: 4331 - DNA, 1400 bp, Rattus norvegicus
  misc_feature (1357)..(1357): n is a, c, g, or t
  misc_feature (1370)..(1372): n is a, c, g, or t
  misc_feature (1374)..(1374): n is a, c, g, or t
ccagaagaggraagttcagacccggacagcgcaagccaacaacccctgccaagctggtgtccttccatgatgacagtgacgaggacctcctacacatctgactccgtggtgcctacaggagaaggtggcaccatggacagccaagcatctccrrccrarkaagacttcagctcgatgatgcgtctgtcattttgcctttaacaaaactgcttcaaagggaagtttctgtaatgggggagaggatgggggaggtgggcmccactcttccatgatcgtttacagtcagtggaacaaggtgttgcttgaatcggccaaagggcgctacttggtgcccagggttttgccccaagtcctcacttacgatcatagctgctgtgtgcttccaacaggtgcccaggccacatgcatctcacaacagagggctgtgtttgaaaaaaacccttgctgctttagaccctatagggtgaccatttatatttttagcattgtaattctctccccstatttaktgactktgacaaktastactcaggtttgcgaaaaarraaaaaaaaaaaaaammcagtttcttctgccagcaagggcataaggtgaagctggcattatgctggagccttgtacgtggctcctgagctggtccttgatgcacactttagtgagctgcagtattctattcttcgctttgcgttttgtaagggcacacatacatgcacaggtccccgagtgcytcggtttgggaaggcccgcctgcyccgtsccctacctcgtctytatagctgcagctctttscacgaatcyttctgggtgkcrckwktgcccgctggtgagcsccarcagctcacccagaggtgggtgtttgtgcatscgatggagtaraggctcttgkaragragccgcacttcaggtttgggctgtaggtctcatctcttcaggttctcaatgccacctttactgtgyttttwkyttttwykkyamgggggaaatgtttatcacccattcrrcmkrbdmgargmmwtaawtwgyryaggstgaytkasagasayygtkaaatmmkgtsgvyswgtstwgtgtgtggscttgtgcagggcagtgtcccgggatgraaggccaggcccggkscackrgvtgtggactcctttcctgatgtgttcaatgacttctcacattatagagttgtawataggtggtatttayatacccagaagcaaagtaccccgcagaatttcttggwttawgcctgattttgctagcttatttgatttcacattgagtgtatttttaaaaattgatttttttcttcaytttttartcaactttactgwaayatgaagtattcamttkcmrtaaaaataaattnttwamwavhhhvnnnmnraaaaaaawaaaaagttgtgcggccg

SEQ ID NO: 4332 - DNA, 1400 bp, Rattus norvegicus
acacccacctgcaaaaaatttataacaagatcccaggaactagcaacaatggactagaggaggaatttaagaaattaacttcaatcaaaatccaaaatgacaagatgcgtackggwwaccttccagccaacatgaagaagaaccgagttttacagatcattccatatgaatttaacagagtgatcattccagtcaaacggggcgaagagaacacagactatgtgaacgcatccttcattgatssstaccggcagaaagattcctacatcgccagccagggccctcttctccacacaactgaggacttctggcgaatgatctgggaatggaagtcctgctccattgtaatgctaacagaactggaagaaagaggccaggagaagtgtgcccagtactggccatctgatggcctggtgtcctatggagacatcacagttgagctgaagaaggaggaggaatgtgagagctacactgtccgagacctcctggtcaccaacaccagggagaacaagagtcsgcagatccggcagttccacttccacggctggcctgaggtgggcatccccagcgatgggaagggtatgatcaacatcatygcagcagtgcagaagcagcagcagcagtcagggaaccatcccatcactgtgcactgcagtgccsgggcaggacggacagggaccttttgtgcyttgagcacagtcctggagygcgtgaaagcagaaggaattttggatgtcttccaaactgtcaagassctgcggctgcagaggccacacatggtccagayaytggaacagtatgaattctgctacaaggtggtacaggagtacatcgatgccttctcagattatgccaacttcaagtgacaggggasaaggcccacagacaggagaattgcctttaatattttgtaatatctgtttttgttaatatacccaaaattgtatatatcttataactgttttrgaaatggcacataggcttctattacctattaggtggagattttgtatgtaaatgtgttagcactatagtccttttccagtgttttattggggaattaaatagtgygatatttgagttgawwwaawraarwmmwwagcctggaaattgggccagattattctttgcttcaaatgtctttttctaaagaagacaaacataagagtcattccaggtaactcggtgccaactaaaacaaagcacaaagttctcggagctcttgaggaaatggttgtctcacgtccccaggccggcctcttcccttccctgtccctctccagtgcaccctcatctcccaccaatatcagccacctcaggagtggggaataatgagaccagagcagcatccctggcaccacactaggaatcatcaggtaataaacactcttgattcccgg

SEQ ID NO: 4333 - DNA, 600 bp, Rattus norvegicus
gccagaatctagtacaggtgcctgtccccagtgtccgtaaagcttaggacaggcagatgcccccatttccttgtctctgaacaagctgtgtgtctgcagtttctgtggagtcagtggtccgggtgctggcttctttccaaagtatkstatccctytgkstttsayrtccamwyagaatggaaacgatccccaaactgatggccgctgttgttctgttgactgtgtgtttggaaggctgctccagccagcactggtcctatgggttgcgccctksrkgkwwgagaaatactgaacacttgsttkattctttccaagagatgggcaaggaggaggatcaaatggcagaaccccagaacttcgaatgcactgtccactggccccgttcacctcttagggatctgcgaggagctctggaacgtctgattgaagaggaagctgggcagaagaagatgtaatgcactggcccagaaggatccacaacatccgagtgtgacattgacgctgagatccatgacctgttacagctctgtaattgtgtgggcttccgcatttctatacccagcagcgtagatttcataataaagtaatgtgttgtggatc

SEQ ID NO: 4334 - DNA, 600 bp, Rattus norvegicus
aagcaattggatgaaagggagcacaccatcgaagaatggaaagaactcatctacaaggaagtaatgaactcagaagagaagactaagaacggcgtagtcaaaggccagccctcaccttcaggtgcagcagtgaacagcagtgagagtctccctccatcctcatctgtcaacgacatctcctccatgtccaccgaccagaccctcgcatccgacactgacagcagcctggaagcctcggcgggaccgctgggttgttgcaggtgactagccgcctgcctgcgaaacccagcgttcttcaggagatgacgccatgatagaacacagcgcacatgcacacacacagagcttgtacacacacacacacacacacacasrcgcacgcacgcacgcacgcaagcacgcacgcacgcacaaatgcactcacgcaatgtcaagaaaaaaaaaagtagcgagagagagcgagagagccaacgtaaaactaagttaaatctttctgcgtgcttctccagagttctgtatcgcagctgagctgaaatgtatacttaacttctagtcgcgctcgctcgactttggtctccctccggcagtgcttactacaca

SEQ ID NO: 4335 - DNA, 600 bp, Rattus norvegicus
  misc_feature (366)..(366): n is a, c, g, or t
gctgacaggaaaggcagaggagtttcakgatgtatgggaggrmcaggccagtacttttgcctttccttaagcctttgccaccagttctctgcadaggcctggtttcgggsytgrgactactttcctgggactctccatgtsccactcgatggaccactrggcgcttaattagccaaggcagaagagaggaggattatctggtccaggcagaaratcaccysmccgkcwcsmssagccatattmtatccctggttaggaagggactactcgatbccgatgggstgsgystgaggtgtatawaccaaagcagggagacctcgrctytgggaactttgtctgcttcttaccaggtgggaggggsttgtntacaccytggytccckgcacsasagtrmyrgsswgtcrwgyccwctgrsytmccgtwscmyswctcctcaycarytgrtggaggagwsagggtacgggaggccatgggytctggttttataatgtaaccaywgtrggagtgggggagggcgacgtaccatgtatttcagtgaaatatttaatatatttaaatatcaataaaatcaaactctttgtdaaaaaaaaaaaaaaaaaa

SEQ ID NO: 4336 - DNA, 600 bp, Rattus norvegicus
ggctgtgtccaaagactttgcttaatgttatcaagtaggaaatgcgcagataagaagagaatctggagggtgagaattggggtcctaactccacagtgtgataaatggaagaactctgaggtatccctgtagctgtcaatcttgagacttagttttctggttactttaactgaaaagatctcagcagccttctgtttattcttctctcccttatcactggcatagccttgtactcagcaggggcactacgtggtcgtttgtytgctctggacagccctataggatagatcttagtggctcttgcagcccagtaaaagcctgtcctgttggtggtgcatggaaacatgccccagtcctgggctcacaagaattcgctgtctgcctttgctatgcgcagacccaggctgaaaccaatgcagagcagtccccactggatccaccgcagcaactgccatgaaaaaggaaggcaaatacaaattcaaactgcaaacttctctgctagtttctctgctagttttcctgtgattcaacttacatttctgtctgtttatctgtctgtctatctatctatctatctatctatctatctatctatctatc

SEQ ID NO: 4337 - DNA, 600 bp, Rattus norvegicus
agcctgtgtgcggccaactcacccactccgaagttttgcaaaccctttgctacctccacctatgagtgcaatagaaccaaaagtcccttacacaccgcttttgtcgcagccaggacccacccttcccaagactcatgttaaaacggcctcccttgggctagcaggaaaggcaaggtcccctttgcttcccgtatctgtgccaacagcccctgaagtgtctgaagagagtcacaagccaacagaggatccagccagtgtatatgaacaggatgacttgagcgaacaaatggcgagtttggaagggctaatgaagcaactcaatgccatcacgggctccgccttttgacatgcattgccaaaccgttgagatcttctgggaactttacagcataccaattatccataaacagcacacctgtgtccaaaaactctaaaccagtgtacaggtccaccatctggaccatccagttaagaaacatctgaagcacttcagaagaaatctgtaacccatcctagatggacatcaggaatcaaagcaaagatggtcatgaggtcccgaagatgcatcttaactacaaagtcaaggtgaagtgcctgcag

SEQ ID NO: 4338 - DNA, 1400 bp, Rattus norvegicus
  misc_feature (591)..(591): n is a, c, g, or t
aatcaggatgcaaagaattaccatgcctggcagcatcgacagtgggtcattcaggagtttcgactttgggataatgagctgcagtatgtggaccagcttctcaaagaggatgtgagaaataactctgtgtggaaccaaagacacttygtcatttctaataccactggctacagtgatcgcgctgtgttggagakwkwwktyywwtwtwytstrgaaatgatsawwtyabkrsmamacmwtkmkwktgcrtgkarytrsttgamagkgatttwgcaggaccgtggtctttccagataccctaatctattaaaccagktgcttgatttayaaccaagtyacagctccccctacctaattgcctttcttgtggatatctatgaagacatgctggaaaaccagtgtgacaacaaggaggacattcttamtaaagcactagagttatgtgagatwytagctaaagaaaaggacactmtwagaaaggaatattggagatatawtggacggkccyyccmgagtaaacmcagcagagaawgtgacataccggcgagtgyatagcagcaagagcggstggaagamgtggacaatgctttntamgscctcttattcgggagkrtagagcggttaraghrktcrkcwcrwgvytskgmrckarssktgtycargtgctgyttytaacaagaaytaaggrtgamwmmwrwrwhwramrctgttcagactagytaagagtcgatttcctaaagcaaggtcattggaggggagggtgaagaaaactttcccgtaaaggaactactgcttttgtagtcttcccaacatttaadccaatcctgtagamtymgcatytcctgaaagacatgktgcacgkctgtgtgytgggcgtgkmtaagggcarctgtgtcatgggtytgcmgtcatgggaacctcggagcgctgcccgggaytgcattgwtgattagggytgytggcctcacccacaggatcttgstatcactgtarccaaytaatgccaaaagaaaggttytwtaataaaatcacwtkathtacwammraaaaaaaaaaaaaaaaactcgctcgtgccgaattcggcacgagcctgtcctcagtgatggccatgtagccgaggacaccagggtgaagtacattggctttgcaggtagctcctgatctcccaggcacccctcctacctgtgtggctgatctgatcttgcttgttccatacatacacaattagtttagaggtagccaccacgatggactatgtcatttgtggtgagagccaaaacgacacagacttctagaagattgtgctacatcttgatccatggtttgatgcaattgagggacggttcacctgttaatgaggatcttgggagctccgactaccttgggtttgtacaatttgg

SEQ ID NO: 4339 - DNA, 1400 bp, Rattus norvegicus
gttwgcytttgcctgwtcggccttgcctcctgtstyccggtgaaagtggctgagttwggmrgstcrsrggagaaggcgcattacagcaaacactcagatgctgtagccacttggctgaagcctgacccatctcagaagcagaatcttctagccccacagaattctgtgtcctctgaagaaacggatgactttaagcaagaaactcttccaagcaactscaatgaaagccatgaccacatggacgatgatgacgacgacgatgacgayggagaccatgcagagagcgaggattctgtgaactcggatgaatctgacgaatctcaccattccgatgaatctgatgagtccttyactgycagcacacaagcagacgttttgactccaatcgcccccacagtcgatgtccctkrsggmmrarskgatagcttggcttayggactgaggtcaaagtccaggagtttycctgwttctgatgaacagtatyccgatgccmcagatgaggacctyacctyccgcatgaaragmcasgagtccgatgaggctmtcaaggtcawycmagttgcchagcgkctgagcgtgcccwykgakcargamagcaacsggaagamcagccatgagtcawgtsrgctggatgaaccaagcgtggaaacacacagcskgsagcagkymarggrgkmkaarcagaggssyrgccacgagagcactgagcaswcgrrkgcgatcgatagtgccgagaagccsgatgcaatcgatagtgcrgagmsgwcsgatgctatcgacagtcaggcgagktccwaagccarsytggracatcagagccmcgagtttcacakbcatgaggacaagctagtcctagaccctaagagtaaggaagatrataggtrtytgaaattccgcatttytcaygawyymgrgagttcatcttctgaggtcaattaaagaagaggcaaarccmmagttccttactktgctktaaataaahcmaaaagtaaatycmmhcaagcaggaatwctamctgcktgtttctcagttcagtgsatacatgtatgtgsagaaagaaatagatagtgttttkgsccbtgagcttagttcgttgtttcatgcasacmccmctgtamcctagaagtttcagcattkygcttctgttctttctgtgcaaraaatgcaaatggccmctscattttwatgattgctattcttttatgaataaaatgtatgkaraggcaggcaaacttacmggamcagsaaaattwaaagagramctrtwatarkctgtgkcmctatamtctyytgstyttataawyagkgkawahtttgktgkgmwtawttwtgkkggtgtgaataaakcttgkatcttgvadrdaaarawaaaaaaaaaaaaaamwmraaaaaaaaaaaaa

SEQ ID NO: 4340 - DNA, 600 bp, Rattus norvegicus
  misc_feature (349)..(349): n is a, c, g, or t
attgtgcgagacatcaaggagaagctgtgctacgtagccctggattttgagaatgagatggccacggcggcttcgtmttmttcybtggagaagagctacgagttgcctgatsggcagrksakcacsmttgrcmmtgmkcrcwkmsgcysscmskarrccctgttccagccttcsttcattggcatggagtcagctggaattcatgagacaacatacawttccatcatgaagtgtgacattgrcatccgmrrggatttstatgctarcaatgtcctctytgggggcastaccatgtacyctgggattkctgacasgatgmagaaggagatcacagyyttggctcccagcnccwtgaagatcaagatcatcgctcctccggagcggaagtactcagthtggaytggaggmtccatchtggyttctytyhccwcyttccagcaaatgtggrtcarmaadmmaragtwtgatgaagcgkggccmtccaktswccacaggaaatgcttbtaaagtcacagggcmttbtbtggggrymmmwrmaaravtgctgtcaccrgtcacagatcadtaaarccttcargcmwwaaaaaaaaaaaaaaaaaa

SEQ ID NO: 4341 - DNA, 600 bp, Rattus norvegicus
acgaaacacaccsgtaagtggggcwwgaccatcatcgagtaccgatcacagaagacctcacgccttcccattgttgacattgcacccatggacatcggrgggcctgatcaggaatttggtgtggacatagggcctgtctgtttcttgtaaaaccctcaaccccaaaacaacacaatccattgcgaacccaaaggacccmrryackwkstrrmcgcagtcactctaggatctgcactgaatggctgacctgacctgatattcaactatcctaacctcacagtccggaccattctcccctttytaagagacctgaactgggcagactgcaaaataaaatctcgaagttctayttatttattgtcttcctgtaagacctttgggtcaaggcggagacaggaactatytggtgtgagtcagacgccccccgagtgactgytcccagcccagccagaagacccctacaggtgctgggcrcaggaactgtrtgtcctacacaatggtgctattytgtgtcaaacacctctgtattttttaaaacaccaattgatattaaaaaccaaaaaaaaaaaaawmawwggaaaggaaaaaaaaaaaaaaaaa

SEQ ID NO: 4342 - DNA, 1400 bp, Rattus norvegicus
acaaccacaaattccttggtcacctccaaatgtaaccggtcctttagcccagtagaggagggtgggtgtggccctggcacagctcccggattgttgatgggcactctcctgagctttgcttgagtgagaagctgaatgtagctgaaaatcaactcttcttacacttcttactgcttcgttcacttacgaggtcacatatagaacaaacatcaccaactattagcttaccgttagcttcccaactattagctttctatgttttgaaagcagtgttgctgaccccatgttttaatgatggtttaatacatgcagccctttcctctcatcggtaacactagctccaacatcaacttcatgcatgtggctctcaaaagcaggccccaagaagcccagttctttaggagaaagctgcgtcctgtttctgtggacaggcaggaggaaacagagcagcctgcccgtggtgtctttatctgttttgaaatcaaggctgcctgtgtgtaaggaatggttcaattcttataaagggtgccactgttgatrccacaactggcagttggtctagctccaggacaccggtttccatgttgcctggcagagacagctttgattgggactggctggccacaagggatgggatgaagatgtgctgccctctctttcaaagttgagccctgccagggcacatagaagcatctttgctcctgaccacaacgtagaacagcttggattcaaggtcatcaagcgtctcctgtacattgctctgtgacckwsrtaacagactgtcccgcacaaaaggaacggcagtttatggatctagagtgggagcacagggtctggaaaggtgaaccgattggcaaaatacacagaacaggagggagagtctcaagccgagacatcttgcttactagccacacvcmatctcctggagccctcctcctgacctgggcagacccttaggtgtatatctaaagacctcktcaatgttcagsttcagaatctgtraatggttgcgtcctggcacccmttcytgaaaactgaacawasgagaggwhatctttcctccaytgagccmtgaaagtatgamtggcttctcaccytcccacagagcagggagcyctggtgcacacagtctcctgatatcctccstgctcwwtgaggtytsccktgggagaaamtgattcacctcgggaggrgacgctttsgtgtctgaagtacdtttatatcgaaatghtaatgawtacccatgtaaaatactcawtwgcmacstttcttccmttcacaatgttktcgaggggaatrcatccaacayccaagtgtacctgrtcagtgsgaakttccatgaagactcatacmttgamtaaacatattcghtgtgccgaaavmrrmmrmaaaaaaaaaaa

SEQ ID NO: 4343 - DNA, 600 bp, Rattus norvegicus
tacccttcagaacataacagtcagaccctagtactaaggatagcacacacttgagacatataacatttccatcaagctgatactggtctggaaagttcaactactggctagcctgcagagtgatgaaaactgatattgtcactactagaagagaaaggtaaccatcaatattaccctttgaatcctgagaactacacccaacctgccacaacatggccaacggctgtgtagtggtaccaatgtcatgcaagtaagaacctactttctggttgaatttaaggcctaatccacaggttgaaacccatacctggtaccattaatagggccaagaacctatagggagacaggcaattgtaaaagtttggtccagttctacctcccagccccatggtacagtaataagactcagagtcaaaatatatttacaagaaccttagccatatatgtaggctcttctctgactagatcctaacttattataacccatttactctaggctaccttctgccacatggctaattacctatgttcaggtaccatgcatctgtctcatcacatcttccctacgtgaatcacctgcctggctctctcccagaattc

SEQ ID NO: 4344 - DNA, 571 bp, Rattus norvegicus; identical to SEQ ID NO: 248

SEQ ID NO: 4345 - DNA, 565 bp, Rattus norvegicus; identical to SEQ ID NO: 249

SEQ ID NO: 4346 - DNA, 991 bp, Rattus norvegicus; identical to SEQ ID NO: 250

SEQ ID NO: 4347 - DNA, 600 bp, Rattus norvegicus
ggcgagggacgggatttttacagagcccacagtagaaaggcacagcatgtttgtgagtgtgtgtgcatgcatgtagatgcatgtcacttgaggtacatgattttgtgccacccttgggtacctgtccctactcagggccacagcggggtsggcykwttttgcaattaaraagcagtgtgcacaaattacatgmtaggtcctgagcctttgtggccatcaggacaggagtatgcgagtgcatggtgtgggtacaggggatgcaratgcatgaggagcccccaaaattttctgggaagagtsggmtatgccctctcaccttctcactacccttgtcccaacaggagaggcagaagagcagytggccttctgtatacatgagcctttcctctgccaattctgctaactgtgcatagaaaaagttttaaaagttgmawmwrwmmwrawmawawawrarmwwwwwwwttttttttaagaaatcatattccttacccctacagcatggtaattcttcacatggcttttacaatattgggtatctaagtcacctggagatcacacaccaggggatgtaggctgattctttacaaacactgtggtttt

SEQ ID NO: 4348 - DNA, 600 bp, Rattus norvegicus
  misc_feature (193)..(193): n is a, c, g, or t
  misc_feature (596)..(598): n is a, c, g, or t
ctttgtgcactaaggtttagggtaactagtgactgtagttggaccttttataaaatatggttaatgtgaarrwwwwmwwwarwmacagaarwwmarwmwrawaawtatttaaaaatgcagaagccctcaagctggcaggccttgctgcagacagcgtgacactggcagagacagcccaggggcccttggcggncgtgctttggtgcttaggtgcacttacaacatgaatgcatcagcacacaacacttcccaccttagttggaagcatggtggaacaatttattttcagatttgagcatagcaggtcagtaaagaacctgattctgagtttcaacccattggaacgtaaatcagaataagcggcaatgattcagatcagctccaccctagaagaaaagagaccgaattctagaatgaagaacgagcccgggcgttagaagggggacagggggcggggtcaacccacgccccaaatggggggtgaccggggccgggcaaacctctgagagcggggaatacacaatcccggaggggagcaggtgcccggtggctgaaagcggaaaaggccggtgtcgcatcgcgattcggggcggccnnnaa

SEQ ID NO: 4349 - DNA, 1400 bp, Rattus norvegicus
ttcttggagggttattagtagcattgagcagaaaaccatggcagatgggaatgagaagaagctggagaaagtcaaagcctatcgggagaagattgagaaggagctggagacagtttgcaatgatgtcttggctctgctcgacaagttccttatcaagaactgcaatgattttcagtacgagagcaaggtgttctacctgaaaatgaagggcgattactaccgctacctggcagaggtggcttctggggagaagaaaaacagtgtggttgaagcttctgaggcagcgtataaggaagccttcgaaatcagcaaagagcacatgcagccaacacaccccatccggcttggcctggccctcaatttttctgtgttctactatgagatccagaatgcaccagagsaggcctgcctcttakccaaacaagccttcgatgatgctatagctgagctggacacattaaacgaggwttcctataaggactccactctcatcatgcagttgctgcgagacaacctcaccctctggacgagcgaccagcaggatgaagaagccggagaaggcaactgaagacccatcaggtccctggcccttyctttacccaccacccccattatcastgattcttccttgccacaatyactatatctagtgctmaacctatctgtrttggsarvacarvtattyagatctgbcctcctgtsccttggaarsrgbttcagataamccttcatgggcatttgctggacygakggttgctttgagccacmvagcgctccctytktgrattgtgcagagaartgtgttctkaacgagscattttaywabgyctgbtgatctgkdgcawatmcatgtgawgskwattkagtskdkaaakgrgawtwwbscmmcmcargstwtggstgytrtttaaamcmrgykgwtagtgkgbtgktaagcardacatytygtgcatgcaaaartgaawttgrccctctcmccccytyyttyarbtwatggdaactgdcacacgacaacttgttcytthammatmagstttataaactgtttytsgtgrgytttmaggccchkgmtgtgcctytttaaawtwtgatgtgcgsacacyttyttttyaatgmmakgcwtharadgkktttgatatgtgkaacyytttkttttggttgkgaktaagaatcatggrwttattykttkkaactywttggcwattgdtcytgygkmcmctgmmagcatcatgtgtgkyaacctgkgkcaatmwtgakgggtggkwwtgaaatgccmrawtgctwaaawawatgktttggactwamaragagkmaawaaawrmwrmhhwrrvvawwwwaaaaaaaamaaaaaaaaaaaaaaaaactcgagggggggcccggtacccaattcgcccgatagt

SEQ ID NO: 4350 - DNA, 600 bp, Rattus norvegicus
ccaccaagaagcctgtcgttcccctgcttcagagacgtcttctccagcgcagacctttgactggatgaaagttaaaagaaaccctcccaaaacagggaaagttggagagtatggctacgtgggtcaacccaacgcagtgcgcaccaacttcaccaccaagcagctcacagagctggagaaggagttccacttcaacaagtacctaacaagagcccgcagtgagatagccgcgtccctgcaactcaatgagacccaggtgaagatctggttccagaatcgccgcatgaagcagaagaagcgcgagaaagaggggctcttgcccatgtcacccgccacccctcctggaagcgatgagaaaactgaagaatcatctgagaaatccagctcctcgcccagcgccccttctcccgcatcatctacctcagatactctgactacctcccactgagctgccccagcccaactctgacccaggcttctccctgggctgagatttcttacccaaagcacattcttagcttatcttcctttctttccagactctctcttcctttctggtcccatctggggagctcctggctaagataagatatttccaga

SEQ ID NO: 4351 - DNA, 1400 bp, Rattus norvegicus
gccccaggaaatcagcccccctcccactgccaaccttgaccgatccaatgacaaggtatatgaaaatgtgacgggcctagtgaaggctgtcattgagatgtccagcaaaatccaaccagctcctccagaagagtacgtccctatggtgaaggaagttggcctggccctgcggaccttactggcaactgtggatgagaccattcccatccttccagccagcacccatcgagagatcgagatggcacagaagctgctgaactccgacttgggtgagctcatcagcaagatgaagctggcgcagcagtatgtcatgaccagccttcagcaggagtacaagaagcagatgctgacagctgctcacgccctggctgtggatgccaagaatctacttgatgttattgatcaagcgagactgaaaatgctagggcagacacggccacactgagccactggccattgaasatggctttctgccctttgggagatcttctctagcattccaccagcagcgaggaagtaaccttgtcctcggtcgcccgcactcacagctccaactgatgacagctagctgaaagtctctcttgtataagtttaactamttatacatggttytgattctgttattyttctaaatagtgttcagaaaactctggatccaaaatgtggcatttttctgagaatgaagattgtacattaagaagcttttaaaatatacttggtgttcaaatyggvahrwadrwwmmwaraagtggyaattcatactgaccatgacttcgaattggaagagaagtgtctgaggagggagggctcccaagacactgagactggctatcmykmskgccaraawtmctgtccagaytgartkgcaawmtgctaatywyaytrtaragaagkgcataaaagctatattttgaagaatgagkkgtttcaaaaraaaamttytgcccyccctgtyttcacyttytttcctgkggatcctraagcattgggttgcaaactatytytaraactgacaaaaacttgtytttccyccycaraattytkkgccagttttgkaccaragcactcccaaytrcatcaaraagttccaggaccayccctgttyyccatytttawataatttataagaatgattaaagccatgttgmctyttamarmmamwrarmwaamwgatctcatgcgtctgtcttcccagggaggatcccgcagacaaacagggatgtggttttctttagatgtccagttgttacaccatgcattctgttaggtggttttgagagcataccttccctttagtttgttggggatataaattattctcaggaagaatataataaattgtacagttactctgacctattaaaaaggrgckcswgsaaarrwaaaaaaaaaaaaaaaaa

SEQ ID NO: 4352 - DNA, 996 bp, Rattus norvegicus; identical to SEQ ID NO: 256

SEQ ID NO: 4353 - DNA, 1031 bp, Rattus norvegicus; identical to SEQ ID NO: 257

SEQ ID NO: 4354 - DNA, 600 bp, Rattus norvegicus
aaatgtattttcatatttaaaaaattcctttcttttatcgtttgtctttatttaaaaatttctatttttttctttgctatatgtatgagtgtttcacccgaatgtatttccgagcattacgtaccttcctagaacttacttaaaccagaaaaggacatcgggtccttacagatggttataagctaccatgtggatactaggaattgagcccaggttctctggaagagcagctgtagagagaattttaatccagcaatttgtgaattcaatagacttaaaatagtacctccaacatggtttctctggcaaaagatcacatccgaagagcttctaggtttatatgatctggcttgaatgcagacattctctggattatagtacaatctggctgtaacacagacacacccttagtacacacctttaatccctaacagtgaaggaaagttagtttgtagaaggaagtagtcacttttgaaatcgatgtccagttgagggtcagacagagtgacgaatcagagaaagttttgacagaatgagttagagaaaagatgtgctcaattcacgtgagaacagtacggaaagagaggatgccgaaaaggg

SEQ ID NO: 4355 - DNA, 1400 bp, Rattus norvegicus
caacagcgcacctcccgactgtgaccccgatgcaattcaccctggaagctcggtgaagggggactgtgggaacccatccgtggggattttcttttttgtcagctacatcatcatatccttcctggtggtggtgaacatgtacatcgctgtcatcctggagaacttcagcgtcgccaccgaagaaagtgcagagcccctgagtgaggacgactttgagatgttctacgaggtctgggagaagttcgaccctgacgccactcagttcatagagttctgcaagctttctgactttgcagctgccctggatcctcccctcctcatcgcaaagccaaacaaagtccagctcattgccatggacctgcccatggtgagtggagaccgcatccactgcctggacatcwygwkkgcttttacaaagcgggtcctgggcgagagtggagagatggacgctcttcgaatccagatggaagatcgcttcatggcttccaacccctccaaggtctcttatgagcccattaccaccaccctgaaacggaaacaagaggaggtgtctgctgctatcattcagcgtaattatagatgttatcttttaaagcaacggttaaaaaacatatcgagtaaatacgacaaagagacaatcaagggaaggattgacttgcctataaaaggagatatggttattgacaaattgaatgggaattccaccccagaaaagacggatgggagttcctccacaacctctcctccttcctatgacagtgtaacaaaaccagatwaggraaagtttgagaaagacaaaccagaaaaagaaatcaaagggaaagaggtcagagagaatcaaaagtaaaaagagacaaagaaatgtctttgtaatcaattgtttacagcctctgaaggtaaagtatccgtgtcaactggactctaaggagaggtccatgccaaactgactgtttcaacaaatactcaaggtcagtgcctataccagacagtgacctctgtcactgccactctgtgagacagggtatcaacattgacaagaggttgctgcttccattaccagctgacactgctgaggagaactccattgtgcaagtgacccgtcatcaygcccccaaactccattagtacaacgctcctgtcatctatttttaacattcacatttgccatatttttacaaaatctgtcccagtgtatcttcctggtccccacttcatagtctgttcataatactatgtcactatttttgtaaatgaagtttacgttaagggaaaatatatatataagaatcccatgttgctaagtccacaagtttctccagtaatcataaaaaaatattttgcctgagagatgaaattattgctcaaaacaaaaaaaaawaaattctaatgttaacagtttc

SEQ ID NO: 4356 - DNA, 600 bp, Rattus norvegicus
ggttcttccggtggaactcagtctgcgctcctgttctccccaggactctgttctcctgttttctagtcaggcttcacctgaggacagtgctgccagaattaaaagctctagagagctgccccggtctcagagatgaattctgcccttccttcctctcctggaagagtattactgttgggggtacgagggaggcagcaccccctcacagccaggcacataggtctcccctagtacacggcgggccctgtccaaaggctgagggaagagagggctgttccacatgggccgctgaactgtgtccagctgtgggcagctgcacagcagaggacgccatctccatttcccaggctcccctggggtctctgcctctgaccgagtgtgaaggggattcccactgggactccaactcctcttcagacactgtggaagtgggagggtagcctggccctgcctaggagagaggccctgggtggtcaggcatggttctgtgccctggaagaggacaagccctccatcccatcgggaggggaggcagtgtggcgtctgggcccagcccggggtctgactatcccaggcgtcttctgagaaggctttttcagg

SEQ ID NO: 4357 - DNA, 600 bp, Rattus norvegicus
ccattccttaaccctgaggttatagcacatgcactgaccagctccattccttaacgctgaggttataaacgcatgcactgaccagctccattccttaacgctgaggttataaacgcatgcactgaccagctccattccttaaccctgaggttatagcgcatgcactgaccacgtccattccttaacgctgaggttataaacgcatgcactgaccagctccattccttaaccctgaggttatagcgaatgcactgaccagctccattccttaacgctgaggttatagcgcatgcactgaccagctccattccttaaccctgaggttatagcgcatgcactgaccagctccattccttaaccctgaggttatagcgcatgcactgaccagctccattccttaacgctgaggttataaacgcatgcactggcatgcttagcttctcacacaggtgataggaacttggcctcagatccttgcctgtaggtcaagtgctctaagccatggaacgatctccccagacagcctgtcactttaaaaaagtaattgctctcttcctttctaattagtcgacttgttaagggccagcacttgcacctccg

SEQ ID NO: 4358 - DNA, 600 bp, Rattus norvegicus
tccctttctctgtttcttgtcctcacacccatgkcctcatcccctmtatttctccttcccatgtctcttgtgtcaaggagttgagtcctcctccctgtggcgacykcccccctcagaaggtccctgtagtgggagtcagtagtcccttgcccagaacccagttcctacgcctttcctctacatggatcaagcctggcttggccctcacagcctcaggaatctataaagagtaaagagtcactgtggaggaagatctgtgagcagagcctgctgtcgctgcctgtggacccccactctgctgagtgagcccagctcccaccttgtctaggtgggaaccagcctgaatccaggctgtyggaatagcttctttgtacagttcttataataaaccctcacctgatgcctcwrrrawrwrrwmwmmwwmaaacctccgtgtgggtgagggctgagggaggctagaagaagggtgggtgagccagcaatggcaaccaacagggatggtgagtttgaggaagtcagggcaggacaggaactctggggttgaaagctgagttccccctccctccttcagcagccctttctcccggcaaccaagatctg

SEQ ID NO: 4359 - DNA, 1400 bp, Rattus norvegicus
tgaaggagaggaagctccaattgcgtacacattggatgataccaagccagatgcaggctgtgctgctataatgggatttatccttgctcacaaagctagaaaactggtacgccttactaaagaagaaagactgaggaagctctgtgagctatacgcgaaagttctgaactctcaagaagctctgcagccagtccattatgaagagaagaactggtgtgaggagcagtactccgggggctgctacacagcctacttccctcctggcatcttgacccagtatggaagggttctacgccagccagtgggcaagattttctttgcaggcaccgagacagcttcacattggagtggctacatggagggggctgtagaggctggagagagagctgccagagagattcttcatgccattgggaagattccagaggatgaaatttggcagccagaaccagaatctgtggatgtcccagcaagacccattaccaacaccttcctggagagacacttgccttctgtaccaggtctactaaagctgcttggattgaccaccatcttgtcagcaacagctcttggtttcctggcccacaaaaagggtctgtttgtacgtttctaaagatgggctttaggaccatatccacaggtttctcattcagtgtgtcacaaaagcttttggaaggagttgggataaaaatctgacaaaggtgcagagattatggagtgagaaagcacagtaacttggtctccattttggctatcttttagcatcgctgtggtccactcattttcaactttcctgcactctgaatattgagaacagatacacaggctctctcacaacctacctgccctatgcacatagttgtttttcaaaaccctatgcctttgtgcttgtctttcttctggtgtgttaggtcctcacctatatcaagttcttcatcattgtacctagaatcctgtcttgttagaaccagmasgmrktagacactgtagcttattgtctactttagagttaaataaaccaaatgcaacagaagtgraatctaaccacacaaggcctacacaaagctactggtatttgggtgactggaacacaagctgatgcttttctcacctcccaaggttcattcccctgtgatcctcctccaccttatgtcatagtcattcacggatcattgttcttgtggatttactctgtattaactggtaytgtgttactcagtagattcttctaggcttgctattttgtgtagtgttgccagctgattctaatttttcttgagaatgggagtcttgtctttgtcatttcttttttscmtsttycwgtatsmttycwykmatwgatkkaagasawrmttaaayarktrwmaataaakmtkttykaccataaaaaaaaaaaaaaa

SEQ ID NO: 4360 - DNA, 1400 bp, Rattus norvegicus
cagagtgtcctgggggatgggtcctccattacctgggatcacctggaccagattccctacaccaccatgtgtatcaaggaggccctgaggctttacccacctgttccaggcattgtcagagaactcagcacatctgtcaccttccctgatgggcgctctttacccaagggtatccaagtcacactctccatttatggtctccaccacaacccgaaggtgtggccaaacccagasrygwkkgacccttccaggtttgcaccagactctccccgacacagccactcattcctgcccttctcaggaggagcgaggaactgcattgggaaacamkwkgctaygmgysmgatswmgstgatygtsgycctgaccctgctccgctttgagctactgccagatcccaccaaggtccccatccccttaccacgacttgtgctgaagtccaaaaatgggatctacctgtatctcaagaagctccactaattccgttgtggagctccgaaatctgaaatgagtttcactggcagaaagctgagttggtggtgtgactagccttcttcagaagagtgcttcagagagtcctctcctcctctcttcagtacagatcacccttctcagcactggaatattcctctgctttaaagccagcacccttcccataccccctcttctaaaagccttcccttttacaaatgttcttawgacatcatcaagaccactgaaaaactccaarawaawwwmmmawmwcaatattccttactccatctaacctactaagtcccttttgaattatgaggaataattcaatttgttccatgggctccaaaactcaaggcctgagcattattgtgaaacctttattcagcctaatatcatcttcacaagactgttacctggtacgttcatctaaatctcccctgcatagtctctctacctgactattcctcacacaagtttctttaccttccctcctttctccaataaagtgtccagtgtcctgcacaaaaagctcaaggagaactgattatcaccttctgattcgttcattgatgcattcaaattaaacctccacatagtagagactttttcaactattataaaaaccatcctgagccagacctgcagtcaacagcaagagcaggaagcgcataggaactacacctgcaaccaagctggcacaaagaccaagaattctgaagcagcccaaactcaagatgacatatttttacaagttagagaaaaatcaagatctgagttatcttgacaaactcgggatggaaagtaggagggaggggaaagcaaataaatacttccttattgtgtagcataaaaaaaccgaattcgtaggagggaggggaaagcaaataaatacttccttattgtgtagcataaaaaaaccgaat

SEQ ID NO: 4361 - DNA, 600 bp, Rattus norvegicus
ggcgctccggcagaggcagggccctgaggtctctgagcagtggggtgaggggcctaagtggccccggtcggaggagtctggagcagaaatggcagccccatccttcctccagccactaccccaagctacagtgggggcctatggccccagcttgctaggtcacccccgacccttcctccagcgcctgctctctgcaacttgatttccacctctctcctgctgcaccaccctcccacgacatttccccaccccattcactgggttgtctctgacctttcccagggctagccttcactgccctagtggcagtgcttcaggggtgctttctggctcccagacatctagggctccagactccaagagggctgagccttctcttctgtccgcagccacaataggcttcctcagacgctggctcgtgatgagtcccgcaccttgggcaccagggagcgccatctgcctcccagtccggtgtcactcaccccactaccttgtacatgaccagctctcccagtgtcccagtgtctgccccagggacaccgggcgcgcacagccacccctaatcccggtattcagtggtgatgcctaaaggaatgtcag

SEQ ID NO: 4362 - DNA, 1400 bp, Rattus norvegicus
caaagccggaaaggatgagcagaaggaggaagagaaagttgaggagaaraargaggtagccaaggaatcacccaaggaagagaaggtggagaaaaaggaggagaagccaaaagatgtyccagataaaaagaaggctgagtccccagtgaaagaaaaggccgtagaggaaatgatcaccattactaagtcggtaaaggtgagcctggagaaagacaccaaagakgagaagcctyagcagcagkagaaggtgaaggagaaggcagassmskagkskssyagtsmsswssmwvtbbbtbhywhwhryyybywrkdatyywwkawgkwakwcatagctatyaatggggaggtggarggwaaagagraggakgakcaggramctcmsgagaagggcagtgggcaagargaggagaaaggggtggtcactaatggcttwkatgtgagccykgcggagraaaagaaaggggaggakagaaktkatgacaaagtggtggtgaccamsaaggtakaaaaaatcaccagcsasgrrggcgatkktgctaccaaatacatcaccaaakykgkkactgtcactcaaaaggytgaagagcatgaggagacctttgaggagaagctggtgtcaactaaaaaggtagaaaaggtcacttcacatgccatagtcaaggaagtcacccagsgtgactaagatcggagtccattgcaaaaggttaagccatacaacaatttcaaaatgcatgtgattgacagcttyaaaacagaatgsgttctcccatgagggctccagacawtgkawtttcctttgtgcratatgagggaactgcatgcmagctcarggtgcccccctcctcagtccttgggggaattcaaatgcatgttcatgtatgtacctarggaatttgccagtttcctaagctgttgaaagaggggcactcggggggatgtcttgagatgtattacgcaaagtaccaactgagccaaaaataataagtkraacagaactctcttagccttaagaaagctrtatatgaatacttatgtttacctcactggtgcatttaraakggwcttcagttcatgggagaacctkgctgrcctgcrcagtkcgcamcybtrtgktrabysaygtyaaatgtymcagcmgktcttgctcaataaasgtcatactggarsmmtraaaaaaaraarmaaaamwcgrggsggggccsgkacccawysgccyawagwgagtcgattwacawgcatggcsgsswtamacgksggmtgggaracckgggtacmactatcgckkgaggaaycctytccagctggkwayaagaragcgacgmtgcwwccarsygcgsmgaggatrgaagmgraraytgsamgggrywrraacattcaagagcgactaaaaaaagggggtc

SEQ ID NO: 4363 - DNA, 600 bp, Rattus norvegicus
atgggtttgctgcatctcagcagttggatgttcttksmtytgacggtagcttgktygctctkggggggccargaatyggattcarkttacactatywtgaaaaaaaaaaararrrararaswkwgmgrymryawarctatattyysktkagkghggygattaawywymtsyttkgsgtatgcctttaaaaatgcttctaggaaaaaaaaarwhwwaaaaagaaagctratgctagtctatacttcaatgttaggggaatgaacacrttttcctagcgcactggrgacttttagataggttaatgaaaggccttttattctgttactggacacgaaaactttgtctaatttcttatactctattgtacgtttacagtcgcagcactaaaaatggatgacatcaaacatttttaaacagaaaaaaaagatgtrcrrrctaaataassactatttattgataatgttttgctactcttgtcagacaatggctmtaaactgaattaggcmgwmttmaaaaaarwmmraaaaaartaaaaaaaaaacctggggggaaaaaagaatgttgcaaatttgtttaawtghcaaaaaaaaaaaaaaaaaa

SEQ ID NO: 4364 - DNA, 600 bp, Rattus norvegicus
accctccaaaagagtgaactgtcgcaccagaattytctgaggaagcgcaactctatgagaagaaacaactccatgaggaggagcaactccatccggaggaataactcttccctcatggtgcccaaggtgcarttcatgactccagaaggaaaccagtgcccatcagaatcatgagggcaggacgaccctagacagccactcactgagtcccgatgactgacagaccatcctgagacagtttgctgagwtctkstgaycrragymymggwycwgtcsccmattmaskscwggmmcwcaaswaagggcagagtagagagatgtcctgaattaacacagtgtgtggtgtggtaaaacatggaaactaggcagttgtgtagccttttagtcagagtttggggcttgaatttatttcatatatgagccattggacctcacaggtcatcgggaatatgttcaaatctaaccttaaaagacacatgattctaaccaggtgggctaagttgactgctcccaagaaatctgtgacttggaactctagactcaaagatcaaacgggtacttgcagctctgcttgcctgtttaataaagttctcaaaaccc

SEQ ID NO: 4365 - DNA, 953 bp, Rattus norvegicus; identical to SEQ ID NO: 269

SEQ ID NO: 4366 - DNA, 1400 bp, Rattus norvegicus
  misc_feature (996)..(996): n is a, c, g, or t
  misc_feature (1048)..(1048): n is a, c, g, or t
  misc_feature (1050)..(1050): n is a, c, g, or t
  misc_feature (1070)..(1070): n is a, c, g, or t
  misc_feature (1110)..(1110): n is a, c, g, or t
tgamctttcggaatttgggaattggaaaaaggaacattgaggaccgtgttcaagaggaagcacagtgcctagtggaagaactgaggaaaacaaaaggctcaccctgtgacccctccttratcctgaactgtgctccatgcmatgtcatctgctccattactttccagaatyattttgattataaagataaggaaatgcttacsttcatggaaaaagtgaaygagaatctcaagattatgagctycccatggatgcaggtctrcaatagttttccttcactcattgactattttcctggaactcatcacaaaatagcaaaaaatattrattatatgaaaagctatttgttgaagaaaatagaagaacaccaggaatcattggatgttacaaaccctcgtgattttgttgattattacctgattaaacaaaaacrggcaaacaacatcgaacawtcagaatattcacatgaaaatctgacatgcagtatcatggatctcattggtgcagggacagagacaatgagcacaacattgagatatgctctcctgcttctgatgaagtacccacatgtcacagctaaagtccaggaagagattgaccgtgtgattggcagacatcgcagcccctgcatgcaggatagaaaacacatgccctacacwgatgccatgattcatgaggtmcagrgattsattractttgtcccgaccaacywgccccatgcagwkashwrwsacwtkmmatwcvsrraytrcctvatycvkrarggracaaargtkttaacmtcaytgacwtcagtghtgcatgasrgcaaggagttcscmaayccrgagatgtttgacyhtgkcmactttbtagatgrgawtggaaactttavgaaawgtgabwacttkttgcytttbtcdgcaggaaaasgmrckwgkgttggagaggscytgscccgcatgcagttgtttmtattcttgacarccattttacagaactttamcytgaaatstntggttcamccaarggacattgatasgakgscagttytgratggttttgcytntntgccacccabttaccakytntgsttcattcbttcytgawtagatcaggcattktggcttntastgtgttgchtkbtgcaatccccttcaggtttttayccagtccyttccctbtatcatccatcctsactyttgtbttaagatccagaaagcacatgcagtttytggagttatagcmcaaatccamttgtattatytctttcawrtaacaatttatgatcccttgtgtcattgkgtatccattcctgagttaaaataaagcttcmctataaaataawaaaaaaaaaaaaaaaaaaaaaaaaaatgtgtggcggccgcaagcttattcctctttagtgaggggcattttag

SEQ ID NO: 4367 - DNA, 1400 bp, Rattus norvegicus
agcagaaaagaggtggrgagggggggaataaggaagagaggaggaaaggagagaaggcaggaagaaggcaggggaagataccaccatgctgtgctgtatgagaagaaccaaacaggtwgarmwraatgatkwkkwycamwwswttgaacwagwtggtgwmawaccrgagkayaakrytywtaaggctgcaaccaaaattcaggctagcttccgtggacacataacaaggaaaaagctcaaagacgagaagaagggtgatgcaccagctgctgaggccgaggccaaggagaaggatgatgctcccgttgctgatggtgtggagaagaaggagggagatggctctgctactaccgatgcagccccagccaccagccctaaggctgaggagcccagcaaggcaggagatgcaccttctgaggagaagaagggcgaaggggatgcggccccttcagaggaaaaggccggctcagctgagacagaaagtgctgctaaagctaccactgataactcgccgwcctccaaggccgaagatggcccasccaaggaggagcctaaacaagccgatgtgcctgctgctgtcactgatgctgctgccaccacycctgctgcagaggatgctgccaaggcagcgcakcctbcaacggagactgsakaaagcagccaagctgaggaggagaaagamgctgtagatgaasccaaacctaargaaagtgcccgacaggatgrgggtaaagaagaccccsrggctgvccaagaacatgcctgractttaagaaacggytttccacgwtgbccycasmtgaaccctgtctctcstgccctttcwcarrtscactctgaagwttcytctcctgtcctgctsacgtgwgtgagcytgtcctctystammtatgarmyctmtctctctgygtggyamacattwaaaaaaamaaaarmwvrarasakcycrwgycsaaywgtgtggcttaaacatttgtttcttggkgttgtwatggcgagwttttggtaatgatgatgcagtcatcttgkgaaattcttgcactgtaccccsgtkttttgatctggtgcgtgtggccctgtgggagtmcactttcctctctatttctctctgttccaagwgtgtgkgtgcaatgttccgttctgaggagtccaaaatattaagtgaattcaaaaaaccatttctgtttcctcattttcaatgtgatggaawgmacrwaaaggttamaaaawtttaaaaaaaraaaccggtttgttttaaaaataaataaataaagcaaatgtgccaattagcgtaacttaagsctgtrrggcycctttttcratctsaatatyaatawatcatgasagtaatcvwamaaaaraaaaaaaaaarractcgagactagtyctctctctctctc

SEQ ID NO: 4368 - DNA, 600 bp, Rattus norvegicus
ttgctactgcagccacgagggggctaccttcccgggtcagcagcatcagtaccatctccagggcaaagatccgaaccgtgaagatgacctttgtcatcgtgctggcctacattgcttgctgggcacctttcttcagtgtccagatgtggtctgtgtgggatgagaatgcccccaatgaagattctaccaatgtggctttcaccatctccatgcttctgggcaacctcagcagctgctgcaacccctggatctacatgggcttcaacagtcgcctgttgccacgttccttgagccaccatgcctgctgcacgggctctaagccccaagtgcacaggcaactctccaccagcagcctcactagccgtcgcaccacgctgctgacccatgcctgtggttcccctactctccgactcagccttaacctcagcctccgtgcaaagcccagacctgcaggctcactgaaggatttagagcaggtggacggggaagccactatggagaccagcatcttttagagaagattccctggactctggttctgtacatctcaggcacccggaatgtggactagccggctcagggatggtaggaagtggagct

SEQ ID NO: 4369 - DNA, 1400 bp, Rattus norvegicus
ccccgacatgaacttggagcttcttggaacagtggtctctgccccacttctgaatgtcagtcctgggaatctgtccttggccccacagatggagattgaaggctttgtgatcctgcccagctccgcccgcgaatctgtcttccggcttggcgtggtcacgaatgtattcgtctcattaacttttgrcaacagcaaggtywccgggatgctgcatccagagaaggcgcaagtgagactgatcgaatccaaagtcggcatgttcaatgtgaacctgttccaggcattcctcaactactaccttctcaacagcctctaccctgatgtcaacgatgagctggccaagggcttccccctccctctaccaaggcgtattaagcwcsacgacctcgacttccagatccacaagaacttcctatacttgggtgccaatgtccagtacatgagagtctgaggacawgaagaaagatgggcctcagaggccacagcgggacctgccatttgtaattccagatgcgtagcacatcyccrgagagtctcaaaatacaaagaagtttctgttcctggctmtggtggaycctgtccccacagtcctbttcrccaggtgcaccytcarmskgracyysactbtrwcctmtysarkkakwagccytccccycmccaacctytmmarggagarcccctccccccaccaacctytscagggagacccctctcccaccactgacctggaatmacttaaagagcaggcmctgkggttttgagtgcaccttctcaccttcatgtctgacggagtgctggcmcttagtaggtcctcaataaatatttatagaatgmmawramarmmmarmwraammwmtttattgctagaccatctggtctgagccagccttagatgctctgtcagagctgttatctccaaggctagaccaccttttcactcttgttggcctctgctatgagggcctcaacaagggagtgaatgactacacacacacacacacacacacgcgcacacacacacacacgcacgcacgcacgcacgcacacgcatgcacatgcatacactcacgcacgtgcacgcacacaccactcccttcaccagcacgtgtctaggcttctagccttattcccacagatacctcctccttgcctcctgcttgctgcagacaacagacccagaaggaaagcaaaattgtagccccccgaggctgtccccatggaggtctgtgcaagtgagaaagagatggagccaaggaaggttttggttggacccaaatcaaacgctcatcggactgttgttcacgagccacatgcctgcgaggagagaccatgatttctaactaccgaacaataagcctttgatcagacttaataaagagtcatttccgtgttatgtaaaa

SEQ ID NO: 4370 - DNA, 1400 bp, Rattus norvegicus
cttcamgcgggagaacaagaacctccaggaggagatctcagacctgactgaacagctggghbmasbkggkwararbrtscacgagctggagaagatccgmaarcarctggaggykgadmwkctsswmstgcmgtcagccctggaggaggytgaggcctcyctggagcatgaggagggcaagatcctccgagcycagctggagttcamccagatyaaggsagagatygaaaggaagctggcagagaadgacgaggagatkgagcaggccaagcgcaaccacctgcgggtggtggrctcyctrcagacctccctggatgccgagacrcgcagccgcaacgaggccctgcgggtgaagaagaagatggagggcgacctcaatgagatggagatccagctcagtcaggccaatagaatagcctyagaggcccagaagcacttgaagaacgcccaagcccacttgaaggacacccagctccagctggatgacgcagtccgtgccaatgacgacctgaaggagaacatcgccatcgtggagcggcgcaacaccctgctgcaggcggagctggaggagctgcgggccgtggtggagcagacagagcggtctcggaagctggcagagcaggagctgatcgagaccagcgagcgggtgcagctgctgcactcccagaacaccagcctcatcaaccagaagaagaagatggatgcagacctctcccagctccagacagaggtggaggaggcggtgcaggagtgtaggaacgcagaggagaaggccaagaaggccatcacagatgccgccatgatggccgaggagctgaagaaggagcaggacaccagcgcccacctggagcgcatgaagaagaacatggagcagaccatcaaggacctgcagcaccggctggacgaggcagagcagatcgccctcaagggtggcaagaagcagctgcagaaactggaggcccgggtccgggagctggagaatgagctggaggctgagcagaagcgcaatgcggagtcggtgaagggcatgaggaagagcgagcggcgcatcaaggagctcacctaccagacagaggaagacaagaagaacttggtgcggctgcaggacctggtggacaagctgcagttgaaggtgaaggcctacaagcgccaggctgaagaggcggaggaacaggccaacaccaacctgtccaagttccgcaaggtgcagcacgagctggatgaggcagaggagagggcggacattgccgagtcccaggtcaacaagctgcgggccaagagccgtgacattggcgccaagcagaaaatgcacgatgaggaataacctgtccagcagaaagagcctcgctgttgctatcccacaataaatatgaatgcttgactttgcctgtaaaaaaaaa

SEQ ID NO: 4371 - DNA, 1400 bp, Rattus norvegicus
acctgactgaacagctgggmkcaaskgggaararyrtscacgagctggagaagrtcckmwrgcwwytkgwsgcwgrgmwgckgsrgcygcagtcagccctrgaagaggctgaggcctcyctggagcatgaggagggcaagatcctccgagcccagctggagttcaaccagatyaaggcasagatcgaaaggaagctggcagagaargacgaggagatggagcargscaagcgcamccacctgcgggtggtggactcyctgcagacctccctggatkscgagacgcgcagccgcaacgaggccctgcgggtgaagaagaagatggagggcgacctcaacgagatggagatccagctcagtcatgccaaccgcatggctgctgaggcccagaaacaagtgaagagcctccagagtttgctgaaggacactcaaatccagctggatgacgcagtccgtgccaatgacgacctgaaggagaacatcgccatcgtggagcggcgcaacaacctgctgcaggcggagctggaggagctgcgggccgtggtggagcagacggagcggtctcggaagctggcagagcaggagctgatcgagaccagcgagcgggtgcagctgctgcactcccagaacaccagcctcatcaaccagaagaagaagatgsatgcagacctctcccagctccagacagaggtggaggaggcggtgcaggagtgtaggaacgcagaggagaaggccaagaaggccatcacagatgccgccatgatggccgaggagctgaagaaggagcaggacaccagcgcccacctggagcgcatgaagaakaacatggagcagaccatcaaggacctgcagcaccggctggacgaggcagagcagatcgccctcaagggtggcaagaagcagctgcagaagctggmggcccgggtccgggagctggagaatgagctggaggctgagcagaagcgcaatgcggartcggtgaagggcatgaggaagagcgagcggcgcatcaaggagctcamctaccagacagaggaagacargaagaacctactgcgactgcaggacctggtggacaagctgcagttraaggtgamggcytacaagcsccaggytgargaggcggaggaacagsccaacaccaacctgtccaagttccgcaaggtscwscacgagytggwtgaggcagaggagagggcggacattkccgagtcccaggtmaacaagytgcgggccaagagccgtgacattggcsccaagggcctgmmtgwrsmgtagatcttgykctacccaaccctaaggatgccystsrwgccbtgrgacctggagcctttgaaacagcmccttwggcagaaacmcmrtraagcaattttccttcargccmaaaaaaaaaaaaaaaaa

SEQ ID NO: 4372 - DNA, 1400 bp, Rattus norvegicus
catgaccctgggcattagcatcctttaccggaagcccaatggaaccaacccgggtgtcttctccttcctcaaccccctatctccggacatttggatgtacgtgctgctcgcctgcctaggagtcagttgtgtactgtttgtgattgcgaggttcacaccctacgagtggtataacccccacccatgcaaccccgactcagacgtggtggaaaacaatttcactttgctaaatagtttctggtttggagttggagctctcatgcagcaaggatcagagctgatgcccaaggctctatcgaccagaatagttggaggaatatggtggtttttcaccctaatcatcatttcatcctacacggccaacctggctgccttcttgacggtagaaagaatggaatcccccatcgattccgcagacgatctggccaaacaaaccaagatagaatatggggcagtcagagatggctcgacgatgaccttcttcaagaaatcaaagatctccacctatgagaaaatgtgggctttcatgagcagtagacagcagagcgcactggttaaaaacagtgacgaggggatccaaagggtgctcaccaccgactacgcactgctgatggagtccaccagcattgagtatgtgacgcagaggaactgcaacctcactcagatcgggggcctcatagactccaaaggctatggagtggggacgcctatcggctccccttaccgggataaaattacgattgccattcttcaactgcaagaagaagggaagcttcatatgatgaaagagaagtggtggagggggaatggctgccctgaagaagacagtaaggaagccagtgctctgggagtggaaaatatcggcggcatcttcattgttctggctgcaggactcgtgctttctgtgtttgtagccattggagaatttttatacaaatcacggaagaacaatgacgttgagcagtkwctmwstktcwatgccwtsatrsmmkakctgkkwrkatcyctcaagwrksrgaaarmmttaaagaaaaagtcaagaactaagggcaaatcttctttcacaagtatccttacttgtcaccagagacgaactcagagaaaagagacagtggcgtgatcaaagaacacacykgtaagaagaaaaagcccacacgtccgctgcacatatttggaggacagatttcagaggactatgtctttatccataaccccagtcgtggacagagggggaagaaatgcacaatttttaaagctcacatagatattacttgagaagtgaaactgattcttttcagatgaatttgtatgcacacttattttgaatttttccatttcctccgataaattgctatgtgtgctttctaaataataataaacaagcggactttgtttttcat

SEQ ID NO: 4373 - DNA, 600 bp, Rattus norvegicus
agaaactgcctctgctacgtctttcccgccatcctatgacagtgtcaccaggggcctgagtgaccgggccaacattaacccatctagctcaatgcaaaatgaagatgaggtcgctgctaaggaaggaaacagccctggacctcartgaaggcactcaggcatgcacagggcaggtyccaatgkctttctctgctgkrctaactccttccctmtggaggtggcaccaacctycagcctycwmcaatgcatgtcactggtcatggtgtcagaactgaatggggacatccttgagaaagcccccaccmcawtaggaatcaaaagccaargatactcctccattctgacgtscsttycgagktcccagaagatgtcaktsmtccctkctgywtgtgaccagagacgtgattcaccaacttctcggagccagagacacatascaaagacttttctgctggtgtcgggcagtsttagagaagtcacgtargggttggyactgagaattarggtttgcatgmctgcatgctcacagctgscggacaatacctgtgagtcggscattaaaawtmatatttytaaagbtaaaaaaaaaaaaaaaaaaaa

SEQ ID NO: 4374 - DNA, 1400 bp, Rattus norvegicus
  misc_feature (1372)..(1372): n is a, c, g, or t
tgcccacttaactgtgaagaagatctttgttggcggtattaaagaagacactgaagaacatcacctacgagattattttgagcagtatgggaaaattgaagtgattgaaattatgactgacagaggcagtggaaaaaagaggggatttgcgtttgtcacctttgatgaccatgactctgtggataagattgttattcagaaataccatactgtgaatggccrcaactgtgaagtaagaaaggctctgtssaaacaagagatggctagtgcttcatccagccagagaggtcgaagtggttccggaaactttggtggtggtcgtggaggtggtttcggtggcaatgacaattttggtcgaggagggaacttcagtggtcgtggtggctttggtggcagccgtggtggtggtggatatggtggcagtggggatggctataatggatttggcaatgatggaagcamkwkkggaggtggtggaagcyacrakgattttggcaaykrcamsarccagtcrkcamrwkktggaccgatgaaaggaggaaactttggaggcaggagctctggcccttatggtggtggaggccagtactttgctaaaccacgaaaccaaggtggctatggaggttccagcagcagcagtagctatggcagtggcaggaggttctaattacagccaggaaacaaagcttdgcargagasccagasamgwgrcagggaagytacaggttacaacasayttgtgaactcagccaagcacagtggtggcagggcctagstgytacaaagamgacatgttttagacaatastcatgtgtgtgggcaaaaactccaggactgtayctgtkactaattgtataacaggttattttagtttctgttctgtggaaagtgtaaagcattccaacgaaggkttttactgtrgacctttttcacccatgctgktgattgctaaatgtaaaagtctratcatgacgctgaawaaawrwrwmdwwwwttkkdwhwwwwaawrwrmwrwrwaaarttagtytactytgaasccatcttggtaaacttccccaacagtgtgaagttagaattccttcasggtggtgccaarttccatktggratttawttatggktgcttgggtggrsaabccattgtcttcamaaaccttggtgttgcyaaactgccagttactgytgtaacwtaatgartktcaccatttaragggtcatccaagcaagatcacaatttggttataaaatggttgttggacacctatgwakasaaaattgaataacggyctcagataaaataasakatgggaatgaagcttgygtatcatccatkrtcatgtgtrctcaataaacgmttkaattctmwwrwrwrnvraaammwmdwrmmraahhctygtgccg

SEQ ID NO: 4375 - DNA, 600 bp, Rattus norvegicus
ttrtgraaagvccaaaatattatgaactatyttatgtaaatttacaawtgtcctttaatgtacattttgtttacagtatagtaccttattctctgctgtgttaagtgggtgtcgtactccaaggagacaaacactttytacaacttctattgaagacactggsrkywcsarttttttcatgtgtastatgtcagaaaatgcttttgattttatttttaaatmtaacatctgatggctttytcagagtgttgtggaaacttcagtcatacataaaatatgttmttataaaatgccaammwmhwwwwawwmwrwttttcctcaatggkacaacaatctaataatgagaaaacagaaagtgtatsttatattyttcccaaataaatctagatgtytgtagtgaarrarrrmawmwmwrmtcagtttgttagaaaagtatgatagagtcaaggcagaatgtstttttaatttaaatgaagagaattggtmgttgtggtamgtmatgmtcmttaagcactttggacatagagagaaatgtggcaattgattaaatsaccaattytgcatacaggcattgtgtastgtcaaaaaaaaaaaaaaaaa

SEQ ID NO: 4376 - DNA, 600 bp, Rattus norvegicus
aaagccctgtgacacgatgaaagtgggaggaaacctggattccaaaggctatggtgtagcaacgcccaagggttcctcattrrgaamtsctgtwaacctygcmgttttraaactsartgarsmaggcstcttrgacaarytgaaaaacaaatggtggtacgayaaaggwgaatgtggascsrrggastcgkgawscaaggacaagacgagtgccttgagcctgagcaacgtagcaggcgtcttctacattctggttggcggcctgggcttggcaatgctggtggctttgatagagttctgttacaagtccagggcagaggcgaagagaatgaagctgactttttccgaagccayaagaaacaaagccaggttatccatcactgggagtgtgggagaaaacggccgtgtgctkacccctgactgccccaaggccgtacacacaggaactgcaattagacaaagttcgggattggctgtcattgcatcggacctaccataaaaaccaaaaaaataattgagtgccttaatcaaactgtgttggtgactgactgaaacgcagccctgagggaaaggccaagagtgggtcttgactaaatccat

SEQ ID NO: 4377 - DNA, 600 bp, Rattus norvegicus
ttggtgggttcaagatgtctggaaatgggcgagaaatgggtgaacagggtgtttatgaatacactgagctcaagacagtcgcaatgaaaatatctcagaagaactcctaaagaagccagcagagtgacgagaaactctcagcagtrgctacatgtctcctacaatcaccagcagagggttgttttattacagggtcttctgttgatttcttaaacataaggaatccatcagcattactgtaactcatagaaaayrtatagyttaattcttctaatacatgaccctaatwcatacccaagaagaaagggatacatttaggtacatgctctttgtaacccagtcatgaaaaagtgctttycattgtagctacttgtctacagccctcatttgatgtgatttaaactctgtttctcggtkacttcttgccactactyaccatgcacaactgaaaagtyagccactgttcttggagttattgttctgagtattgtgaaatatttttagaatgacayacctgcttgtcaaatraaatgcttagctgtaawtagagtgcaaagtttaataaaggcaaaatctcacatraaaaaaaaaaaaaaaaaa

SEQ ID NO: 4378 - DNA, 600 bp, Rattus norvegicus
vaacggtgggtggktgcmtccttccctgagcccacccatcctttgctcmcctctctttatttaasgtgaaaggtgattgggtctcatarcctttccttttgtagcattgcctaacttgtcwttctcactgacagragccaccacgtccagccagagcacatggtctcttaggagaccgggcttacttaccatgcatgtttgctgctgtccttttccattttgtggaggcatttcctttttctaagggaattcctcagatgttctagaaacattcagaagaacgcagaagaaatattctagagaattrggggwtcattcttgaatattttctgatttaaaactgctcacctgaaattgatactttcagatcctgatcttgtaaattactcgagatttggtaagatgctgagttctctgtgttgttgcagaattggagttgggatgatcataccttggmtacctgcgctcagagcatttccttcttgagcttattttgttaacaattcatatcttgtgttcagttactttgggagytatggagtgtgttatagaaggaaatttgataagaacttttytggaaagtaaaaaaaaaaaaaaaaa

SEQ ID NO: 4379 - DNA, 1400 bp, Rattus norvegicus
gcaggacatgatcartgaagtagatgccgayggtaatggcacaatcracttccctgaattyctgacaatgatggcragaaaaatgaaagrcacrgacrktgvagaagaaattagagaagcgttccgtgtgtttgataargayggcaatggmtacatcagtgcagmrgagyttcgccacgtgatgvcaamccttkgagagaarktamcagwtgargaggkygrtkraatgatcagrgrmgcasacatbgrtggkgatggtcargkwawcyaysaasagtttgtrcamrtgrkgacagcgrrgkrrasaccctgkmcagaaggkkktaaatttctkkwacarraykrkwwattkgccttttctytgktkgtaayyyawmygkraarkgtyycccmmytgtmrvaayatgcatgtwtrgwaaytaggmtycmttcyyycatgttyytycccwatcttmtgtcattgyccttcaaccttattttagaaaastgatcaagtaccatgttgcatgtggcttcctctggmtatatytaagccbttykkcacatctacacttagatggagttggtcawagggaacatywgsskyatgmysttttttamagtagcttttdggaaccgkcrgcwtrytgctgttgaagtktggagttktgagcktggacyktggrcagtsgacavsgtgtaytaarrgttgcactactgsaarygggtgttytrkccgrtactcactcgtacrctatttktttgkacygskggkattgtmccagaaacattytcktwtaytgktacttsctttttaaactttgtttagccacttaaggaaratctgcttwtggcacaatttgcctcawatccattcmaagttgtatatttgttttccaatawaaamwmrtgmcaatttwmwmmmmwmwmammmaaaaaawagactaatgggaacatctaagggaatttcagaagtgtgctttatcagtttttcatttaaatttcatttttctcttctgtaaacaatattcaagaaatttcacttatagaatttcctagttatttatgaaatataccttataaatagataaataaatataagtagacatctataatgtataattatatattatatagcacaaaatatataaatatataaatatgtaaattatatgtttattatttattggtatttattttcattttaaattcttataccctttcctggtttcccctctgaaaaacccctattcatcttcctcttttctgcttttgtgagggtactcacccacccgccgaatcccacctcaccacgctagcattcccctaccctggggcatcaagtccctgtaggaccaaggacctcccctcccatggatgacagataatgccatcctctgctacatatgcactggaggcat

SEQ ID NO: 4380 - DNA, 600 bp, Rattus norvegicus
  misc_feature (587)..(587): n is a, c, g, or t
agaaaatgaactttgctcaacccggaccccggcagcccaggctggaccaagggtgggcctggcacccctctcactctgctggggtctcctssttcaagaggcttctcccactccagtcccctgccccatctccccttgacctgagtgatgaggtggtcccagagctgatctctgctgctgtgtctttatctatccctgctagccccagctctggtagacggttctggaatggaagggctatgaccgccctaggacctgtgctacagaggggtggagggcactgagtaggctaagctctgccctactcatcctgttggaaccccaccccattttccctgacagaacattcctaaatctcaagggctagtttccctgaggagccagcctaggcctaaccctctccctctcaagctgccacatgtaacgcccktgstgcttmtgtgtgtgggtgawtggatgtggaggyggggcccgtggagagcccgtgcccctccccacctccctgtgcctgtatctaatatataaatatagagatgtgtatatggrgaaaaaaaaaaaaaaaaaaaaaaaaaaacccaaaaaaaaangtctgcgcggccg

SEQ ID NO: 4381 - DNA, 1094 bp, Rattus norvegicus; identical to SEQ ID NO: 285

SEQ ID NO: 4382 - DNA, 1400 bp, Rattus norvegicus
attattttccagaatcgcyttgattataaagatccgacttttcttaacttgatgcacagatttaatgaaaacttcaggcttttcagctccccatggctacaggtmkgcaakrctttycytkcmakwakysatyacttccctggaagtcataaccaagtacttaagaatttcttctatataaaaaactatgttttggagaaagtaaaagaacaccaagagtccttggacaaggacaatcctcgggacttcattgmwyrwktmwtgawcmaratrrawcaggaaaagcacaatccgcagtctgagtttacccttgaaagcttggtggctactgtaactgacatgtttggagctggcacagaaacaacaagtaccactctgaggtatggactcytgctgctgctgaawcayktskwtgtcasagctaaagwcmagrrrgwgrkrgaacrtgtaattggcagaaaccggagcccctgcatgaaagacaggagccagatgccctacacggatgctgtagtgcatgagatccagagatatattgaccttgtccccacaaacctgcctcatttagtgacacgtgatataaaattcagaaactacttcattcccaaggkwascwwtgtgatagtatcgctgtcatccatactgcatgatgacaaagaatttcctaatccagagaagtttgaccctggtcactttctagatgagagaggtaactttaagaagagtgactactttatkyyrttmtyagcaggaaagaggatatgtgcaggagaagccctggctcgcacggagctgtttttgttcttcaccaccattttacagaattttaacctgaagtctctggttgatgtaaaagacattgacacaacaccagctatcagtggatttggccatttgccccctttttacgaggcttgttttattcctgtgcaaagggcagactctctaagctctcatctgtaatgtctcttctgagggtcctgtctacttcattcttggtactatagtagctttaactcacatatccccatttccttcggatccagtgaacatcaaacctcattgagttgagttccctgagtcaatatatagttctattcctgttccctatatcttgtgacgttccctatatcttgtgacattcccatgcagtacttacatagttagtgctaatacttgtatgacttcattactgttaatactgttttcactatataaaagcaaaatattttagaatatgagaattcagagtcatctgttcccttcatgtgctaaataaatactaatttttggaccagttcatagactcttttttttaatgggtataatgtaaggaagaagtaaagaaaacaaactctcaggagaccatatttgtcttcatttatacaaaaagggaccga

SEQ ID NO: 4383 - DNA, 600 bp, Rattus norvegicus
agcsttcctttatcggtatggagtctgcggggakscatgagaccrcctacaacagcatcatgaagtgcgacatcgacatcaggaaggacctgtacgccaacaacgtcatgtcagggggcaytmccatgtaccccggtatcgctgaccgcatgcagaaggagatmamagytytggctcccagcmccatgaagatcaagatcwtcgccccccbkgmrcgsragtastcakwgtggatcggcggyyccatcytggcctmgctgtccaccttccagcagatgtggatcmccaagcaggrgtaygacgagsccggcccytccattgtgcammrmaaawrhttytaggcgcacccgcgtytktgtacgcgcthtytytcctcaggasgacaatcgaccatcgtkhtwtggttgcagggtggccccatcctccsccgtggstccatbgccsccahtgcadccggsgcctgtttttgacgtgtacatagatwcactcgttttaccycattttgttatttttcaaacaaagccctgtggaaggaaatggaaaacttgaagcmttaaagccmsccmttytgttttgctcchmhaaaaaaaaaaaaawaaa

SEQ ID NO: 4384 - DNA, 1365 bp, Rattus norvegicus; identical to SEQ ID NO: 288

SEQ ID NO: 4385 - DNA, 1400 bp, Rattus norvegicus
ggtgatgttcatttacgccatctttgggatgagctggttttccaaagtgaagaagggctccgggatcgacgacatcttcaacttcgagacctttacgggcagcatgctgtgcctcttccagataaccacttcggctggctgggataccctcctcaaccccatgctggaggcaaaagaacactgcaactcctcctcccaagacagctgtcagcagccgcagatagccgtcgtctacttcgtcagttacatcatcatctccttcctcatcgtggtcaacatgtacatcgctgtgatcctcgagaacttcaacacagccacggaggagagcgaggaccctctgggagaggacgactttgaaatcttctatgaggtctgggagaagtttgaccccgaggcgtcgcagttcatccagtattcggccctctctgactttgcggacgccctgccggagccgttgcgtgtggccaagccgaataagtttcagtttctagtgatggacttgcccatggtgatgggcgaccgcctccattgcatggatgttctctttgctttcactaccagggtcctcggggactccagcggcttggataccatgaaaaccatgatggaggagaagtttatggaggccaacccttttaagaagctctacgagcccatagtcaccaccaccaagaggaaggaggaggagcaaggcgccgccgtcatccagagggcctaccggaaacacatggagaagatggtcaaactgaggctgaaggacaggtcaagttcatcgcaccaggtgttttgcaatggagacttgtccagcttggatgtggccaaggtcaaggttcacaatgactgaaccctcatctccacccctacctcactgcctcacagcttagcctccagcctctggcgagcaggcggcagactcactgaacacaggccgttcgatctgtgtttttggctgaacgaggtgacaggttggcgtccatttttaaatgactcttggaaagatttcatgtagagagatgttagaagggactgcaaaggacaccgaccataacggaaggcctggaggacagtccaacttacataaagatgagaaacaagaaggaaagatcccaggaaaacttcagattgtgttctcagtacattccccaatgtgtctgttcggtgttttgagtatgtgacctgccacatgtagctcttttttgcatgtacgtcaaaaccctgcagtaagttaatagcttgctacgggtgttcctaccagcatcacagaattgggtgtatgactcaaacctaaaagcatgactctgacttgtcagtcagcaccccgactttcagacgctccaatctctgtcccaggtgtctaacgaataaataggtaaaagaaaaaaaaaaaaaaaaaaaaaaaa

SEQ ID NO: 4386 - DNA, 600 bp, Rattus norvegicus
actgycatttaatygtcwgtttctttracataaasmgcatcttctccacaygrgckkcacgtggtttggagatgggtgggggaaaacaatcaggtktcttcaggctgaggaggacttgctcaggccratyccaaayattgtgctcgttcaatgcrtagaartgayytgcatgatggcatgcygtgwtcagaagtcatgcatgagayccayacaccaargacactastamtcywgtcccwtscaswggtcagcctkyggacaggacccagccctgcaccgttcactgtatttggagaaaatggtaagagttccayaccggctrcartyctytsagttcktarraktcyttcrtacaccttctgggtagggaracaamyaacyaattgacyamyaccamcaacaacaawaaacaaacccaatccaacaagcagatggatccgttgcgtgtatatgtttaacagacatctctaacatacagccattgttgcacattttgcaagatgaactatttaatgctgctctgtgtccagtacatgggggagactttgatcccaaatggcttgtactatttatgtcactgtaaaaccaaatcctagggct

SEQ ID NO: 4387 - DNA, 600 bp, Rattus norvegicus
taccggtcgccagaggtgttgctgggctcggctcgctactccaccccggttgacatctggagcatagggmccatatttgcagagctggcgaccaagaagccgcttttccacggcgaskcasagakbgaccagctcttcaggatcttcagagctctgggcacccmtaacaacraagtgtggccagaagtagagtccytgcaggactacaagaacactttccmcaagtgkaasccgggragcctcgcgtcccacgtcaagaacctggatgaaaacggcytggacttgctctcgaaaatgctggtctatgatccagccaaacgaatctctgsaaaaatggcccttaagcacccatactttgacgacttggacaatcagatcaagaagatgtaaccctctggaagtcccgccctgctgtggcagggaagatcgtggcgtttactgttggctcttcctgtcttgtatagttttctyytcyytgyctgtaaaccatcatctggacttttcctattttccwacgtataacttaattaacatgtaaawattattccatatgaawwwaaawmhaawwmwgtawawrwrwrrraaaaaaaaaaaaaaaaa

SEQ ID NO: 4388 - DNA, 600 bp, Rattus norvegicus
ccattgatcaaagaatggggacttgtcacctatacaatggtacgtgacagaactttgaggtggactgcatttaataatagtcacaatgttaaaagaacaaaattcttgagcagttttttttttttgttttgttttgttttcaaaaaatgttcaggtttatttgtggaaatgcaagatttctataaaatagtttttgtatggaaatttttgtaatactttttatcaacaaaataagaacacatgtttctgtcaggggtgtgaggtcaagcatgaacggtagtgcgtgtgcaccaccaacgtttggtgaaactatttttatcaagaaaaaggaatcatasaagagaaatattttcaagttagatactataaaagctaggtgcactaccaccacggcttgtcgcgccacacccctgagtccacaaggtggataacatattgtaatgaacagttgtgtgtaaaatggcaaaagacacagacctcttgacaacattgtgaaaacagttgagtgcacacagtttgctgtttgaatccaatgcacaaaaattttacaaaaatccattaaaattatgtccgttttaawwycaaaaaaaaaaaaaaaaa

SEQ ID NO: 4389 - DNA, 600 bp, Rattus norvegicus
aggaagaagacactggaggaagagtttgccaggaaacttcaggaacaggaagtgttctttaaaatgaccggggagtccgaatgcctcaacccctcagcgcagagccggggctgtttacaaacgtctcaccccagcagtaccagggcaccagcgtgggcaggatgaagcacatgagcaggaggccgggcttgtaatacctcctctggaacatcaccagcttctcagctttcaggtcagacatgtccagctttccgcccttctctttgacagccgggtgtttgcgcacaagcagccaacccacgtgagagaagaaaaagccacggcgggagttgtgagggtcggcgtgtgtctctgagaacttgtggtgggcgcggtgatcccggggcccattcgtacacatcgttctggaatgccatggtgttggcgatgatgagaaagagcctcaggggcagccgagccttgtaagtcctgtggctccacaggcgatgagccccggctgtgatgcccagggcgctgattacgtagtacaaatatgcaaagaggcaggtgtagaccttgcaggaggggaccagtgtgatcccgtacagggctccaatgtgc

SEQ ID NO: 4390 - DNA, 600 bp, Rattus norvegicus
  misc_feature (506)..(507): n is a, c, g, or t
gtaaagkwtgbtttaccaaaaatagtggktgkaacaaawkgatctgdtttggatgdtgctatagtgacatgcagttctctatttwgdwwwcggrgggaggggacaaaagaaacaccagtgktagcttactcttaatgtctggygkwtgkcatggtgaaattataactattacarkgktggrgaacgccgcggasskwctctgaacgamctctgtgctttyytgtcmtgktatgcagkgraactatttttarggtctaatcaagkgatttttycccccccamctycgwgtttcgbtaaggamttatttcgcacacggaccattcttmgcagtttcctcagtgatggaatattcatgartgtgagtcattatktagccgtcgtacatbgarsaamtmrrctkamaraaacctgggggcggccacgctatgtgctagcggcgtacagagggacgtgacaatgagcccctgttcggtcgcccagtcgaatgtttgaccacattatttggnntcggagcgcgacgacaaccacatagacagcacgccatcacaccagcgacaggaacgatacaccgggaagccggcacgaggaacacgcacagac

SEQ ID NO: 4391 - DNA, 600 bp, Rattus norvegicus
agaaaccctacaastktrmmcagwgtgggaaatcstttactcaatgttcaagccttcagaaacaccaagtmrkccacactggagagaagcccttcagmtktgcagartgtggsaartcstttacgcaaaactcaacccttagtcaacaccagagaattcatactggagaaaaaccttacaaatgtgaacagtgtggaaaggcytttacccaatgttcaagccttagaaaacaccagagaattcacactggagagaaaccctacaaatgtgaagaatgtggcagagcctttaactgccgttcatcttttactaaacacacaagagaattcacacaggagagaaaccttacaaatgtaaagactgtgacaaagctttcatccactgcacaaaccttactcaacaccggagaatccatacaggagagaaaccatacaaatgtaatgaatgtggaaartcctytagtcagtgttccaaccttagaaaacatgagagaattcatacatgagtaaaactarcaaatgtaaagawtttmgtaaatctkttatccatakkcaaaaaaaaaaaaaaaaaaaaaaaaaaaaaaaaaaaaaaaaaaaaaaa

SEQ ID NO: 4392 - DNA, 1399 bp, Rattus norvegicus; identical to SEQ ID NO: 296
  misc_feature (1267)..(1268): n is a, c, g, or t

SEQ ID NO: 4393 - DNA, 600 bp, Rattus norvegicus
acgtgaccacaaatatctcagccccamgmkkacctgactatgaaggcgttgatscmtctctgaatgaaactgccaccaccatcactgtactgctgagacctgcacaascgcaaaggtgccccwatcagtgmttatcaaattgtggtggagcagctacacccacatcggacsaagcgtgaagccgggaccatggaatgctaccgggtaccggttacgtaccagaactccctgagtgggggcgcasmctattactttgctgcagaactcccccctgggaatcttcctgagccagctcccttcaccgtgggcgacaaccggacctataaaggcttctggaaccctcccctggctccccgcaaaggatacaacatctatttccaagcgatgagcagygtggagaaggaaactaaaacccagtgtgtgcgaattgctacaaaagatggtagttccctcttcaactcttctctgcctgttcctcctcaatcccactgttgaactcactgaagatcagaaaagttgttcagtatttttgaagcaagaaacaaaatgcggggagaatggagctgagttatttttattttctctgagttggagtatttg

SEQ ID NO: 4394 - DNA, 600 bp, Rattus norvegicus
  misc_feature (128)..(128): n is a, c, g, or t
tatgtatcttamgrraygwggswgtkcksywbsdgvswdvdkggcrkmtttskmggcykghtgggaacrgsayttctaaaaaawymvgyaygwskggaaggctgtggtgmaaggccatttttgctggnyacaagsgrggcctcmggaaccaaagrgagcacacggctcttcttaaaattgaaggtgtttatscscgagwtgaaactgagtyctacttasgyaagaggtgtgcttatgtrtacaaagcaaaaaacaatmcagtgactcctggargymraccawacaaaaccmgrgtgatytggggraawgtaactygggcccatgkaaayagtggcrtggttcgtrccaaattccgaagcaaccttcctgcaaaggccattggwcacasaatccgtgtratrctgtamccatcccggatttaaactaatggrgrgtwaataaataaaarwarawwwrwrmwhwwrwawwwwwwwmmhawmwrwmmwaaaaaaaaasarwygyggcygyaagmwyakwcsmkwagccatttaaggctgagcctgtaaagaccagaagctagaaatacaaggagcatcaggcagaggggagtgaggtgagcag

SEQ ID NO: 4395 - DNA, 1400 bp, Rattus norvegicus
gctgtccctgagacttcatgatgctgcttttttgagaatcacctttcaacttcattagaggcccyagcatgggcacagccagttaacccagcctccctctactctggtgtccctcgcccagtttctttctccttccacctaagttggtcagagggaatgcagtcaccagtaccaaactttggaaagtctgactttttaatggatgagctcatatttactttctagtgtctggaacctgctatgggtctggtccccatcgtggaaagtgcagcaagctttgtgggttgggacagatataaaacgttagttctaattgcattctgatgtctggcaatcaatctcctttcttcccccggtgatgctgcttgcttcttgcttttacccttctatgagatgcagacatcgaggtcacccggcaagtttggtgaaggagttggtttttaccttcctaaacgggatagtagaacatgaccagaacatgaaaactgaaggagatttcagtggagcgcagttcctccaagtgaaacggctgttttctggttttaaccgaactgcaattagacataaatcagtcgtcaacaatctaaaagttstacactatcaacattatgcttacttctcagcagcacattctgagggaggagcagtcacacccccacagaaagcctgggacttccgaagacagaggaggtggactgactgatgggtgagrgaawcaaacrcaaactgggcatgcatgctgaaggggaagtgtgtccattcstactgcgtcccwtctgtgtgctytgtmtggattcacggcagtgtgttcaatgtaaatctbtcasagccatttwaaaatactcactttagttytccatgaagaagaggaaawaaagcagtcctcccgattgtagtattcraacttttaagagtttatcacaaatgccggtacataggacctaaatttatctatgtctgtcatacccttaaatgacattggttttgaatttggtatgcgttattattattattgtkattattattattctcaccaccatgagatcatctatatttataraggaatasaagtttatatatataaaatgccatatttttaatttcgcaaataaaaaaagtgaaagttttgbamwwmmrraawwmmrdwrttyykgaatkcckgaawwymrscatcctatctgaactgcctttacattttacagtgcctcacaaccagtccacaacatacaaaccgaaagattcggtggacaaacccgcccttccaaagagcaaccagtctgccttccgagtggcatttgtaaagcactattttcatgacacagaaaacagaaggtttcagtcctttaaccaaacaatgtcgtcattaaagtataactaattttaaaaaaaaaaaaaaaaaa

SEQ ID NO: 4396 - DNA, 600 bp, Rattus norvegicus
tgctgccttgsstttgscctyatyccargamcctgtgacacggtgcctkagargcargcatggagttctctttaccggcctcctccacagctggcccamtgccatgccagctgcaaagaaaaggggtgcagagagaatgactgaaaggtcargcccctcctggstcaytacacttggccgagaytcctctgcctgccttaccctcctgccttcccgagcytgggacgagtggattcccagaggcaaatctgccatgcttgcytttttctatattgtattcagacaagagatgggaaagatggggaaggagaagggacggtcagtttgaacctacctttcccccgtgcgtacagcctgctggtgggctctgtctgtcggtggagggcagtattaagtgggattggggagagagtgagggaaaggctcctggagattgggagaacctgctggggccagtgagaagactagagggtgtggtgattggtggctacagcaaacactaaggaacccttcattcccacttcccatctgcacctctgctctccccccaaatcaatacactagttgtttccawmmmraaaaaaaaaaaaaaaaaaaaaa

SEQ ID NO: 4397 - DNA, 600 bp, Rattus norvegicus
aagatctggaactgaggagsctggaggaagaggtgggaasccatgaaggctctcagctgactcctatgccctgtctccttagggtcagtcttctataccctggggccactcccagtaaacttccttctaagggcaggtgggattatrggagtgtgcctttgggagyrgcasgrdsacaagggcaaagaactgccccatttcctccagggcctctcctctccacagtcctcatagcttctccyttcataaacaagaacagaccctccccaycbtagatgactcytgggctaccagcagcbtttgtccggcytgggaatggccagagcgctcagcccatgactataggtgtcactcytagtatcctggctccctcccagcsactttctttctgcccttttgttctctcttattacctaataaaatgtagcatcctggwawmmmwwaaarraaawwaaaaawatcattgcggccgcaagcttattccctttagtgagggttaattttagcttggcactggccgtcgttttacaacgtcgtgactgggaaaaccctggcgttacccaacttaatcgccttgcagcacatccccctttcgccagc

SEQ ID NO: 4398 - DNA, 1400 bp, Rattus norvegicus
  misc_feature (1193)..(1193): n is a, c, g, or t
agggatctgtgatggcgttcttaagaatgaaaagctgatgaccaagctgcagagaggaaagtttgaagtactgttgtcagacccagtatttccgtgtggcgatatcgtagctttaaaactggggattccatttatctattccttgcggttttctcctgcctccacagtggaaaagcactgtggaaaagtcccgtttcctccttcctatgttcctgcaatcttgtcagaactcacagaccagatgtccttcgctgaccgagtaaggaactttatctcctaccgaatgcaggactacatgtttgaaactctttggaagcaatgggattcctattacagtaaagccttaggaagacccaccacactgtgcgagactatggggaaagctgagatttggctaatgcgaacatattgggattttgaatttcctcgtccatatttgcctaattttgagtttgtgggaggactgcactgcaaacctgccaagcctttgcctaaggaaatggaagagtttgtccagacctcaggggaacatggtgttgtggtgttttctttggggtcaatggtcaaaaacctgacagaagaaaaggccaatctcattgcctcagcccttgcccagattcctcagaaggttttgtggcgatacaaaggaaagataccagccacattaggatccaatacgagattgtttgactggattcctcagaatgatcttcttggacatcccaaaaccagagcttttatcacccatggtggaacaaatggaatctatgaggccatttaccacgggatcccgatggtgggagttcccatgttcgctgatcagcctgacaacatagctcacatgaaggctaaaggagcagctgtggaggtgaacatgaacacgatgacgagtgcagatctgctcagtgctgtgagagcagtcatcaatgagccattttataaagagaatgccatgagactatcaagaattcaccacgatcagccagtgaagcccctggacagagccgtcttctggattgagtttgtcatgcgtcacaaaggagccaagcaccttcgtgtggcagcgcatgacctcagctggtttcagtaccactctctagatgtgattgggttcctgctggcttgtatggcatctgccatattattggttataaaatgttgtttatttgtatttcaaaaaattggtaagacangaaagaagaataaaagggactagatgaaggaaagacatctcaggtctctgggtttggtcaagcaccaactggagtagcaatagtacttagaaacccagggagttgccagtcacctatcctcatcccattttcaatcattccattcctgtcttagcttgaggtaaattggaggatcgaacatactttctttgctatttcaatgacggt

SEQ ID NO: 4399 - DNA, 600 bp, Rattus norvegicus
tgtgatgtgagcgaactttaagtaatcagcatcgcagtccattagcatctgctcccagatggaaacaaatgttaacagcactgtttcaggctaatcttcgaatttctggatctgaatgcccgatcttagcttattagctgttttaccatttatccagggtttgacacgttagaaaccttagacaaagaagcattttataacttttcacatgtatatttgtagtacactgacttgttttccgtgtgtaagtgaatgagtcacctgcatttttcattccttttttcataagcttaacaagcggagtgttctgtataagcagggaggtttgatttaatctgcccaatcattttaatttgcttattgtaaacagggaaagaactgttccacactggttggaggatgaacattgtttttagatgtttgtttctgtgttttaggattctgttcatttacttgggatttatttacttgggaattgtaaatgtacttatatgaatatttttaagtgattttgccatctcctaaaagatatctaatggtggactaccatctaactagcatgtactgacatagaaaagcatcacagatatactatgtata

SEQ ID NO: 4400 - DNA, 600 bp, Rattus norvegicus
  misc_feature (292)..(292): n is a, c, g, or t
taagcattgccacccagcattccaagcagacttgtttcctagaagcatccttcattytgcattccatmctgggtcggcatvtaccacacwcagcaggcattyctyttgcagctgcaggacagtascagttcccaaaaagybttaaccccctcccycgcyccgattcccatgggggaacaacttagaaaaaaggggggaagaaaaacmcascattccaaggagkcygrssgtcctcsttchtgycagatgactstcaccgtgtccactcctcctgyktgtcmcgctcarcarntgaggcctcctcgtagggacctggatagggytaaracctccmytgcarctktttggggcttggtttacaccagagtcttgcacagcattggtatcgcaaacccrgaattytythtaggacacactgaccaaaatatgcaaccttttyttttttytttgtkggaaaagaggaagagagattgtcctgtgacttctgcccattacmtgaggcctgtggaaataaacctttatgkacttaaagttatmcagaaaatagaataaagttartaccvmwmwwrwwwaraaaaaaawaaaaaamacatgctgccg

SEQ ID NO: 4401 - DNA, 600 bp, Rattus norvegicus
cmyggtggtctgcaggggracttraragctttcttttcagatttccagtgggcctcagtttgatccagaaggaggagatgggctctgccykgaaacgtggttatatcttgaagcccctggatggataggccaccagcytgggcattggggcaggaaccatggtgctggagcctggcacagtgcaccggataagaccaaatcsccggttatragtktgggtggaaggtgtgtcagtgtgtcctgcgatgggtccggtgtcactgtttacatgacctatttgtgtggttatatagccctttatttaaaagagaagttccttttacggagttattaaattatatgtttaagmgctaaaaaraaaaaaaarmwrcagagtatttataaaattgtcttaaaaaacaaaaacagaaaacaacatttgaccgtataaatggataagggaagaaagtatagtagaaactttgctagttgaaaaaaaaaaatccctttcttgtaaacctggggacagctctgtggctgttggagtttagtttttatacacagagttatcagacattacttataaaacttagtttaaaaaaaraaaaaraaaaaaaaaaa

SEQ ID NO: 4402 - DNA, 1400 bp, Rattus norvegicus
agggctactacagcccgtacagtgtcagtggctctggctctactgctggttcacgcactggttcacgcaccggctccagggccggctcccgtcgtggcagctttgatgccactggctctggcttctccatgaccttttcttcttcctcctactcttcctcaggctatggccgccgctatgcctcagggccttcagcctctcttgggggccctgagtctgcagtggcctgatcccccagcctgtatcctgccttcccgctctgcatgtcgccaggctccccgtggaggcgctggggtcttttctttcttcttctttttttttttttttttaacatttaaaggtgtcttcctcccaagcggtgcctaaaatctaaccaaaaagaccagaataacacattaatatatatatatatatgcgatgtccagacagcctgtgtcttgggaaacagggctggcccaggcccagtgaccactccactctccttgggcctccctaatcctttctacctgccactcaccacagctaggtgccttggagaatccagagctgggcactcagcccactactcctgtctctcctgggaggattgccatctgggaaaggcccccagacctctaagccaaccccactggatgtctacctgctggtcckagctgctgaggggaactggggackgtcctgtgagcagacagctgttgagtctctkgaggcctctgccctgagccagctgcttctccccagtgtatacctgaatattcagtgggttttgctggcaaaggmamgaksccaggccaaccatctcttccagcctgcccakagaagcccyttccccatgggaagataaggcctggtcctggccccagcctcccgcctggctcctgcagctgccattggagctgwgctttgtagctcactaccccatacttattcccttgagacctgagcctctgcttcagccttccagcctcaactccccttgtaagtgccttctgtgtccttgtacccaggccctaaagacccagacccakggcaagagatggacattctggctgggcggggctggagggttytgcagatctgagaattycttytccaraggcccagggtyttmaagcctktggwacccctytgggtgstgytgcmcaccccactcccarggagccctggccagcccarctgtgstaacataagtamttggscagtgacactytcccttccctggccttgrdggctcctacccctgcctycaccctbtgagkgagstttgcatgttccactaaccttragctggtgacaggtggaratgccaggcagaacactaacctgvccatgggcgggggccctgcggtgtccgcccctcwataaaagcaattccmmccttmaaaaaaaaaaaaaaaaaa

SEQ ID NO: 4403 - DNA, 600 bp, Rattus norvegicus
attctkttcaatgtctgtgattccttcctaaagccaaagtttytgttsgactgtattggcacaccytggacatgaggtggccagggcmccaaggctgckkgcacagrccgmctyhgtggggactcrgmwmgargcaggttwtyytaactagcaatagtgatgtastgctgrgtaagctattaatggtggaagytaatgvgacattgyacagtgcccatatagtmtattcastgagtaatctktttacagttggatcaggcctgaacccgtccattcagaaagctkcaaattatrgaaacaacactrtcstatacgagtgatcgataatgctttctttggvdacattctdtattctgckgtgacattgaggcttataaakcaaaaggaactaacttkccgtccaccggtttwtmcagaactcmcagtatytatgacttttttaaactacgacctgytaaaatgaatctgtthccacaratgccgtgtacaatgccatgtgctaagaatgatttcavactwmttaaatgcgagcttsyyrwcctgwmhmwraaaaaaaaaaaaaaamwcgakkgsgggcccgswascywattcscyywatag

SEQ ID NO: 4404 - DNA, 600 bp, Rattus norvegicus
ytgcgcgatggrccaggaacctgrtgaataactkractcttctatggggatcamtatttattgatgtgkattaaytgbcmccawtaaascagtycttwmccmwwwrraaaaaadaaaraaamaraaaaaataatccaaaaagaacaagatgaaacaacagaagaacaatatacgaaaaaagggaaaagaactcaagggggggcccggaacccaatcggcccaatagggagtcgaataagaaacaacgggccgtcggtcaccaacgcccgagaccgggaaaacccggagatgcccaactaagcggcctggagacatccccctatcgccagtgcgtacaacagaaggccgaccgatcgcctcccacagttgccgacgtaggggatgcgacggaagccacattgggacgcggttaatgggcagacgcactttaccaggcgaagacaccaatagaaacccaggggggtctgtcaaccaaagggccagggaccgggcggtacactggggcgcaccgcaagcgcgagggccctaacagacagcagaacagcgaggcaggcacacacaacgcacgcagagcaggagcggcacgaaacgcgcagagag

SEQ ID NO: 4405 - DNA, 600 bp, Rattus norvegicus
  misc_feature (579)..(579): n is a, c, g, or t
mctattgcagcacaytgtccagctgggtgctgatgatggattacctgggcaacgccactgccatsttcctcstgcccgatgatggcaagatgcagcatctggagcaaactctcaccaaggatctcatttcccggttcbtgctaaacaggcaaacraggtcagccattctctacttccccraactgtccatctctggaacctataacttgaasacactcctgrrctcactgggcatcacccgggwvttcrrcamtgatgmtgatctctctggamtcacagaggatgcccccytgaagcttagccaggctgtgcataaggytgtgcygascttagatgagakkggmacagaggytgcagkarcyactgtkkyrragsmmgycyscatgtytbtgccccctcaaktkaagttsgrccaccctttcatyttcatgatagttgaatcagaaaytcagrgccccctytttktgggaaaagtgwtagatcccacacgttaatcactgtcctcagaagtcacatcccttytggatcgggtccccttcctaataatwttaaactcaggytggcytggcctgatgcttntgcaaaaaaaaaaaaaaaaaa

SEQ ID NO: 4406 - DNA, 1400 bp, Rattus norvegicus
  misc_feature (1090)..(1090): n is a, c, g, or t
aggacgttgaggaccattatgagatgggagaggagcttggcagcggccagttcgccatcgtgcgcaagtgccagcagaagggcaccggcatggagtacgcggccaagttcataaagaagcggcgcctgccgtccagccggcgcggtgtgagccgtgaggagatcgagcgcgaggtgagcatcctgcgcgagatccgccaccccaacatcatcacgctgcacgatgtgttcgagaacaagacagatgtggtgctgatcttggagctggtgtccggcggcgaacttttcgactttctggctgagaaggagtcactgacagaggatgaggccacgcagttcctcaagcagatcctggacggtgtccactacctgcactccaagcgcatcgcgcactttgacctgaagccggagaacatcatgttgctggacaagcatgcagccagcccacgcattaagctcatcgactttggcatcgcgcacaggatcgaggccggtagcgagttcaagaacatctttggcacgccagagttcgtcgcccctgagattgtaaactatgaaccacttggcttggaagctgatatgtggagcatcggcgtcatcayctwcwtcmkcctgagcggsgcdtccccattcctgggggagaccaagcaggaaacgctgacaaacatctcggctgtgamctatgactttgatgaagagtacttcagcagcaccagtgaactggccaaggacttcatccgaaggctgctggtcaaagatcccaagaggaggatgaccatcgcacagagcctggagcattcctggatcaaggttcgccggcgtgakgacggcgcccggaagccagagcgacgccgactgcgcgcggcgcgcctgcgcgagtayagtctcaagtcgcactcaagcatgccgmgaaacacgagctacgccagcttcgagcgcttctcgcgcgwgytggaggacgtggcgscgrcgkagcagggvytgcgcgagytgcagcggvsccgvcgscagtsccgsswgmgcgtgtgcgcgctgcrcgygvmtgcsgavcarcgsvaggcgygctbccgsgaysggagyscygsshtagnmcgcgammtgygacvcctgcrcacggagytgggtcgcaccgaggctmtgcgcacgcgcgcgcaggaggwggcacgggcagcgmtyktgggcgctggtgscctgaaacgtcgcctgtgtcgccttgagaaccghtacgacgcgctagccgcacaggtggctgytgaggtgcagttcgtgcgcgatytggtacgcgcgytggagcaggagcggytgcagkccgagtgcggcgtgcgytaggctgcgacacccccagatctcsgsccmtccccagaataaagstactttccacgcamaaaaaaaaaaaaaaaa

SEQ ID NO: 4407 - DNA, 1400 bp, Rattus norvegicus
ctcgccttgacttcctctggaaactgcaggccacagaagagaaggaggagatggaggagctgcaggcctacaaccggcgcttgctgcacaacattctgcccaaggacgtggctgcccacttcctggcccgggagcggcgcaatgatgaactgtactaccaatcctgcgagtgcgtggctgtcatgtttgcctccatcgccaacttctccgaattctacgtggagctagaggccaacaatgagggcgttgaatgcctacggctgctcaatgagatcatcgcagactttgatgagatcatcastgaggatcggttcaggcagctggaaaagatcaagaccataggtagcacctacatggctgcctctggcctcaacgactccacctatgacaaggcaggcaagacccacatcaaggctcttgcagacttcgccatgaagctgatggaccaaatgaagtacatcaatgagcactccttcaacaacttccagatgaagatcgggcttaacattggacctgtagtggctggggtcattggggctcgcaagcctcaktatgacatctggggcaatacagtaaatgtggccagccgtatggacagcactggggtgcctgaccgcatccaggttactacagatatgtaccargtgctggccgccaacacataccagctggagtgccggggtgtggtcaaggtcaagggcaagggtgagatgatgacctacttcctcaatggagggcctcccctcagttagcagataccagcagcatcctggcctccagaggattgaacagcttctctgtgcaccatgggcagatagggcctgtgcccaggctcacagctgtgctggtaaaatttctacttggactcagaagcaacttctgcctttgctggtgggcatgsmttttggcctaggccagggtgccagcgtcctgcgagcaccgagctgaccaaagatgttgcccytggcagaagactgtagactcgagctgaccyytgaggttytgacaagtgytghtaytgcacggtggatgtgytaccggagcacagcytggcacagagtggctgschtgaggggagsccttggtywtgaaggggaggtaggcaagcttgaagctggcytgggggatgtccatggacctcatgggtctgctttccactgtggagaggctatgccccctcacaacrttttgggggcaggaactgggaragatgcggcctgtgccattctctcctcacacctccatgcacacagacaatgccctgtacgggaaacaggactgttgataagggggaggcaagaggacaccaggcaaggagcagtggctytgagcaaaagaaaatatttattaaataaaacaaaagttttctctgcmmwwmwwwwaaaaaaaaaaaaaaaaaa

SEQ ID NO: 4408 - DNA, 600 bp, Rattus norvegicus
ttcacctgctcatggctggtgcacagaaacacggacttgaagtttaacatcaagagcagcagcagttcccctgagtctcgggcggtgacatgtggassagcatctctgtctgcagagaaggtcacactgaaccaaagggactacgagaagtactcagtggcgtgccaggaggacgtcacctgcccaactgccgaggagaccctgcccattgaactggtggtggaggcccagcagcagaataaatatgagaactacagcaccagcttcttcatcagggacatcatcaaaccggacccacccaagaacctgcaggtgaaacctttgaagaactctcaggtggaggtcagctgggagtaccctgactcctggagcactccccattcctacttctccctcaagttcttcgtccgcatccagcgcaagaaagaaaagacgaaggagacagaggaggagtgtaaccagaaaggtgcgttcctcgtagagaagacctctgccgaagtccaatgcaaaggggcgaatatctgcgtgcaagcgcaggaccgctactacaattcatcatgcagcaaatggacatgtgtaccctgcaggggccgatcctaa

SEQ ID NO: 4409 - DNA, 600 bp, Rattus norvegicus
attaaagtgccccagaaccaaaatggcaaatcaaaagggtatgcatttatagaatttgcttcatttgaagatgctaaagaagctttaaattcttgtaataaaagggaaattgaaggcagagcaatcagactggagttgcaaggacccagaggatcacctaatgcaagaagccagccgtccaaaactctgtttgtcaaaggtctgtctgaggataccacagaagagacattaagggagtcattcgacggctctgttcgggcaaggatagtcactgaccgggagactgggtcctccaaagggtttggctttgtagacttcaacagtgaggaagatgccaaagctgccaaggaggccatggaagatggtgaaatagatggaaacaaagttactctggactgggccaaacctaagggtgaaggtggctttggaggccgtggtggaggccggggcggctttggaggccgaggtggtggcagaggaggccgaggtggatttggtggcagaggccggggaggctttggagggcgaggaggcttccgaggaggcagaggaggagggggagaccacaagccacaaggaaagaagacgaagtttgaataa

SEQ ID NO: 4410 - DNA, 600 bp, Rattus norvegicus
agcatgctgctgctagtcgggacagccttggtggtgtcctgatggtcaggtcccccactgggctcctccctctgctggttgctccccacgaccccccatagattcctgtgccctgtcagtcctgagttcatcattctctacccaagggtctcaacgctggcctttgcaccccaacttggttgttctcttatccagatgctgaaacattatcccggcccacagttctaagggccacctctgggaatatactctgagatttgctttataactctgggcttccgcttctcaactgcagtgggaggtaccgaacggtatccagaaagctacagtttgtggctgtcccagactccccttcaatccatcacccttcacagggaccaagtaactcacattttcaggccttagcttgttcctatgaaaggaaatctcaaaagtccaggagactgtgggttctcaagcaagcagcgcagagcagccttgggcccccacccctggtccatctcaggctgcatatagaaaccggacaaagaatattaccgactcttgtccccagtccttgaagagacacaatgacaacaaaattaaatgcttatataaggt

SEQ ID NO: 4411 - DNA, 600 bp, Rattus norvegicus
ccagcctcagatcccacagagctagctccttcccagacagcatgaccaccacagctctgaggctcggactccacgggacagtcccaactctccttttgccttcatccaccagccccatgcaacacaggtacccagcaataatttgtgaaggagtaaacatgcatctacccattgatcctctcttcaggcttggatccatccctgcaggctctggacccaggactaagacataaggaagaggctagcttctcatcactcctcagtctagtctgatggcaggacgaaggttgctgtgctggtttcccctagccagcctttgacacagtccttcctcaccgtcactgggccaggtccacactcagaacccttcatgggcacagcacaccaatccatagagcggacatgtctggagtccttcagcccttccacgtctttcactcagctaggaaatgcaaggagctgttatcccccgccaccactcccaggtctcaggtcatctcaggctgcacctaaatttctgaaagcccctcacttcctaggtctacattcccctgggagagacagaccaataaagtattgtgcaatacgaaaaaaaaaaaa

SEQ ID NO: 4412 - DNA, 600 bp, Rattus norvegicus
gagctttacagaytggcagaatatmttcttctattkctttaaaastaacatagaactaatgaatttattgaagacttaggttctmtaattyaaaatcaagaaagaaaaaaaaaaaccttggattcgtattttgccccaggcagctgaaaacattaaaaaaaaaaaaaaawmacatgcacaaagttggccaggtttgatttgtttcccagcatagtcaaggctgcccttcaactcccagtcctcttgccccagccttttcggtcagttatggggttacaagtcacagtctgtaggatgatgtcattatacaggtgaaggcaggtataggatagaatgaggcctgtcattggacaagaaggaaggatgggtggaagaaaagttttagagaggaggaggaggagactggatcgagggaggagaaaccagctgagagaacatggaggcagatgtaagattcctctctgcacatttataggttgttatgaatattcttaagggatggatatgtacagggctttgtatgtctagatgagcaaattatattattggatcagaggttattgtgttgtgtgttctttcatgaggtgatttaattgaatc

SEQ ID NO: 4413 - DNA, 1400 bp, Rattus norvegicus
aatgaaaatagtgctcagtgtcagacagccagtcatctctgcagtaagcacactacagagctgggtttcgggaggggagggaagcagtttctggtgctttccacragkccacatccacaagagtggggggaaatcctaacgcacaattcccatgcttccagtctaggctttgtggtaactcttcaggaaccattcatgagacagagtacattttgtggtatgacagaagggtgtctttycaagcaagctacagtaagcattgtgctgaacgtgttgcatgtccgtgttagaaaacagaaacccagtcatcagctaattcaagcaattcccaragcagtgtttgttcaagctctgtaatatgtgcttcctgcagggtccttgtgactkwycaccagtgtgtgtccactgtcaaatcctttatcattatggtgtaactcaggaacagatctcaggttggagagaggcagaaaacctgaatcaagcttttccttgcactcacacttctgaaggctcctgagagaggacggtaactggagatgagtgagtgccacctcaccgcattgtatattaacatgattmtmggcatgttgttcactcccatcttccacaagggtgcaaggagcccacagggctggtccatgactgtgtgttatgaggagagagtgtgacaatagcaaatccatgaatagttgcggttgtttctggagacagcgtaaacatggtcacccaactggactgtttgaatcgtgtgagctagcggccacytsrwsccsmattgttaatactctagaacaccgttctgttycatgtagagaatttgtttctgtgttctctgtatcttaaatcaaatgtgtgcctgatgaattctgtcctctaaccccctcccaccaataaaaatggtcaatgttaaggacaggtaaggaagcagaaagggttcctttgtggatagtatcctttaaatgttgctatgtagtagtctgggtgaaggagatggaaagccacagttcagaagagtacccgtgtctataagggggacatgaatgaaaacctttatttgaaaaaargraacwraaaaaraawawtattttcctacaattaagaaggctgtcctctcacagaataaaatagagttccaaagtgtattatgaacttcttccagatgtcactgatgtctattatgaaagcagggaagggcccctttcctgtgaaggggaggcaggcactgtcctttcagaatgtgtacaaattcctgagctgcagttttgctagactgaccatatatacttatattcctaatttaaataacaattatgtcagatatgtgttgttaaatttgaaagtgttttattacattacatcgaaataaaggttatttgtagctgtaataaagcaacttaagc

SEQ ID NO: 4414 - DNA, 600 bp, Rattus norvegicus
agcccactatgacctccaccaagaagctgaggccacctttgcctaccccatattcctgccttaagaatgtccttttaggagctggggtatagcccagaggtagaactggtgctaagcatgcgtgagaccctgggctcaatccccagcattaaaaaaaaatgtttttaatattttcaccccagtctgagggcactctaaagttgggggaaagtcttaagagtttgaargacttcagagaattgtctggttcaggcaaatcacagagatggagacaggcacacagagggaggaagactccttacacacatacttttgacccattatagtacggtctttattggctctgggtacctctatgacctgggagcatggggacagggctggccttggaggaactgcaggggcatcacttctttctgctgtttctctccaccccagaggtccttgggtttgcccagctctctctgtgccctctgggtttctcagcccactgctgacacttctgcaatccagagaaacactaaataaaacaatatgtatttgccaaaaaaaaaaaaaaaaaaaaaacattgcggccgcaagcttattctatttagtgag

SEQ ID NO: 4415 - DNA, 600 bp, Rattus norvegicus
ctggctgctaggaatgtcctggtgacagaggataatgtcatgaagatcgcagactttggcctagctcgagacattcaccatatcgactactataagaaaaccaccaatggccggctgcctgtgaagtggatggcacctgaggcattgtttgaccggatctacacccaccagagtgatgtgtggtcttttggggtgctcttatgggagatattcactctgggtggctcaccaaaccccggcgtgcctgtggaagaacttttcaagctgttgaaggagggtcatcgaatggacaagcccagtaactgtaccaatgagctgtacatgatgatgcgggactgctggaacgcagtgccctctcagagaccaactttcaagcagttggtggaagacctggaccggattgtggccttgacctccaaccaggagtatctggacctgtccatgccactggaccaggactcgccaagctttccggacacacggagctctacctgctcttcaggggaggactctgtcttctctcatgagccatttcctgaggagccctgtctgccccgacaccccacccagcttgcaaatggcggactcaaccggcgctga

SEQ ID NO: 4416 - DNA, 600 bp, Rattus norvegicus
ttaaaaataaaatcatagccataagmrwrwwarwatmmwawaaarararaamarwwrtcttagtacctatggattttcttcatttgttatttgagtgaaccagccttagttgtgtttsragaatsamgarkattctttggaatgcctctctaagacccaccgtggatgctgattttgtagtgcaccaaaggtatcactggggtgagatgtactctatttggacagatggaatctcatcccttcaaaaacattcttgttaccaggtttccctgagctggtaatagactctagctgggccaataccaccgcacctgcatggtgtttttatcttaacaatcattcattgcatacatgtgacaacttcaaaatgcattctgtgttcttataatacagtgccctaaaacggtgttctaggatctgcagataagagagacttatctctaaatttttctttcatgaacaataaaataaattaaaatgtacaaccttaaaaaaaaaaaaaaaaaacctttgcggccgcaagcttattccctttagtgagtgttaattttagcttggcactggccgtcgttttacaacgtcgtgactgggaaaaccctg

SEQ ID NO: 4417 - DNA, 600 bp, Rattus norvegicus
  misc_feature (448)..(448): n is a, c, g, or t
agagactgccctgtgtggaagactatctgtctgccatcctgaaccgtctgtgtgtgctgcatgagaagaccccagtgagcgagaaggctcaccaagtgctgtagtgggtccctggtggaaagacggccatgtttctctgctctgrcaskwgrcgagacatatgtccccaaagagtttwaagctgagaccttcacctkccactctgatatstgcacaytcccagacaaggwgawgcagataawgawgcaaacggctctcgstgagytggtgamacacaagcccaaggccacagargaysagstgaagacgrtgatgsgtgacttmgcacaattcgtggacaagtgttgcamggmtgccgacaaggataastgmttcgccaytgrggggccaaaccttgttgctagargcaawgaasccttagcstaaacacatcmcamccatvtcaggntaccctgrgaamaaavgacatgargactcaggastcatctstyvtgttggtgtraarccaacacchtawggaacacaaatttctttgaacatttgamttcttttmwmtgtgccgcagttattaaaaaatagaaagaaaaaaaaagaaaaaaa

SEQ ID NO: 4418 - DNA, 600 bp, Rattus norvegicus
caatagaaacacaatgggatatgmcagcttgcacgrattttaatagcatcccaactagaactgaattttgtctttattatttttaaaggaaagttttgtaaatttcwmwawwrwmwmwrwwwacattttgtatatttgtatttaaatgaaagtcagacttcgaggswskakrttttctgtgcagccactgttaagccatgtgttttaagacattttagatgggggggggggtacaaaaatgtgactctagatkkccrgagcctcaaaagagaaaatgyytttattaaatataaactatttyacmttttacctttaaagacctgattacatctacctacatccacctctctagctgttttcccctccttgtagctaatcactctcctgttgacttgtaacaagctaaatgaaatgacagaatgcacttgggccatctcccaacccaaacattctttatgagctatgacatcattggtaagatgggcaagcttttgacattgcagcttcattggcctcgttctatagggcatccacatggagggtaaggaatcctaaatcattggaatagagatcttggctgcttaaaaaaaaaaaaaaaaa

SEQ ID NO: 4419 - DNA, 600 bp, Rattus norvegicus
tctccagacatagtgtgattggggaactccgcctgggcctgaatggagcatctgtacccctggggacagcacagtggggtgaactgaagaccacagcaaaggagccatctgcaggaactggggaggtccttctgtcaatcagctaccttccagctgccaatcgcctcctggtggtgctgattaaagctaagaacctccactccaaccaatccaaggagcttctaggcaaagatgtctctgtcaaggtgaccttgaaacaccaggctcagaagctgaagaagaaacagacaaaacgggccaagcacaagatcaaccccgtgtggaatgagatgatcatgtttgagctaccagatgacctgctgcaggcatccagtgtggagctggaggtgctgggccagggtgaggaggggccgagctgcgagcttgggcgctgcagcctgggcctgcacgcctctggctctgagcgaagccactgggaggagatgctaaaaaacccacgccggcagatcgccatgtggcaccaattgcacctgtagttggccaccggccactgaccgtctttcttggacacagtcatcttccaggctcagctgtcagtca

SEQ ID NO: 4420 - DNA, 600 bp, Rattus norvegicus
aacagtggtgtttssasstsstctsckkccccatcccatraagccttttgaggtagaaaagaccaagagcaacgcaaagctttttaaatcttgtctcctgtgagctctmagtcctccgwagtcatgtgcstgtccacmgtttctmtccacgcagcctcctccccacagcaragtcatggctactcccaggctctcchttgragttgdcggcgtccgtgggmtgctggactcttgagggtggggtcccccctggactctgttttgtragatggactcagctcggagcacccctgaggccccgraggmgtcytgggcggagcctgttmccacccctcctggttctgctgcctctttccctgctgatgataaaaatttatctctggagttacacctgggccatttgattgttttaytttggaattggtgtatatcatgaagccttgctgaactaagttttgtgtgtawatatttaaagatcagtgtttaaataamaaaacaaacctawrwamwwamrmmwmwarmwwmwrmraawagcaatttggtaggtagtgattaactgtgaataaactccaatgacttcktaaaaaaaaaaaaaaaaaa

SEQ ID NO: 4421 - DNA, 600 bp, Rattus norvegicus
agcgccccctagccaggaagctgaggccaagggggaggtcgcccccaaggagacccccaagaagaagaagaaattctctttcaagaagcctttcaaattgagtggcctgtccttcaagagaaatcggaaggagggtgggggtgattcttcagcctcctcaccaacagaggaagagcaagagcagggggaaatcagcgcctgcagtgatgagggcactgcccaagaagggaaggctgctgccacccctgagagccaagagccccaggccaagggggcagaggccagtgctgtctccaagggaggagacgcggaagaagaggcagggccccaggctgcagagccatccactccctcgggcccagagagtggccccgcatctgccagtgctgagaatgagtagctgggcgggggctggtgggtgatctctaagctgcaaaaactgtgctgtccttgtgaggtcaccatctggaccttgtgccctggctgccttcctgtgcccagaaaggaaggggcttgttgccccgtcccagccacgctccctcttctccctcctgtggattctcccatcagccatttggtcttactattaggccagttgaa

SEQ ID NO: 4422 - DNA, 1400 bp, Rattus norvegicus
tgtcaactctagcccttagtccaaggagattgatcgatcagacaggtcattgagtcttagtaggtgcaaacttcatccaaatgtctggagtcctgttacgtttctgttcactgtctcttcaaagtctctaaattatgactctgactccctacccccagccctagcagagcgaattgaccaaaagaaccctttataaattcccgcttaaccctgcactttgtttagccatcttcagctctcagcgaggttgacactgtaatgtgttaatgaaatgctatttattgtgtaaatagtcattttactctgtggtgcacgtttgagcaaacaaataatgacctaagcacagtatttattgcatcaaatacgtaccacgagaaacgtagagtgcaagctgtccgctggtaatatactgtattctgtaccattatagatagtgtggatgctgtcagtgcatgtcgatattaccatgctgcggtatctagtttctcccaccactcagaatctcatactcatgagacaccataggtcagtggctaagtcaaggaaaccgttcagcagatttcatttctttaagtcattaagcaatagtttgcagcattttaacaatgtctgggttgtttttcaattctaagtggatgacgttcaatgtatagccagactgtacatacatgttcggaagacaacactactgcttaacctgttaaaacatgtttagagttttataagcaagtataaataactgtacaaagtcactttcttttgtttttcagcatcatgtacatatgaagaggaaattatcttcaggttgatatcacgatcacttttcttactttccgtccacagcagtttttcatggaagatatttgctaactaagaaatgaaaccatgacggggtagtggtagatctctgcttttttaatcacgggctttaagtttggattatttcataattttaagggacaaagtacactcacaacctcacatccaaattatgatttgcaattgggaaagggtagaacatttgatttatgtttattatagtgtctgtgcgaacagatgaccggaatgctttttttttctcattttttctttattccctaatttctgtttatttttctttgctttggaatcacgcatctctagattgttctaaatataaacgtgagcttcggaatttcttttcctcaaaaacagagaggatgacacttacatagtcaattatatcaagatatttgtgtttcttacagaagcagaccataggcacctctttttcttaagaaaaaaaatatttaggcaaaccgtattcatgaactgcatgttggaaaatgctactattgcccaaaatgatgctaatcacaattaaaaatgtgcaaatctaataaaaattaattttttatttt

SEQ ID NO: 4423 - DNA, 1400 bp, Rattus norvegicus
  misc_feature (1396)..(1396): n is a, c, g, or t
ttaaatcagtgatcctgatctgtggcawtcatgaaaaacaagttgaagactttgtttatctggaattgtttctaaatataagtcatttgtagcargamwwwrraarmawwmamrtttcttccttaaacatattcctttatgttcagtagttaagagaaccagagcccatgggggtgtctgactgtcactgatgcatttttgtccctggcttgcwwwwwwwwwwwwwwwwwwttttttgkctcatgtcacagatgactgtttcgcacaaacacagcatagtggaagaaaaaattcagaagcarrgtagccaagcacatgttatgatggccacgaatgcttggtcagaatccttccctttgctcagcagtgaacttattcccagcacccttccctcctcactgtccagtttctgttctttccttgggtttcctgtgaagttggagggaagtttgtagtcatgtgacactagccgtcctgcccctgctgtcagatttttwttctccagagaggtgcctgtyctgtgcttggatagtcagtttgtgtatgaaacaatgtacaaatcaatgttttgaaaataatgatctcagactttctaagttaaattttaaacaatttgattgtttgccatattgggtgggtttactcttagaatcgcatgctgtagaaatgctctaaagtgcatayasgaskcagtccttagatgttctttttattttaagaaataacctcttcaagttgtaaccgyggcggctttgtccattactgttgctattctgcacacatatcggmassagsargcgctttacacactcgagtagtgggataagtcactgttttctttacttwacaagatgatagtcctgttgggaatgactgctgctggcttcaggaagggagggaagctgctccgctgyctctttgccacttcctggaagcagcctccatggaacagcctttgcatmtgaggcaaccatttttacaccgygcagatmttcgtggttatcatctcaaakccatgttcagcakcagcgtttggacagcagtgttctgtgggccctcccatccccmkatatcctgcacccctcatagcagtagtggmttcgmyattctgwtktmygsagcgkcckgtacmrmmctgtgctgtgactgtgcggtaggyctggacatggcaaagagaatacagcgaagccccttctcttcytaccaaacgactctgtagagctctctgcaccctgtaccctttccaccttttgtatttaattttaaagtcagtgtactgcaaggaggctggatgcaagatagatactatattaaactgtactgttatttaagatgtaataaarmaktttkwchtkvddraaaaaaaaaaaaaaaaaaaaaaaramagtcttggcgnccgc

SEQ ID NO: 4424 - DNA, 600 bp, Rattus norvegicus
aacactggggcttggatgacccagccgacgtgatgtcgttcagcaagaagatgatgactgggggcttcttccacaaggaggagtttcgaccaagtgctccttaccggatcttcaacacctggctgggggacccatccaagaacttgctgctggctgaggtcatcaacatcatcaagcgggaagacctgctcaacaacgtggcccatgccgggaagaccctactgaccgggctgctggacctccaggcccrgtacccccagttcgtcagccgggtgaggggacgaggcaccttctgttccttcgacactcccgacraagccatacggaataaactcatcctaattgccaggaacaaaggtgtggtactggggggctgcggtgacaaatccatacgtttccgtcccacgctggtcttcagggatcaccatgcccasytgttcctcaacattttcagtggtatcttagcagacttcaagtaaasaagccatctscacgacattcagagaaagctctgtcccagcggtgtcaacttgattagtttgcctaattcatattttcacttcaaagtttatcagaggcgaatgcataaactaaagggtc

SEQ ID NO: 4425 - DNA, 1400 bp, Rattus norvegicus
cgcgccctcctcgccgsggcctctcggccatttctctgttgggggactcctcaagctgccagaagatgctctggtgaaggccgagagcccggagaagctagatcggaccccgtggatgcagagtccccgcttctccccgcccccagccaggcggctgagtcccccggcctgcaccctacgcaagcacaagaccaaccgcaagcccaggacgmccttcaccacggctcagctactggctctggrgcgcaagttccgccagaagcagtacctgtctattgccgagcgcgccgagttctccagctcgctcagccttaccgagacccaggtgaagatctggttccagaaccgccgtgcyaaggccaagagactgcaggaggccgagttggagaagttgaagatggccgcgaagccaatgttgccgcctgckgcsttcggcctctcctttcctcttggkggycctgcagcggtggctgcagctgccggcgcctcactctacagtgcctctggccctttccagcgcgccgcgctgcctgtagcgccsgtgggactctacaccgcccacgtaggctacagcatgtaccacctgacataggtgggcccagagtcacctccctgtggtgccatcccttccccagccacctcttctaggcagcgggagtccttcctaggaagctckgctgcccaacaccacctggccccttctcttaaacccttcgctacacagttcctcctggccatcgcatcttaaarttcctcctccctcttccgaccccttctgggaagaaaaaaaagtggccggaagtgtctaggtttttcgagaaaaatttatattyacasgtgcgagttataaatgtggaaactgggggatgcaaaggcgaagagatttatccgtggtccccagcarawttarargctgaaggagaccagaggccaaaaggactagaggccatgagactccatcagctgcttccggtcctgaaaccaggcaggactgcacagagaaattgttatttggtgctycmararacsagccmagccytatagaaagcaaggagcacagctccttccaytgtcagactccaaacgcwttgcagcaaagcattgctctkagggggcagggtgcrtgctgstgsttcacgaaggtaggttgaaragactttcccaggaccagaaaaaaaraarwwaaaaaacaaaatctgtttctatttaacagtacattttcgtggctctcaaacatcccttttgaagggatcgtgtgtactatgtaatatactgtatatttgaaattttattatcatttatattatagctatatttgttaaataaattaattttaagctacaaraaaaaaaaaaaaaaaaaaacaattgcggccgcaagcttattccctttagtgaggg

SEQ ID NO: 4426 - DNA, 1400 bp, Rattus norvegicus
ccgcctggctcggaagcggaggagcacgggagacggggatgccctgcccctcagcctcggctataaggtgcacgtggcgtcagtgaacaacttccccaccgctgcaggcctggcttcctcagcagccggctacgcctgcctagcctataccttggcccgggtctacggggttgagggagacctctcagaagtggcccggcggggctcaggcagcgcatgccgcagcctctacgggggcttcgtggagtggcagatgggggaacaggccgatgggaaggacagcatcgcccggcagatagccccagagtggcactggccccagctccgagttcttatccttgtggtgagtgcagagaagaagccgwcgggcagcacagtgggcatgcagaccagcgtggcgaccagtaccctgctcaagttccgggctgaswcsakkgtgcctgagcgcatgaaggagatgacccgttgcatccaagagcaggacttccaggccttcgcccagctgaccatgaaggacagcaaccagtttcacgccacctgcctcgacaccttcccgcccatctyctacctcaatgacacctccaggcgcatcatccagctagtccaccgcttcaacgcccaccatgggcagacgaaggtggcgtacacatttgatgcgggccccaatgctgtgatcttcactctggaggacaccgtggccgagtttgtggcggcagtaaggcacagcttcccccctgctgcgaatggagacaagtttctcaaggggctgcaggtggcacccgttcttctctccgatgagctgaaaacttcgctggctacggagcccagccctggtggggttcagtacatcattgccactcaggtgggaccaggacctcaagtcctagacgaccctcaccatcatctgctaggcccggatggcctgccacagcgggacctttgatctctcccatgtgcatctggagaaaggggttgctcccgggagctcgggagctcctgtgctgatgggccacgtccaaaggcttgcttgatgacacctaggggtgtctcctgtgatgagcagctgtctgggcagccggggacccctctcaagtgcctcaccttcctgctggctagccgaccttagggaagaggagtcggcgtctctcccaccgaagatgcccccgagggcctytaagygtgaaggatgagggctcagacagcagtgcctytkttgagactcaggccacagtttctttgagaascctcytggtgagggtaggggctgtggaacccacaggtagggtccattgtgggtktggatktaccacgaaggtgcagtygatggacccgatgmccacaggaataaagtgtgccactgctgcctgccaaaaaaaaaaaaaaaaaaaaaaaaaaaaacc

SEQ ID NO: 4427 - DNA, 1282 bp, Rattus norvegicus
  misc_feature (50)..(50): n is a, c, g, or t
  misc_feature (53)..(53): n is a, c, g, or t
tttttttttttttttttttttttttkkyykykwkwtttktktwtwkdybnywnkkwaaakgtttgcatttaattabccwyygaagkggmyttaagccaccaggamacaggcmcctcccacaccctttawyytcyyttcagctyttytgctgaaraacttggccttyacgatgacwggttgcytakgrrgcttccccttccccmraactttgtaktrscctgatcgaacarcgycaatgakggragcaactccawtcttgktttttgctgcattgamccgtgtytgctcgctgascaacgkccatrattbrkccaggttgwcagttgggcadaagcybtsgtkcckyttmargkggkaatgmctmatgcmaactttgccgaagtaacctsratgmyatttgtyaaagttgawcytgkggkgatgcatgcctccagcattcccgsggsctcctgggtgcttgcggkgmttaccgatgcgwccgtggscgtgghtyacstsgysccsvwbtttccstykkcctaccagtctsgatggcayskcsktgcmgawtctyttcagkcctctgargrcyrcacacaggatggctgcaaacaagcccaagggtcagaattctttggccttacacaaagtcatcatggtgggcagtggtggtgtgggcaagtctgctctgactctgcagttcatgtatgatgagtttgtagaagactatgaacctaccaargcagasrgctacaggaagaaggtagtgctggatggggaggaagtgcagatcgacatcttagatacagcagggcaggaagactacgctgcaattagagacaactacttccgaagtggggaaggattcctctgtgwmttcksyaysacagagatggagtcctttgcagctacagcggacttcagggaacagattttaagagtaaaagaagatgrgaatgtcccatttctcctggttggtaacaaatcagatttagaagataaaaggcaggtttctgtagaagaggcaaaaaacagagctgaccagtggaacgttaactatgtggagacgtctgctaaaacgcgcgccaacgttgacaaggtattttttgatttaatgagggaaatacgagccagaaagatggaagacagcaargaaaaaaawrraaaaaaraagaggaaaagtttagccaagagaatcagagaaagatgctgcattttataatcaaagcccaaactcctttcttatcctgacctgaccatactaataaatataatttataagcawwaaaaaaaaaaaaaaaaa

SEQ ID NO: 4428 - DNA, 600 bp, Rattus norvegicus
tgacatccgtaaagacctctatgccaacacagtgctgtctggtggcwccwccatgtwcccaggcatygctgacaggatgcagaaggagattwctgccctggctcctagcaccatgaagatcaagatcattgctcctcctgwgcgcaagtactctgwgwgkattggtggctctatcctggcctcactgtccaccttccagcagatgtggatcagcaagcaggagtacgatgwgtccggcccctccatcgtgcaccgcaaatgcttctargcggactgttactgagctgcgttttacaccctttctttgacaaawcctaacttgcgcagaaawaaawaaatgagacatttggcatggctttattggttttttgctttttgctttwgctytttttaaaytyyyyyttyaaaaaggrctttttttttttgctttgatttggcgcttttgactcaggatttawaawctgkawcggagrakgcgaccgyagatgattggagcaaacatcccccaaagttctacaatgtggctgaggactttgattgtacaatggtttgtgattatggtttttttacatagtactcccagtatatacggcatagatg

SEQ ID NO: 4429 - DNA, 1400 bp, Rattus norvegicus
aaatttcttgccgaacttcaagtagaaaaagggctgggaagttgttagactacttacaggaaaaccccaagggactggacacccttgtggaatccattcgcagggagaaaacacagaacttcctgattcagaagataacggatgaggtgctaaagcttcggaatataaaactggagcacctcaaaggcctgaagtgcagtagctgtgagcccttcgcagctggagccaccaacaacctttctaggtccaattctgatgagagcaacttctccgagaaacagagaccatccacggtcatctaccatccagagggagagtcgagcactgctcccttcttctctaccgagtcatccctgaatctgccggtcctggaagttggcaggctggaaaacagcagcttctcttcagcctcgcttcctcggcctggggaccctggggccccccctttgcccccagacctgcggttagaagagggggggagttgtggaaactcaagtgagatgtttctccccttacggtcacgggctctttcacggcagtgacaggtcactgcgagttgttctaatagtggtgcaaatggtgtggtggatatcatctttttataaatcacgggatgcgcgtcttaaatcacaggtgcacataacattctctgtaaataggattggaagtgtaatggagcacactctaggggcagcttggtgtaaatcatggtggtcgtgtacttttcagcattgtccttttttattattttaagtgttttggtattttgaacttttttataagactaattttatcaaaatakttctcaatttgagaaaacaacttgtggaccgaaaaccctacargttttccgcctggttgtgtttcctggtgatctgacagtacattttagcagtaagctgttctgactttcaggaaagccagacatggggagagctgytgacacaccctcaggagaatgtcccactccgtgcttctgagaagccgtcaggttctgaggaaacacctgatggcgttgagccttgtgatctcagttgsccagaatttgttgtwtaccttgccmgtatgattgtctttgccttttacagaccttgtgtcctcagtcttggcctgaagaatkttatyccggcagggcgctccttgtaattaattggtaacacttgtaattagctaaagtccttgctytgagcctttccttytctkccgatgrgcamtgccatgtggagttactgtattacaaagttggctaactttacacmtttaaaaagtgctgrttattttcttttaaattatacctatttctgacatytaactcctatatatttytwttwtttaaaaattaagaaatgaaaagttyytwttaacaataaaatttttttaagtaaaaaaaaaaaaaaaaa

SEQ ID NO: 4430 - DNA, 1400 bp, Rattus norvegicus
  misc_feature (991)..(991): n is a, c, g, or t
ataagatcaaatacccggagaatttctttctactacgtgggaaccatgagtgtgccagcatcaaccgcatctatggcttctatgatgaatgcaagagacgatacaacatcaaactgtggaagactttcaccgactgcttcaactgcctgcccattgcagccattgtagatgagaagatcttctgctgccacggaggcctgtctccagacttgcaatccatggagcagattagacgtattatgcggcccacggacgtgcctgaccagggcctgttgtgtgatctgctgtggtctgaccctgacaaggatgttcaaggctggggcgagaatgaccgtggagtctcctttacctttggggccgaggttgtagccaagttcctgcacaagcatgatttggacskcayswgsagagcacatcaggttgtaraagatggctatgagttctttgccaagaggcagctggtgacactcttctcagcycccaactactgtggcgagtttgacaacgctggcsccatgatgagtgtggacgrgacactmatgtgttcsttccagatcctcaagcccgytgataagaataaggggaagtatgggcagttmagtgscytgaaccccggagsccgtcccatcactccaccccgcaattytgccaaagccaagaaatagcctccrtgtgytgccctytgccccagatgacggattatttgtacagaaatcatgctgccatgggtcacactggcctytcaggcccacccatywtkkkkwwywywkykktwagtgtctttcstttatttwktaaagaatcaatagcagcatbtaattcsccagggctccctcccaccagcacctgtggtggctgcaagtggaatcytggggccaaggctgcagstcagggcaatggcagaccagattgtgggtytccagccttgcatggytggcarccrgatcytggggcaacccatytggtctcttgaataaaggtcaaagctggnwwmwmvmmawrrmmwmwrwmwmmctcatcccagatagtgggccagcagtcctttggtacaaagccaccggggagggcagacagtggctggacatgggcccagccagggctagtcaggtctagaggcaattgggattctaagccaaggcccaagtgttaggaccacagaagggtctgatgggagttcatgattggcagagagcgtgtgttcaacattgatcttttttacaggcaggtgagcctaaggaagcttaagtttctggctctgaccagatactgtagagcctcacagtaagaggtgaagaatctgtcaggtgatagccgggcaccaaagtatacgctgagtaaacaggacaaacatgggtgcctaggtatctctgaagcagacagccatgtggggcctacccaag

SEQ ID NO: 4431 - DNA, 600 bp, Rattus norvegicus
atgctattcagaccatttggtcaggcaggagccccactggcttgactggctgaatattgtctgattttagagaaggtggtctgagccaattgtgtttgtgctgtgcccctaagttcattttcaccatggttggcttgtttggggagcccttgctgtgccccaggactttgtacctcactgccctggatcagttggggatctcccagctgctctggcccagtgtttttctgctcagggccctggggcctctttactaaagcactgtttgctgctggcagacacgaaccaggtctgtgaggctccataggaaattaagatttggtgacagactggacgtgggtgtgagtcctgaccctgtcacttaactggccatgtgaccttggtcaggctgacttaccttctgggcctcagcttctcacagactgttgtgactcttaaagataaagcgagcagaagctgacaccagtgagtgccttttcttctgctcacccttgtgctcaccagggtgagatagaggtgagaatgcccttactggtgaccactgtggtaggcatttaccgttcggagggaactccattctggaataggggagaatgcgac

SEQ ID NO: 4432 - DNA, 1400 bp, Rattus norvegicus
  misc_feature (1375)..(1375): n is a, c, g, or t
cagcgagsccgagacccagcagccgcccgccgcccccgccgccgccctcagcgccgccgacaccaagcccggctccacgggcagcggcgcgggtagtggcggcccgggcggcctcacatcggcggcgcccgccggcggggacaagaaggtcatcgcaacgaaggttttgggaacagtaaaatggttcaatgtaaggaacggatacggtttcatcaacaggaatgacaccaaggaagacgtatttgtacaccagacggccataaagaagaataaccccaggaagtaccttcgcagtgtaggagatggagagactgtggagtttgatgttgttgaaggagaaaaggktgcggaggcagctaatgttacaggccctggtggagttccagttcaaggcagtaaatacgcagcagaccgtaaccattatagrcgctatccacgtcgtaggggtcctccacgcaattaccagcaaaattaccagaatagtgagagtggggaaaagaatgaaggatcggaaagcgctcctgaaggccaggcccaacaacgcsggccctatcgcagscgaaggttcccaccttactacatgcggagrccctatgcgcgwcgaccacagtatyccaacccccctgtgcaaggagaagtgatggagggtgctgacaaccagggtgcaggagagcaaggtagaccagtgagacagaatatgtatcggggtyacagrccacgattccgcaggggmmytcskcrcsmrrgacagcctagagaggatggcawtgmarakgacarwkwawwtyamrgaratkmracyyawrrwcagcagscacytcaacgtcggtatcgccgcaacttcaattaccgacgcagwcgcccagagaaccytaaaccrcamgatggcaaagrgmcaaaagcagccgatycaccagytgagaattcgtccgctccyraggytgagcasrrmrkgsytrrgyaradgccggcttaccatythwmccatcatccggtttggtcatccaacaagaagaaatgaatwtgramttccmgcawtaaraaatgamcaaagdttggagytgaagmccttawgtgcttkytttytgcccgttgwccmgatccaytagaactgtytscatkwtytatgcagcmtgggskttwwatwatttttacytaaaratgtctcttkttggtamtgmcaaacgtgttttttwwraaraaaaaaaaaaarvmctsskkyybytcrwkacacctttaacggtttttaaattgtttcatatctggtcaagttgagatttttaagaacttcatttttaatttgtaataaagtttacaacttgrwwwwwwmaaaaaarwmaacaaactgyaagcacctgttaataaaggtcttaantggwhwwhaaaamrraawwmaaaaa

SEQ ID NO: 4433 - DNA, 1400 bp, Rattus norvegicus
ttggacaccatcatgaagtgtgccttcagccaagagggcagtgtccagttggacagaaaatacaagtcctacatcaaggcagttgaggacctgaacaatctcttttttttccgtgtacagaacatgtttcatcagaatgacttcatctatagtctgtcctctaatggccgcaaggcccacaatgcctggcaacttgcccatgattacacagaccaagtgatcaaatcaaggaaggctcaacttcaggacgaggaagagttgcaaaaggttaagcagaaaagacgattggatttcctggacatccttctgtttgccagaatagaaaatggaagcagcttatctgataaggacctgcgtgctgaagtggataccttcatgttcgagggccatgacaccacagctagcggtatctcttggatcttctatgctttggccacaaatcctgaacaccagcagggatgcaggaaggagatccagagtctcctaggagatggagcttctatcacctgggacgacctggacaagatgccctacaccaccatgtgcatcaaggaagctctgaggatctacccacctgtaacagctgtgagcagaatgctcagcacacctgtcaccttcccggatggacgctctttacccaaaggtatcacagtcatgctctccttctatggccttcatcacaacccaactgtgtggccaaatccagaggtgtttgacccttatcgatttgcaccagagtcttcccgacacagccactcattcctgcccttctcaggaggagcaaggaactgcattgggaaacagtttgccatgaatgaactgaaggtggccgtggccctgaccctgctccgctttgagctgctgccagatcccaccaggatcccaatccccataccaagactcgtgttgaagtccaagaatgggatctacctgcgtctcaaaaagctccaataatcttgacagcacaagacagctccaacagcatgctgtctgccatttgtctttctgtcagtcactcttgtccccactccatctgctcacatctcattctttcttctcaccttgttcacctccacccaccttmtgctgtgcttctggtctccttgtctgtcagtctttctatmtcgacttctggaakttctacctgcttttctctctacctggcccctacctgacttcatgtttgaccttgaccttaatgatctccctaaattacaccstgccttctcttstgcatatttccttstattmtaytgtttgtctgtgcttaaattgagctttataccaatgtcataattgattayaatagaagtattgccctatgattcgatataccaggtgttwttcatgatttcattagaataaagctcaggtcattgcarwaaaaaaaaaaaaaaaaa

SEQ ID NO: 4434 - DNA, 1400 bp, Rattus norvegicus
agtacttttgtkycctactttaaatcctgtccttttcatttctaaatgttctattggcagagacggttgcctgggcttgcctggacttcagacacataggcaaagctagtaagctagttggagtaaccagttcctgttcatgtgggaatagtagtcaacctggttatgttctttacctatgccagtaatttcttaccagaggtaaagtacattgcaaagctgacaactgggaacaagctgagggtgccttagaatcattgtctcttaccagctttacacctcttaatgcaagaggattatagaaattacagaaggaaagggaaggttaaccacatattacttcaaaatgtctttctcaaagtttaagaaatgtggatatcctttaaataaatctagttaccaaatgttgtacttgattgataaaagatttttaaaaaggctaaatcatagttaatgagccaattgatgagagcttttgaaacttgtttctcagtgacaggctaacaaagacatgaatttaagtgaacatttgccttgtgatgtctgatttttaacattgtagatatctaagtaacagaagaattcttacttccccacaatttaagcaaaatcatttttctcacctggaaaaaaaaacatatggcttaaaatgctttcagagttttatttctcaaattaaaatctggtcacttgagatccattttgttctctggttwaamrgykmwaaggtttctcttaacagtcttttcagcagcaaaagcaaggtaagtatataagggacaacagttatgctggggctccttgtgagggaattacttcctgtttctcctttagwatttgtctgctgcagtttaaatataagtaaagccttctgagatgtttagtagacagaksrmacgaaabgkywykwktttaaagtgagtgtttttcttytcaactgatctaaagatgaaaacaaaatatcgtacgtagaaatattttggyaakakkykkacamgmkktcctgtgtywyttgtcytawtttccttgmtgcatttactgtaggttgcacacgaactcttactctcttgtaattgtgcctcagacttctcgaaagtcgactttctgagttgcccagatcttctagatcckacgtgttagccttggwyyrtyhttgtgctttctgtatttaaaacttgagctgtactaggcaaatgcaarattawaaatttagctaataggarkttacaaacagttcaratgattatgatttgatttggtttaattgarctgtactarttcawttcawaaggaaatgatactgtagacaaatgtaaataaaatctgtgagtcaammawmaarwrwwrwwwattagaaataaactaggatgttctaagctttgamwraawrwmmwaarmwc

SEQ ID NO: 4435 - DNA, 1400 bp, Rattus norvegicus
ggacaaggcctctgcgttccattacaatgtgctgagctgcgagggctgcaagggattcttccgccgcagtgtcatcaagggagcacgctacatttgccatagcggtggccactgccccatggacacctacatgcggcggaaatgccaggagtgtcgccttcgcaaatgccgccacgcaggcatgagggaggagtgtgtcttatcagaagaacagatccgcttgaagaaactgaagcgtcaagaagaggagcaggctcaagccacatcggtgtccccaagggtttcctcaccgccccaggtcctgccacagctcagcccagaacaactgggcatgattgagaagttggtggctgcccagcaacagtgtaacaggcgctccttctctgaccgacttcgagtcacgccttggcccattgcacccgaccctcagagccgggaagcccgccaacagcgctttgcccactttactgagctggccatcgtgtccgtgcaggagattgttgactttgccaaacagctccctggcttcctacagctgagcagggaggaccagatcgccttgctgaagacctctgcgatcgaggtgatgcttctggagacatcgcggaggtacaaccctgggagtgagagcatcaccttcctcaaggatttcagttacaaccgggaagactttgccaaagcagggctgcaggtggagttcattaaccccatctttgagttctccagatccatgaatgaactgcaactcaatgatgctgaatttgctctgctcatagccatcagcatyttytytgcagaccggcccaacgtgcaggaccagctccaagtagrgrgactgcaacacacatwtgtggaggccctgcatgcckwkgtytccatcaaccacccccasgaccgaytgatgttcccacggatgytaatgaagytggtgagcctccggactttgagcagcgtccattcagagcaagtgtttgcacttcgcctgcaggacaaaaaamttccccctytgctytccgagatytgggatgtccmcgaatgactgtttyyccgtgtcctctgtgttggccacgcagctgaagcttactgaytgcttcctagaggtggrgcagactgaggrgggcaaacmttcytgggcgytgggtgaaagrgacccttgcwtggcaytaaagrgrgtcaaagggttgggtgttttktggctgytgggcagttggggacctactaacgttgtwtkccatytgaaggccttgttgacycaaccaaataaaytagccmggrgrgcmamwwwrwrmarrrwwmwtcaggccctgcccaaaaaaaaaaaaaaaaaacgactaacgttgtatgccatctgaaggccttgttgacccaaccaaataaactagccaggagagccactttgt

SEQ ID NO: 4436 - DNA, 1400 bp, Rattus norvegicus
tgtggaaggtgctgagtsctggagtcctcagatctctagtgtggatgctacaagtaatgaggcgtgcctgggagaagactgatcttggagaatccagattcctctcattgtcttttacctgagggcttgggtgggagcggctgttatggagagcatcttctggctttgggtagtccgtggtacactgtacggcagtcacgaggatctgacattcatagactgtgttttacacttggcactygctggagaaaggaccaaagtgaatccagcttagagcatagacctgagcctggagcagtgtacttctcctgccaacctcccttcctctctcacggatctccagaatgaaggttacagaacaccaggagtgacaaggagggccacggactctcagcactgtggccctgcagatgtggaagtaactgggatctaggygctgagccgacactggcttactcactacatgctctgatggaggaggctcagccagatgagggaccgtacaagacgcactcctgtcaggctggtggcccttctgtcagttgcttcagtacaggacatcagacagtcagcccacacaggtcagagctgcacagttgggacacacgtggacactgccctttcagaacagatgtcagctctctggattctgtggtcgtctggctattctaatgtttactgataatgctcatagggattggtccccaaagggagatgagcaggactcaggtagccctctctgaaagcctcccataagagatcctggctgcccacatgggtttcaagaatgcaggagggctaggctagaaaagagagaggctgtgcgggagcgctggttcccactcttatcymwgtkcscaygrgwgwrcattgctccttcatgtgcacatgcgtgtgtgtgscmmkmkgctgtatacagcacacttgcatgtctcatactggcacatgcatctgtaatatagtttctatgtcaasttatgcctaggagcagaaggtagcccattgtcmaagggctcccatttcaacccaactcctytgcactaagkcagccagtgtaacccagggcttgaaaacaawtwatctaatcctatctmtaagaatacttttatagagtgaataggaggcaagttatgccaaccaataaayagcaaagagtcagggagcttcaccgwtgggacccacacaggaaaagctcggagttgggtggctggctcattgtccccagcagagccaggaaggcatgctcactgtcacctgttgttgagagctttggttggctttggttttgaatgtmgcacaagtgaacaaactccataagagtgtttataaaaattaacttcttaggaagtgaattaaaaacaataaaagccctttgttgrgttaaaaaaaaaaaaaaaaaa

SEQ ID NO: 4437 - DNA, 600 bp, Rattus norvegicus
  misc_feature (70)..(70): n is a, c, g, or t
catccacratgscmwasmaygtsrcmkasgmrragctgccaaasccttmracmagckccaagcccatctntgsgkgcttgcatmcaactgtgatgagcccatgtwwgwcaagcyggtgraggcgctbtbksccsaschccaratcamcstgataaaggttgrtgmcamcaagaaactaggggaatgggtaggcctytgtaaaatcgatcgaraggggaagccacggaaagtggttggyyvcaghtgcgttgtagttaagkastatgrymawgaatctcagrccaavgatgtcatyraggagkrsttyaaatgcwmsaratgartaaayamaattywggytcmwhhwdwaaaaaaaawwwwwmwwhmtttkygkyccsycryrmcagacaacatagccctcgagggggggcgcggtgcccaattggccctatagagaggcggattacaataaacggggcgcggtttacaccggcggggactgggaaaccctgggggacccacattaaaacgctggagaaaacaccctttttccattggggaataacaaaaaggccgccccgatttgccttccaacaatgtgccaccttatggggaggggaa

SEQ ID NO: 4438 - DNA, 600 bp, Rattus norvegicus
ctggsagwggctgwtrattggaksdrcmryrtaakgtttwtttyaattktttwtatggatagtytgagcaggtkcggttctgattctgattgctatcmgtaatgccccmaactttcttgtgaggatctgaaacccaaaggyrgsarttmkgagakkgggacatggatcttgcccaatcagaagctgktttttttttwwwwaaaaaaaacctgsagagtcaggagcaccataagatatgatggtctctatgtgccaacgggttccccgaagcgggtcacawacacatacggcaacaccacatgtgaatgatacttttaaactgacaatttcgtcytctctgaaaaaagacatacacagagtttgtataacactttacttaacgacacttgctagaraattacmtystgttttwaaaaaaaatwwggaaaatgtaaagaagaatatctaatatgtcagagaaagttgkaaacaaatcacagctcgcatccccatagtcgcagatcacgatgtaaatcactgtaattaaaattggtgttaaatcctttgggttatccactgccttaaaatgacacttatttccttaaaaaaaaaaaaaaaaaa

SEQ ID NO: 4439 - DNA, 600 bp, Rattus norvegicus
ccctcctgagggtggagagcagctaatatacctaggatcatggtggaggcctttgggggatcttaaagtggttgttactgcccaaggaggcatcatccctccccaagagacacacacttccctgaaggagctctcagaggcagcacaggagatgactgagcagtgcctaaaactcacttgctgatctctccgccctcctcacctcactgatggaaagatggttggtgacaggtgacagcactgaatatccttaaagcccacatctttaaggatgtttgctgcctgctgtgtagttggagccccgcacattatttctgcccagaatttctgagccacttttaaatcccttccctagtttcttttagttgcaatgtgtgtgctaattcaggcctaacttctgagaaacaaggacaaggatgctgtgacacccacctcagaggtcctggcaagtcacagggcctccaaggttccccaggtttccaaggttaccaattggaggataaccactggcaggtactgtcctaacgtacttgcacaggcgcttatgtgtaacacacacacacacacacacacacacacacacatgccacccacacacaa

SEQ ID NO: 4440 - DNA, 1400 bp, Rattus norvegicus
gagtggttcaagagccgcttcacggtgckaaccgagagcgccgccaagaacaccgacgcagtgcgcgctgccaaggacgaggtgtcggaaagccgccgcctactyaaggctaagaccctrgagatcgaagcctgccggggtatgaacraagctctagagaagcagcwssaggagctggaggacaagcagaatgcagacatcagcgccatgcaggacacaatcaacaaactggagaatkagctgcgaagcacgaagagcgagatggcyaggtacctgaaggagtaccaggacctyctcaatgtcaagatggcattggacattgagattgcagcttacaggaaactcttggaaggcgaagaaaccargctcagtttcaccagcgtgggtagcataaccagcggctactctcagagctcgcaggtctttggccgwtctgcttacagtggyttgcagagcagctcctacttgatgtctgctcgagcattyccagcctactataccagccacgtscaggargagcagtcagaggtggaggagaccattgaggctacgaaagctgaggaggccaaggatgagcccccctytgaaggagaagmagaagargagragamgsagaaagagsmgggggagrmagaggaagrtgcwgaggmgrmasragctghcaarratgagycwgaasakgscmaagmagragamgghsgwgagrrwgaagmgsaagasaccmmmgartyagmagaggamgagmagamagasgarastgctgrsgakgagcmagctgctmmbamgmmagatygagccccmttccyaactatcccaggaaaaaagtctccccaaatcaggtcaacctcatcaccaaaccaaccagttgagttccagatcctatacagattaagaagtcaatatatgtataattctgagatgacttaggttggacattcaatgwwgwgctatgactttcctccttatgcagagwatctgyttgctwgcagagtggctwwctgscttgctgccaacctgwgcatggtccatgctwatgagttcakgawctacggbaatgtgaawyacacmgatgtttacamtaatartaataaaaaarccacacatacmcaacwtgaatwaatgaattcactaatgkkcatgtgcaacttcatggaaaaatartcatttgaaacttyarkggttagaaattaaagacctcgagktwtgtgcaataaatagtaaataaagttacagtggatgamamamamaacaaaatatatcttcacttgtccgtgtcttttttttcctttttaatatttctccgggggggggccggacccaatttgcctttagggggtggtttacaattactggccggggtttacaccgcgggactgggaaaccctggggtaccacctaat

SEQ ID NO: 4441 - DNA, 600 bp, Rattus norvegicus
ggacaagggttgaatatgaccccaagcatggtggctcccactggtttaccagcagccatgagcaacccccggatcccgcaagccaatgcccagcagtttccatttcctccgaactacggaataagtcagcaacctgatcctggctttactggagctacaactccccagagtcctctaatgtctccccggatggcacatacgcagagtcccatgatgcagcagtctcaggccaacccagcctaccagcccgcctcagacattaacggatgggcacagggaagcatgggcggaaacagcatgttctcacaacagtccccaccacactttgggcaacaagcgaacaccagcatgtacaataacaacatgaacatcaacgtgtccatggcaaccaacacggctggcttgagcaacatgaaccagatgacaggccagatgagcatgacctcagtgacctctgtgcctacatcagggctgtcctccatgggtcctgaacaggtcaatgaccctgctctgaggggaagcagccttttcaccacaaaccaactgcctggaatggacatgatcaagcaggagggagatgggtctcggaaatactgctga

SEQ ID NO: 4442 - DNA, 1400 bp, Rattus norvegicus
ccatctatcaccacagagatcctcaagtcggtggtggctcgattcgatgctggagaattgattacccagcgagagytggtctccaggcaggtgagtgatgacctcacagagcgagcagcaacattcgggctcatcctggatgacgtgtccctgacacatctgaccttcgggaaggagttcacagaggcggtggaagccaaacaggtggctcagcaggaagcagagagagccagatttgtggtggaaaaggytgagcagcagaagaaggcggccatcatytctgctgagggtgactccaaagcggctgagctgatcgccaactcactggccaccgccggggatggcctgatcgagctgcgaaagctggaagctgctgaggacattgcttatcagctctcccgctctcgkwacatcacctacctgccagcagggcagtccgtgctcctccwkctcccccagtaaggccagccagccagggcctccatcgctytgaatgacgccttccttytgccccaccccagaaatcactgtgaaatttaatgattggcttaacatgaaggaaataaaggtaaaatcacttcawawmwmwwawwawmaaawraarmwwttattgttacactttttgcccactttcataacaaaattgccaagtgcctatgcagactggccttccaccctgggtgctggcagtcggcggaagaaaggcarggcartgtgtgtggtggacggkgagccagckggcagcctgagtagaccttgagcctccattctgccatatattgaagatttacagacagtggkgcacacacgtgaaccaaaagcaagccctcaatttttccagccatacgaayycggacasabgmrgcksasgagggcctragraagtgstctgtyttaactgtaagsccakwssytmttaaccgtgaccagcggaagcaggtgtgtgcgtgcgamtagggcatggagtgaakaatctgcccatcacggtgggtgggcmtaattttgctgcccccaccagagacytaaactttggatagacttggatagaataagaggcctggactgagatgtgagtcctgtggaagacttcctgtccaccccccacattggtcctctcaaataccaatgggattccagcttgaasgakwgcatctgcmrggrhwgarmacacmtgcyaagswvmygtsvrymtgmctwcycrswccctctyttmgagattgcccttccttcccaagggctstgggccagagctccgaaggaagcaatcaaggaaagaaaacmcaatgtaagctgctgtcaataaatgacacccagmccctcmarmhrmaaaaaaaaaaaaaaaaaatggaagcggccgcaagcttattccctttagtgagggttaattttagcttggcact

SEQ ID NO: 4443 - DNA, 1169 bp, Rattus norvegicus; identical to SEQ ID NO: 347

SEQ ID NO: 4444 - DNA, 1400 bp, Rattus norvegicus
gaagtatttgatgctttaatggtggattcccaaaagtgctccgatgtatctgagctgtccagttcccccccaggaccctaccaccaggagccttacatctctaaaccagaggagcggttcaaggccccgcccatcctcccgcctcacctgctgcaggtcatcttgaacaaggacacgggcatctcttgtgatccagcgctgcttccggagcccaaccacgtcatgctgaaccacctctatgcactctctatcaaggatggagtgatggtgctcagtgcgacccatcggtacaagaaaaagtacgtcaccaccctcctctacaagcccatatgagaggatgagccagccgtgggccacgggacagcaggcgggagccgctgggctctccgtgtgcatgcgcatcctcactccgggacatctcacccccacatagtcctccttgaaggtctgtccaggcacagccagaaatcggatggacggcagaccgtggtcccagcaccgcaggcagtgcgccaggctctagtgctctaagcatcatccctctgctggcccgagatgtctacagccagacctgaatgctggttcctgctagaaaacctaggacaggaactgaagtcaccaragscctcatcatccctgctgaagcctggcttggaagaaagcagtgctcggtcttgcctgtccttccgaatcacagcagtagattgtagactccatggaatttcagtgtccaatttccagatgcagcttcgcaatcgattcctgacactgtgcactgagaccttcttaaccasagwggctggctgtccactctcacttaaggcaataagtcaccaggacgagactatrggtcatgtgactactgagcaataatcgttstcaaacmgacwtcagraaccactsccatttytccatcaagccagacgatcctkaggactgaccaccatgggaggttgtccaccttatttcagttgcagtgtyggscrhgktassgtgacaacctggtygaagtgcccgccctctttttagttctagcacgtgctactcagctgggggccgtgtctccagtgagcagagagtgtacacggtggttactattgccygatcctaagagagcttggcaccytgcggcagactgctaggttccagcagggttggcacgagtgaacctatgtgtgctcagtgtgatttccacagtgatgtcacmgacgyrcccattggtacaggctcctgtcacctgtcagcataggtaggcacaagctctgtggtgtccgctatttggttaaacctgagttttgggtaccttttgttactgttttcaaaacacggacttgctgtcatcttgatgtacaagtttcaataaagctttgkaaaataamwrraaaaaaaaaaaaaaaaaa

SEQ ID NO: 4445 - DNA, 1400 bp, Rattus norvegicus
ctgagacttgctgatcctggttgcatgaagattcagctttcgtggttcgggtccctggagtcattcctctgccctgagaggaagatgaaagattcttcttcatcctttgtcatcacagagattttgccgttgctgcagtcagtgttaccgctgcgtgtgtcccgtcccactatggcccgctctctgaccctctgtgcactgctgcttgctggagaagactggactccagccgttgctgcccccttcattccctggtgactcttgctgccttaactggtcattttacagactgtagcttcacaggaatgccacctgcgtaaagctgctgtggactggggaattctgccctggttgtacagatctcagaaatggttccattgtctgctggttgttccagagaaaaatgactgatcctgaactgtcctggacttgacactttcgctgctattgtagcagccattactgctgcagacattgtgtctgcagtgtctggagttatcctcccccaatctattgttagacaaacacagtgggtaaactttctggagtagttactaacaattgggaattctaaattctattataggagcggcttgactacggcccttggtggtaacagctgaggtgaaccagatgaggtgcccgctatttatcgggagtggctctgtttggtgcagccctatgctgtggattagtgttcatgctgtggttggtttgcaaactcagatctcaacagaaacgtgacaaggccgttatcactcaagcacttgtggtcattgtacaaggggcctcccctggaatttggttatctatgctcaggaattagttggtatctgagttctctgctcttgcaccccatggatctgtggatccattgcactgggatgagagagactcaatgatcctttgatcagcccttccacatcgctgaggtttcctcattgcacgcgatagggtgatcatgatttgttataaaataaatgatttgtgataaattataaataaatagggggagatgtagagggccgctttaacattcgccaccacaagatggcgctggcttccactgtgccccacggggaaggccaggatagcttctgccattacaagatggcgctggcctccgccgccgagccgacttcctttcaggaagttaactgtgtgcgcatgtgcaagagtgccttcgtgccaggtctttgcccactctggggcgtgcctaatgagatcatgggtaagcgaccaatcaggtgtggatgtgccgcactagggtgtatatgagccgcgccatgcaggcgcgcggggctctctttaagatttaataaaagttttggctgctgtaaggaaaaaaaaaaaaaaaaaaaaaaaaaaaaaaaaaaaaaaaaaaaaaaaaaaaaaagccg

SEQ ID NO: 4446 - DNA, 600 bp, Rattus norvegicus
ggctgctggcctgkatatggaccctgagasctgcccctgwcctactggtggwtcctgcacctgctcggacaaatgcaaatgcaagggctgcaaatgcacgaactgcaagaagagctgctgctcctgttgccctgcaggatgtgagaagtgtgccaaggactgwgtttgcaaaggcgaagagggggccaaggccgakaaatgcagctgctgccagwgaggactcccacacagcctatgtgaatagwgctgcgtgtccctggtggrgcgwggctgwtgcccccctcyctggcttyctgctccgsskcgtgtgaataaatcccatgcacagcawrwraaaaaaarrwmaadhrmmawmarwaawraawmacctcaagagcataagaaaactccaggggggacccggtacccaataccccctataggcagtcgatttacaattacttggccgccgatttacaccgtcatgattggaaaacacctggcgtttcacaccaccactctaaatataacaaacagctttaaatgcctgtcaaagaatccccctttcggccaacttggcttataacgctaaaagagcccatactgatatcgcattcctac

SEQ ID NO: 4447 - DNA, 1042 bp, Rattus norvegicus; identical to SEQ ID NO: 351

SEQ ID NO: 4448 - DNA, 75 bp, Rattus norvegicus; identical to SEQ ID NO: 352

SEQ ID NO: 4449 - DNA, 600 bp, Rattus norvegicus
gctttcccatcagggcttcctcagctcttctgctctcagacagaaactattctctgttcctctggttcgcagaatgtctagatttgacccagaaaacttcatkacacagctacttcattttaacaaagagcagtgtttaatggggaactacccttcaatcctttaccctccccttttctggccaagtaactgcttgaaaacctaaagcactaaacattgtaggtctcctctcaaaacctcaggcctgtctggtgtgttctgaaacgtttgtgtggaaggagatattcagctgagaccctgggaatgtttgctgtgaacttgacctcccttggagggcatggtgctagataaacttggaacctaggactccaggttgctaggcrgatgccctgacactaagccacatcacacattagctctgtgatgcctctttctttatgaaggaccaagctgcccacatactaagtgagattaatttaagaggaatcctgtcctaacactgtatacttcattccctacaactcaacttacttgtatgaaccatgattgttaaggaaattaataaactacatttwtargtamaaaaaaaaaaaaaaaaaa

SEQ ID NO: 4450 - DNA, 600 bp, Rattus norvegicus
ggggttttgagtttggggagaaaagcttgaaaaggtttgcattttaaagtgattcaacattgttcaactgttttttatacacacacacacacatatgtataaataaataatttgaggtttgtttaaaacatcgctttttaaagactttaaaaatgctcaacataattcattatcttttcaacttcactttttagtcttttggaaaaaagtaggaagtagtgactgcttaagggcaagcagcagtaaaacacacacacacacacacacacacacacacacacacaaacatgcacacactcgcatactcctaggaccagttaggtcacatgtttttaaagcatattttctgacttcaaagccttgtttctgaaaattaagcatgtacatttataacattagtcttcaccagaggagctctggccctctcttgaattccaccttaacatccacagagaccagcccatttcttagcccctcctaccagcgggagaagactttctcaaagtcggaactgtgaagggctcccatcagggctcccgactgacagagagctagaaggcacagagaaacctgaggattctcatttaacatctgggaact

SEQ ID NO: 4451 - DNA, 322 bp, Rattus norvegicus; identical to SEQ ID NO: 355

SEQ ID NO: 4452 - DNA, 90 bp, Rattus norvegicus; identical to SEQ ID NO: 356

SEQ ID NO: 4453 - DNA, 600 bp, Rattus norvegicus
gtccctgaggagcaaactgatmcaaaycatcttcaccacaattggactcctatatccattccctagggattgctctcaagmaatgttgaatggcgacaccacctctggcctctataccatctatataaatggtgacaagactcaagcactggaagtctactgygatatgacctctgatggmggtgratggatcgttttcctgagacgcaaaaatggacgtgaggacttctatcgaaactggaaggcctatgcmactgggtttggagaccgcagagaagrttctggcttggactggrtaacctgagcaaaatcacagcccaagggsaatatgagctccgggtggacctacaagaccatggggagtcagcctatgctgtgtatgacaggttcagtgttggagatgccaagagtcgctacaagctgaaggtagaaggatacagtggaacggcaggtgactccatgaactatcacaatggtagatccttctctacctatgacaaggacacagactcagccatcaccaactgtgccctgtcctacaaaggagctttctggtataagaactgtcatcgtgtcaaccctgatgggcagatattgggg

SEQ ID NO: 4454 - DNA, 1150 bp, Rattus norvegicus; identical to SEQ ID NO: 358

SEQ ID NO: 4455 - DNA, 1400 bp, Rattus norvegicus
gcggccatggaggcgtccgcctacggtgacttcggcgcctgcagccagcctggaggcttccaatacagtcccctgcggcctgcctttcccgccgcggggccaccgtgccccgcgctcggctcctccaactgtgcgcttggcgccctacgcgaccaccaacccgcaccctactcggcagttccctacaagttcttcccggagccgtccggcctgcatgagaagcgcaagcagcggcgcatccgcaccacgttcacgagtgctcagctcaaggagttggagcgcgtcttcgccgagacccactacccggacatttacactcgtgaggaactggcgctcaagatcgacctcactgaggctcgcgtgcaggtctggttccagaaccgccgggctaagttccgcaaacaggagcgcgcggccacggccaaaggcgcggcgggagcgacgggcgccaaaaagggcgaggcgcgttgctcgtcggaggacgacgactccaaggagtccacgtgcagccacacgcccgacagcaccgcgtcgctgccgccgccgccgcccgcacccagcctggccagcccgctcctgagccccagccctctgcccgccgcgctgggctccgggcccgggccccagccactcaaaggcgcgttgtgrrcaggrgwggcgggcsgygrsggtggcgggcsmskcwcgggcrcwgcagagctgcttaaggcctggcagccggcggaacccggaccaggtcccttctctggagttctgtcctcctttcaccggaagcccggtcccgccctgaagacaaacctcttctagccgcgggcgtctgtaggcaaccagcctgccccgagagacacccccaccctactggacctgacattatccctccctatacccggcagcctgcctggaagctycccgtcgsccccactacccagtgtctgatccctagaccaggtcccccttcgttgtaaaacaagccagggccactctcgtctggagtactaatcaccaggacccccctccagggcagcggaagccctttcttgctaggcttccttaggagcagggatcaaattgcacctgtccctaactcagagcccagtcatagaggctctaagaagccgagctcctacgacttttcagctagctgggccactcactccttgaaatcaagcaacctgaagagtcccaccgctaatcccaccctaacgagtcacctcccttccctagccagtatgtcgcagagattagacactagaggggaagagctgtcggggaacggaacaaagtggtttccttttcctttattttttttctttgaaaaacgtgtaatttattaaggtgattttgctcaatccaaataaaacttaatttattgaagacawmaawaaaaaaaaaaaaaaaaa

SEQ ID NO: 4456 - DNA, 600 bp, Rattus norvegicus
aactcatcagcgaattcacaccggcgagaaasccttccaatgcaatgagtgccagaagakgttcagtcaggtctcacacctccagtcscaccagagggttcacacaggggagaagccttacaaatgtgacacctgtgggaaggccttcagtcaaaagtctggtctccaagtccatcggrgarttcacactggggagaagccgttcaagtgtgaggagtgtgggaaggaattcatctggagctcagggcttagtgctcaccggagggtccacacaggagaaaaaaccctgcacggttagcagtgtgggaagggcttcagtcagacctcacacttccgattaacagtctgatccaatgtaaacacagcaggatcattatatcaaggctgttacaaaataattgaaaacaaagtgtaaggtagctagtatacaatgagaaaaagcagtatgacacatggtgaaattatacaattagtcagatagcatcctggtaggaaatgacacatatagatttatatttaacaattttgcatcccctgtatcccctggatatagaattaaaagctcaatcagatgcaatcaggaaaaaaaaaaaaaaaaaa

SEQ ID NO: 4457 - DNA, 1400 bp, Rattus norvegicus
ctttgccaccgcccctggaatagaaaagtacagtgcaggacaacccttccctccctcttatgtacctattattttgtcaggatttagtggtcaaatgacattcatggagagagtggaaaatatgctatgtttactttattttgattcctggttcgagtcatttcctgctaaggattgggatccatttttcagcgaaattttaggaagacccactacaatggttgacacaatgaagaaagcagaaatatggctcattcggtcctactgggacttggagtttccccgcccatccttgccaaacattgagtttgttggaggacttcactgccaacctgccaaaccattacctaaggaaatggaagactttgcacagagctcaggagaacatggtgtgtgggtgttttctctggggtcgatgatcaggaacataacacaagaaagggctaacacaattgcatcagccctggcacaaattccacaaaaggttttttggagatttgagggcaagaaaccagacaccttaggacccaatactcgggtgttcaagtggataccccagaatgaccttcttggtcatccaaaaactaaggcttttgtaactcatggtggagccaatggcatctatgagtcaatccattatgggatcccccccatggttggcatccctttatttgcagaacaacgtgataacgttgctcacatggtagccaaaggagcagctgtttctatagattttcatacaatgtccagttcagatttgctcaacgcactgaaggcagtcatcaataacccctcctataaaaagaaagtgatgtggttgtcagccattcaccatgaccagcctctgaagcctctggacagagcagtcttctggattgagtttgtcatgcgtcacaaaggggccaagcatctgagaccacttgcacataaccttgccctggtatcagtacactctctggatgtgattggattcctgcttgcctgtgtgctggccattgttttacttgctgtaaaatgctgtctgtttctttaccgattttttgtaaaggtggcaaagaataaaagggactagggttctttaagaaggaaggctgtgatctgtggtcgtgatrggcatgactactccctttattgctggaactatatatcagatgctccttgttttagaagacattgagctaattgatttatctatagatgtymcactatargttaagaaagtawccrttttaaatctttattttctcaaatmmaycgttttcatattgattctcgatgtgwtagtgctgaggatartgataatccctgaaacaccaacttgcttatgggcaaagatataggaagcctaaactttttactgtgaattttcagatatttataaaataaaattgaataaaatt

SEQ ID NO: 4458 - DNA, 1007 bp, Rattus norvegicus; identical to SEQ ID NO: 362
  misc_feature (387)..(387): n is a, c, g, or t

SEQ ID NO: 4459 - DNA, 197 bp, Rattus norvegicus; identical to SEQ ID NO: 363

SEQ ID NO: 4460 - DNA, 256 bp, Rattus norvegicus; identical to SEQ ID NO: 364
  misc_feature (57)..(57): n is a, c, g, or t
  misc_feature (114)..(114): n is a, c, g, or t

SEQ ID NO: 4461 - DNA, 600 bp, Rattus norvegicus
cagtaccagttcaacaacctgggccagaggagcttccctgtcagcgtggtcttctggatccctgtccagatcaacaaggtgaccatatgggatcctccccaggtcaccttctcccagaacctctcaagtgtctgtcgcactgagcagaaatccccctctcactccaagttccaggatgagcttgaaaggaccccagtgctgaactgctctgttgcagtctgcaagagaatccagtgtgacatcccttccttcaacagtaaagaaatattcaacgtcaccctccagggcaatctgctatttgactggtacatcgagacttctcatgaccacctcctgcttgtgagcactgccgagatcctctttaacgactccgcatttgccctacttccggggcaggagacgtttgtgaaggctcagacagagaccaaagtggagccatatacagttcacaatcctgtaccactcattgtgggcagctccgtcggaggcctggtgctcttggctctcatcactgctggcctatacaagcttggctttttcaaacgacagtacaaggacatgatgaatgaagccggtggccaagatggcccacctcagtaa

SEQ ID NO: 4462 - DNA, 1400 bp, Rattus norvegicus
aaaccttaagtatgtaaagctcagcaggagaaccagaaaggattaacaaaggaagattttttaggtgtgccatgtgctttcaaagtgtgtattcttcaagccctgaaacttgaactcaacctcagcagcaatgttgatgcaaccagtccaatggaacagcgcatctgtcccttccactactctgagaaaacagaaatgtgaagtgcccagcctctgctgcctctggcaagaatgcatcaatgtttacaaatccaatctgaaatcttggttctaattgcctcgagacttattgtgaaggaaccactgaccgttctcagctgagctggagactgcagctcttcgcagcgtttgccttttcttctttggatgtcaatgtcatcaacgcctcccacttgttttgttctgtgcactggagtctgagcatttaccacagataccacatgaagctttcactccagggctgtttggcaatgcagattccttttgtaactattagtttttaacctggggtgggagggaagggacaccaatgtcctagctgtgttctgactctgcagtgaagacactgcatgttgttttcactactgtacacttgacctgcacatgacmrggaaaaaaaggtggaatgtttaacatgccgtatcagctcagggtacttgccmatcagaaataaagtgggatagggaagtgtgtctttcaaatcaagggtactaaaggcccttccgctgcagtgcgtgagaggtatgttgtgtacggctgtatgggtgtgtgtttgcgcgcatgtttgtgcatgtatggctgtgcatgttmtgttccatccgtgtgggaaaggattagaattgtaagcttttatttattgttttagaatgtgacatagtgagcagccacamttgggggargkgraaggtaggtkaagmtskaagattgcwyyagatgccttaaactatgcacaaagctaagtgaccaaacttctcattttgatttgaaaagtgcattgttttcttgtcccccctcctccactttgatgaaatgttaccctttggtggatcttttgatgtgaatagatgttttctagggtaaaatttaaggactaattttagacttaaacactccacttttgtaatgtgttttcagtggtcttatgcatagcaagcacaactgtaactagtttaagagaaacggtgctttcttttagttaatttgtattgcccttgttactgttaaagactgtttattatgtttacagtttgttgcaacagccatcttcttgggagaaaacttgagtgtaaagccatttgtaaaaggctttgcsacactcatttaaacatgtgccttgtwgctgttacctttcgatgaataaaaactggtcttttctcawwwwwaaaaaaaaaaaaaaaaaa

SEQ ID NO: 4463 - DNA, 108 bp, Rattus norvegicus; identical to SEQ ID NO: 367

SEQ ID NO: 4464 - DNA, 99 bp, Rattus norvegicus; identical to SEQ ID NO: 368

SEQ ID NO: 4465 - DNA, 600 bp, Rattus norvegicus
gagcattcagtgtttttaaccaaggagcattttttccagccttaacagtcagtttttttttttttttttttttccggagttggggaccaaacccaggcgcttgcgcttgttaggcaagcgttctaccagtgagttaaatccccaaccccttaacagtcagttttttaggtggagatattcccaggatgcatttgggagactcgggtcaggtcaaacacccaaggcaacaccgtgaagcaggtttattgttgagccctataatatgttttttccacaccttgtcacctcctttttcatttattccttggttctgtcactcattaagcatttacagcttatttctggtgccaactaacttgctggacagaaggaagctgggaatgacaaagggcttgccctggagaggtatttatctcaggggaagataaggctcaaataattgtaatctaattgattagaaccaggctaggcagttgcccggctggtactgggacaggggcctagacaagtgttgctggtccagtccttctttagtttaaagatttgtgtgtgaatgtgggagttagggcatgtagaggtcaaagggcaacttttctgcag

SEQ ID NO: 4466 - DNA, 600 bp, Rattus norvegicus
tccagacacgacatgattggggaagtgattcttgataatttatttgaagtctctgatctctccagggaagccacagtatggaaagatatccactgtgcaaccacagaaagcatrgacctgggcgaaatcatgttttccctttgctatttgccaactgctggtcgcatgaccttgactgtgatcaagtgcagaaatctgaaggcaatggacattaccggatcatcagatccttatgtcaaagtgtctctgatgtgtgagggccgaagacttaaaaaaagaaaaacaactacaaagaaaaatactctcaatcccgtgtacaatgaagccattattttcgatatccctccagaaaatgtggaccaggtcagcctgtgcattgcggtcatggattatgacagggtgggacacaatgaggtcataggtgtgtgtcgaactggactwgacgctgagggtcttggaagagaccattggaatgaaatgctggcctatcaccgaaagccaatcacacactggcaccccttgctggagttacctggccgagcaaccagttttgacagtcaaggatcctgttcttctcccaggccaccgtccacaccataa

SEQ ID NO: 4467 - DNA, 600 bp, Rattus norvegicus
ctacctmtagtaatgggctttatgtgstagatkktawtatccttgagcctgggcaagtgcacaagtctttytaaaagaaacatggtktacttgcacaaaactgatcastttgarrratcattaatgcccttgrarwggttwykkwggktgtgaaacaaawggygrgaawttgaattggtccytcttwttwtwstattgaaattaagtytacttamwttwycaagkcatgwtcatgccstgrttttatrkwcbtrtatcwrkcarwmrayahwsygrwwckygrhvwmvwdrwamadrmhwwmaaataskatctgcaamgktctggagaaaattgtycmytytgttatygaaggwattgsatttaataytcagtttmagtamctttggcraaatttttaatatatcwtagkctttaattcagtacstgaattggmrcctgttmaasrractcmctwmmttkkacaatgcgctatcactttaatcgctatatattgacttacactctatgtgcaattgtatcctcatcatcctccgtccatgttgtttaaaagctactatcttgacgaaagccttaaatctctcaccctttattccaacccc

SEQ ID NO: 4468 - DNA, 228 bp, Rattus norvegicus; identical to SEQ ID NO: 372

SEQ ID NO: 4469 - DNA, 889 bp, Rattus norvegicus; identical to SEQ ID NO: 373
  misc_feature (744)..(744): n is a, c, g, or t
  misc_feature (749)..(749): n is a, c, g, or t
  misc_feature (758)..(758): n is a, c, g, or t

SEQ ID NO: 4470 - DNA, 600 bp, Rattus norvegicus
agctgggccaagagcatcccaggcttctcctcactgtcactctctgaccagatgtcagtactgcagagtrtgtggatggaggtgctggtgctgggtgtggcccagcgctcactgccaytgcaggatgagytggcctttgctgaggacctggtcctggatgaagagggggcacgggctgctggtctgggggatctgggggcagccytgctgcagctggttcggcggctgcaagccctacggctggagcgggaggagtacgtyctsctsawwgcwytggscmttgccmmcyctgamkcmatrcwcaagcwgttkytssarmysctkgasccctggggtggccagggccccctatcagctcccacctcaagggatgggggacagcactgcctctacgccctgcagagcaataacactatatttatttttgggtttggccagggaggcgcagggccatggggcaagccagggcccagagcccttggctgtacagagactctattttaatgtatatttgctgcaaagagaaaccgcttttggttttgaacctttmwtgaraaaaaaaatatactatggagctcaarwaaaaaaaaaaaaaaaaaa

SEQ ID NO: 4471 - DNA, 680 bp, Rattus norvegicus; identical to SEQ ID NO: 375

SEQ ID NO: 4472 - DNA, 600 bp, Rattus norvegicus
atcagaaggtggccctggatctggacccctatgttaagaagctgcttaatgccaggcgrcgagttgtcttggtcaacaatattttacrgaakgcacaggarcgaytaaggcggttaaaccacagtgtggccaaggaaacagcccgcaggagagccatgctggattcagsagtttaccctcctggttctccaagcaaataagcctggacctatgaccagagtatacagtactattctccaacagctttgtcttggtagacagaagattccarcaaagtctccgtagacctttgatttgtttgcactatgtactcattcatgtagcagcctcaagaaatatgcatayagcaggactattcctaaagaacctccattacagtgtccttycargaawrarmmwmwammwwwtgttttgtttcttgagacaaggtctcaatatgtaaggcaggctggcctcaaacatattttcttgccttagcctcctgaatgctgggatcataataggcatgtgtcagggtgcctggctcaagcctttgtacattttctcccaaagaatgttaagtaaattaggcatcatgtgctagaaaaaaaaaaaaaaaaa

SEQ ID NO: 4473 - DNA, 600 bp, Rattus norvegicus
ggatacggcttttacaccaagttwctgaattatgttgactgratcaagaaagagattggagatgaaaactgaagccagcattcaytgggttagaatccmstgtgtagtatattaaaaaaaaaaaarwawmwaaccaatttttgataagcactacgtttytcatattaaaatcacggaggcmsmcagtgbatasmatmaattctcttttcyayaawmwmawmarmawwmwrrmrwvwtgttttcaacatagttygactatgtggcccaggctgccctakaatatacagtcctcctgcttgaggctcagggttagagctaacaatgttaggttggaggattgcttcccarctaaragtgtggactgtckgctaggcagtgctggcacaggcctttaatcccascactctggaagctgagaggtaggtgggtgggtctcartgagttcgaggccagcctgttytatagagtgagttccasaacagccagaagtmcacggaaaaaacatgtyctgaaaaacaatwaatwaatwaatwaatwaatwaatwaatwaatwaatwaatwaatwaatwaatwawtdtaawtaaaaaaaaaaaaaaaaaa

SEQ ID NO: 4474 - DNA, 488 bp, Rattus norvegicus; identical to SEQ ID NO: 378
  misc_feature (39)..(39): n is a, c, g, or t

SEQ ID NO: 4475 - DNA, 1400 bp, Rattus norvegicus
aacaggggtctgcgagtgggtctatctgattccccagtggtctgtgccgcagcgctgatcaagtgctgatagcatctgtgcaagagtcgacggcgattccgacacgatgaccctgaatggaggcagcggagcgggcggcagccgtagcgcgggccgggagcgcgaccgtcgtcgaggcagcaccccatggggcccggcacccccactgcaccgcaggagcatgccggtggacgagcgagaccttcaggcggcgctaaccccgggctccctggcagcgactgcagctggaactcggacacaggggcagaggctggactggcctgaaggctcctccgattcgctcagttctggagacagcggctcagaggatggcgtttacaaggtgcatgctgctggggcgcctggtgtgggcaagagtgctctggcgcgcatctttggtggagtagaagacggacctgaagcagaagctgcagggcacacatatgaccgttctatcactgtggatggagaagaagcatcactaatggtctatgacatttgggaacaggatggaggctgctggctgcctggccactgcatggccatgggggatgcatatgtcattgtgtactcaataacggacaagggcagckwkgagaaagcctcagaactccgggtccagctgcgcgcacgcagacagacagatgtgcccatcatcctagtgggcaacaagagcgatctkgtgcgctctcgtgaggtctctgtggatgagggccgggcytgcgcagwggtcttcgactgcaagttcatcgagacctccgcagcactgcatcacaacgtccaggcactgttcgagggtgttgtgcgtcagatacgcctgcgcagggacagcaaagaggataatgctcgtcgacaagctggcactcgacgacgggagagccttggcaagaaggccaaackctttctgggccgcatagtagctcgcaacagccgcaagatggcctttckkgccaagtccaagtcctgccatgacctctctgttctctaagcccaacggcccccttgtttgtgggtcagyagatggatggaaggctgcccagccaactgctvtaaatgtctcagagttggcccaccctccggtatttctcagaactgtcaactatgcacagcctgtctcacggtcatggacagatagtgctgaccagggaggcaactccaaacgccatcgagcctgggcytatggagatgcatgtgcaggcccacgtgcataccgagcagcctgaaccctgctcttggacaggactctgcctttmtccatgtgggtgtctgcctggagggaggctgttctatatgcttgctgtttgtttacatgcagmtttttgtaataaagactatttcctgvcaaaaaaaaaaaaaaaaaa

SEQ ID NO: 4476 - DNA, 810 bp, Rattus norvegicus
ccacactacaaggaacccacgacctggcgaagaagatggcaaagattactactttgtgaccagggagatgatgcagcgtgatattgcagcaggggacttcattgagcatgctgagttctcagggaacctgtaatgggacaagcaaggaagccgtccgggctgtgcaggccatgaaccgcatctgcgtgctagatgtcgacctacaaggagtgcgcaatcaaagaagactgatctgcatcccatctacatctctgtgcagcctccctcgatggwcgtgcwsgagcracgaytgcggcagcgcaacactgagactgaggrgmrcswggcaaagcggctggcagctgcacaggcagacatsgrsassagcaaggagcctggcttgtttgrccwrgwrwtcgkcaaygacrrcctggwtsmmgcctmtsytasactkwmkcwkkcmctktctkaggmaaksargaaagctgasggmactgaasrtgcmtgaggscctgctttatkcsrcrragwgatscctgtggtctaaatctgcytggattatgaggtggggggaactttkccasggcaccaaggacttgtagtargcttcsactgtggagtwgaaggagctaccccytgtctgsccacaaggtsgstytgcaccytgggctggcttgctgaggcccaatgactccgaagaagagtacccmcatytattytccctgggctawttgkgttcctytccgttcctcctgctggagcgggactgacattytaataaagtaattactgarwwrwarwrwmamarmmmwmmaaaaaaaaaaaaaaaaa

SEQ ID NO: 4477 - DNA, 600 bp, Rattus norvegicus
tggaacaatatagcctatacattggaaattcaaaagtcacagtccgtggtttagaagaattcccttctccaatacatttctgtaccagctgggagtcctcctctggtattgctgaatyttgggtcaatggaaagccttgggtaaaaaagggtttgcaraagggatacactgtgaawtcctcacccagtattgtcctgggacaggagcaggatacgtatggaggagggtttgryaagacacagtcctttgtgggagagattgcagatttgwacwtgtggghcagtgtgctgmccccagagawcattcattctgtggrcagrggtttcccacccaatcctaatattttggattggcgggccctgaattatgaaataaatggttatgwagtcatcaagccccgwatgtgggmcaacaaaagctcatgaaaatgagatgatcagkgtghwcgaggtcaaggtgscagaactcactcwatctggagttttttcttcttwatgaatgtcctgtctamatatctgccaaataaraatcctatcaaattctaaaaaaaaaaaaaaaaaaaaaaaaaaaarwwwrrmrrmmrmaarctattccatttag

SEQ ID NO: 4478 - DNA, 924 bp, Rattus norvegicus
gagcttgaagtactcagtgaaaaatgatgagaaaatgtttagattatggatcctatttaaacagtagtttaaatggggttcagttctggacagaggatattagggatgtaaaagaattaaccttctgaggtgaaaagtttactttggcttaaaagagatacagtctattaatcactttttcagaatcattagtgcttattttttggaatggaagcattactttctcaaaggaaaattttattaatgagtgtggctattttccttcttctgactttagtttttaacacagctggtaattatcaagacactgcatttcaaaacctaattttatataggattcttattaccttgaccttaccagtagcatctcctggatagaatttttgtactktgaacactsccatktgcktaaatgtgttgctaagagtaacgtgctgtagagccagcagtgcaaatgccwtgtgctgctgataccttgggctcagttttaaatgtgaaactgttaaatgtcmccagattattacctgatcacarccagcacagtagtgatggtcccattactgtttacywasmatwggywcrargtgaaaatcaaaatktcaaattymtgaagtyctactycawaayttaamccactaagagtttaaatttggagccatttccatgggtgtaactggttgcagggactgcagtcaagaaggacaaagctggggaccttccaggtataatacmgacmcgagactgagacatrgcttttctaamtgcgtggtcgagcaacactcgttgcaggatytaattgcytgttactgtdtkctgcacctstggtaattttaagtktcaatavttgtcagtcttaataaaawtgagmctaamtattgaaawaamwwwradamawhtttawaarrmraaaaaaaaaaaaaaaaa

SEQ ID NO: 4479 - DNA, 600 bp, Rattus norvegicus
tagctaacctttcagtagagctgactgggcaaagcatatgggaacggttctgaaggacacagtgaaatcagtgtacgggaactgggmrcraskgatcctgggaagctagggytaattcagaagtcttctattagcacctcctgcagttgctcttcagtaccatgaagttaggctagacacgtcaaacctcagtgattgggcaatgtwatctgtggaagcccagatactctcaaagtcatcaaacagtgtttataactgtcaaagaaatttgtgtggaaaatttctccagrgcttcccmrgttgataaaaggcatgaattattaagttgtaaaggtacttgttagtgttaacaaccaattaaggtgttaccaaggaatctttgggagtgccttcccytgagccccaaaatgggccccaaaagataattactgatttattttgtgctgtctmatctgtgaaacctctttgtaatactgtatcaacattactttattattcccacataatcaggaacatgtaaacatgtacgtattttaattaccaagaattggaaataataataaaaaaaaatgacctaaaawrwawrmwaraaaaaaaaaa

SEQ ID NO: 4480 - DNA, 1051 bp, Rattus norvegicus; identical to SEQ ID NO: 384

SEQ ID NO: 4481 - DNA, 600 bp, Rattus norvegicus
tgtaacgtggctgatctgaggtcacttggaatttgtaaacagggtagcaaacaagatatttttcttccatgtacacaataatttttttaagtgcaatttgcgttgcagcawycagtgttaaatcatttgcmtaagatttaacagcatwttyrkmaygaatgkaaacattttaacttaatggtacttaaaataatttaaaaaaatgttaactttagacatatgcttcttacacccacagcccacttctgtattcccaattgtttaaaagaaaaacgatttcaagaacaaatcttctctcaggaaattgactttctccatttatgaatttttwtacaagaacmccaacacatccccatttcttttaytgaggaaaaagtgctggaaaattgcaacaaacctttactacctaaagaatagcatttgtaaatagtttaagcatctgtaaacactcgtgacgtctgtaccgtgtgactaacccmcaggttggtttacattattatttttttttaaagggatatcgtwtggaaacctatttcmccagagttttaaaaaaaataaaaagggtattgttttgtgttctgtaaaaaaaaaaaaaaaaaa

SEQ ID NO: 4482 - DNA, 600 bp, Rattus norvegicus
gacaagaagcagatgcaggaaaaggccaagaagatctacatgaccttcctgtccaataaggcctcttcacaagtcaatgtggaggggcagtctcggctcactgaaaagattctggaagaaccacaccctctgatgtkscamragstsyassaycwgatcttcaatctcatgaagtatgacagctacagccgcttcttgaagtctgacttgtttctgaagcaccggcggactgaggaagaggaagaggatcctccggacgctcaaactgcagytaarcgagcttccagaatmtacaacacataagytgagcccttcacccccatggagcagagggatggactctcagactgtgtgcaggatgtcattgctttgttgtgtttgaggaytggagtgtgcaagaccttccctcagaatatgtgtattttaktaactgtttgaccagtaacttytgcatgrwggctaatcctccattaaaaacaaaagtagctttaaagtttcagttcacaaaacacatgagagtcctccagcgytggacactcagagccttttaatyttgattaaagttctcgtgaagctamarrrraaaaaaaaaaaaaaaaa

SEQ ID NO: 4483 - DNA, 600 bp, Rattus norvegicus
ccctccatttcctccttcctccagcgtctttcaccttactcagagtcacattctgacgtcttccctgggtgtttttctgtctctgccgtggctttcggaaaagaaaggagcacattgggatgtggggggcccgaggmtcgatccggccggtgtagtcgaggcgctctgacaccgtagacaggcttagcctgttatttattmtgctttccttcmwmctcaaaacaccacgtagccmtgccctctcbgtattaatggtgtgacttggttggcaatatttsccgtgtagaattgtygatgttgttgttgwtgwtgtggtwtgttttagatatccattgtacatttgaaacgaagaccaatccatgtaaaaacaaattcccatatgttttatataaatatatataatatgaaggrctgcccaacyccaccccccattttagtattttgrccgcaaaaggtgcggcatctgtgacacatattttaaacctcctttctgcactgtatcaaagggacagtctgagggtatgctttytgtgtactwttktttcytacamaaagaacmvmaataaaaatgtgtaacatttgtaaaaaaaaaaaaaaaaa

SEQ ID NO: 4484 - DNA, 519 bp, Rattus norvegicus
gatctttgtaatagaggctgctgtccgtggggtwtygcaggcccaagcrgaggacstagatgttgtggatgtgratcagctggrgaaggtgctccctcagctgctcctggacttctagagttcccctcctgtgkcctgccatgtytggtgaatccatgccagcatctacgtctagttcctgagctytgcagcttccagaggrtgggaagatcccagcagctgttccccttcctagscatygmskctcagarwcmtyrtkagwswggtgcwkkgwaaggtgmaccrsytgymtymakacaywgmccytgsscmgyymsgmmccacccyacccccacccttyattwtaaataaaccagctgytggcrgtammwmmwwmwwrmmammhtacatcaaagctgctgtgcagccttttaaccacctgacccccacccccaggatgcctccctgagctgtaaatttgttcttacaaagcaacatcaataaatcaacaccatctctctgaraaaaaaaaaaaaaaaa

SEQ ID NO: 4485 - DNA, 520 bp, Rattus norvegicus; identical to SEQ ID NO: 389

SEQ ID NO: 4486 - DNA, 600 bp, Rattus norvegicus
atgcctgtgaagagtgattaaatacatgtttstaatatyttagtgyyttgtatttaggttatytattctttgtatctacaattgaacagctactgtgctatattgactttattggtagtactgagcagaccttgtttctgcatgaaactagttgcaaaacccactattttggaaataaaaaaaatgtattttgacakrtacaaataaaatgaataaaactawwwwaaawrwrwraahtybkvmygarracagcttagattttgttctgagatatttaaattctgcatgggtattttttcactaaatsctttacttggataccagtttgaataatttttgaaattgtaataytgtgataatttgcacagcaatgtacatgcttatctgtaaatgcgaacctaactgccatatttatgcaatacgtgtaccaatttggacaaatgtttatgtattttacataaagctatctgtgtgcrgarwmwrararmwarwwwwttatgctgagtggataaaaatactggtgactgagatyccagttattctgtagcgtgagactccattccataaacatttgcagtgtttcaaaaaaaaaaaaaaaaa

SEQ ID NO: 4487 - DNA, 412 bp, Rattus norvegicus
gccaaggcttcgggccaccgcgagacgskcacrmrsctggaccatggaccctggggaatgcacgtgtatgtctggagggatctgcatctgcggagacaattgcaaatgcacaacctgcagctgtaaaacctgtcgtaaaagctgctgcccmtgctgtcccmcaggctgtgccaagtgcgcccgaggctgcatctgcaaagggggctcagacaagtgcagctgctgcccctgaaacccacccatggcactgggagagatcctgggaagggaccacgctgtacctgagacaagggattggatttgtataataggttgtgctttttatatgtgtgcccaaatgtggggcgggtgatgttcatgtaaagttcttggaacaataaagttwccactcatgamaaaaaaaaaaaaaaaa

SEQ ID NO: 4488 - DNA, 516 bp, Rattus norvegicus
ggcacgaggggcttaccagtccaaggctgctggaacaagtgatgcctctaacctcggactggcctgtgtgtgtttgtatataggatatttatttttatacagtttcacctttggaaaatgcccaaactatgatacatcttacagatcattaaaagagaaagaagaaaagcctgcatattttgtacaggaaataacccctttcccttttgtttacaagacatttttttttgtataaatctgtttctaatacactttctgtctgtgtgtctgctcctaatgttgcatgatatttgtgcacacttattaaatatcacagcttaatraattattgtgtgatggtgccaaaggggccttgtctgcataggggtgctgcgagcttacgtgtgaattcccaaaaaatgtggaggtccacggtgtttgccagacgacatgtgtctgacaatattttaaactttaactgactttcattattataaaaaaaataaaacgtggcaatttcaaaaaaaaaaaaaaaaa

SEQ ID NO: 4489 - DNA, 600 bp, Rattus norvegicus
tgtctgtgcttarkwcrcacswkkgcaaaacgtaaatcacagaatggcggtaccgtggtagaacactgcagctgtcgccagggcgacagtgtgcacagragagactggcactgctgaggactccacactagacatttcagtcacactgaagagccgtcacattccacagtgacatggtcgcgtttttcatggacttttacttctgttggccttattttattatgacttccatatttctttttatttrgagtattaatacatggccaaaataatttagttactacctcatacagacatcataatggttactacagatcacaggaagttagtttggttaaaatcattattgatgggtttttccaatggagtgtatctgtcttaccaagatcgatggcaaggtgtagcgaagcgcacgcctctgactctggtatacgttcatgtgttctttatattttgatgtgagtatgtatacactaagaacaagmtaaattgtggtttatgcttcatttattttaactgataatggttttaaatacgttcctgattgtacatactgtaaaataaacatgttttttaacrwrmmaaaaaaaaaaaaaaaaa

SEQ ID NO: 4490 - DNA, 600 bp, Rattus norvegicus
  misc_feature (459)..(459): n is a, c, g, or t
  misc_feature (465)..(465): n is a, c, g, or t
  misc_feature (467)..(467): n is a, c, g, or t
  misc_feature (469)..(469): n is a, c, g, or t
  misc_feature (504)..(504): n is a, c, g, or t
ctcctcrgtccmtagctttstmtgmtatgcattttcttcacagtgcagcttgcagtccgttgctgaaaattataagctctgcatmrygwkggcykyamtgtkwttwywtgtttyttttttagcaagcccacatctttbtagggtccaaytacaggatwgattacagactttccattagtgtctatttcttttactctgtgtagactttagaaagtctaatccagagatgggccaattcagaattgactataattgaacmcaggctaaaagtatttmtgsgaggattgacacatagcatgagttatttgacttttgtgtaggrtatttaaaatcttcatttgcagttcatgtaacasttgcgtcttamaattcacmcmmtaaascagtcytgttcaawyytmdwdwawwwwawwawawtggggcttgtacaattttttaagtgaatttagggctttttgntttggntntnttgttgttttggtttggttttcatgtggaatgcanatgggtgctagaggaggctctccacatcactatagtgtaatattattacaccacactgaaatgtattcagaaacagatgtttcatttcattcttct

SEQ ID NO: 4491 - DNA, 600 bp, Rattus norvegicus
taatgggaacctttaatatgaaaatggcttccttttgactttgggatgtttcctgtggatgatgtgggtatgtgtgtacatatatatacatacytttttaaatwtaggctamcaagagtcatgtctttcacttttaagttcagggagcaktttgttytaaccacacagacattytcagtgtggtatktcatggagctttrgagacaaactggtatctcattatgtaatgaaatataaacatmccatcatgttattttaatgtctycaaatacatgatytgaggggggtgtgtcacacacttgtgtaccaactyttagttgtsccttgaacatttgcattgaytacctgcaaacaattactaggttaactagaattgmtatgcagttcwatcttgcaagtgytacayagtaactgcagtttaaagtawatttgcayattttacatgctatgctatatgatwgcctttgggttttctgyayagattatttttgttgmtattcaatsmaaattgtmggcgsgmmawatatygtycctmtgygaagtmamytgytataacctgmwaaaaaaaaaaaaaaaaaaaaaaaaaaaaaaaaaaaaaaa

SEQ ID NO: 4492 - DNA, 600 bp, Rattus norvegicus
cacaaaatgargaatttwaatgagggagctcagctcaactctttcctgaagaataactttatgccaaggacaaggacagagacacagagttwtgtcacarggtgtgtgatgtcaacacttttactcagctcatcataagggttccaaagaggctccaatacagctggttgttgtgtttcgcttttttcattataaaccattatattgggaaaggcktgaactccaatttagtgttaacacccttcctcatggtaccagtgacatgtattgtgtccccacatcttacagactttaaaataaaactacacgttatgacttamwrrarwwwmwawwwrtgatatgtactgtggatttgctttctaaagaaacccttatcttttacaaaactctactgaaaatttacagagatgctactgttccttgcttcaatataatccagggtggtataagtttgtacataggtgaaaagagattgactctgacttgataattgttgaagctgtgtgataaatgtttgagatttcattattctctatacttttgtatatgtttgaaattttccataataaaaagtgcaaaactaaaaaaaaaaaaaaaaaa

SEQ ID NO: 4493 - DNA, 600 bp, Rattus norvegicus
cacactccaaggttcatgtataggcctggttcaccccaaataaagtgtgcatgcgcaaattgttttgctgaagatcctctaagagagctgcttcattgactactgtctaaaatcttcagagaagtccttctcccccatccatccccaacctccatactcccatcagaaccaggttcctgcaaaccctacccttttggattcttcttcatccttccaggctgctgtacarctggtgcctggacactctaagggaagaagcagaatagaaccactggcgcccaaccacagctggcrcccaaccacagctggcgcccaaccacagctggtgcccaaccacagctggtgcccacgtgrattcaacaggatcttctggccagagcattctctggtgttggcataaggaccttaaacctctgtgtgaaagccaacagcccatacaagagttggcaaagacyttctttctaattttttcttaaaacaaaaawwwaaaamarwaaacagtaacacagcggccagtaaatagcatttagggtggccagtagaactcttaagatctttgggaaggcttaacatctttggacctctgtggaaaccctagaa

SEQ ID NO: 4494 - DNA, 600 bp, Rattus norvegicus
gacgtgatgcttacatttgaggattaaagttgggctgggcgagagtgagaattaagccttctatcataaccagcatgtgcataaggaasaygakgtgtgaattggggctctcagccctgtcagagacaagtaacwttccaatccccttccttcctccctccctcagcaatactatcgcaactggttgaatcaggattcggcctcggacactgaatcttcggtatctcaataactytaggcactacccttcaccrtagtacactagagggttgctgtccttccgttgtacaacaatgcctttaatatgaaacgttacattmttyataattggtatcgttaatgtatctttttatagctgtaagtacacagaggtagtatatttaaccttctgtaatatactgwacttagaaatgaaaaaaatctatmtgttagatttcacttcttttaaggtttacccctgtggtatggtyttgaaatcgattggactggggattttgatcttaacttcagattgtgttcwgcamtgaaaaaataaagytggwcattgwgaaaaawaaaaaaaaawaaaaaaaaatggaagcggccgcaagcttattccct

SEQ ID NO: 4495 - DNA, 600 bp, Rattus norvegicus
aaatcmgcatgacaaaataacactgttggcacttataggtgacgtgattgattcagtatcttrgagtttacactttgtgtttttaaaaaaactgaaggttttttttttttaagtgcaacctttctgtmtactgtaaaagttataataactgaactgtttggtcgagtctttgtgtgttatattccaaggaaaattgaaagtattcagaaattaaaatattatttgatrtctgvmwmvwrmwwrrmwrwmmccactcactgtctgtgcatcgagctgagcccctgtgagttctcactgggccagcgggggccccgtttgtttactccttcaatcagtttgttcaaaggtagactagtgtatttgcctgtttaatttgggtgtgtgggggggagctgaagttaatggtttatctatggtttaggaagtgccacactgatatagtaagccacccccattcacctaatcctccttttaattaaaaatggattttccaggaaaaaaaaaagggcccttatattagtcacacttaagtgcctgcttagggaaggtattgtgaaaagtattagaaatcttgagatcagtatctattttatcctcgtg

SEQ ID NO: 4496 - DNA, 600 bp, Rattus norvegicus
acattttatttaccaacttttacaaataaggttttacatkwwttkkkwwkyttttwtkywwywkwaaagttttccagaaagtttwttykwwkywtwwtkttaaagacaaaacagtttattaagttcagctcataatagattttcaaataaaaaatatccagagctgttagcactgagcaaataccctcttattagttatatatatakattttatatatatatacatacacatccacaccactttagcttaattagcagttctcttctttttcctccttttcccttgacttttacttggwgccttctggtttgcactggkctgagctctkatkwwtwwwgkamtmtwmtcwggctccamwrtamycmywtcttmttcttcactatctgawagcactataggggcaccttggctcccaatatcagaaacttctcccgtgtccatctttgtatcatcaagaatgacagtttcatcaatgscaccttcctcctcctcttccttctcagaatcttcaaggtcaccccaggagttttctattccctctccaatctgggcagttccargagtccacagcacaggtttagaaacaacctctggaggag

SEQ ID NO: 4497 - DNA, 531 bp, Rattus norvegicus; identical to SEQ ID NO: 401
  misc_feature (521)..(521): n is a, c, g, or t

SEQ ID NO: 4498 - DNA, 1097 bp, Rattus norvegicus
tgctgagatggagtaagaagccacaccatgcttcaccatgatcttctaccacctcagagcgcaggttgtagcttcccttcctgcagatgacatttgtcttcctcttggcatgcagaagtcctgagtatgggatgccctcagtgacctttggcagtgtccacccctctgatgtgttggatatgcctgtggatcccaacgaacccacatattgcctttgtcaccaggtctcctatggagagatgattggctgtgacaacccagactgttccattgagtggttccactttgcctgtgtggggctgacaaccaagcctcgagggaaatggttttgcccacgctgctcccaagaacggaagaagaaataggtttccttggattccatcagagacttcttctgaatccccctgacctgggctagtggacagagaggggtgcctgtgctggggatgggkgtccagsgagatggggacagtgcagtaccgtcatcccttctccctkmtcsyswttcrgwgckgaggctscwtycawwccccwgywkwgamkkwgmmryrgscastgrmgkgakgyactctcscagtcscctcaatcctccttcscccattgrraactaggtaggacagactgcmttctctgtgctcttccttttctccatggggagggtcttctaggtcatttggsctgtgscctagttgagtggttaccccaacctctatggcccggggaattctgctgactttgaatgggagasggmaskwggagcccagatagctcamatgtaaagggagtyggggtagtaaataaaagctatccmcgytarmmwmwrwrwwwawwrwasagactgtttacgtatatgtggtaagcattcktktkgcattctctggattggatkakaggcagkaggatggcttgccagaaataggmcargacwtaaaacccaaaatggtctttgtcctgtggtatcctcagcttctccacctggagggtsccggcatcggggactcagaactttgtawttacgagtacgcgctccgcgaaacacctttcactcaataaatcatgtatttgctktmaaaaaawhawaaaaaaaaaaaaawaaa

SEQ ID NO: 4499 - DNA, 703 bp, Rattus norvegicus
gatgacatttttagtggtttgctgttttggtttttttcaggttttgattcctacacaggtgtcttcattaccatcacttgtacactgggaaaaaaaaartawtctcctttgtgagaaccactgcacgtattyaygrsraawatatttckgmaagkctakaatgrtggawatgagcmcgggaasttggtcagcttgactaaggagtgctggcaataaactstgagcattccacaggactgagctgaacstaggctcccttggmatctgwacagacargaacatgggattgccasttgactactctgaccatctagttatggacttcagrgataaatcagccatggcctaaagccatttcaagaacaaaaatgaattgggactatagcaatataastttgaacacagtaatgtttcctmtcttgtctgagggtatttgtaaactcagcasargtaacttgacctcatgtctastacagaactccstgcattsatccmktcsttatccttttgytycctttcccttgcmtagtcaktagttcwtgasttagtatkckttttgctycagaaatttgaaagaaaatctttatgccrtgaatctttttsttccacaaggacacctgtttaccaccttgtttaaatgtaaatrttyycttaygcttttgaaataaatttccttttgtaawwwwrwaaaamwaaaaaaaaa

SEQ ID NO: 4500 - DNA, 599 bp, Rattus norvegicus
cacgagggcagttttcatccgtgcctctgtcgaactgccccggaagatcctcagctgagagtagatagagccttttggcttcaagtgggaagggaggtgggacaggatctcaggcactggctggaamtggattgggggccggacctcctttcagcttmttttgcctaggttgttagcccattctccytaccaccaccaccaccaccyhtmmccctcaggtgcctycaattggtgcttcasccctggcccytggggggagcargtctckgkgttmtcaagggctggaaatgtratcccaggscctgtctcccytcytgggcagggcggacatgccttggtgccarccacgttctayctggaytgaggtgcctgytcaggtgctatatcccaagasccatagtgggggtgggaggtattggcaacgggaggggtaggtataasaatctsccytgagattaccttmtytttccattcacccagtggcgccctctctggwyatttatttctctagtgctaggagggcacagcaggggaactctgatttttaataaatcctgaattgtawwwawwaamwwrrwwmmaaaaaaaaaaaaaaaaaa

SEQ ID NO: 4501 - DNA, 891 bp, Rattus norvegicus; identical to SEQ ID NO: 405

SEQ ID NO: 4502 - DNA, 544 bp, Rattus norvegicus
atctcacggtgtgtagtaaccatacagaacgcacagcaacaagttgtctgtcacacccagcgccttcagtaatggcgtacctctgctcagccagtatttaaaatgtgtttgtgtttgctcatttgctttttctgaggattggaagatgtaggttctgtgtcgactgggtctaccagtggtattaaaatcatktgctatttagcctcatcatgaatgagcaatgggatcaattcaactaattcaagaaaccaaactagttagcgctaaaaagactgtttccacaccataggcaatcacctcataatttgcaaaatataagcatatgcctactgtattcgagggttttcccaatcagaacgtgttggtctataccagtgagtgtgtgttagcggtgaaatgtgagggttttcaggaagtcttttacctgtacaagaaggttgcacatgtttaataacaatcagaaacagaaaatctcctttaaaccacacactgcatgaccctctctgataattcaaatactaggaggtgttcttattccactggc

SEQ ID NO: 4503 - DNA, 614 bp, Rattus norvegicus
gtttacattcagtcagtctgctcttacttagtgttttcaagttaaaatgcttaaaagcttccagaatccactgctraaactggggrakkskkcckwbkggagaaacaaaggstggaaggagcttatatccctgcttagcatactcagtccccagccacacggcaratgaccagcascctgagtgaaraggcwsgmkgctgsccctggagcctcggctttagattagaactgywtwtgttcccttccaaatactgtccagactgagtgcacaagaacgaccttgytaraggggytgggacacgggctytcctgccaggtgcctttwccgcgtgcgtggttttccwtctgtgatgtgttaccttyttcatmtttctgtctcatgtragstgctagtgagtrttaactaaccttcgtctgtgccatgctctactagaacattctccgggtmtaccctggatccttgtttaaataaaccagttcmcmttaaaaarwwmawmaaarawmwrwmwhwrwwmrrmmrawgyttmttysyatcttaytagksttwcaactgtttggagctgacttcatgttttgcagttgaccttaggttatgtttgtgtgttcaatatggt

SEQ ID NO: 4504 - DNA, 572 bp, Rattus norvegicus
gtgttcatctttcccctccccccmacaattgcaggcttagtctgtggctactgttctcttgtaccgctgtattactctctcagaaagaagaggccctgtgcccctggcggtgtgctcctgcctgtgtgtgcccgtacagcagtgacttcccctcctagtcttatttatgctccccttccctcttttcctcatgccaaagtgttcttagtggctgattcgggggggttcacatgaacacagagtgtattttcttattgagaccataccttctctgtgttaagtatacmtaaaargrccaagactcctawrwwmarmarwrwrrwttatttcttcgtatgtacttattatgcaccagccataggtctttgttctgtgtaattamtgaaggtwtgtgkttgatgmtattctgaatgggtttgttgattttgagacagggtctgtctgtatagctctcgatgtcctggaactcactgtggaccaggctgaccttcagctcagaaattaggcctytgcctcctaagtgctgggattaaaggtatggstmcmmcavmwmmraaaaaaaaaaaaaaaaa

SEQ ID NO: 4505 - DNA, 600 bp, Rattus norvegicus
  misc_feature (580)..(580): n is a, c, g, or t
caatggctcagtggactgagctcctggatgrctggagggggactraggacaaagactggtgtgtctcggactccttggaccatttgctcacgctagctaggcacgcaccaagatgcctccaatgagytgtaagggatccgctccccgcacagcaggccacaggcacgtggggccacttccctccaagccagggagagcaaggagactggcgttcccagcttccccatggccgacagcttgctgtctccttgaactgctgaaggctgcgtggcccctcccttccctgccgggcckgacgagaagctatytggaagagtctgcgtgtacaaagccagtgcaccacctggctttttggggttgatcagtttctttttttctatgaaataaaatgtcacgcatgwawrrwrwarawmwrawwactggtcccctgagggctgtctgcctggcatctgtgggtgttggtggtggaatctgggagttgctttgccttgcaaatgttaggttttgccctccggtccatgtttgtttagttgcttttgtaatggaaaggaaagactgggattgaaagtaaaaatggaanccaaaaaaaaaaaaaaaaaa

SEQ ID NO: 4506 - DNA, 513 bp, Rattus norvegicus; identical to SEQ ID NO: 410

SEQ ID NO: 4507 - DNA, 1400 bp, Rattus norvegicus
gcctaagcagggagaaggctataaggtgaaaacaaagaaggaaatccggaatgtggagaagaaagcccactagtgacggtgacgtcagtccaggaccacgcgttcgtactgccagtattgagaaactcaccagagatcagcagggaggagaatctctagcaagagcggagtgtggatctgccaccccacacatcagtgacatgtttggggttttgggtttttttggtttttttttttaatgcagaaggatamasrarrtywycttttttttatttagcatgagccaatttacagagcatggagactcactttcattcccggcgctgacacgcgtgcactaagcaagtgcaatgtaagatacaagaagccatgttgttcagactcagcctcaagtaatttggtgtcactttcggagaaggacagacaamcaacgacacctgtgccaccggaaggagggrggccagcaccaagtggagcgrtcmcaatccaggaagacacmcttgaaattactaaawcccacmacaagctcgccttatttttcttggacccaaactaactgtcagggtataaacactgtttgyttyttttttttttttwaaagwwwaaataataataararaaatcaatagttttgctgtaaataataacactgtaaattctaacagaagaamctacaataaagaattataaggcaccygcctcacggaacacaaagataccacaaacgcgtccawtgacaggcgtaccaagtggcctcaccctggacaaggacgkgaatctggcgcgtgcgsgacgctctctcactgactcctgtatattagcaattatgatgtttgtacacgcmaaactgctsgcttggttttaaaaagaaaatgcaaatctttwaaaaaaaaaaaararaarwvwrctgcaaaatttaaataattcccccagcgaggaggaattctgtagttctgtgaagagaagaatttttttcsttcagaatatactaatattttgatgcatgcatatctccttattttgattaaacctttkccaattttgcaaacamtacagtctcctgcaacacgggagattttacctgtaaacacaaagcccttcatgtaatatttattgctattgccaattktttcaatgaaatgvccaraaawrrraraaaaaaaaaaammwvstrtacagtagtttgcttgggggtggggggaggggcgctgttagtgcttacagggsggaaaatgcttgccactgtagaggtggatggtgcttacaagaggccccagtcatgggtatttaaaaaaaatggactgaccggaaacccgtatctagcaggatcgaagtgcactgtaaaaaaaaaaaaaaaaaaaagggaaaaaaaaaaaaaaaaaacctttgcggccctcgtg

SEQ ID NO: 4508 - DNA, 388 bp, Rattus norvegicus
cccaaagggaaatttctyccacagtgcaggtgaactcaggcggctccgtggtggtctccagcctactggtgcttgtggcggtactgttcctgcacttttgaggacccaatagttggcaggtcacagcctgtgtgaggtcattgtgggtcgtagtggctctggaggggtcctggcaaccctaaggatgtgaagmccattaggtggagcccagattgcatctcctgctttgaactggggaggggggagggagttctgctttactgctttcatggttatcggggaggggccgcttatttccgatgtctttggggggcggggagcggggggggcggagccgggagtgggggcgggaaataaagtaattcggaaagaaaaaaaaaaaaaaaaa

SEQ ID NO: 4509 - DNA, 519 bp, Rattus norvegicus; identical to SEQ ID NO: 413

SEQ ID NO: 4510 - DNA, 600 bp, Rattus norvegicus
aagatgacattttcccccttggaaatgattatcttacamaaaaaaaamccttkymtmrtkmrgcwyraggcgttatcagtytaysagakggttgtgggaaattattgaaaattcttttaagtgtcaacttaagaatttttctaaataggatataaaagttttcatcaaaagtaatattttgtattttcaagagggcagggacttattgaagaacttattgaagaaagggaactgttttcagtctgttgagtaccatgatcctatgggtctaaccctmagttagctgaaatatccatggaacgtgtgattctgcttaactgaagwtgagtaaagactggatgtagtawccattccttaaccagtattgcatsccaragstaagttagtgcttttgacatttggggcattcacatsccttgtgttttactcaacaactgtaactgaatgtagtcwtggaaggtacaagwtacggaacactcacwgacattgggacatmacctggaatttttaaaataaatttatccwttttgttwhmmdaawwwwrwwrwwrwaaaaatatamaaaatataaaaaggtaaaaaataaaaaaaaaaaaaaaaa

SEQ ID NO: 4511 - DNA, 600 bp, Rattus norvegicus
tggggtcascactgattytctactgtggcagcctgtggacctcctgaccttytctcccatcctgaaraatgtttttgagaatcctactatggttcagtttgaycaccggcttctgggagtcacgtytgycactgccatwacaatgctytakttcctgtcccggagaatcccccttcctcgaasaaccaagatggcagcggygactctgctagctttggcatatscacaggtggccttgggcatcascactctgcttatgtatgtgccaactccgstggytgccacacacaccartcaggctccttggctcatgaatgaactccgaakagttccaaaataattctccaaggatcgtttcctaggactggaactgccctgggaattcatcaccaagaacaagaccttttcgggtcttttcasgacggtggtattgacaggccacggtttccaaattggtcaggtcattcasaacttttaaggkgggcactgaatcaagaatgtcactaaggtgttcttataccagaggtttcctttaaaacaactgttgcataaacaagcatctgtcatttgctgctwaatatgcaaaaaaaaaaaaaaaaa

SEQ ID NO: 4512 - DNA, 577 bp, Rattus norvegicus
  misc_feature (481)..(481): n is a, c, g, or t
gaaggctgggacccggggcaaggctgcagccaccaagcaggctcaacgtggctcttccaatgtcttctcaatrttcgagcaagcccagattcaggaattcaaggaagccttcagctgcattgaccagaacagagacggratcatctgcaagtcagacytgaaggagactthkkmmcagckcgggagggtaagtktcccagaggagragctrgatvccatgctgcaagagrggaaggsccscatcaacttcaccgtyttcctmacgctyttsggggagaaactmaatgggaccgaccytgaggagsccatcmtgagtgcttyccgaatstttgacccgagcggccagggagttgtgaacaaggaggagttmaagcagyttytcakgrysmwsvcakayawgytbtcwcctshyragdtggakcagctdwtcrmcctgacacccatggacmtgacaggcaacatcgabkacaagtmtbtytgntacwtmatcacccacggggatgagaaagaggagtagagacacactggggtcacctcaataaactctgtgcctgaamwrdaaaaaaaaaaaaaaaaa

SEQ ID NO: 4513 - DNA, 539 bp, Rattus norvegicus
caggaacacttgaattggtgtgtaggaggggswwggggtcctcaccctcstgagggtgacatgtgccmtgcmtggagtctggcmtctggctctggcctcagtcattctttagggactagagtcattgggataaamccaggtctgtgatctgcagctatggggctggcctcagccgmtcctggttctgcacagctggccaatggacvtagacttcrgaaccccagcaggctcaggtgccaatcgcaatgggcctttggttcagtgtcccagcctcttttgctgtsaggagckgccatatggcccagcagaactgagcaaagtcaatagaggggtttctggagtacactcccagcccaagaccctgccttcmtactgtgaacgtgggtgtgatggctggatctggggaagctactttggcaccatgaaagaaaggccgagacaatctaaagctgctctccctaacacytgatctgtaagaaattaaacttttatttaaggcwmaaaaaaaaaaaaaaaaaaaaaaaaaagtttggcggccg

SEQ ID NO: 4514 - DNA, 600 bp, Rattus norvegicus
agcggkmykggcscmkccasmctctcwrtgaywcccacgcctacctcaccttggcattgcactgggtaragcctggtgaawacacrghacctgtggttgtccrscaygakgcccaaatgtggcaactccaagtccaagtgatcgtgtgtcgytrcaatgtgragggtcaatgcatscrcaakgwkgsycrmatgawggsaaykccmacsaagctgtcadskgtsgstgymmtstkgggswcmmtggcagcgmwaggtttcatcctcattcttgtcttcacacacctggccctggcgaggaaggacctggatcagccggcagacagtgtgcccctgaagacagccrtgtgagtgatctaagcagccccagctgggaggtctaccccagctccatctgatctcacggagaaaggacccagaacccaagatgcactggggaccaagagtccttcaccttgttggagtggagacactgtcaccaggcatgtccccaaagcctgagcacttactttacaggacgaccatggtaatactccaaatggcagctctttgtccagtaataaaggctcagagagctagactggammmwrwaaaaaaaaaa

SEQ ID NO: 4515 - DNA, 600 bp, Rattus norvegicus
aacaacctcttagctcaaaatgttgagtcatttagatgtgatccgggataagcccctcttctgaaaaaaatctatgaaatcttactctatagacagcaagatattcatgggagagaatttatcttaccatcaagttattactggaatcaaattaattgggattttagcccataaattcttatctgacttaaagaaaacacatcctttaagtaactttgatcrgaawtttagtggttcatgtwaaacttatcaacttatcatatccaatggagcaatctcctgttttatatattgtttttgcayactcctgatggttttgagaaaaaatgccaaattaacaattcttattatcctggtgcttcccatgtaagaatyattctcctgtaggctcatttgtataagaagmcaatatttgcttggtcttctcccttcaattagaaaaagacaatggmcttttaaaacctttatattttaaacattktrtcaaaatagtcatagaatacattattktcttarctgtcatcttctcactgmatgttttttttaatttaccagtatcaacttaattaaagatatrtgtthtaaaaaaaaaaaaaaaaa

SEQ ID NO: 4516 - DNA, 1282 bp, Rattus norvegicus
gagaatctggagaacggaactcttcagccctcagatttggaaagaaataagatgaaagacttcccaaagaggcccttctctcagtgcttgtccacaatcatttctcswcwgktwsmrgagstgdwmgrsmvgagccrggmgtswsgagggaactysrgstcrrwrgamkagcwtcggggagccatctacttggcggaagaggcctgccctgggatctccgacaccatggtggcacagcttgtacaacggctgcagagatattctctgagcggtggaggagcctcagcgcactgaaagcccatggcgtcctggttggkttttcctttcttcttcatcttccttctttttaaaagtcaacgagagcctttgccgactctgcgaagaggtgtcacggaggggcccaccctcccctagcgccagcacctatccagggacagcctcgtcgtgccacagccagatggagtcttctgatagggtgggggagggtcttctccttcaagcaattattttatttttttatcgtttttaattttaatcatagtgcacatattcaaagaaagtatctttaaacacaaamarmmmwraarwrwayaykwggrttryymtwmkgmwgttgaagacgcaacctcaggtatctctttgtattgatagctcytcccccgggagacggagagtcgctctggtggatcggtgtacagattgtatatagcgtcawttttaccgaaacccttttggcgtgcatamrgatcactgtgtacacgttggccaagtgcttctgtagataatgtctgtggagtaaatatttgacaggccagaactcgagtcttattgccttgcctttattacgtgtaaatttgaagttcgtgaccagtgatttggattttattttgtatttacagggtctgtcattamtaataattatccccsmmytcgtgsamsaskcccatttgtacctcaacagacgcaaatttccctctcgttcaccytgcgccccttttggtacacatagaagttttcctttttccawcaatggwactgtytcttagtgttttcaattggaacatatcttgtctcacagagctttaaattattctttaagtttcttccggatgaagcgctctcatctaacctgtgttgggttrwgctrctgcgtctgtaccagatgtcctgtctgacatcttccaytgaatcytgtagtacaacctgcgtatcatctttcccacctcaaagtgtctgaatgcttacacaataaattttwtaactcaaaaaaaaaaaaaaaaaa

SEQ ID NO: 4517 - DNA, 600 bp, Rattus norvegicus
tcagcctctccgagacgcaggtgaaggtgtggttccagaatcggaggacaaaatacaaacggcagaagctggaggaggaagggccggagtctgagcagaagaagaagggttcccaccatatcaaccggtggcgcatcgccacgaagcaggccaacggggaggacattgatgtcacctctaatgactaggggaacagtcgagagcccacaagggcagagcattgcttgctgcyggccggggctccaggggcccacgctggactctggccactccttagccaggctgcagggagrtgtcgagtcacggccccacagggcttggagcctggggccatcaccgtcagagggacaagaaaatgggctggctgaggcctgggactgctcagccttctggtggagagcctgctgcttgggtggaccgcccatccctgcggcccccccagctgctctccgtgtctctgtctttgttctgagacatgtctcttttaatttattttccaggtcctgctgtagttcttagtgatcctctcatgtcccccttccctatgggaaataataataaaaaaaaaatctctctcttaacgaaaaaaaaaaaaaaaaa

SEQ ID NO: 4518 - DNA, 600 bp, Rattus norvegicus
  misc_feature (137)..(137): n is a, c, g, or t
rgawctytgttgakggcahraggtccagtcacarkywkcaagccactgcccarctgsytgaggaaaacmmctytyttgcccmtgtggcgcccaktkaggatkawcakgamagtcccgggartgatgmtkgagcgcanccdcctcacstsstgsctgaagggcttcttgccgtggctcarcagcttycgaggcacgtmttcagymbsgtratacctaggcatttttcgaagcttcaccacccgggtgccaccgttcttgkccccaccarctgtttttgyramgswwsyawrracctyytctttctystyvtkmbkvtcaasctwystcttsscmkmwgagtatttsctkytgtacaaggcctttctggaatacatrgcagatcgkgaatacctgccgattcctctcaccaggacagggttccggctgcaatggggcttactcttcctcagctttttagccttagaactactctttttgacgcaccaggccccggcgcggggcgcagtagcatcaccgccagccttcttggctgcaggtttctgctcctttttatcaggcttctccgccttttcacccgccatcttgcaagacgggaaagag

SEQ ID NO: 4519 - DNA, 1400 bp, Rattus norvegicus
  misc_feature (1016)..(1016): n is a, c, g, or t
  misc_feature (1189)..(1189): n is a, c, g, or t
gtggagctgtacaatgaattccctgaaccsatcaaactggacrwgaacgagcgggccaaggcctccgcagagagctgcagctgttgaagaggcagbgrgcmcrgrgcacaragtccttcacagaccaagaacacacacgtaggccttcaacacgcgtccctcctcctctaaacagaccagaasgtgagytytcacatccagctgccaaaagaaaswscmcmsmshcacwtacmcacatgcmcmcmcmcmcagacatacacmchcagcaagcaawcwccgcytgtgcctgtcagggctcctggggmmrctgtccmccktgagccctgtgtwtggcawatgscgragmccctgggtgcthtggggtscaktggsykysgraagcytmctctttttgyccactggaaaktgaragaactgttcmcagttcatcygkgtswaatwhtykkwtttttktttttwamggtcttgkggtcttttmcccyymcccyccttgaaggycctktgggaaggctggygcccargctccgttctgagcasgctgttttgtatgtatctgttaatgcttgttacttttaayyaatcagatctttttacaskakscatttattatgtaatgcttcttasaaaagaatcttatagtacatgttaatatatgcaaccaattaaaatktwtaaattagygtaarraawwmmwrrrwwrwrwrtttaagtcctctaacgcaggcgtgcaaggtggagggttgaaccctgtctggattacasagtgttakagactcaaatttggaagtccagctagcggcagtattctgtacagtagacacaagaattatgyacghcttttatcacaracttaagagccaaaaagcttttcatctstccagagggaaaactgaatgagacagttcccttctgtgtctaaattttccaaaaggttgattkgcayaakrcarkagtgwatacaatggataaattgctgytamttcaraaattaaaattatcattttctcccwwwmwrndwwwmwwmwrttcaacacttyccaatgcccttagatcaytgtymtactyaaagaggaaaggagamccccrccagwcctgtcccagtcagtgactcwacctttgtkbyasraggcgctcctttcrgrskwgkgstmcctgtagsttagcakatcccctcctttcccacccaccntagtgtggcccagcactaacccacagtctcttgggwtgagccctggcagttytgtcccctcctgaggtcstgccctgcatcatggcttgcttcccggrgcacttcccctccagaagtytacatthtasggtgtaggctgagttcttytgtmaagrrmtgrgcgtgatkccawtaaaayttaacaagadcaavcaamaaaaaaaaaaaaaaa

SEQ ID NO: 4520 - DNA, 1400 bp, Rattus norvegicus
aaacagggcttcatcactcctccgacttgtccttgagaaaagtggctacatcctgttgatagcatatgctcaaataataccaaacatggagacaaattccgtgatatatttcaaaacccattccctttgctaacaagaatctgtctgtaactttgatccgggttgccaaacgttgcctgagcactgctgttcttcgctgatgtccgtttacacgytggggcccaccttgtcatccatacagcactgtttacaagattgcttatcaatgaaagacattggagaagctgccttgagggtcctcaaggatccaggtgatgcctrtammmaammwrrwmmwratgtgagcttatttaccacgccaaaacttttctctctgttctttttcagtcactgtagggacagaacaggctttgcctacctacccacactaggcacttcttaacaacaggcaggcattaagtcctaatactgaagaagattccagttcccagagatgctgcccagctgtgtccttgtcatctgataacatttgtaaacatgtgcagcgcatgtcaatacatagcaaccagataagcacagatggagcctccaaggtgtcagtgggaacccagttcagataaaggacaatattcctgacagtctgtctttcttagccactggattgatagaaaaaaagttgattctctccactgtaagtccagtggatgttaatttgtctwccaactgaatcaaaggctttataatgcccttttcctaagaaacatgagtctaacctgatttacccytcarktttccabtaggccttcytcaggggaaaaagcawtgattatacaagatctctccttygcttgtactgtcaacwacatagtaacattccaacrtagcttccaaagaagcgataattcacattgttcmaatggratatccacattcccttymagatggtattgtgtcctttgtagaccaaatttcagagttccccttgtatcatgggagtgtctgtgggtgcctggaagcctggagcttatgcacgtgagataactatgtgactgtaascaaaaggggttcactggagtaaaatctcttcaaagcwgctcccgacccatgttttyatgaataaatatgctggtttaaaagatgacacaggaccacaaagccagtgatgtggattagtaacagagcagcagtcacatccaaaggaggatgtcacccctgaggaacactgtamaaatgaggtgggatttgtaatcaacaatggaaattaacatgtttttatgaataaataacttatttcttawawrrmmaarrawrawaaaattatttcattctatagttatggtgaataaaacactttatgcagataaarawmwrawwamawttaaaatagtcaatgtatatgg

SEQ ID NO: 4521 - DNA, 648 bp, Rattus norvegicus
gctggttaacccacagcacgtactggacagcgtctgtcaaagtaactctgcatacattttttaaggaaaaatcctgggtagtgtgaaatattttgctagtcctataaagagggggaaacccacctkttggagaaagggaacgttaacatcatctttttttctgtcacagcrgatgkwaaggaggacaggtgtgtgtaaatattcacatcagtaaggttacggtgcgaaggaggggacacacatgytggtgacgtctcgaatgtgtgtaatccccttytgaggtgtccagccaagagcaagaagtagtgcttgggggctaacccacagaaaggtcagttthccmctacagtaagtgggaagaagcttcctttcagagttmtaggtctcatttagkkyrtaarwgsgsacttksggtmcrgakgggtacagaggtcacarcmctaragattttactcctggtaagaatttgrgrgaaggaatytggactccagctcaaaggggaaagataggtgaaatagtatyatttaacttagttggkwttywtaataaatggcgattttaattattcataatatgtttatttacagtctaactcttgaatgcttytaaataaaccmcaattcaaactgcaaaaaaaaaaaaaaaaaa

SEQ ID NO: 4522 - DNA, 600 bp, Rattus norvegicus
atcgctgcacttagtcgggacacaattgataggtggggcaagcttatgaccccaaggcaggtgaacctatacatcccgaaattctccatrtctgatacctatgaccttaaagacrtgctggaagacytgaacattaaggacttgctcaccaaccaatcagatttctcaggcaacaccaaagatgttcccttgacattaacgatggtccacaaggccatgctacaactggatgaagggaatgtgttgcctaattctaccaacgggkctcccstacacytgcgytytgaaccacttgacatcaagttcaacaagccsttcatcctcstgctctttgacaagttcacatggagcagcstgatgatgagccaagtggtcaatccagcctaagaacgtgtcctgagaagcyttggtgccatstgactttgagggatggaagcctttccmcagtmttctcagggtctccccaacccaatctacttttagataactagcaatgagtagcccttgttgccactctcaagacaaagtcacttgagaagggagcactgwgaaagagstaacagttattaaaggatgttyttgcaaaaaawaaaaaaaaaa

SEQ ID NO: 4523 - DNA, 600 bp, Rattus norvegicus
atgtcttaccagccctaccccactagattcacctctccagtccacctatgctgaggttgattatagaatttatcccttagccacatacccttagccaaaatactgatcctgacctacccagctccttcatttyacagaaggggaaactgargcttcgagttgtgaatatctgtccattattagagcacktggrsctkwtatttctttgwgatagwatctgcmtatttagcccargytgggcacagtagaagatgctccwccagccttggcctgtgtgcctggaggagccgscatacccagcacattactttgtcatctaktctagggaaacccaaaactcccttgagagaggcagcagatgaagggaagtacttgagacttgatttctctrygtgttgggaggattatgagcagtgggctmttcatggccagaccccaagctcccaaacctcaggtctgaaacaggaaacctgccaygctcttgctttccattgttgtcatcctgaggatcctgtgtcagactgtactacgggagtagtgttcctggttggcattaaccaaaaataaatggtggtctccmggraaaaaaaaaaaaaaaaa

SEQ ID NO: 4524 - DNA, 460 bp, Rattus norvegicus
ccccaggagcagtttgtgctgcagtcgcacgcctggttcaacgtctcctccctaccgtactcggtgccggtggtcagcttgcccagcgggcaaggtctggtgcagacacatctgcttcgggccttggaggagagggacatccctgtctggtgggtgctggtaggcgtgctgggcggtctgctgctgctgaccctactagttttggccatgtggaaggctggcttcttcaagcggaatcgaccacctytggaggaagaggaagaggaagaatgacagcagggtgagggtgggggctggtgataaggccaagtacctgttttttctttgcagccagttacctytgctcagaactccatgggttcgaaccatggggtcctccctttytagcagaccaggtgcatcccttttttctttttcctaataaagagtttgccttcaacatcmaaaaaaaaaaaaaaaa

SEQ ID NO: 4525 - DNA, 842 bp, Rattus norvegicus
cacgaggattcttgcaaaaagacacacctgcaaagaagatacaacccaacaaaagggttcaaaggtctagaaggcgatcaagagaaggccgttctcagtgaaaattcaaaggccagacaacagagkttatataatcctaaatcaacaatctgatttttaagggaaattwtaagagccccattgacttcggaatctgaaatggcaacaaacagaagctaattgtcaagcaaatctgaacgcagagttaatttgtttctgaatgagaaasataggaaaatgatagtctcctgtggggtaggaactgaaggaaatataggacsatgcagggattttatctcaatgagagaagttctgattatattaggaatccaccaaagaccatcattgtgactggatccacacagctaagtctttgctcagtgawcatggtcaagaaraggctggaaaaacccaaagcacacagttacctttccatgggaggctaagctatcaaaagcggtgttcagttatacaacaagcaagccaagccaccaaattacaaacrgtggtgttacatatttctygtgcaatgtgggttycbtgmtaaattttgttgttkttacamttgatttatatcctcragatgattgtsatatgctwwwwrmarwamaaatgtttctcycaaacatttcaataaaaacattyttcaggtawaaararaawwamwwmagacttgstaattcagaaaactcaaggtttaagttaaaagtgagtttagactttggaataggacttcatacctttttttattgttaacaagtactcaataaaggaatctgrwtaamaaaaaaaaaaaaaaaaaa

SEQ ID NO: 4526 - DNA, 600 bp, Rattus norvegicus
msttycttttttctttcttttcttccttytctwwywtktmywytyhygaggcagcatttcatgtagatcaggmtagccytgaamwtgtagcaacyttcctrcctttgcctcytgaatgctgggattataggtgtatgccaccactcmtcgacagaaacmawrtatatgtgtgtgtgaatgtgtgtgtgtccataggggaagggrccaggagaatgagatatgtagcccaggstagcctswtstacatsmamctgccaaawrmmawrawwamargtttgtgccactatgtttaactaaacacattctttatgctcactttcaatttacagttttcaggggacactgtgaggtactatacagctagtgctggatgctgcacagttgaggggaaagaacaatcttaagattacaagacaaaacgaatcacctacrtgaaaagaacaaaggaagcagacttccattttgccacctttttctgttcaagtagtaccaaactggagacaagaaggcaaaagtacttcattaaccaaagaacagaggtcacttgacctctaaaaagtttaggactcaggctgttccattccgatgttggagcggccg

SEQ ID NO: 4527 - DNA, 884 bp, Rattus norvegicus
cacgacgcactattaccttacaaacgcagactaacttctaatggccgctgtttaagggacagtaaacgcttaccacaatctagaggtagttcttactcaaggatggtggcatcactagactgtgtcactgtaaatgccactccgaacacctttaaactgcctcctccttgtttgtcaaggggaaggccacctgtaaaatgtggtggtgacagccttcttactcaccccaagctggggctgcgctggacagccatttctcttgagatcagctgcagcccgctgcctccccacctcacacctccaggmtgtgtcagtggtgcagggcggagctcactgtggccttacctatctgtgcagtaactgttcttggttcccttcagccctgcttctttccaagcacctctcctcagytgccatggaagcagggcactgcggtctgacagactggagcagtttgcagtkccgctgtgctttctgagggcctagatttagggtttagttaagtcgttaaytgagaacagatgagatgcttttgaagaacaaactattccttacccagctttgtagcttaaagtaagttttcaagttcatggctttattaaaatgaactttgactttttaaaawrmwwawawmwmawttcggttcwwwtgtttakwttagtaagaattgaarcaattagactataagtmgttttcstgywtstytstttsttwytwttacaaagytcaagratgtrwcmataaaggcattttcctatggttttawrwmaramwmmwrmmacagagtagcctgaacagatacgtctgttttaccatgttcttgatagttcttytgtcagctgcttttattaaaagtcctttctgtggawwwrwaaaaacaaaaa

SEQ ID NO: 4528 - DNA, 490 bp, Rattus norvegicus; identical to SEQ ID NO: 432
  misc_feature (469)..(469): n is a, c, g, or t

SEQ ID NO: 4529 - DNA, 468 bp, Rattus norvegicus
gcttgtcccagcacaggaggcrkcaamgcwggagcactttcaaatctatgacactgggctcactgccccccaaacctcgagaacggctggctttgcaccggacagcagcctgggagcccacagaaccgccagacggcgacttccagacagaggtgtgagtgccacgccggactgcccactgcacagaaatatatatctattttcacactccactttggaactaccaggagccagcgccyctccccctcccgaggctgggcaggaggtgcagaggactcagcctggctgggggcagccagactggcagggcctgggggccagggcccctcctggttctcagaggtcccttagccactcaccagagcctcatctttgccccagcctgtctgtycctgtcctgggctggggaggggggagggaaactttgttgggaataaacttcactctgtggaaaaaaaaaaaaaaaaa

SEQ ID NO: 4530 - DNA, 600 bp, Rattus norvegicus
tgcccatttcaaggggcttctgaccccgacaccctaaatctcggggctcgctaacacctgttttctccggtcgtggtacccagggctgtagggagcctctggcctccgcatccctgacctggcccgacccctcctcactccatctccattcccctgagtaaagttgagattcctgcgctccgcccggtgaccaccctcctacttctttgtcctaataaccctcttaggggaagcctgcacctgcaagaaagccccgccctccgtcacagcccacccctcgacaggatcccgccccctcaaaggccgctgcccctcggagcccgctctccttcagggggacctttccttgggatgacactggcacatcagtgtgtatccagagccccttagtgctgcaccccctcctctttgtgttcctttcactaaaagagacctttcagagtgactcggctaatcattgtgacccctcctctcaaggtgactcctcccctagctctcgcccagcggtgtgacccctttcggcaggttgcgccccgcgtctgtagacgcgggtatgcccccctcaggccagaggaggaggtgcagaggcctctacagccc

SEQ ID NO: 4531 - DNA, 600 bp, Rattus norvegicus
ctcggctcgggaggacaaaagacaaaaacccagcgaggcgatgccaacttttgtatgaccgccggctctgtaacwykwkscggggtttgcttcccgccggctcttctgcctsaggmtgaggracggacctcsagcccttctcacytgttatwaatctagtaaggcarawmmwmmmamhwamragttttttgtagctattacggctcytttgggttggttggttaatttataccgcaatgccctctcagacggtggggttatawtctgggttttgtaaaactctgtatccgagcatttgcaayttttttgttttkttttgtawtatttcttgtaaaggagttgtgacatttttattttaggcgttgcsmtrtgggacgggagaggagtcggatgtacatagcctacaagtctttcatctaaaaacgaaaaacaaagagagatcccccccccaaaatgcatcaaatttgaatcaatacattgaagagagaatagccggtttccctacgaaatcgaaacgtgctaattttatatgcatgtttgtttttttttttagttcaaaatacaattagaaatctgttggaggagaaattatcaggatgg

SEQ ID NO: 4532 - DNA, 803 bp, Rattus norvegicus; identical to SEQ ID NO: 436

SEQ ID NO: 4533 - DNA, 600 bp, Rattus norvegicus
gagcaaagtargtctggtataagacgtgkagggatggttgracctaccacataaacgaatcagcacttgaatggggaaagtgaarggtgggcccctgggcccatccctgtgtgrraattccttatggaaaaagggctggtcccacctgacctccagtttcttcccasyasaarggatgtatcmctttgactgtttcttatcatccctccsagytgasggtctcaagctgagcttggaaaagcctacakatgtggtggggctgaggaagggcaggagagcacctcttggggccccatgatggggccaggcggggaagtcctttgctgtcctgcccctttttgcaytattggcttaaggagtgccgagggtggggagagggagctgcctgactccacagatcgtgagtgtgtgtgagtgtgtgagtgtgtgagagagatggtcagtctgtttaacctgtctgtcaattcttcctctggacctggggcagccaagggcaagagtgggagcaacggccagtaytggagcaggagctcctagytyttgtaccctctaccccctcactaactctggcctyktscagggcatgagtggttaacttat

SEQ ID NO: 4534 - DNA, 455 bp, Rattus norvegicus
cggcacgaggtggacagatggacagacagatccctgatgtctgtcaccatagacacacgtgttgwacatgtggcccttaacacttgacactcttaacactactcatggggctgggtagagggaggcttgtggtttgggggttggtttttttttkttgtttcttttctttttcttttttttttgtaatttcatactagtttttgggtaactgtagggaggaggggagggtaagtgggagcaaggggacatgtcattatgacaacttttttgatattcattagaaatgatgcaatatatcctttctgagatatttacagtattattaaaaatgaaaagggttgggctgttttgcttaacaaactttttattggcaacccaaagagcacaagattgtctgtctgctcgtttttaaaaattaaaggatgtggatcaactcccaaaaaaaaaaaaaaaaa

SEQ ID NO: 4535 - DNA, 600 bp, Rattus norvegicus
gccttcactagataacactgaacacttagaaaatgtgtggactgactcccagagaagtatacagtacaccgaatgtattgcttcccccmkgywygwrkattcacagtatttggaaaactgccttcattttcctgtgtgggaaaagctctcttgttccctgtgttacctgatctcagacccatacctgatggttcagtctgtctttgagtaaaggaagcgtgtttytttttttttytaatgttataatacttactgaccagtgtgttactgcaacttgaatcattcttttactgttgttgggtataaacttatcctgtaccaatgtatttattaacacttgtattttaatattgagcgtatcaataaaaatatttaaaawtaamarawwrwwwwwwammagttctacagcaccttttgtgtattctttctacaccatattgtatatttatgtgtagaaatgtatattttttttaacctgagtatataatttgccaacacagcagcatcaatttgcaccattcatctacagtggatgtctttggcttcaggttttgtgtgtagaatttattgccaacgtgatgatttttttagcttccaact

SEQ ID NO: 4536 - DNA, 600 bp, Rattus norvegicus
aaggggttctggwtcgtttggtagacaggagggaacggccattagaaggtggccgaamtaattccaataacaacaacagcaatccatgttcagaacaagatgtccctacacaaggtgttacaagcacagctgcagacchtgggccagcaaakcccagaagagcacagaggcccaattctctggatctttcagccacaaatatcytggatggcagcagcatgcagataggtgagtcaacgcaggatggcaaatcaggatcaggcgaaaagatcaagagacgtgtgaaaactccatactctcttaagcggtggcgcccatccacctgggtcatctccaccgasccactggactgtgaggtcaacaacaatggcagtgacagggcagtccattctaaatctagcactgctgtgtacctcgcagagggaggcactkccacaaccatggtgtctaaagatataggaatgaattgtctgtgagatgttttcaagcttatggagtgaaattwtttttttgcatcatttaaacatgcagaagacatttwaaaaaaaaaaaaamwrmwttaacctcctgtcagcaacccttcccacccctgcagcaagg

SEQ ID NO: 4537 - DNA, 874 bp, Rattus norvegicus
taagtttgaagcttgttttgcccctcaacagttgttgctggtttgctgaggaggctgtgctgcgcccccaccggtgacagyrskarrgcgctgcccgcctcgggtgtgcggmgcccargtggtggacagccaggcgttaggatggattttcccatttgtcaaatcatgcakagtccagagaacaaggcgatagcaaagctccactgttaacgctgcgcgccatacgtctcatgactgtttttccttaaattakactgactgtccagttccatcaatcawccttttctcaagcagcagcawagcgagaagtagtgtttcttgtytgtttgttttgwtttgtttggmasaagtttactgccacgctggcgcagctatggaaattgtctasaaagtttgcttayggtaaatttsmytgatttctkacaggytacgtttggwaacttttkaytayatagtttacatacttmyaagtctwtcatttaaaracgtgtactgaaacaaatgttgtatttgkttcataagcatcttcctgtaatctaytataaaattgammttaaacatmgmsaatgttttaacagtttwwwaamtcawwrhwwdwmaawmawhwwwmatagttctttttttataaaargrwaaakgaatttaaggacaggcaatagtctcttaaaatttattcmcaagaaccgttaamtgcacagytgccctwagctgcctgttytaaatgrtggtctttttattgaaacmcaaataaacttttctgtartatyhtwtggartataaardgactttaawtgtttgacctgtttaastaascmctgttagtttttattaataaaacgcgcatgbgchttttwwmmaaaaaaaaaaaaaaaaa

SEQ ID NO: 4538 - DNA, 843 bp, Rattus norvegicus
agatttcataattgagaaaatccctgagttgatagctctaaaggcagatatgctgtacttggctcctttaacccatttttcaactttttttttttaaggcttcactraggkktsayyaystassattktrwgggrmaawwtaastcwgstaagscaatatccrtatgcatgaacatttccyagrattycatgaagcagttgagrtcytaggcwactgctacagcagctctgatgaataactgcatctcatmtaagtcttcyttygkcataawacacttaacttctccattaagaaagttctcagcttrgggaaagataaaggttttagatcctakaymatggryttgaagraggtggarmcaaattggywaatatcttaagctgakrchcbsccwttytthcagratacytttcasarkwattcsrctaamgwkkatttttcaaaaaaatgwayttyacatcwttgtwtgtgatsacktgtcagtgttmaggtgtattttagmtaagrvtrgtgratgccctaayttrgatgstttttraagcstawacmtttggtaytgkttggsccttaagyttttacatythtkagcakggaggrcaaararagctgtmcattgttgcbtgmgamwatgtacattttagrccagwtttgtacttgcmytgtcagtatggcaaatgrgtggaaaatgttaawacmswattggattkyttayttcctgttyyrawyycmscybayrcmcwsrctrsamaacctcawkttmystkcatgmcagtggggatttttwtaaatgtytacattytttytawtaaastgttggargdtkwvaaaaaaaaraaaaaaaa

SEQ ID NO: 4539 - DNA, 638 bp, Rattus norvegicus
caggaattcggcacgaggtaccattctsaygwkgccyyggccytasgmggacswrgarytcskyrygmsscgtttccttgtcccggttttttccttcgcacgccagcaggatggcccacaagcagatctactactcagacaagtacttcgacgagcaytacgagtaccggcatgtcatgttacccagagaactttytaaacragtacccaaaactcatytgatgtccgaagaggagtggagsagacttggtgttcaacagagtctaggatgggttcattmcatgatccatgagccagaaccgcatattyttctctttagrcggcctcttccaaaagaacaacaaaaatgaagtacagctgggatcatctaataatctttttcaaatttaatgtatatgtgtatataaggtagtattcagtgaatacttgaaaaatgtacmmatctttcayccatacctgtgcatgagctgtattcttcacagcaacaragctcggttaaatgcaactgcaagtagggttattttaagttgttaaagataaattttcttgtagtttttttcttaatataaatgcctgttttactttacctgttttgttaaataaagtttgtatattgcawwwaaaaaaaaaaaaaaaaa

SEQ ID NO: 4540 - DNA, 600 bp, Rattus norvegicus
  misc_feature (510)..(510): n is a, c, g, or t
tatgccccgacgaaggacccaaaatgacgtcacagggacagccagaagatggggaccatggggtgtctctgtgtcccagctcagcctgmcagcttcatctcccaaagccccccagccagacagcaagaggacagacaagggcagayggcttttatacaaagtatctatattgaaytagtmtatattgtacagcacgggacccgsgcccamtamtgccttttytatgggcccccastgcccaccgagccggtgacccggcggtbgaacaaggccccctccccgccytcytcccaacaacaawtttgcttatttcttctttgaaamwwrmarawmwmwrwgtgtgtctctcagggggagggggctggcaagatggctcagcggttaagagtgctggcctctcctgcagaggcccggagtttgatctctagctcaccaccatctgtagctccagtgcccggggcattggatgcccctctctgacctctgccgtgaccaggaacacgtgccggncactgactggtgcaggcgaaacaaccaaacacgtagaattaaaaatagtagggctgggatttagctaagtggtaaacgcttactaggaag

SEQ ID NO: 4541 - DNA, 600 bp, Rattus norvegicus
cttaaggaaggggtccgacatgggtgagggattacagcttcagcgatggaacagccagcccagaatggattttttttttttttttattgtaaatttgagacttatgtaagcgtgatttcaaaccgtaattcatgttgtaaagtctcagcagaggcggtgaagaaggaggcagagctggacaagtacctggagaacagagtagaagaaatcataaagaagcagggggaaggcgtccctgacttagtccatgtgatgcgcacgttagccagtgagaacatccccagcctcccaccagggggtgaactggcaagcaagcggaatgtaattgaagccgtttacaatagactgaasmstkwcamarmygacsacwctgattctgcatctaycagttttgggctaacatgccttgattctctgcacctctttatgagttcttacatttaattactaattggcaagcagcagcttcccactcagtgggagactgccacatttcgttcctatcatgattggctgggcctgctgctgtccctagtaagatattccgaattccattttatcaataaagcttggtttaacaaacaagaaaaaaaaaaaaaa

SEQ ID NO: 4542 - DNA, 600 bp, Rattus norvegicus
ccgttttttattcaagtagcagaggcctcaagtggctactgcattgcgctcagccatggtcatctgcaccattttctacaccagatctgcttggcaccacgsggmrckarcwckrsscctgcacaatgacattccaatcactaccagccagaagttacagccgaccttgytgattgtcacaagcaggacyttggtccattggcactgtcggtgagagtaagccatttcttgggaagaggagactcctccctacagatctgcttgggcctttgcaaawggcactgcaaacagtcccacgcacgtggagcccatgagctggtgggatgtayaaagatgcctaagcatttcagggctggttctgttcatatccaattctggtgcttaggaacagggacccrkswygatgsccaagggcaaaaagccccattcctattaaggggcatcctgaccctgatgcccagcaagggcaaccctaggctttgtttttcttgctttattccctttctttgttggccttgtgctgggtttgtttacaaagatgtattttgtttaaccaaatattaaaaatgagaagctgrmmmmaaaaaaaaaaaaaaaaaa

SEQ ID NO: 4543 - DNA, 570 bp, Rattus norvegicus
cctggacaagccaggagwtcccctggacctstggctctcttgaawtcagatggywkcyttamagtcwcagtacktgctggtccagaggtagccsttgrccacacytggcacttmtcagaggtgcaggtgactttkwtstgtgtgtrtatgtgtgtgtgtaatggactcaactttctcaaaaggatacagtccttttgaattttgcacagccctagatataatcccttttgataaaagggcctttgcttmtgatgaaaggagcmccgtggaacgtatgtmmatawgtykkyatamttcmwtgmmawgvtsktstbcacttgsatgaaagcagtccctgtcaamtactgcctgtccagggctgtgatgagtcasacmtgggragggaatggatctgttctttsgagctagcctggtgctstgaccattcgactcattgtaagttgccactaccracacaagaccaaagtgtgtgacttgtcattatgcagtgtgacagcattaaagactgwtgctwammmwvaaaaaaaaaaaaaaaaaaaaaaatctcgcggccgcaagcttattcccttt

SEQ ID NO: 4544 - DNA, 600 bp, Rattus norvegicus
ycwgywtsttgaaartgtcatctgtytycwkwwmwgaagtaatgrgccagccgtgtccgccatcttagttgagagagmattctaagagsaygcagkggaacgctttctggagcatcctgggcctcagcctcctagcagttggcacttgccaggaagatatcgaggacactgttacagatgatggagcacagaaacagtatgaagtctccatctcaggamccagtgtagagctgacgtgccctctagagaatgaggacaacttaaagtgggagaaaaatgacaaagtcctgcctgataagaatgagaaacacctggtgctagaggatttctcggaagtcaaggacagtggttactatgtctgctacacagaaagctcaaggaaaaacacgtacctgtacctgaaagccagagtgtgcgagaactgcatggaggtggacctgacagcagtatccataatcatcattgttgacatctgcatcactctgggcttgctgatggtcgtttattactggagcaagaaaaggaaggccaaggccaagcctgtgacccgaggaactggtactggtggcaggcccagagggcawaacawggagcggccgc

SEQ ID NO: 4545 - DNA, 600 bp, Rattus norvegicus
gttagtatacagaacgtatttagccrkyacsmrkgcaacaccacccaatatatwactgatttagaagcaaagatttcagtagaattttagtcccaaacgctgtgggggggaaatscatcttmttcggaactatccattacrkgcatttaaactctgccagaaaaaaaaaataaytattttgttttaatctactttttgtatttagtagttatttgtataaattaaataaactgttttcaagtcraaaaaaaaaaaaawaamwwaaaaaaaaaaaaaaaaaaaatggaagcggccgccagcccgatggcatgggcagctgccagcctcccggccagggcggccacatcgcgacccgcacggcggtacacgccgctcaccgcagccgctacgtcgtggtccaggcgcgtctggctctcagccaacctgagctgcagcagagagcgcgcaggcgctaggacaggggtctcctcggtgccccacgcctccactgcatcccgttgcaccacgagggggggcaggtctcccggcgcgaccctgggctccggctcaggctcggagtcggtctccgccgcctaccccggccacccgcaacccagtggg

SEQ ID NO: 4546 - DNA, 502 bp, Rattus norvegicus
tgcttcgagccatagaactaaagccaaccsrcwsgmkgggaagcttgaaccccactcaggggaccscacttccstacvtcccccaaggaccctttcaggccaccttcctcgaggtacaacagactatgcaatagtcccatccctcmtgcgtccatgcctcggcagggtggttactggacacatgtccaggtgcccytgggcytgagcagytgtttcagcccccgccccatttgtcytggggacacctgtctcacagcagtttaactgtctcagaagggaccatgaataatggccgtcacttgttagggsccaagtggggtgcttcagcytggccaacgtgtctcccagaaytattttggggccmaacaggtktcccsggggwgaaagatgttwacattttaaaggtatttatattgtaagcagcattttgtatagttgatatgwacagtttattgatattcawtaaagtggttaatttmtmtactaaaaaaaaaaaaaaaaa

SEQ ID NO: 4547 - DNA, 706 bp, Rattus norvegicus
cccagcaactttacagacgcctctctcaggtacccagaggacacttgcaaatctggacccagtccaaatcctcagagtggtcttttcaacactcctcccccgactccgccagacctcaaccaggattttagtggatttcagctcctggtggacgttgcgctcaagcaggcagcagagatggagcttcaggccaaactcacagcttaaccgagtgtcaaacaaaacagttctccaaaatacggtcytgaattgccgggggygrysgcaaragatkywttattttatatattttcctattaatatttgcacatgggattgctcaaacgaagcttcctgttactaagatgtcttcarwggaatagtcattccaagaactgcagactaaagctactgtagaaacagagggttttcttwtmgaatgtttcytggtagtttctcataatgtgagacgttcccagtatcatgtgatcttctcctcccaactcctttttttttttttcaagactgtgcaatacttagaagcccttgtgcctctctgttcccatgtggaacatgaccccacatacagtmtaatgaataaactttcagttttttgtttgtttgtttktttttatagattcaagcaagtatgaatytagttgttggatacctttttcatgatgtaataaagtattttctttaaaarwwaaaaaaaaaammwmrwrmc

SEQ ID NO: 4548 - DNA, 535 bp, Rattus norvegicus; identical to SEQ ID NO: 452

SEQ ID NO: 4549 - DNA, 600 bp, Rattus norvegicus
attgctgacagcgamtacccttccaragtggcctttaccttgctggagaaggtactagatsaattctccaagcaggtcgatasaatagactggccagtaggatcccytgctacaatccattacacagccctagatggccaccttagtagataccagaacccccsggaggctgatcccatgagtaaagtgcaggccgaactggatgagaccaaaatcattctgcacaacaccatggagtcyttgttagagcgaggsgagaagcttgatgmctyggyatccaaatcagaagtcctgggaacacagtcgaaagccttctataaaactgcccggaaacaaaactcatgctgtgcaatcatgtgacatagcccacagaggcaggcgctggatcgtcacgycwcktsaacccctggagacaagcaacatcctagaagaggatctggagccaggcagactgtctacttttatttgacgttcccaagaggaatggaggaacgatttaggggggacatcgacgttcatgtgtgtggttgtgactatgggaaaaaatttgagctcaaagatgtaatgttgggaaaatgaaaccataaacttttaagtggc

SEQ ID NO: 4550 - DNA, 517 bp, Rattus norvegicus
aagaattcggcacgaggccccttttccaggaaatctggcctaactttaggatttaaaaacaaaagcaactctaaagattgaacgggacttgtgcgtttgcccgcacactgttttaacacagtgaggaaacctactcccctcaaagggtttatggaactttgtggatctgtctttggtaaaaccacacatgtatatttattctaaatcaacctgaacttttgaaacgtgcaattgtcgagattttgcaaaatcaataaagggaaacagatgtagaaaaaaaaataagttatgtgatagcctctaatcaaataaggtgaccaaataagccttaattcaccattaagaaaccaatcaataattgacgtgtgtgatcttttgtttctttttaagagatgatgtatttcgttgaaaaaatatgtatagaactcaaacaatattggacttttgctccttttgttgtttgacttggtccctaatacagtaatgtttgtatttctatgaaaaaaaaaaaaaaaaa

SEQ ID NO: 4551 - DNA, 600 bp, Rattus norvegicus
gactctttcacctcctggtggctgtggatggagtcaacgcactctggggaaggaccacgctgaaaagagaagatagaaccttgattgcccmrkwkgaamkykccyttswsyaywacytragaamaatggtkmarmatgaswragcttcaacakaggaagggaggaaggagctraagttcckgmryraskgcaaccctgagcagctggarcggctytgsgcctcactgtgagtgcggacatggagcggcaagccaagccggaagaygccttccttcaactgcctcgcatgacggaggcccacggtcccaagccaagcagcccgacggcactgacggacatgtgacaatgggctgtccggttgtcctacaaggaataccagttttctgttaggatttttatattaaaagtagatctgtttctaarwawwrwawwrrawwwgccataaggaaagttctacactggccaggttcggtttctttggcattgtttgttagcatctgaagaaactcagcgctacagaaattactagttctgtcttctggaattaaatcaattcctcctakacagggaactcttcttawamaaaaaaaaaaaaaaaaa

SEQ ID NO: 4552 - DNA, 600 bp, Rattus norvegicus
  misc_feature (572)..(573): n is a, c, g, or t
gctccaagcytcaactgtaacctgcagcaaacarataacattcctggcaagaaragacaagtcttttttaaagtttacwgayrskwasayckgyrrgcwkctagtccyckgraagkggkygktytsstakgcwywgmsakctcagaaataaraaccccattttgaaacatccaggatgtcccaatattaccatgattttttcccccctttttgctaatccagtccaggttggaaagaagtctcctctgtgtcagattaagccctgtctcttaatgatatggacaaatgagtgtgcctaaggccatgagatgtttcctaatgcagaaggaatctgttgtacgtttttttgattgtactcttctakgctggaccgaattcatatgcagatcgaagtsastcctgttctttacagatggtattttgatagatactggagtttgtctgtgttatatctgtgccccttctttaagaacaatgttgcattaygttcctttggataaattgtgatttgacaactgatttaaataaacatatttgmctamwwaaaaaaaaaaaaaaaaaaaaaaaaaaannaaaaaaaaaaaaaaaaaaaaaaaaaaa

SEQ ID NO: 4553 - DNA, 484 bp, Rattus norvegicus
tgaaaacagcatcatcctcaatggcactgtgatggtcagcccaacgcgtctgcccagctcctccggcggagaccrktcaggcagtggtgactgggtgcggtacaagctctgcatgtgtgcagacggcacactcttcaaagtacaagtaacaagccacaacatgggctgccaggtctctgacaacccttgtggaaacacgcattagaaggagcatccgcagggctcagcatgttcagatctaactcgaccctccccttttgaagaatgcatgtgagccatgtttctacagtttgcgtaacttgtaattattttaactgggaaacaccactgtatctattatgtgctctccatatttaaggggttttgagtgcctaaattctaatacaatttagtaagttgcactgatattcaaaggacagttctctaaaataattatgagaaattaataaaatcaaaattaatctttgaaaaaaaaaaaaaaaaa

SEQ ID NO: 4554 - DNA, 600 bp, Rattus norvegicus
aaggtatctggaccattaagaaaaaccaattttgtaattagctttaaaattaagccaggctactcgtttccctgcaagtgaaattcgtaaacagtatacatcccatgggttggtctttgttgtttacctgacagtctttcttaaatgccttctgtggtctcagatcagctgggagaccataaarkrawtatakmwtsbgyygcwwwgktsttyttttttataagttgatgttgcattttattaaatattaactttttatagtctagaacacaaaaattctgttgatcttacatacagataarttgcttttctcattggtatgtacctaaaaawawwaaarraaaaggaataatataaattttagagttaccaactatactatgttttctagtagtacttgaccggcttctcaaagttgtgcacacaattggractcgcatattactttactcttaawtactgtgttcacaagcctcggatccttagatcyctygygyctgtgactaaccacagtgaccacttcttgtatttctcacacatgtatattaccattttttaatagattktactttgaaaaccctcgwraaaaaaaaaaaaaaa

SEQ ID NO: 4555 - DNA, 485 bp, Rattus norvegicus; identical to SEQ ID NO: 459
  misc_feature (301)..(301): n is a, c, g, or t

SEQ ID NO: 4556 - DNA, 600 bp, Rattus norvegicus
aagccagtgatgtggattagtaacagagcagcagtcacatccaaaggaggatgtcacccctgaggaacactgtacaaatgaggtgggatttgtaatcaacaatggaaattaacatgtttttatgaataaataacttatttcttatatggccaaggatgataaaattatttcattctataggtatggtgaataaaacactttatgcagataaagatctgattacatttaaaatagtcaatgtatatggaaggcttgttgtgttttatttaaaaaaatttttttaaaaacttaaagcagtcaaagaaatggttcttgatttttgtagacaatgttctcataaggccataaagggctggcacagttccctagtaaatcatttaactgaccttccccattgtgcagctgaggtttcattggagatgtaggcctgcccagtgcagcccagagtagcctaggggctgatggtgtggcatattcttgaaatgaaaatatctgcttttaaagtgcttttggaagatgattgtgtctgtaggtggtcaaattatggagagttaatttacataagagcttgggcaaattaatatatcataattttacacg

SEQ ID NO: 4557 - DNA, 600 bp, Rattus norvegicus
atggggacttccttgtgagagacagcatcaccaacccggggcagtatgtcctcacaggcatgcacgcggggcagcccaagcacctgctgctggtggaccccgagggtgtggtacggacaaaagatgtgctgtttgagagcatcagccacctcatagactatcacctgaagaacgggttgcccatcgtggctgccgagagtgaactgcatctgcggggagtggtctctcgggagccatgagccaggtgacagtcgtcagcccttgctgtggccccgaaggctcagcctttctctcagaccctgaagccacgagaaccagaatggttaccacctctccttccgcatgagcctcaggaagccgcctatttccagctgcacttgctcagctggctgggccagtgagacagagtcagggttcaagcccctcgtcccacctgagccccaaccctgaacttgggtgaggccatataaaccaaagacagaccgagtcgcctttaacaaagacatccaaatgcaggtcccatgcctctggtgcccggcgcgggtagagacatcgggctgtgtccacagagttgacgtggacggctctgtgtgggcagga

SEQ ID NO: 4558 - DNA, 600 bp, Rattus norvegicus
  misc_feature (568)..(568): n is a, c, g, or t
  misc_feature (571)..(571): n is a, c, g, or t
gaaaccaacccctgggccctgtgttgagcaaagctgcgtctgtggagtgtatcagccccgttacacccagagccccggacgccaagatgctggaggagcttaatgctgagccctggtaccaaggcgagatgagcaggaaggaggcagaggctctactacaggaagatggagacttcctagtcaggaagagtaccaccaaccccggctcctttgtcctcacaggcatgcacaatggccaggccaagcacctgctgctggtggacccggaaggcacggtccggacgaaggacagggtctttgacagcatcagtcacctcattacttaccacctggagagcagcctgcccattgtctctgccgggagtgagctttgtctccggcaaccagtggagaggaaaccctgagcttgccctgcgcccaggtcaggaggacctgggctccgctgctctcagcctatggaatctggggcaactgtctgtgggcccatcaccttcttcaaaagccccgtgagagaggtttccttcaagttcaaatttcataaatatgttcacacgactcagatgcatantanaaatgttatacccacacatcctgtacaaa

SEQ ID NO: 4559 - DNA, 600 bp, Rattus norvegicus
ctccgggaccagaaccacaagcagacagtgaagatgcttgctgtggtggtgtttgctttcatcctctgctggctgcccttccacgtgggaagatacctcttttccaagtccttcgagcctggctctctggagatcgctcagatcagccagtactgcaacctggtgtcctttgtcctcttctacctcagcgctgccatcaaccccattctgtacaacatcatgtccaagaagtaccgggtggcagtgttcaaactgctaggatttgaatccttctcccagagaaagctttccactctgaaggatgagagttcccgggcctggacaaagtcgagcatcaacacatgacagcacatcccatctctccgccatcgctcattgctctacacccgaagccgtagccaagcgggacttgggaggaggcagaacctcagtttggggattagagacaaatgggtctggaaacaattgggggtggggagtagagccagatgggcagggtccacgcagattgatctgcttgtgcgcccaccagagcactcatgtgcaacccctgcacacccgtgattttattattggggctactggcagctttgcagctca

SEQ ID NO: 4560 - DNA, 600 bp, Rattus norvegicus
gacagctgtctaagcatccattgcagcacaaactaagtgactgtgcacctggtctgcacctggtctgcacctggttgcgtctctgcctgaccatgtgagctctttgagaagagtgatgactactgggcttttagctcttttcctttttgggacacagtcttgctattgtactccatgctgtccttgaacccacaagccctcacctcaccttcccaagtgttgggttacggacattagctatgsctkccagctttattagtctttctatctcctgccatggtctatccccggctatttgatactatatattctcagattgaatctggaccatgtggtagaagggatgaccactsmccaggctytacccaccactttatcttaatcttttctctaggaaagtgaatctctccttgccttacagcattttaaagctccccttggctgttctgctctttagccactctaaagtggatccactctacttctcaccacccatctttctgcaccccagcctgtctttttatattwaaaaaattgtatttattatgttttcaaataaaatgtttactccttkaaaaaaaaaaaaaaaaaaaaaaaaaa

SEQ ID NO: 4561 - DNA, 600 bp, Rattus norvegicus
accggcaccccagaagaggagcacatgggcaagaccacgtcactcatcgagagccagcaccaccacctgctacactgcttagaaaagaccactgggttatcctatcttgtggatgatcccctgttgtctgtacgaacctccaccatcaagaaccacgagtttattgatgagcagatgtttgagcagaactgcatggagagctcaatgcagaactacccatccaccagaagccyttytctgtccagccactcgggcctcaccaccacytgytgctcccgccgtagcaagaagaccacgcacytgcccaactccaacctgccggccacccgcytgcgcagcatgcaagagctcagcaccatccacatccagggcagtgagcagccctccctcaccaytagtcgctccagccttaatttgaaagcagacgacggactgagaccaaactgcaaaacatcccagattacaacagccatcatcagcatccctactcccccagctctaaccccagagggagaaagtcggccaccccctgccagcccaggtcccaacacgaacattccttccataaccarmaawrwwrwmaarrwctctgycttgtaa

SEQ ID NO: 4562 - DNA, 600 bp, Rattus norvegicus
tgcagtttctgtccccatgtttgggacaggaaagcagagacttgttggaatctgcaaatggactcagcacattggcttcctgaggagtccgggaaggaccacggttcacagtggcacctagaagggaatgccagaatgccacttctccctctcatcccagggatcccctaaagcctatagcccatcctcctgtggaataaacagcgtatctgacaccagaramawwwrwrawawmcatctctcagagctgggtgggtgggtatggttctgtaagctacagtgacatttgaatatggacctgtgggcttatgaaactgtgggagggagtgtctgccctagtcaccctacctttcccccctggaggcccagttggggcctgcagctacatccccagaaaccccgccctggaacagttgctggagaaagaggattcaacccatctttcagatgaacagcaataccctcatcctgctcttcattaaaccattaagagagagagattcctgctgggtatggtggtacatatctttaatcccagcacttgggaggcagaggtacttggatccctgagttcaaggccagcctggtctacagagtgag

SEQ ID NO: 4563 - DNA, 600 bp, Rattus norvegicus
cctgccattcactgtaaaacattcagggtcctctcatttctgttcaggaaatcctgtagtttattktttkttawwwaamaswawwaaarwrarwttttgtawawwwwmawwwwaamwwtatttgtgaatagtgattgtggcatgtttggggatgttattttaatatttcacaatackgmarwkktaatttttttttttaaaaaaagaaagttctggaagaaacagattcatgtgtaacagtgaatattggaccactgctgcttttcacgattgtcagctggttttatgttaagccccgtagcctaactgctgttatttctaactgacagacatgtattaatattgtactttgaaggttataaatattatgtgaaaattccttccttcgttttgaaatttataataactaaatctctgtgttatataaaatgtgatctttgtggaaaaaaaaaaaaaaaaaaaaaaaaattggcggccgcaagcttattccctttagtgagggttaattttagcttggcactggccgtcgttttacaacgtcgtgactgggaaaaccctggcgttacccaacttaatcgccttgcagcacatccccctttc

SEQ ID NO: 4564 - DNA, 1400 bp, Rattus norvegicus
agaacagtggaagcggcaattctccatctgcagagatgagaatgacaggctccgcagcaagattgaggagctggaagaacagtgcggtgagatcaacagggagaaggaaaagaacacccagctgaagaggaggattgaggagctggagtcagaggtccgagaaaaggaaatggagttgaaggatctccgcaaacaaagtgaaatcatacctcagctcatgtccgagtgtgaatatgtctctgagaagttagaggctgcagaaagagacaatcaaaacttggaagacaaagtgcggtctctaaagacagacatcgaggagagtaaayacmggcmkcgysmcctgaagggggagctcaagagcttccttgaggtgctggacggaaagatcgatgacctccacgacttccgccgagggctctccaagctaggcacggataactagggtggggcggagcctakatggagagtggaaagcgtgtgtgagagatgaagtggrcatagggcattctccgtttgcttctgtaatgcgggtgcgttctgtctgtstccaggccagtcgtgccgtccactcgctcctccagaatagaaaatctcttgcttctctggctttgtgaggtcgtggacacctggaagcttctgactcaggaatccagaacggtctaccttagccgtttacgcagtcagggcagggacattcaratyttcccttaagggctgttgcaaccctatgaactggggatgggggaagtattttctaatccaagtatcattaacctttacaacaggcmykwgggcgccttccgctgcgtggcactcagtgtgtragactctagattccagaccgggarcacgtggagggaacatcttttcccaggatgcattctgttcctttagcagaggtagctaacctttcgaagttatgacagatttcacactcaaaaactgcacaattgatctacccaaaaagaaataattattwaaaaaaaaaaammwaacatattttaagtaaatacactgttttgggttggagcgcattcatagttaccctcagctgcatgtggcctttggactgtagkccacacaaacstcktgmmgrawycatttartggagacttgtccagtgggaagacaaaccagaagttttggcgtgcgcttactgacaaggaattacttgtacmtactmtgacccatcstcccstgatttgtcacggttgsaacaatgtttttttgtktgttagwwtgtkttgtwtytgwtttgtdtgctttcctttktaaatttcagaacagatgcwtgagctgttggaacagaatgcagggagggtgtctagcacagtytgggcacataataggtgmttaataaacattcgttcasttaaachtwwaaaaaaaaaaaaaaaaaa

SEQ ID NO: 4565 - DNA, 600 bp, Rattus norvegicus
ataacaaaatcgccctgaaaaactgtggtggtatcccagcacttgtgagactccttcgcaagaccacagacctggagatccgggaactggtcacaggagtcctttggaacctctcatcatgcgatgccctcaagatgccaatcatccaggacgccctggcagtgctgaccaatgcagtgatcatccctcactcgggctgggagaattcacctcttcaggacgaccggaaaatacagctgcattcatcacaggtgctgcgcaacgccactgggtgcctaaggaatgtaagttcagctggagaggaggcccgccgcagaatgcgggagtgtgatgggctcacggatgccttgctgtacgtgattcagtctgcactggggagcagtgagatcgatagcaagaccgttgaaaactgtgtgtgcatcttgaggaacctctcataccggctagcagcagaaacgtctcagggacagcacatgggcacagacgagctggacgggctgctctgcggggaggccaatggcaaggacgcagagagttctgggtgctggggcaagaagaagaagaaaaagaaatcccaggatcagtgggatggagtaggac

SEQ ID NO: 4566 - DNA, 600 bp, Rattus norvegicus
gtgccggttctggagaacactcarggtcacttgatcactgaatctgtcatcacttgcgagtacctggatgaagcatacccggagaagaagttattyccagatgacccgtaygagaaagcttgccagaagatgacctttgagttattctcaaaggyrcmgkctctggttacsagttttattagggcgaagagaaaggaagmccatccgggcataaaggaagamctsragaaaragttcagcaagctwraagaggctatggstwawaaraggmcagscttyttcggtgggaattcgctytcaakgrtcgattatyttatttgsccskggtttcagmgactggaagcactggagctcaatgagtgtatagaccacmccccaaaactyaagytytggatggcaaccatkcmgraagacccykkkgcatcatcccamttcawtgrtkccaagacctaccgtgattacttaagtytytacctacaggacagccccraggcctgtgattatgggctytraggggcaaragccctcagcgaatratgttttccttcatcgattgaawagcatgcttttattttammmhwwwaaaaaaaaaaaaaaaaa

SEQ ID NO: 4567 - DNA, 1400 bp, Rattus norvegicus
  misc_feature (1380)..(1380): n is a, c, g, or t
ttgagctgacccaggggctgcggcggctgcgggatgccgcgagtgacacccgcgactcagtgcaagctctgaaggaggtacaggtccgttctgagcaggagcacggccgcttggagggctgcctgaagggcctgcgcctaggccacaaatgcttcctgctctcgcgagacttcgagacacaggcggcggcgcaagcgcggtgtaaggcgcgaggtgggagtttagcgcagcctgcggaccgccagcaaatggatgctctaagccggtacttacgagctgctcttgccccctacaactggccagtgtggctgggagtgcacgaccggcgctcggaggggctctaccttttcgagaacggccagcgcgtgtcattcttcgcstggcaccgcgcactcagcccggagtccggcgcccagcytagtgcggcatcccatccacttagcccggatcagcccaatggcggcatcctggagaactgcgtggcccaggcctcagacgacggctcctggtgggaccatgactgtgagcggcgcctmtacttcgtctgcgagttccctttstagagagcaggtctctgccgcggagctctagcgcacattctgcaccgtacaccgcgcaccatactgttaggggtctggggtcgctcagagattaagcaasacsakggatacattttaataagaagaggcttttaattttagatactggcacccagactgattggggccaaggtctacacctgagatcgcttccaagatgcaagccctagctattatcagcccagagcttataaaggcaaatcccacaagawwrmawrwarmmwgatgacatggaggcaggggcttaaattttaacatatatgtcttgtagttgtcctagtcatcctttgagcagaggaagcaagattgattacaaaagcagagatagcagttagtcgtacaactaaatttgctagaacagcaaattttacaagaccaatcaatttcaaaatagtcttcaatatctgggagaaaggggaagtggactgctagtgtacagcctgcacaagctaggagctttcgtcttagagccatatttgctttggtctctcaagcgtagtgagtctaaacttctaaatgtaatgttgaatacctacggtgtacattctgcaccctgtaccctacactgcgccctacatcccactctgtacacctttcattctacaacctacatagtgcaacctgcaccttgaaccctccttgggccagaagtgccaccaatcctggctggtcccccacccccaccctgagagatagcctgtacaacttctccatgtccccccacctgtctttgaaacttcaaggtcccaactaggcccggtgccaataaatccttttaaantataaaaaaaaaaaaaaaaa

SEQ ID NO: 4568 - DNA, 600 bp, Rattus norvegicus
aagtaatagcattcactctggtgatttatgggaaggacagtagttcagctggggaatttctgggttcttctggatggcmaagttmaaggtggcgtggagggttatggatggagcctmattgtcttctatgggccccatggagccagcctcaggttcaaccagcaaaacccactagggctgaaaacctcctccatagcaccttcccagctagcaacccatataccgygctgaggcaygtctyywtkwwytyyyhykwbdcacagaacaaccagccctgtttatttacagacttttctggagaagctagcagggcattgctaaggcaggaagcccgaccccagtggccagtcccttacaataggcctytaagggtcgggtctctttttttgtgcagaaaaaaaaatttttgaaaacaaaacagaacasaaaccccttctcaataaacaacatgtdaacagaawmarmwrhwmmarhmtctactaggtctcattgtgtcttcaagggcttgtccgtgatgggcaatggggagggctggcccatggggccattttcctcctcctccagggagccctgggggtaaaccacgaaacacagctcctg

SEQ ID NO: 4569 - DNA, 600 bp, Rattus norvegicus
tctttaagaatttcatgcatgtatatagtgctttcgttattgtagcttctctcttttttagttgtccccacacccatcaacaactgttcttctctaaaactcctgtattcctgtggggagttttatttttaagatgggcatcaaactatatatcccagctgacctagagcttgctatgttgaccaggtgggccccaaatcacagtggtcctcctgcctctgtttcccgaccgctaaggttccaggtcattggatcttgtctgtaatttttaagttcagttcttagaatttgatattgatcaatccagtgtcattgtgtcttccagcctckgtcatgttcacaccttaaatcttattaatctccaaacccaaaatatccaacttttaagttcaccatttaaaacgcctctttgcgtgttaaatactctcactgcacttgaaccaacaccttgtgytcgcacggaccagatagatgatctcacagtttgtcacctgtgtaacaggcaaacccagaggaygcctccaagataatcaaactggaggtttcaaaaataaaacatctgccataaaaaaaaaaaaaaaaaaaaaaaaaaaaaaaaaa

SEQ ID NO: 4570 - DNA, 600 bp, Rattus norvegicus
ttcgctacgacgacgaaggaggcggggaggaggacacagaggcttttgacattgcaactttgcaaaacccagatggaattaatggatttttaccccgtaaggatattaaaccagatttgcagtttatgccaaggcaagggcttgctccagttccaaatggtgttgatgtcgatgaatttataaatgtaaggcttcatgaggcagataatgaccccacggccccaccatatgactccattcagatttatggctatgaaggccgagggtctgtggctggctctctcagctcgttggagtccaccacatcagactcagaccagaattttgactacctcagtgactggggtccccgctttaagagactgggcgaactctactctgttggtgaaagtgacaaagaaacttgacagtggattacataaataatcaatggaactgagcattctgtaatattctagggtcactccccttagatgcaacaaatgtggctatttgttttagaggcaagtttagcaccaatcatctataaactcaaccacattttaatgttgaaccaaaaaaaataataaaaaataaaagtatatgttggaggtgaaaaaa

SEQ ID NO: 4571 - DNA, 1400 bp, Rattus norvegicus
ctatccgacctggagtctaatatcatagccgtggagagagtcaaggagtactctaagacggagactgaggctccctgggtgttggagagcaaccgtgctccagaaggctggcccaggagtggggtggtagagttccggaactattcggtgcggtaccgcccgggcctcgagttggtgctgaagaatttgactctgcatgtgcagggtggggagaaggtaggcatcgtgggccgcactggggctggcaaatcttccatgactctttgcctattccgaatcctggaggccgcagagggtgagatcttcattgacgggctcaatgtggcacacattggcctccatgacctgcgttcacaactcaccatcatccctcaggaccccatcctgttctcgggcacgctgcgcatgaacctcgatccctttggccgttactcggacgaggacatctggaggaccctggagctatcccacctgagtgcatttgtgagcagccagccgacaggcctggattttcagtgctctgagggtggggataatctcagtgttggccagaggcagctcgtgtgcctagcccgagccctgctccgaaagagccgtgtcctggttttagacgaggccaccgctgccattgacctggagactgatgacctcatccagggtaccatccgtacccagtttgaagactgcactgtactgaccatcgcccaccggctcaacacaatcatggactacaaccgggtcctggtcttggacaaaggagtagtagctgaatttgattctccagtaaacctcattgcagctggaggcatcttctatgggatggccaaagatgcaggactcgcctagaatctgcattccaaaggtttcttccytgtctgaatcggacagcaagtagctgcagcatggatttgatggcaacgagtggggacatttgagttggttttggttttttttygttttttgttttttttttttttttaaattctgcaaattgccttacagactagccatacttaacagtggaatgaggaagtgggtccttggaggtcacagccagttcacagccaagttcagaccagtccctgggtctcctagacctagtctaccattattcccgtactgcatttttttttggttctttttttcagagctggggaccgaacccagggccttgcccttcctaggtaagcgctctaccactgagctaaatccccagcccccgtactgcagtttttaagagaccctgctcctgcctctacatattcatagtttccaattttttttttaaatgagcctttctccttctggaccagggacwgcyaggtcagtctgtccggggaacagaatccctggttggtgctgtctgaatccactgacgaaataaagccatgagcagcagc

SEQ ID NO: 4572 - DNA, 1400 bp, Rattus norvegicus
rctatycagtatcgtctgggtgtcctgggctttttcagcactggagatgagcaygccagaggcaactggggatacctggaccaagtggctgccctrcgwtgggtccagcagaatatcgcccattttggaggcaaccctaaccgkgtcactatytttggcgwgtctgcaggtggcacaagtgtgtcttcacatgttatatcccccatgtctcaagggctcttccatggtgccatcatggagagtggagtggccctgctgcctgaccttatctctgaaacctctgaracggtctccactacagtggccaagctctctggatgtgaggcyayggactcagagrccctggtgcgctgcctgagagcsaagaktksagcakwgaytctkgtmatymacmaggtcttcaagatgatycccgctgtggtggatggagagttcctacccaggcatcccaaagagctgttggcatctgaggattttcrccctgtccccagcatcattggtgttaacacwgatgagtactgttgcaccattcctatggtsatgggcacwgytcmaatmmtmwmggagcyatscagagagwaymtgmakgctgttctaaaggatacagcagcacaaatgatgcttcctcctgagtgtggtgacctgctmatggaagagtacatggggaayactgatgatycccagaccctacaaatacagtacrcwrakatgmwgrraracttcmkgtwwgwgatmmctrcavtccwmktwgymcmstytcmrsgttcccatgcccctgtctayttctatgagttccaacatgcacccagctatttcaagaatgtcaggccaccccacgtgaaggctgaccatgctgatsaggttccttttgtctttgggtccttcttytsgggcatraaasktgacttcaytbwkkwskagarrcwkvwgakyaggmbbwkgatkawgtwctgkbycwrbttkgcaakmcasrggaaccccaacagcgagggtytaccctactggcctgyrttggaccacgaygagcagtacctgcagttggacacccakcctgctgtggaccgagccctkaaggccagaaggctgcagttytggaccaagactytgccccaraagatysaggagstaaatggagctcaraaaaaccatgcagagctgtagtgtytggtkaaakgaacaragtgtgggagtdagggcaggtgggatcattytgagtttcaaagtctaattttytgttccaacackcagaatcctttccaaycccaatattttccctttyyracatgaatgaraagcccyccrtgtgttactytttattyttyygrgcaaamtttaattggactcaataaaagttcccataatagtgtggwtatatgaammmwaaaaaaaaaaaaaaaaaa

SEQ ID NO: 4573 - DNA, 600 bp, Rattus norvegicus
cagcaagaccaggcactcatgcacctcaatgccacattgcgaggctggaaggcactgtcccagratgagctgtggggactacaccgactctatggctgmctggrmckgatywytswswgyamrwccwgggcacgaaagggattttgtgatgtccgccagaggctcatgaagaggctctgccccagaagctgtgatttctgttacgaattcccatttcccacggttgccaccaccacatcacccaccagaacgaaaacgaggttcgtgagagagggtaggaacatgaccttccactgtggacagaagatcctacacaagaaaggcaaagtatactggtacaaggaccaggaacccctggagttctcctaccctggctatctggccctgggtgaggcacggctgagcatcattgccaatgcagtcaacgaaggcacctacacatgtgtggtacgccaccgccagcgtgttctcaccacctactcctggagggtccgagtgaggagctgagccagctccagcctctgtgctggaagccagcagataaagcactttctctctgaaaaaaaaaaaaaaaaaaaaaagaaaaaaaaaaaaaaaaaa

SEQ ID NO: 4574 - DNA, 600 bp, Rattus norvegicus
attgctacacagagatcagcagccaggcatatgcatgaaaaacaggacaagatcaaatcttttctggtcagttattaggagtaggagacagatgtcaaaccattagtctcgttgtcactagctaggcccagacctatgtctacacatagagaaccaaggcaggccaaagsccttywcsagtacaccaactgagaaaagaacagtgccatttttaagaggaaagacagacatttcacacagamtgaggcaacatttgagcctttaaacccgtagctsggsavgaggaagaaaacaggagtgtrrtrtcctcctgagtggaaagggcaaggttcttattgcactcggrctgttcagaatgtagaaaggacgcatttgagggaawatctatttgagcastgatttactytgtaaagagggcaaaatctctmtgtcytaaastaatggaagtgattttcccatgctcatgtgtaatgatttwaacattactcactggagagattggactttctggagttatttaaccactatgtycagtattttagsgctttwtgayaatttaatataaatkkarctttytwwawwraaaaaaaaaaaaaaaaa

SEQ ID NO: 4575 - DNA, 600 bp, Rattus norvegicus
ctccaggaaccagcgttcrgctccagacccggggtagaacccagcccagttctaagaactcaagagagtagccaccatcttaaagcaaagtagcrggtggggaaaaggtgggtaraggagatgctacttaggggktgggattttccagtcaggsccattyrgacasgggaatcgytgrggctttcagtsgmwrrggywykhkkttttccctgyttcatctvtcggcctcaggagaggtattaacagtattatcmccatttatatcctagctgtcctgarccaaatctgccattggaggtgtcttcccctgtgttggttcyccaagggacgttgyatggggatttgtgggggcagggcagcaaggccttkttctytaaatgtccagwaacactbtamttrccmttkccambtgggtkcytcacacaytccycagaggggaggtaacatstbtgccccatttmcmtcctgttccttggcttggtcattccctacctttytattttstgktaaacttgscttttttttytttttcatattgaaaagatgacattgccccgrgagccaaaawtaawtgggawttggaaaaaammdvrwrmmaaa

SEQ ID NO: 4576 - DNA, 600 bp, Rattus norvegicus
ccgcgggggctgtgagcagcggtgcctaaacaccctgkgcagctacaagtgcagctgtgaccccggctatgagctggccccagacaagcgtcggtgtgaagctgcctgcggtggattcctcaccaagctcaatggctccatcaccagccccggttggcccaaagagtaccctcccaacaaaaactgcatctggcagttggtggcccccacccagtaccgtatctccctgcaatttgacttcttcgagactgagggcaatgatgtgtgcaagtatgatttcgtggaggtgcgcagcggactcacagccgactctaaactacatggcaagttctgtggctccgagaaaccagaggtcatcacttcccagtacaacaacatgcgtgtggagttcaagtctgacaatactgtgtccaaaaagggcttcaaggcccacttcttctcaggagggggctgtgtggacttttgggacacccatcgaggagaccctaagacaagaaggagaagcagagcctgaagaccttcagtctgaccccagcacctccggggcatttgggcactgtaggaaaagaggccagctctgcagccccctcggggacgccc

SEQ ID NO: 4577 - DNA, 1400 bp, Rattus norvegicus
cggcctcggttcttcctcttggagaatgtcaggaactccgtgtccttcaggcgctccatggtgctgaagctcacactgcgctgcctggtccgcatgggctaccagtgcaccttcggtgtgctccaggctggacagtatggtgtggcccagacacgaaggagggccatcatcttggctgcagcccctggagagaagctgcctctgttcccagaacctctacacgtgtttgccccccgtgcctgccagctgagtgttgtggtggacgacaagaagttcgttagcaacattacarggctaagctcgggtcccttccgaaccatcacggtgcgagataccatgtctgacctccctgagatccagaatggagcctcagcccccgagatctcctacaatggagagccacagtcctggttccagaggcagctgcgagggtckcactaccagcccatcctcagggaccatatctgcaaggacatgagcgcgctggtggctgcccgtatgcggcacatcccgctgtccccaggatcggattggcgtgacctgcccaacatacaagtgcggctgagagatggcgtcataaccaataaacttcgctacactttccacgacacgaagaacggctgcagcagcaccggggccctscgtggggtctgctcctgtgcggaaggcaagacctgcgaccctgcttccagacaattcaacacgctcatcccctggtgcctgccgcacactgggaaccggcacaaccactgggctggcctctacgggcgtctggagtgggatggcttcttcagtaccaccgtcaccaaccytgagcccatgggcaagcaargccgggtgctccatcccgagcagcaccgggtcgtgagtgtgcgggaawktgctmgctcccaaggckwkscagatacctaccggttattcggcaacatcctggacagacaccggcaggtggggaacgytgtgccaccaccactggccaaagccatcggcctggagattaagctctgtctgctggccagcgctcaggagagtgcctcagctgcagttaaaggaaaggaggagactactaccgaggactagtgctctcacccagagccccacgtgcactgatgtttttaacccgtcgagccccatcatttgaagtgttctgctcagtgtctgtgaccatsgctgacactaagctgtttggaggtttgttttgtgaccaagccgtgtagwctttgtgcattctgaattttaaggttttgtttttttgtttttttgttttgtttttttattctgtattctatcagatctgccactgtgtgggtggcaagtgagacttgatgtagttttatatgttgtaatatttcttcaaaataaagcgcttctataaagcaaaaaaaaaaaaaaaaaaaaaa

SEQ ID NO: 4578 - DNA, 300 bp, Rattus norvegicus; identical to SEQ ID NO: 482

SEQ ID NO: 4579 - DNA, 600 bp, Rattus norvegicus
cgcgtgtacgcgagctgtgcagagccccacgacggtggcaggaagggatcccgcgcgcgccgcctcttcgcacacttcacctgtgccacggacacgcacagcgtccgcagcgtgttcaaggacgtgcgggactcagtgctggcccggtacctggacgagatcaacctgttgtgacacggggaacccgaagcggtggtggcgaggacactgcgccccstggtggccactctcggaactgcaggcmarggaagtcaagtccaagatctgctccccasgggscctccaagcccagcccctctgtaattyatcccctcactctcctagctgttagagaaaggacctttawccccagcgctcggaggcagaggsaggaggatcctctgtgagtwccgggatcctgggccaaaaactaaacaaacaaaaccggatagaactgtccggggcttgtgacttcccagggatcctgtccaagtcctcctgtgggcctcatgctgggtaagtgaaatgtgcaaggaaggaagttctacttgctgtctacccattggttgractgaggtagactccaattaaagattgacttttgawaaaaaaaaaaaaaaa

SEQ ID NO: 4580 - DNA, 600 bp, Rattus norvegicus
tcctccatcacagtgggcagccctgcaagagactctgccaagtgagctcaaccactgtgcatgttcctgaaggagatcactatttgtctttccgatggccatcaggcggccacctmtacctcctcgaccccaaatgtgcaggcctggctctctgaacccactttgccagctgctgccctgcataccacgtctactggaggcgcgctgcggactcagagacgaggcggcaggaaaagcctttgctgagggacagcccagtcgctggctgagcctgaggacagcaggcctctgggtcccaccctgcaaatgtggtcagtgatcctatctcggtcctgagacctcaaggtggagggactcagtcgcgaggatgttccaacaagcagggctgtttgctctgtgacgggagacctcaggaaggcaggaattggggggatggatgctttggggtgtgtggtcggcctgggtgactcagcctactcaagctgtttctggcttcctggctggatgtggtcctagtgactcatccctgctctggggagctcaggtgctccaaaatagatgtggyyttttaggggctctggwwaaaaaaaaaaaaaaaaa

SEQ ID NO: 4581 - DNA, 1400 bp, Rattus norvegicus
gctgccacccagtcccctgaactcagccccacccaatagcaccccagaatgccttggtctagagctggggctcaaaggaggcacctggctgaaggcccctcctccttcagagcaggtgcccaagccctttggggatgacctgggccttggcattgtgtactcgtccctcacctgccatctgtgtggccacctgaagcaacaccacagccaggaggaagatggtcagatccatgtcgttgcwwgccctggctgcggctgttgctatgatgaaaaatcaccatccttggggaatctctcggggaccttggagagctgtcctggggaaatgtcacaggaagccaacctcaccttagcacccaggacaccctccaatttgtcaggggtgggcaagggccctggccactctcctgttcccagccagactactgaggtacctgtgggcactctgggcgtcactgtgtcttaggtgagtgtgctgttgttgctgaggtctgtgctrwsgmcggggttcctccaagccagggaagtgcttcctgagagacagcccagctggcaggtttcccagaaatcgaaagaatggtgaagtgaagatgtgaacttggcctgaccctagaagttcagagcctggctgtctcccctaccgttggcctgggctctcctccctcacaagggattcagggactcattttgctttctcccacagcagtgctgatattcttaagccctgggctctcctagctcttgttgccctacctgctcaggcccattctgtccacccaatagaccgtttgcccaaggctcacagcagtcctggcatagctgtcgggttctccagctggaagctggtcctagaaactcgcagctggcctggcagtggcttgggaggccctaactagtggaaattttgagttaagggagggtagatactgccccaaggaggctattcattgaacagctcggactgagactagaagcagagcctgctgtcccagcttggcccagttgtggaaagcaacaagaacgcaaacttgattgcccaaagtcactgccagttacccacatgtggccagaagccagggctcccaggatgtggmrgyrsgaksccagtaaacaaacacagcagcctagtggcaggtcccagtggacaccaccactggcagccaaggcgagaccacaagggaactgtggggctggttctggttggtggccagatgatagggatggcagatggcagactgcagtctgactgcattctggaggacgggrccaggctcaggactgtctgctcgtgtccctacctttgggacacctagtatgtttgcaaggagggcaggacagaagaggtcacgtggagctctatgtcaataaagactctttwtcttgaaaaaaaaaaaaaaaaa

SEQ ID NO: 4582 - DNA, 1400 bp, Rattus norvegicus
cagacgatgagcattacatcccccgggctgtgctgctggacctggagccccgggtgatccattccatcctcaactcctcctatgccaagctctacaacccagagaacatctacctgtccgagcatggaggaggggctggcaacaactgggccagcggattctcccagggagaaaaaatccacgaggacatttttgacatcattgatcgggaggcagatggcagtgacagcctagagggatttgtactgtgtcactccattgctggggggacaggctctggcttgggctcctacctcttggaacggctaaatgacaggtaccccaaaaaactagtgcagacgtactccgtgttccccaaccaggacgagatgagtgacgtggtggtccagccctacaactccctcctcacgttaaagaggctgacccagaacgcggactgtgtggtggtgctggacaacacggccctgaacctgatcgccacagaccgcctgcacatccagaacccatccttctcccagatcaaccagctggtgtccaccatcatgtcagccagcaccaccaccctgcgctaccccggatacatgaacaacgacctcatcggcctcatcgcctcactcattcccacccctcgactacacttcctcatgactggctatacccccctcaccacggaccagtcagtggccagtgtgaggaagacaacagtcctggatgtcatgaggagactgctacagcccaagaacgtgatggtgtccacaggtcgggatcgtcagaccaaccactgctacatcgccatcctcaacatcatccagggagaggtggaccccacccaggtccacaagagcctgcagaggatccgggagaggaagttggccaactttatcccctggggcccggccagcatccasgwggccctgtcaaggaagtctccmtacctgccctcagcccaccgggtcarcgggytcatgatggccaaccacaccagtatytcstcsctttttgaaaggacctgtysccagtttgacaagytgaggaaacggkaggccttcatggagcagttccgcaaggaggacatcttcaaggacaattttgacgagatggacacctccagggagattgtgcagcagytgattgacgagtaccatkcggccacacggccagaytacatctcctgkggcacccaggagcaatgagtcgcccgagacagggaccctcatytgccttaccggttagccmwggccctgcctggctgactacccctcagagcacagatcagggmcctcatcaatcactsgcawacacatgcmctgtctgttggcttaggggcgggtttacttctttgagagtatttatytttaataaagcmctggwtgtaammmrrraaaaaaaaaaaaaaaaaa

SEQ ID NO: 4583 - DNA, 600 bp, Rattus norvegicus
agactctttgaatwgrgaagatgctttcttttgtaaagacagamtaaatgtttaattttgctcccacccctatcccttgtgtaatgccaaatatgtatagtatttaaaagrammmwmmmmmaarrmdmaammwwwmwmwrwrwawtgtaaaatagaaaattgagagttttacacacacacacacacacacacacacacacacacacacacacacacaccccattggctacaaagataaaagctgattgaaacagtaagtaaaaagtgagtatccagaatttcagtgaattcaagaaaggaaggagtggggaggggagagaaaggatgatataatggaaggtaggaatgaagggaaggagggaggggtgagataggaaggaaggaaggatgatgtagaaaacgttagggagcacatcaatttccacaattgtgatctaatatggctactcatctaccacagccctgggaatgaaatatatggcttaaaaaaggaaaatgagatgaaaccatggggaatgtaggtaagtttctgatctttccctggctaaaaggataaaagacagaggagggaaagtagaaaagaaagtaggagggaaagat

SEQ ID NO: 4584 - DNA, 600 bp, Rattus norvegicus
taactggtgatctttgagactagatttgtattttttttttcaatgaacattcactattacttcccgtgccaggaaggaacacttagcattgttctaaaggctgagcttcattacttcagtctaacgtttatatgtcataaattctttatttatggaagcttaagctctagaaagcaaagaactgtgtggagaagagaaaataacaacattaaaaacaggaaaaacggatgtctgttatgtaggagaaaggaagaagttgggatgaggaaggaggatgggaagcagaactggggtgctgaagggagaggaaaggagggtagtagagaggaggagagaagagggaaggggggggaatgggaaaagaggggaggggagagtgatatcttaggttatagagagatcagctcttctgtagagaggataaataatgtggtcgcattcatagctgagttgagcagaaagtgatcagattaaaagagaatgaaggggggctggggatttagctcagtggtagagcgcttacctaggaagcgcaaggccctgggttcggtccccagctccgaaaaaaaagaaaaaaaaaaaaaaaaaaaaaaaaaaaaa

SEQ ID NO: 4585 - DNA, 600 bp, Rattus norvegicus
ctccagcattcctcagaggggagagcttctttctgcctcccttcttctgctgtcatttctaagcaaggtccagtctgctgccagtgttccgtgcttcaggttcmygaggctggccaccgcagagctcccaagctccccggccagttggttcccagcccccacccgggctccactgctgctgctgtwgtaggtggcgttttcatttgcmtgaccccacagctccagagctcagcarcagggctcaggagtgtggggtccgttcttcctcacttcagtctcctctgcaaagtctgcacccctcagcagctcttgctaatcagtgtckcasaskggyskmgaagttttttktactgtaaagagacctacctcaggttgctgattgctgtgtggtttggtgcgctcctgcagaccccctgtgttgtgggsctcttagcttgggtgggtgtggttgccactgtcaccagttgagtggtcagcgttgcatgtcgtgaccaattagacattctatcgccttagcatgtttgctaaacmccttatgaaagcaaaaatctgaaaaagtgaataaaattattttggatttataaaaaaaaaaaaaaaaaa

SEQ ID NO: 4586 - DNA, 434 bp, Rattus norvegicus; identical to SEQ ID NO: 490

SEQ ID NO: 4587 - DNA, 600 bp, Rattus norvegicus
tccagatgatgatgacatcgtgaggaagattgatcagtctgaatttgaaggtttcgagtatatcaaccctctcttgatgtctgcagaagagtgtgtctgattctgcttactgccatttagtgcatggatcaaccgttagcccggtcacagttagcattttatgttgtccctacagaaatctctctcaatatcctgttagcgactataggaatcatatagctaagcagagctaaaaaaacagtcatgtcaaactccagttatgcttgctctccagaggctcctaatgagaaaggacagtgtctttgtgtaaaggaaacagcctagcttgtcaaagaaagcctctgctgcgttgtgacactcatgggatgacatcatcagtctcccacagttgtcactttgggttaaggcatggaaggcttaattgtagagtggagggccatgctaagtatatctgctagtgttactggtttctgagttccctcagtttgaatcctcctataaatcttctcattactttgggtaatttaaagaagcagttatcaaattgatacacaattgacttgttttattaagaattgggttctaagttattatctgtgt

SEQ ID NO: 4588 - DNA, 600 bp, Rattus norvegicus
gggggcgacagcgccgccggggtggggctgagcgccgcaagccgggttcgcctagcagcgcaggagtcagtgggcgttgcgccacgatctctctccactagcactgtgctcccgccccactcaccgccttggaaagtcacaagagaaggcaggctctaagacccagcaggcaccatccggcaggcgccctccgcccaagacccgcttggacaccagggggcgatgcccgaccctctataaaagcggtccccgcgcgggsctggccattcrcgasscaaactgcscgggygcgggcgagttggggtactgggtgggcggcggygacagcggrccacgcscakgctggaggycgcckaggctcgccatgccgggagaactctaactcccccatggagtckgccgacttctaygaggcggagccgckgyccccgatgagcagccacctccagagccccccgcacrcgcccagcaacgccgcctttggctttcyccggggcgcgggccccgcgctgtccccagacccacctgccgccccggagctgctgggcggtatctgcgagcacgacacgtctatatacatcatctcctacatcgacccgg

SEQ ID NO: 4589 - DNA, 600 bp, Rattus norvegicus
ggaggctgagttctktgcacttcaggacagcaamcagaggctggcagggrcccttcgagakkcyawckcggccgccactcagtggaggcagcagctggaggtccagcgtgcagaggctgaacacttgcggcagcgggtggctgagctggaggcccaggtggctgcagagccggtccgggcaggagagaaagaagcaaccagccagtcggtggagcagctggaggctcgggtgcagaccaaggaccaggagatccagactttgaagaatcagagcactggcccacgagaggctcctgacaccgccgagcgggaggagacacagcagcaggttcaggacctggagacccggaatgcagaactggagcagcagctgcgggcgatggaaagcaacctggaggaggcgcgggccgagcgggagcgcgcacgagcagaggtgggccgggctgcgcagctgttggacgtgcggctgttcgagctgagcgagctgcgcgagggcctggctcgcctggcagaggcagcaccctagtttgctctggaggcctgcggccccaaggcaccctggcagggaccagggggccccagctgtctctgagctttgca

SEQ ID NO: 4590 - DNA, 600 bp, Rattus norvegicus
aacaaaatgacaaacgcccaggctgcgtagatacctccatattgctgtgcaggcttccatgtgccaaactgacaggaggaagaaaaaaaagataaggttacttttggtatccactgtttcaaagtcttagaaacagtaatgcaatgcaaacttctgtctctgcagcccaatcacttgtaacaccctcagggaccaagatcaggtgttttagctttcttcccttaagcaggaaagtactctgccatcccaggcatcagccagcatttcttacacctaccaagtgaaccaggattgccgataactcatttctctctccagagtgggaacactgttttacttagtttattagtgacctctgacttgagttcacctctacctaaatacaaacccccgaccccatcaccagactcattcattcacttcagttttttgtttttttgtttttttaaggctagtgtctcatgtcagcaccctgagcagcctcaaatcctatagttaatggtcttgaaatcctatcctcctgcctccacctcctagtactgggaccatagctttcagggctatgcccagttctgctcagtttatgtggtgctggagatc

SEQ ID NO: 4591 - DNA, 361 bp, Rattus norvegicus; identical to SEQ ID NO: 495

SEQ ID NO: 4592 - DNA, 600 bp, Rattus norvegicus
gttggctccaaccagytgattgaagccaasggcaagaaggttagaggccgtctctacccgtggggcgttgtcgaggtggagaacccagaacataatgactttctgaagctgagaacaatgctcatcacccacatgcaggacctacaggaagtgacysragamcytcaswaygawaactkmckttctgagaggctgarrasarkskkcakgaargtagagaatgaggacatgaataaagaccagattttgcttgaaaaggargctgagctccgccgaatgcaagagatgattgcgaggatgcaggcgcagatgcagatgcagatgcagggcggcgacactgacagcagcactcttgggcaccacgtgtgaggtccagcttcaatgttggaaacactttggataaaaagaaagtcttcctgataagtgctacagcatcaagtttcttagctccgtggaagggtacccatctacattgaagtgcctgtgtctgaggatttcagttgttttgttgtgttttggttttttaacatttgatttttggttttttttttccttctttctccctccaacccctaaccccccaaaaaaaaaaaaaaaaaa

SEQ ID NO: 4593 - DNA, 600 bp, Rattus norvegicus
ggatggggaatgaagtagcggggacgtagatagcatagacaggatctgcggctggggacggttttatagcctgcccgccaaggggctttattctaagagacgtgcatgtgaggaatgattaccacggctctatytagattgacaaggagttcatttctctgtagactgtaatttctacaataacagattatttaaggtttatgctgcacctagaattccttagaggaaactgtccttgaagctaggaaagggagtgggcatggttggtaaatagaagcaatggatctgttatgctaatagtagtgtctagacttagtgtttctggttatgcatatttagagcactgtattttatgtgtcttgttttattaatctaccgtttctggaaaaaaaaaaaaccaacccgtttcaaactgcctgttaatgttagccatgtatgtatacctctctcttcatacacgagtgtttctcttttttattgatggacacagtatccttattacaaggttattttgtacttgttttattacctggagtgtaataaaaactaagaagactttgtgacttccgatgagaaarmmmaaaaaaaaaaaaaaaaaaa

SEQ ID NO: 4594 - DNA, 600 bp, Rattus norvegicus
ggacaaagcaatattggctcctttttgttgagaaacaaagattatttttccagtgtatatccatttagatttttgtgtwttttttttttttgatgtgcactgttctccgagttctgaacctttgggaaaaaagtgtaaaacatttatgatctcttgaatcgagtcaaaagttaacttatttaaaggggggtgtacataggatgcatgcagtggtgttgcaagtgtcctctgtgccttgtgtgatgtgggcagtgttacagggtctgcatgtgtacaggatgccttactatgaaaaaaaaatcactccctgggtttaagtatggctgtatatttctgcctattaatattyskmrtkyykttagaaagtatatttttgtatgctctgttttgtgacttgaaagtgttaccttcgcagtcaaatttcagatgagagtgtgcttaacgtcactgcagctgacttgtttggttattagctcttaatagttgtggaaagattaaacaatctattctaacacagaaccactaactggagttcagatatcggacggcttatggcaatggtgtaaaataaatacttttcaacaataaaaaaaaaaaaaa

SEQ ID NO: 4595 - DNA, 600 bp, Rattus norvegicus
tcccttgaccttttagtccttcattcccagttttccggaatgatactttaggaggaatagatttgtaaagacgaagaggaaagactgaccttcctgctcacgctgcakasacagactggagtctcacggccattccccagagtgtctcgggtttcactgaccacggatgtttcatttgttgggagacacaggatttgataaacattttggaagcgggaaaaatcaagtcacaactcctttctggtgtggaaaaattgccttttggcaactgccactgggtccctgcaggtgtggctaactgaataaaaggtgttcttttgacatgtgattaccaaacaattctaaacctccatttttaccattggatttttaaattgtgatgtagcctgtcaatgtctagaacacagctaaagacttttgttgaactgttagatttttttgaggtagagtttttcatgttttatttgtatttgtmaaaaaaaaaaaraaaaaaaaagaaaaaagaaaaaaggacaaaaaattcccacgagaaaacaaaccccagatctgatgacaaaaccaagcaacacggtgccttctatttatcgttgactccggccc

SEQ ID NO: 4596 - DNA, 600 bp, Rattus norvegicus
  misc_feature (240)..(240): n is a, c, g, or t
taacctcctgcatagtcccggatgggcacgagctcgggaaggctggtggcggcttcggtgtaggaataaaaaaaarraaaawggaactccacgaagcactcaccttgcaggaagcaaacccttgtttacatcttcaagccgggatgactgaagttgggggctcctcgctttaacagctacccgatatttcccagcgccgccgctacttctgactctctgtgtgtgcgctcgctcgcactntgtgtgtgcacacacacgggcgcactctctcttgtgcacattttaaagtaattaattaattaataattaattaaaaccaatcagcttgaatcagagcttgtaacagccagacccctctgattccggctgtggcagcatggatggatgaagagacaagctgggggaggggaccagaaatgcacctcatcgcagcaccaccagagaagctgtcgatcagtttgttttctgacttgaaagataggagattgttcatcatggtggtggtggtggtggtgatgatggtggtgatgatgatgattaaaaaaaaaaaaaaaaactcgagactagttctctctctctctctctcctcgtgccgaattc

SEQ ID NO: 4597 - DNA, 1400 bp, Rattus norvegicus
tgccagtgtttatgttctacaatatctkgtcaacctgtgaagtcatcaagtccccacaaagcaatgggacctcgggtgtggagcagatctgtgtggatgtccggcaatacggtatcattccttggaacgctttcccaggcaaaatctgtggctctgccctggagaacatctgcaacaccaatgagttctacatgtcctatcatctgttcattgtggcttgtgctggagctggtgccaccgtcattgccctgctgatctacatgatggctactacatataactatgcggwtttgaagtttaagagtcgggaagactgctgcmctaagttctaattgcataargscaataaggagctatatttagagarcycagcyctgtagcgggtgamcctcactgacacttcagactaaagcgggcckaaggtttctgcagttcgctacagtaattkgtaatagcttcagttactcactttgcatggagactaaataggacttactgtacgtgaattacaaaagaatggggtctgactattcccagtttgaaagggattgwtwtttactgacactggtgagcatcctttgaaaaataattttcttaaactctgagcataagtatctctaagtgaaatattaacaccttgacacaccgtttgtttttccattttgwttgcttgcttgataaccagccttagcgatggccaagagaacaagtgctgaaggcggaaaggttgaacctagctttcattytgtcatycctttctagaaaagattttgcaagtagagktaaaattaagktgaaaaggtctttatatcacatgghtggctcactaccaaataaatgccaagktagacaagataaaaatttgaagsccatcacccatttgatttttctgaaaamtgattacatatttttgatacaacaccattaaggtctttagamcccacaamcctgataactttcaatcaccttgctacatagcaactgttcccttacaactaggttcttaaattacatggaagattttcatgaagagaagttgggcccagatctgaggktctcatctatgttgagaaggaagtatggcatgagaaaggagtctggcctttaaggaaactgagttgtgcagatttgttttgggcaaggggaaaatacatgggaaggatgcatgtgccacagaaactgtaaagaatgataaggattttcatgtgaagtgaacttagaggaaatgaaatattggcagttataaaaggaagaaaatagttgctaaaaattgtttacagactgcatatttttaattttggttttgacattcatttaatttctycatgttaaatatatacttctataatcatttacgcaaaataaacattttttcacacywdraaaaaaaaaaaaaaaaa

SEQ ID NO: 4598 - DNA, 1400 bp, Rattus norvegicus
tggatacttggaaccagtgcgacttgctggcactcacctgcttcctgctgggcgttggctgcaggctgactcctggcctgtttgacttgggacgcacagtcctctgtcttgacttcatgatcttcacactgcgcctgctgcacatcttcacggtgaacaagcagctggggcccaagattgtcatcgtgagcaagatgatgaaggatgtattctttttcctcttcttcctctgcgtgtggcttgtagcttatggggtggccacagaggggatcctgaggccccaggaccgcagtctaccgagcatcctgcgcagggtcttctaccgtccgtatctgcagatcttcggacaaattccccaggaggaaatggatgtggccctcatgaatcccagtaactgctctgccgagcggggctcctgggctcacccggaggggccggtcgcaggctcctgtgtgtcccagtatgccaactggctggtggtgttgctcctcatcgtcttcttgctggtggccaatatcctgctgctcaatctgctcatcgccatgttcagctacaccttcaacaaagtgcatggcaacagcgacctctactggaaggcgcagcgctacagcctcatccgggaattccattcgcggcctgccctggccccacccctcatcatcatctctcacctgcgtctcctcttcaagtggctgcgcaggtgtcataggactaacttgcccgcctccccagtcttcgagcacttccgtgtctgtctctctaaggaagcagagaggacgctgctgacttgggagtctgtgcacaaagagaacttcctattggcacaagctcgtgacaagcgagacagcgactcggagcgtctgaaacgcacgtcccagaaggtggacactgcactgaagcagctgggacagatcagagagtatgaccggcgtctgagggggctggagagagaggtccaacactgttctcgagtcctgacttgratggctgaggcccttagccactctgccttamtgcctccaggggggccaccccctccaagccccactgggtccaaagactgagtgtccctggtggacatctaggtgtttgcatcctgagagggttcattccgagagctgcgcccagtctgcctcaagctacacaactggtggccttgtcctcaccgtagaccccatgttcaggggttgctgtctcgccagagggactgccttccaggagcagcctgaccttgggcagatcaagctctgagctggcaatgttggcccctttgtgggcccagccacaagcagaggagkccagaaggtcctggggtgcaggaaccacagaccytatgcacagcttccccacaatggggaaataaagccatttgwtgrgawdwhmaaaaaaaaaaaaaaaaa

SEQ ID NO: 4599 - DNA, 600 bp, Rattus norvegicus
ggggcagggctgcccggctccccgccgcagcccagtgtccccgtgggaaagaaattcactgaggctacccctcccctgcgtcctctcttggctgctccatccaggaaccactcacacccgccggatgtacatatgcgcccctgcccacctctcagccacccccaggtccctgccggcttccccaggtgtcccctgtcccctcagcagcaggtaggggacgccggtctcccagacctgggcccacccttcttgcgcctctgcgggacagggtgggagcgctgtacggagtttccctcccatttcttttattctccctgagccccgggctagcagcggagctgtacatacagtgtgcaaagtgtatatgaagttatttattcgtgacccatgagcccgtgaccgtgtccgtgaatcagtgagtctgtggcctgtgccctccccatcccgggtggggcaggaaggggccgagagggcttgcccacgcgtcctggcccccagccccgctcgctccacccaggtcccaggacagccagatctcttgggttctctttttttaaatgtggaaataaacttcttacaawtgaaaaaaaaaaaaaaaaa

SEQ ID NO: 4600 - DNA, 600 bp, Rattus norvegicus
ctgtgaagttattattggttccacacatattttaacacccagaaagctgctggatgacataaaaatgctgaataaatccaaggataaagtttcctttcttaaggatgagtagcttttttattgtggtttagaggttttgttaacatgcacagctaaagcagatgctgctgcggtcactgaagcggtgtaaatagtgtgtggaggaacacggtcttcaggtggacacctcgaggacgcttatgttactggatttgccatttctaataatttaagtactgttgctgctttggtcaagacatgatgttaacgggccttgtaatcaggcagttttcaccttggagcagaacctgttctgaggtgtgggtgttttcacagccagctgtatatgtgcccactaattactcactggatacttatgctgaaattagtgcgggcaaaaacgactttgaatgaagagatcataaacgtaaaaactgtaaatgtatgtatgatagagttattataatgcagtttcttaagactgaaattcataatttttatgtataaaataatttgttattaatatgatgacttcactgtgtatattacctgcaagataat

SEQ ID NO: 4601 - DNA, 600 bp, Rattus norvegicus
cggcgccgctgtccaccaagagctttaccttcttcaactccatgagtccgctatcctctcagtccatgttctcggcccccagctccatctcttccatgaccatgccatccagcatgggcccgggctccgtgcccggcatgcccaactcgggcctcaacaacatcaacaacctcacgggctcctcgctcaactcsrcsakgtcgccrggcgcctgcccctacggcacccccgcctcgccctacagcgtctaccgggacacgtgcaactcgagcctcgccagcctgcggctcaagtccaagcagcactcstcgtttggctacggcggtctgcagggtccagcgtcgggcctcaacgcytgccagtayaacagctgaccgccccgccgggtccccggggccgccggccggcaaggcgcakcgggagcgcgcggagcacacggggcgctcgcagcacctgggacctcacctctgcgcagccccttcctccccaccctgcctccaggttggttttgtgtttgcttttccggaccccgctctgcccccaatgaataaaaaagggaaaaaaaaatcaagccaagggagggggtgggggagagaaagc

SEQ ID NO: 4602 - DNA, 600 bp, Rattus norvegicus
gtgatgtgtccgatyasrascgcttacagattgacagaamawmmddmamvdmacaaatgccttaaacttcctcttacccataaagcaaaggacagaagattgtccaacagagccatcatgccatatagggctaaggatgagggcttctcagacytacctgtaattctggcacagccagaggaragacacgtgactggtgtgtgtctcagggcgtcctcacaagaggcccagcagtggccggctcccagtggaagtagggtgccawgttttcagaggagggcaggtcagagcttccctgtcccctgttgatacctctctgtcctgccttagstagcacaggctcagggtgaagcaaatgttcccagctcagcstgctcctgcgcggccttggctcctccaaagactgaaagtcaaggatgggctttgaccaaccgstaaaaaccgcacctgtgaggtttgaagatgccaaacatctactcctgtgaaaaatctcacctatgtgtgtgcagtgtccctccagagtcctcctgagaccggttcaggcttagccattaaacagcagagtgtgacckgtraawaaaaaaaaaaaaaaaacaaaac

SEQ ID NO: 4603 - DNA, 575 bp, Rattus norvegicus; identical to SEQ ID NO: 507

SEQ ID NO: 4604 - DNA, 600 bp, Rattus norvegicus
tcttccaggctggtgtggtgagctggggtgaaggctgcgctcagaggaacaagccaggcgtgtacacaaggatccctgaagttcgggactggatcaaagagcaaactggggtatagaagcatggacagacaacccaccatgaactcgcaaagggatgccccccacgcgtacctggatacassagrggatcgctgaggacatttgtgctgtggcctctcccccacatcccagactgtgaactgcttccctaggactcagaatccttccctgagcttccaaagtgggacccctcaggagttggccagagatcttctgtgctggtggcccagcccgggktggggcaaggatttgatggcagcyttcccctctaaccctgaactgggtaaagacgatgctttcctggagaactgcttccagactctaaaggaaaactatcgtcgcgctcctgggggccctatgggcagaggggctgcagggtctttcaggaagctccagccctagggaccccagaaaagagtggcacctatggctgagtttgttttgctggtatttgagagtaaaacattttatttctttttarrwaaaaaaaaaaaaaaaaaa

SEQ ID NO: 4605 - DNA, 600 bp, Rattus norvegicus
tatttcctaactgtgctgagtattgtgcgcttcctggccactgcccaccccttccagatgctccatatcaccagcgttaggagtgcctggatcctctgtgggattatatgggtcttcatcatggcttcctcaggactgcttctgaagcatggccaagagaagaaaaataacactacattgtgctttgagctgaatctccaaaagtttaaaaatctcgtcatcttgaactacattgcattaggggtgggcttcttgcttccatttttcatactcaccatctgctacctgttgatcatccgggtcttgttaaaggtggagattccagaatcaggtccacgggatgctcagaggaaggcactgaccactatcgtcattgccatgatcatcttcctcctctgttttctgccataccatgcacttcggaccatccacttggtcacatgggatgcagattcatgtatggatgaattacataaggccacggtcatcactctgaccttggctgcagccaacagctgcttcaatccctttctctattattttgctggagagaatttcaaagcacgattaagggctatattcagcaaagatcatctatag

SEQ ID NO: 4606 - DNA, 600 bp, Rattus norvegicus
aaagccaggtttgtgtgtgttggaatttggatttttgtgattttgacaagttctccatttttactgagcaaatcttaccaagatgagaaaaacaatactaaatgttttgagcctccacaggacaaacaaactaaaaaatatgttttggtcttgcattatgtgtcattaatctttggtttcatcatcccttttgtcaccataattgtctgttacacaatgatcattctgaccttactaaaaaatacaatgaagaaaaacctgccaagtcgaaggaaggctataggaatgatcatagttgtgacagctgcctttttagtcagcttcatgccatatcatattcaacgagctatccaccttcactttttacacagtgaaactagatcctgtgactctgtccttaggatgcagaagtcagtggtcataaccttatctctagctgcatcaaattgttgctttgatcctctgctatatttcttttcaggtggaaactttaggagaaggctgtctacatttagaaagcattctttgtccagtatgacttacatacccaaaaagaaagcttccttgccagaaaaaggagaagaaatgtgtaaagaataa

SEQ ID NO: 4607 - DNA, 600 bp, Rattus norvegicus
cacgctgcaaccaagcccttggatcagctgttcactctatatgccattgatcaagtgaatcctccaatgaatgtcacagtggaaattgaaaacaattctctctatatacaatggggaaaaccactttctgcctttccagtccattgctttaagtataaactgaaaatttacaacacaaaaaatggttactctcagatggaaaacctggtcaccaataagttcatctcaaaaattgatgatgtttctacatattccattcaagtgagagcagctgtgagctcaccttgcaggatgtcaggaagctggggcgagtggagtcaaccgatttatgtgggaaagaaaaagaagcccttggtagaatggcatctcatcgtgctcccaacagccatctgcttcatcttgttaatcttctcactcatctgcagagtgtatcacctatggacaaggttgtttccaccagttccggcgccaaagagtagcatcaaagatctccctgtggtgactgaatatgagaaacctccttggaatgaaaccaaaattgaaatcgtacattttgtagaagaggatggatttgaagtcatggaaaattccctgttttga

SEQ ID NO: 4608 - DNA, 1400 bp, Rattus norvegicus
atgaaaatattrtrrtyaayartccwtywagrccwtggtgggaaagatatcaaccaatyagctacaaaatwtgctcmaggtctggaaatgarratgaattcaragacatggtgamsagrtgcaacaaygttggtgtccgkatttatgtggatgckgtcattaatcacatgtgtggstygggcrmtrrwgcwggaacamacagtacmtgyggaagttayttcaayccwaataacagggamttyycwgsagttccrtaytctgsttkskaytttaaygataataaatgkaatggagrmattrakaactacaatgatgcyrmtcaggtcagarattgtcgtctgtctggccttctggatcttgcactygakaaagattatgttcgwaccaaggtggctgaytayatgaacmatctcattgayattggtgtagcagggttcagacttgatgctkctaarcacatgtggcctggagacataaaggcagttttggacaaactacataatctaaatacaaaatggttctccsaaggaagcaracctttcatttwycaagaggtcattgatctkggtggtgaagcarttmaaggtartgagtaytttggaaatggccgygtgacagaattcaartatggwgcaaaactkggcamagttwtkcgcaartggratggagaraagatgbcytacttaaagaactggggagaaggttggggtttyrtgcctwctgacagagcccwwgwvttygtgsacrassatgacaaycagcgaggacatggtgctggaggakcatccatcctgacwttctgggatgctmgamtstataaaatggcwgtyggatttatgttggctcatccttatggwttcacymgrgtaatgtcaagttwccrwwggmcaagawatttcsagaatggmaaagatgtsaatgactggrttggaccacctaataacaatggagyaacmaaagaagtgaccattaayycagacasyacttgtggcaatgactgggtctgtgaacatcgatggcgtcaaatmaggaacatggttgccttcaggaatgtrgtcaayggtcagccttttgcaaactggtgggataatggcagcaaccaagtrgcttttrgcagaggaaacaraggmttcattgtctttaacaatgatgactgggmyttgtcaasmactctacagactggtcttcctgctggcacatactgtkatgtcatttcwggagayaaagtcratggcaattgcactggamtwaaagtmwatgttggcagtgatggcaawgctyacttctctattagtaactctgctgaagacccattcattgcaatccatgymgastcaaarwtstaaraktyaaawtaaasakawwtwgattsagcayyaawmaaaaaaaaaaaaaaaaaa

SEQ ID NO: 4609 - DNA, 600 bp, Rattus norvegicus
aagacactcccggaatccagccactcgtggcctcccttctacagcttccggccgtctgcggggaacccaggaagtggctcccccaacgccccttacccctacctcacatacggccaacacctctcctagacccgtctctggcatggaacgagaacggaaagtgagtatgcggctgcaccgtggggccccagtcaacgtctcctcatctgatctcacgggccgacaagatacctctcgcatgtccacctcacagattcccggtcgggtggcttccagtggtcttcagtctgtcgtgcaccgatgagaactctcctttttgctgtgaagggcagacaatgcatggctgatctactctgttaccaatggctttactagtgacacgccccccggtctaaacccgaaatgttaacgccgggagctctccaggccactcacccagcgatgcacatggggaatcaaaacacaaactaaatggacaggctccaagagctgccatcgccaggggctgccaccatggccccatgtgagctcagttgtcatggggctgggacgaagagcagagctgggaaaccttgcagagagaacccgactccctgtgaa

SEQ ID NO: 4610 - DNA, 600 bp, Rattus norvegicus
ctctgtgccggtggctgtggtgtgctgaggtattaactctattgaaggaacaggacactgccaacaggagatcccactaagtgttgcaggagaatcccatggcacccctgagtcagggcactgggacggtatagtttctccaggagtacagaaaggttccaaaccttagtgagctttgatatcaccctgtggtgttaggaaacggtcataatcaaaggctttcacgcagaagggcaatgaaaccagaactcttgtgtgaaataataatggtgttgaaaggaagcagactatggtgaaaggtcgggtagaaggctgtttcataaggtcgggttgacttaagcagaaaccacagcttgcaccaatggagacaaagggtcggctcccctgctcccgttgagcagttgctttatgattgtgtttgatggcacgattgtttacaacccttgactttctcccctgcctcatcattagtgttcctttagaataatgaagcctgctccatccattaactccactaacatttgctctccccgtggacagaggttaaaaattaattactcttccaacatattgattacacgactataaatataaaaacag

SEQ ID NO: 4611 - DNA, 600 bp, Rattus norvegicus
ckagtgtctcctgatgggacagcattctgctcagggtcrygrgrtcacaccctaagagtttgggcatawkcctctcccagcgtgcaaraaggacacgtgctctcccgtgtggatacgacctcttgatgagcccagggcttcccacaggtagcctatgggagcaatcccagtcagcactcactcacccgtccagtgtctccatgaaatccgccctcccasgaaatactcagataggccctggctcttcaactggycctccaagcccttctttcatctcaaayactctgtgaagttttgtccgtttttgaagctattccawccaccagaattccacgtctgtcagcatttcaaatgtccctcattgcttccttgaatccagtctgtcttcagagcactttaaagtctaccttttcttggtgtcgactgtggtttctagagccatcgtctggacatgccggctatatggactgtgagagtggctattcagtggtctgtaacagaaggaaatttcagttccaaatgtacagaatcacacagaatcactttttaaaactgtttctaggtaaaagtatctttttcaammaaaaaaaaaaaaaaaaa

SEQ ID NO: 4612 - DNA, 600 bp, Rattus norvegicus
gggataagtaccggcaccccgagtgctttgtgtgtgctgactgtaacctcaacctcaagcagaaaggttacttcttcgtggagggggagctgtattgtgagatkcrsgcamgagcccgsrygwrgcycccasamgsykacgayacckkcactstgtmcmcymaagctyarattcttwmcagacgagaacaytcattcacgcatgsgcacacacgaacaccggsggatgwtaaggaggacttcaagcaggrggagtgcgaaggtmacctcccaatsgaaagcgaggcttttagtcatttatcttactgtgtagtgagggaaagacatggggaggcagaggcctgcctamtgacaaaagtattatctgtgggttgtaattmtttatmtttggggacagcawtggtgacatttaaagcaataacgttgtaatrccatgctytacggtttccatytgttacacgcccatccgatgcgtgaacachtggatatktagggggggtccamttgtmtttcctwccaagttgmttttggtaattgtagtaacgcsrarttacagctttgtaytgghvcaaaaaaaaaaawwwaaaaaaaaaaaaaaaaa

SEQ ID NO: 4613 - DNA, 600 bp, Rattus norvegicus
tgcaaagagaggacgctagacaaccagctgttcttcttcctggtggagaattcggccagaggggtcatactgagagtgagaccccaagagaagggagcagaccacacccgtgccatcatactgggctgcgtagggggcattgtggcagtgggattagggctggtcctggcttaccggctctcagtggaagtctatgaccgccttgagtacagccgctttgagaaggagaggcagcaactcaactggaagcaggacagcaatcctctctacaaaagtgcggtcacaactaccgtcaaccctcgcttccaagggggcaacaaacagtcgctgtccctccctctgacccaggaggctgactgacttaggattcttgtcttggaggacagagggggcagtagggcaggggcagtgtctgttgcaaagttttttttcagactggccttcagagggcagcgtaaccacggcaacagccaccccacgtgaagggctggtccttscaccataaagttctgcctcagactttcggcctgtgctgtacttcaccccgggacaaaaccagaaacaaataaacaaacammcaaamaaaaaaaaaaaaaaaaa

SEQ ID NO: 4614 - DNA, 1400 bp, Rattus norvegicus
  misc_feature (510)..(510): n is a, c, g, or t
  misc_feature (544)..(544): n is a, c, g, or t
ggactgcgtggtgtgcggkgacaagtccagcggcaagcactacggcgtgttcacctgcgagggctgcaagaktttcttcaagcgcassatccgccgcaatctcagctacacctgccggtccaaccgtgaytgtcagattgatcagcatcaccggaaccagtgtcagtactgtcgcmtcaagaagtgcttccgggtgggcatgcgcaaggaggckgtgcagcssssbsssawmycgcacgctctcccggktchcgcggsctgcagccctccgggcgcggcgssagtcbagccgttcgcgrrgccgccrgtgtccgarctgatygcgcarctgctgcrcgctgagccctamcccgcggmtgggcgctttgrtggcggcggcgccgtgcwgsgyatcsacawcgtgtgcgagctggyggcgcgcctactgttcarcacggtcragtgggsccgccacgcgcccttcttcccggagctgmcggscgccgascargkggsbctgctgcggstcanctggwgcgagctgttcgtgytgaacgcsgsgcangcgsskstaccgstgcacacggsaccgctgctggstgscgyggggstgcacsccgsscccatggctgcggrgcgcgcggtggscttcatggaccaggtgcgtgccttccargagcargtggrcaagctgggccgcmtgcaggtggatgctgccgaktacggctgcctcaargccatcgcgctcttcacgcctgatgcctgtsrcswkkctgacccagcccatgttgagagcctgcaggagaaggcacaggtggccctcaccgagtatgtccgtgcccagtacccatcacagccccagcgctttggacgcctgctgctgcggctgccggccctgcgtgctgtgcctgcatccctcatctcccagcttttcttcatgcgcctggtgggcaagacacccatcgagacgctcatccgggacatgcttctgtcagggagcacctttaactggccctatggctcgggstagtgatggtcctttcctaggacacatggaagctggggccttgtagggaccatgggraccagggccccagcttctcttctgagactgrcykmkktttttaaagactgtgaaatgtttggtttggtttgttttttaaataatcatgaaaccaaaaagattcggatctcccaggctccagctttgtcctggcagccttcggcagggtggggctgagggtctggagccagcatgctagtgcctctggtgtcstgggwatctggaaggrccactgcagctgggcaggggtgctatgggccaggagggtccyctggamacatggcccatggagggaaccatgaaatcatggccaacamtaaagatattcccatccytraaaaamaaaaaaaaaaaaaaa

SEQ ID NO: 4615 - DNA, 600 bp, Rattus norvegicus
agtttgcargaaaagtcccaskgyrcwkkggaagagtacgttakgagccagtaccccaaccagccaacacggytcggaaagcttttgcttcgtctcycttccctccgcacggtctcctcctcagtcayrgmgcaattgtttttcgtccgtttggyaggtaaaacccccatcgaaaccctcatccgggatatgttactgtccggcagcagttttaactgkccatacatggcaattcaataaataamtwwatcaaaataagggggagtgaaacagagaawgaaaaggcaaaagactggtttttgtttgcttaatttccttctgttaagaaaggatgttacaagtttgctaaaagaagagaggggaagaacttaatggactttgatttcaaaaaaaggacagagagaaagaaagaraaagagactgccaaatgaacttttacagaatgcattaaaaaaaaraaaamaamtcctgtgttgggcagaacaacttgctacttatyatttttgkataaaaagaaaattagtctttcttttctttatggtaaatatttgaaaaatattgctaacagtgcatttaagagattgggagaaaattagcaca

SEQ ID NO: 4616 - DNA, 600 bp, Rattus norvegicus
gccgaaggccttttctcatctctggggcggcttcgctacctcagcctcaggaataactccttgcagaccttttcaccacagcccggcctggagcgcctgtggcttgatgccaacccctgggactgcagctgtcccctcaaggcgcttcgagactttgccctgcagaaccctggtgttgtcccccgctttgttcagactgtctgtgagggggacgactgccagccggtgtacacctacaacaatatcacttgcgctggccccgccaacgtctcgggcctcgacctaagagacgttagtgaaacacattttgtgcactgctgacactggctacttactggcccggtctggccgaacactgcctcatggccaggacggggtctcattgttaacagaataagctggctctcaaattcctacccatctctaggggacaggtcctggctgctcacttcctggaagcaggctgtactggaagctatgtggcctagaaagggtgggctcaggccaagtgtccaagggcccaaaggagggaggtgctcagaggctctccctgctgccaacaattaaagcaaatactaagatagcttgtgacctggagta

SEQ ID NO: 4617 - DNA, 600 bp, Rattus norvegicus
tacaacgcctacccctatcccggctacggtggcgcggcctgcagtcccgcctacagctgcgccgcgtaccccgccgcgccccccgccgcgcassccccagccgccagcgccaacagcaacttcgtgaacttyggcgtcggggacttgaacacggtgcagagtcccgggatgccacagggcaattcgggcgtctccacgctgcacggcatccgagcytggtagggaaagggcccgthtggggmaccccggaccgactcccacctttaggagaagggcgatramwmmrrrgatrgaaaggctcccactgtgtcctgtccctcggatttcacacccacacttgcgcaggcctgggacctttctccgatccatccccttttgttgacytaacctgatgcctcggtcytgggaaagcccttcaggkccaaaggcaccctccacggattccatayyaggacccggagcctgggccsgscgcccgggccctgggtgccttgccgscrcccaccsrccsgkrtttatgtttttacctgttgctgtaagaaatgagaaccctyttcccattaaagtgrgtgsgctwamrmmaaaaaaaaaaaaaaaaaa

SEQ ID NO: 4618 - DNA, 600 bp, Rattus norvegicus
tgacatcagatgacaagaggtctatagcacatctctgggcttttccctacccagagaagagccccctttgatacaaatcagttggattttcatatgcttcaaaggcttgatctgtgagtcactccagtttgggacataggtctgtctgtggctttgagaaaaggtactttcaaaagagggctttccagagcacagctcacagccagctgttaggaccccacccttctcctttattgtggaggtgactcacagcagactgacagtggtcagactgagctttctgctaaggtggtgaggtagccaacactggcatgtctcggtagtggtttgggcaaatttccgcaggtctcttcccccaaccctgcctctgatgaataaagacaatgagtacagttccttaattcaggcttttgtgactagcttactacggaaccgaaaatggtcccctttgtacaagccgagctgttatggaatcacggtgaaccagacccaggtctgtggcacctgtttgtttgtttttttttttttttttttttagctctcatttctacggcatgctttccaaggaaccaaaggagggtctcagagatgccccctcgt

SEQ ID NO: 4619 - DNA, 600 bp, Rattus norvegicus
atggctcctggcagtgggaagatggctcctctctatcacccaacgagttaacactggtgaaaacaccaagcggaacctgtgctgtctatggctcaagctttaaggcctacacagaagactgttcaaatccaaacacatacatctgtatgaaaagggcagtgtaaagatttcattaaccgtctcacagaaacagccaggacaagagaattgtcccaggagaaactggaactaatgagactcaacataagacaaacataaaagaacagtactgcgccctccacagaactaatagttggacatatcgtgtccggtaaaacaaggggagcctgtggggccaaggaactatgaggcaggggatggagggagcaagaggactaagagtttggttgaggcctatccaaacccgggaaatctggccctgccctactggaggaggccttgttgcccagtagactctcccttataagatcaagtctatcaacacctggaattcttccaagatatcccctacacactccctaaaagtttaaatagcccctttccccccaattaaatgacctatcttattcaagatgcctcaaaaaaaaaaaaaaaaaaaaa

SEQ ID NO: 4620 - DNA, 357 bp, Rattus norvegicus; identical to SEQ ID NO: 524

SEQ ID NO: 4621 - DNA, 378 bp, Rattus norvegicus; identical to SEQ ID NO: 525

SEQ ID NO: 4622 - DNA, 185 bp, Rattus norvegicus; identical to SEQ ID NO: 526

SEQ ID NO: 4623 - DNA, 525 bp, Rattus norvegicus; identical to SEQ ID NO: 527

SEQ ID NO: 4624 - DNA, 600 bp, Rattus norvegicus
cgatagaaaacaccagaaggcacattggaaagggtgtgcatttgtactacgttgggggcgaggtgtacgcggagtgcgtgagcgacagcagcatctttgtccagagccggaactgcaactaccagcacggcttccacccggccactgtctgcaagatccccagtggctgcagcctcaaggtcttcaacaaccagctcttcgcccagctgctcgcccagctgctcgcccagtcagtgcaccacggctttgaagttgtctatgaactgacgaagatgtgcacgattcggatgagctttgtgaagggctggggagccgagtatcatcgccaggatgtcacaagcaccccctgctggattgagattcatcttcatggaccactgcagtggttggacaaggtgctaactcagatgggctccccacacaaccctatttcttcagtgtcttaagtcatgtgctcagctgcatttccacagaatagacgaaggcaggggcttctaccactgcaactcgcagctagtaaaagaccctggacgcagatgtaaacacgtacgatgcacacgattcccatttctatccccattggttctgtgctacctactt

SEQ ID NO: 4625 - DNA, 600 bp, Rattus norvegicus
gtctgaacccagtrykwskgaggttctgtctaggatcccatggaagctgttggtgtaaggagaagctcctgactcattggagtttcttgctcaccgagggctccttggtgaccttggactttggcatggttttwacaaatasttgaacctgtcccattgtatctctccmtaaagcacctstggtgtcattcagaaagttgtcagacchtagaccaaaaaccacccytttgagggggtagcaggaactgcmtgcgttctgggtcagtggtggtgactgacatactttttcagtttagtgtcctgtgtgctttttttgtcatccattgtgacaatgtttccctccmtaccctggggagtcgttttcaaactactgattctggggtctgcatcgtttgcaatgtggtactactatgtccttcgtagattgtttttccaaggggggaaaggcaataagtcacccccaaacccatgtgaatgtgaagaaaagcagygttgatgttttttttatatatatatatatacatgtagkacrmawttwraaaaawrwmaaaaaawaaaaawaaaaagtgmwwarwdmwwrwraaaaaaaaaaaaaaaaaa

SEQ ID NO: 4626 - DNA, 600 bp, Rattus norvegicus
gattttgtattcgtaaaaaagctaaagaggtgcaacaaaggagaagggtccttatccttgctcaactgtgaggagatgagaaggcaatttgaagaccttgtcaaggatatatcgttaaacaaagaagagaaaaaagaaaagagctttgaaatgcaaaraggtgatgaggatcctcaaattgcagcacatgttgtaagtgaggccaacagtaatgcagcatctgttcttcagtgggcgaagaaaggatattataccatgaaaagcaacttggtagtgctggaaaatgggagacarctgacggttaaaagagaaggactctattatgtctacacccaagtcaccttctgctctaatcgggaacctttgagtcaacgtccattcatcgtcagcctctggctgaagcccagcagtgggtcagagagaatcttactcagggcagcgaatacccacagttcctccaagctttgtgagcaacagtccattcacttgggcggagtatttgaattacaagcaggtgcttctgtgtttgtcaacgtgactgaagcaagccaagtgatccacggaattggcttctcatctwttggcttactcaaactctga

SEQ ID NO: 4627 - DNA, 600 bp, Rattus norvegicus
taaaacagaggccaactggatagatgtaagatacgatctggagaaaattgaaagtcttattcaatttattcatattgatactactctatacactgacagtgactttcatgttattttgcacgagtacagtaacatgactcttaatgaaacagtaagaaacgtgctctaccttgcaaacagcactctgtcttctaacaagaatgtaatagagtctggctgcaaggaatgtgaggagctggaggagagaaacttcacggagtttttgcagagttttatacatattgtccaaatgttcatcaacacgtcctgactgcactcgaacctcgtcagtgtttctgttattaagacacctccgcctgctgcccagaggcagcacagctccatgcattcgtgatctgctgggaaaccaagctgcctaacaggaaacggttgagccatttggatcccatgaaccctcgggaatgaagagagggaaagggcttttctcggacttatttttgcttgcttatttttaatttattacttcagttgtgcatatttgtaatataacagaagatgtggaataaagttgtatgcatattttaaaaaaaaaaaaaaaaa

SEQ ID NO: 4628 - DNA, 600 bp, Rattus norvegicus
cttggaagcagatgcggggctgggtggtcccgttgactttagtgacttgccatggccactgtagacactacattttgctctggcaacagctacagtatcaaagtgcattactgtgaagttttacmgwskgtgaagcttactggatagggagagaacagcttttatgtactgactccataaaagccatctcagagccattgagacaagtcaatctaccatgtgtaacttcagacaaagtggaactaagcctgctccagtgtttcctcatcattgagtttgggctagctgtggatagcttgcattaattgtatattttggattttggttgtgttgaattttttaatcattgtgcacagaagcatcattggtagcttttatatscaaaatggtcatttcagatgtatggtgtttttacactacaaagaagtcccccatgtggatatttcttatactaattgtatcataaagctgtttattcttccttgtaagaatcctttactataaatatgggytaaagtataatgtattagacagttaaatatttttaataaatgtttcccttgttctataaaaaaaaaaaaaaaaamaaaaaaaaaaaaa

SEQ ID NO: 4629 - DNA, 600 bp, Rattus norvegicus
wwwgataaaytgawsycacasartaattwytcakagkyrtgaaggcamggagctggagggarsaaggrargagcgcggcaggagaacagtggaggcgcagggactctgttactctgctttcactgtaagctgggaagggcggggactctgkyackscgctttcactgtaagctcggaagggcatccgcgatgccatgccaggcttttctcaggagcttcaatgagcatcacstacagacacaagcaggtgactgcggtaacaacaggaatcatgtacagcctgctttcttctsttggwttcgtttgggtaatcagaagccagttgagaccaasysksactgacttcayggyycatcctacttggccccctttttcctctctttctccttaccctgtggtggattcttctcggaaactgcaaaatccaagatgctggcactaggcgttgttcagtgggctctttcgatggacatgtgacctatagcccagtgcctagagcatattagcataaccacatttcaggggacaccaatgtccgcttttgcatcgctacgtgcagcgagcacaggaaaaagaaaaaaaaaaaaaaaaaaactcgag

SEQ ID NO: 4630 - DNA, 420 bp, Rattus norvegicus; identical to SEQ ID NO: 534

SEQ ID NO: 4631 - DNA, 600 bp, Rattus norvegicus
aacatttttgtttcaatttctgtcttttgtaaaagtgtgggctttarrmwwmwmwmrrwwtgttttgtatgttaagggacatgacttgggattcaaagggattgcttcgctgcccccactcttgtgtgtcctgtctggtgcccgccccagggcatctgccaactccaccatcaactcaactcccacatcatacctggtgctgtccctgggctctgctggtcatgcgaagccacctcagagaaggaaacagagggtgcagtgactggcgccgcctggccagcttccctccatccgtggacagccctgttcaaagagtaccgtgcaccagtgcaccagccctgctgcggcttccctcacccccaccccacccccaaccacgactytaaggcacagtgacttttcttttcccgtttaattaggcaatacccttgttaattgccctttggcaactaacttaatcatgtgcttccaacacactaaatagggaaaacttacagggcaatattattcttgtggcaagaaggagggagggacagaattgactagatctaacacctattaaagacaaaactggctgcttccaaaaaaaaaaaaaaaaaa

SEQ ID NO: 4632 - DNA, 590 bp, Rattus norvegicus; identical to SEQ ID NO: 536

SEQ ID NO: 4633 - DNA, 1400 bp, Rattus norvegicus
tcctggaccactacaaggaaccctctgccatcttccagctgccctatgagaaggactgcaagaacaaagtgttctgcatcgctgagatccagctgaccaccgccatctctcagcaagacctggtggtgggtatcacaaaggaggtgaccatgaacatcagcctgactaactctggggaagattcttacatgacaaacatggctctgaattatcccagaaacttacagtttaagaagatacaaaagccactctctccagatattcagtgtgatgaccccaagccagtcgcttctgtcctggtcatgaactgcaagattggtcaccccatactcaagagatcatctgtaaatgtctcagtgacttggcagctagaggagagtatctttccaaataggacagcagatatcactgtgaccatctccaattccaatgagaagtctttggccagagagacccacagccttcaattcaggcatgccttcattgcagttctttccagaccgtcagtgatgtacatgaacacgagccaaagctcttctgaccacaaagaattcttcttcaacgtgcacggggagaatcactttggagctgtattccagttgcaaatttgtgtccccatcacattacgagatttacagattataagagtgaagcatctgacaaagactcaggcccacactgagtgcacccagagtcaagagcccacgtgtggaagcgatcctgttcagaatgtggaagaatggcattcagtgatctgcgctatcacatctaataaagaaaatgtaaccgtggccgcagagatctccatgggccacactaagcagttactaagagatataagtgaactgcagatccttggtgaaatatctttmaacmmwtctctytrtraskkmctgamtkmwkrgaacmwcwgkaymmagatcacagtcatcttcctgaaggaggagaagccacactccctgcctctaatcattggcagcagtatcggmkrcctcmkgktsctsrtsrkgmttmymsccmttytgttymagtgtggctttttcaaaagaaaatataaacagctgaacttggagagcgtaakgaaggcacagctgaagtctgacagtctgctcgaagattagcccctgcttcctcacctgaaggagggagcttgaggcagtctggaagaagcccggataccccctgtcggggctccttactctctttaggacaatctagcaacatcaaacaaactgtagagtgttgttcgtagccacacattatctccacagtgtctgtgaattgtgaaaaaagggaaacttgggacatgcggtaataaataaatttaccttthywraaaaaaaaaaaaaaaaaggggatcctctagagtctcgcgaagcactagaatgttctcgaggcct

SEQ ID NO: 4634 - DNA, 600 bp, Rattus norvegicus
cagtgactccaggcagggaccctgccctcccactctgacaacgcgcctggcagcagcatcaccttccacactgcctgccaccgaggattccttcacagccaggcccgcttcacccttcccccaacccccaggtagcttctgtagacagactgcgcagacgcagcgctaagagtagaccggttgtgttctcaccgtagccctcacgtagccctcacgtagcgcccagcagcctccatgagcgtcagctgactgttgccaggaaataaaccctcatgaattaaaamaawrmawawwwwwactacaataaagagtttaaataaatacatagatgtagacgttaaatactgaagtataaatagtcaaagaagcatctcttgtgttcgatgaaagatggatgcgatataagaaagatcatttaatttaaaaaaaaaaagtgttgtttcttatctgtttcccagctaagtcataatacagggtagaaaggcctcaagtgacatttataaagacacagaagtcaggtcccggtggtgtctgtcctcaagcctaggcagctgtggtcacagggaagtctaatgtctggagattactcgtgccgaattc

SEQ ID NO: 4635 - DNA, 600 bp, Rattus norvegicus
tccagaggaagagaggctgcagcagcggcgagagatgctcagagacccggaactgagatccaaaatgatatccaatccgaccaacttcaaccacgtggctcacatgggccctggcgatgggatgcaggtgctcatggacctgcctctgagcgtgcgcccacagcccaggaggaaaagcagggtcctgccccaacaggcctccctcggcagcctcccatccaggaacaagccctatgtctcatggccgtcctcaggtgggtctgagcctggagtgcctgtgcctctgaggagcatgtctgaccccgaccaggattttgacaaagagcctgactctgactccacgaagcactcactccgtccaacagctccaaccctagcggccccccgagccccaactcaccgcaccggagccagctccctctgaaggcctggaccagccagcctgcgacgcctgaggccgccagcatagcaccatagggccagggagccagatggccccaacatcagtgccaagactgagctgaccctccagtgttgtccaaggaaatgtagaatcagtttgtagatagataaatgaatctttaattatatgatcagttt

SEQ ID NO: 4636 - DNA, 109 bp, Rattus norvegicus; identical to SEQ ID NO: 540

SEQ ID NO: 4637 - DNA, 600 bp, Rattus norvegicus
ccccaagggagcgagcagcaggggcstttccacctctctcctgaacgcacctcccctgtcytgagaggkgagagaagacawagcatttccggtggacagagacgagcgcatgccgacgtgccgtgatgacgcacaggcgtgcagtgcctgcattgcggagtccagtgctgtctgcagactgtcaagtccgttcatgtcggcagacgggatcctacggtcctgaatytaatagtgccactgtcctsgactgaaagacscgcaagttggataatcagrtysgtmagcaataaaatcstgggtkaggccgcctccggtgatgtcgccccaggtgacaagtcacctaacgtgscabtgagkccagccccagcaagaaagccacagcagmtgtcacagytgycavccwgcagcaaagggytwttaaagatggagggacagtttytytgagtaagtcccctggcacatgmatctgcctggggttgagaggaattgtsccagtttttcctagaggtgacagccytactctcaaaaagcctttcctgaacttgtaaatgtgaaagtaaaataaaatttaaaatgtgwrmmaaaaaaaaaaaaaaaaaa

SEQ ID NO: 4638 - DNA, 1400 bp, Rattus norvegicus
tgggcccgagggagagtggtttctagtgacagtgacagtgactcagatctcagctcctccagcctggaggacagacctatgccctctgggatcaagggcacaaaatatgacaagcctagaggggactcaggtggcagcatggagtcacccaggatggggcctgcccgaccgcccagccatctttytggcagccagagcagcctgggcagtgagacgggggcaggtgctacagatccacagggaggcaccctaccccggcctgagcccagggtatccggcaaaaggcatacctgggcaactacccattactgaggtggccggctgacctccctgggctgaggcacactctctggaggaagattcagagagagacaacagggccggcctaccggagcccctctctgaaggttcttgagggctcacaagctccctgataccttgacctgcaactcaacaagccagtgtttggggaccgagcgtgcttgcccccaccctgtagtgccttctctactatctcactcagcaccccaccttttatttattgcccctcccccatcccagtcacatctcgatttgctcgggccttgggttgggttggaaaggccttcctctatgcactgaagtttgggtgggacacacagggctttctttgtactaatgatgcgcactctaaccctcagtgtgaccctgcggagctgagcaaccccaccccacacccccacaccccccaccccccaccacattcccagtgtaagcctggagcaccaggctgtccctattcctccaaccggcgggcggcggggcggcggcggaggccagagcaaggtcctatttgccccgaggctggtccaggagctgagttaaatccagctttgaggtttccccgaagcccctattggcctctgggtttttgttctaccctgaaacacagctccccctcagacattaaaatgcttywygkkcttcagtggaaaacaaagctcccaccctgcctcatgctcgctggcccagcmtgggagtttcaaattctaaagccagagcaagcgtgaaaaatatkcaaarwacagatgyttstggaaaacccctccytgggktggggktgaggaartgtcmtatgcccttccttcmctgagwccagttsswycsttccmcaccamcatcmctcccattattattattaatartggccascaccattattarccttttgcctgttgctgctggcagaagacaaacttcactatttccctgagatgtgtarccrtcagcactawcataataaacataagaattttchccarrmmwvwmwmawhmaaagaccacaatccccacattctgacctgtgttgggatagcagtggatggattaaaatatgtagcactgaaaaaaaaaaaaaaaaa

SEQ ID NO: 4639 - DNA, 600 bp, Rattus norvegicus
aagcmtatgaggtccagagagcctcattttttgctgctagtgatgaaaaccatcgccccttgagtgcggcctccaacagcgaccagctagaggagcaggccytggtccagatgaagtcgtacagcagcagtaaggactcctctcccactctggcttctaaagtggaccagttggaaggtatgstgaaaatgcttsgagaagatttgaagaaggaaaaggaagacaaggsccacctgcaggcagaggttgagcacttgcgggaggacaachtgaggctgcaggaggagtcccagaatgcctcggacaagytgaagaagttcacagagtgggtsttcaacaccatagacatgagctagggccagbtgaggggaaaggaggagggcaggstgytctgtatgggcaccctaaagcacccattcatgccttggaaagtattctcagagtcccagcttcccagtmtgytcatattggacagtgcacaatacaacaactgcagatcaacaatcattatctgccttttmtagaaaaraaaaaamaaaammykwrymraawtyttaaaagtaaamtrawarwwwaamwrmwwaaaaaaaaaaaaaaaaa

SEQ ID NO: 4640 - DNA, 600 bp, Rattus norvegicus
cagtccccaactgcgcatcaccctgggcttctcaacctggaagagtccacaaccatccttctgaggccctccatccccacaaccactagctgttgttctccaagccaagggccccattccctttmktatgcatgtacggagtatcgmctagactttaagcgtccatcctrtttgaaagtttgggaaactgacacacgttgtgttcaascagcytggtgtggagtgccttygtrttagtstaccctmtcggaagctgkttggtgggcagstgaggaagaaatggagctgaaagtgtcccctcagttgtcctttcctccccctctaaggtccctcmctttycccaggacatcgtacactcccccccttgtcacctctsctaaccttcagagcagtactgtcacctttactcactgggcagaaataaagacagtgtcagaggcttccamarardawmwrawwwrttcagaaggtggggtgaggacagacaagacccaaccttgctcgttatcaccaccgaatgtctagcgagcctaaacttccacaacaaaccctccacagcagcagctggcgttaaatccgcctccaacgacgaggtgccct

SEQ ID NO: 4641 - DNA, 332 bp, Rattus norvegicus; identical to SEQ ID NO: 545

SEQ ID NO: 4642 - DNA, 399 bp, Rattus norvegicus; identical to SEQ ID NO: 546

SEQ ID NO: 4643 - DNA, 375 bp, Rattus norvegicus; identical to SEQ ID NO: 547

SEQ ID NO: 4644 - DNA, 600 bp, Rattus norvegicus
ctctactcctccccagcccctaaatctccaactgtgcgggctttcaccagccagcaggaggccgggctctgaggacccctggagcccccatcagagcccgaagaattctgagaaatgtgaaacttagggggtggggagacggggaagcagccacggggagctgctgagaagccccccagtcctcagaggccctgctgggccccagaccccttgcctcccaagggaactaatgttctaggtttttgttttctgttttggtttggttctcgtgtctctctctctctctctctctctctctctctctctctctctctctctctctctctctctctctctctctctctctctcatatctctacttatacctcccctgggctctccaaagcccaaggtgtctttgtccaggtcaccccccactcagtccctcccggctctctcatccccagccatgtctcccagccttccactaccttaatgtgtccactccccttctgttttttgcatggctatgcagttatggaagaaaaaaaaaggaaaccccagcagtccctaaagctagtccccagagggcaagatagaagaaaaaaaaaaaaaaaaaaa

SEQ ID NO: 4645 - DNA, 600 bp, Rattus norvegicus
ttgtytcwctatrtggrakcamaggcctctggtccttggccatcatttcctgggagagatggctggtggtctgcaagccctttggcaatgtgagatttgatgctaaactggccactgtgggaatcgtcttctcctgggtctgggctgctgtatggacggccccaccaatctttgkttkswkyaggtamkggysttatggcctgaagacatcgtgtggtccagacgtgttcagcggtacctcgtatcctggggttcagtcttatatgatggtcctcatggtcacgtgctgcatcttcccactcagcatcatcgtgctctgctacctccaagtgtggctggycwtcykagcagtrgcmmwkcaacagaaagaatctgagtccacccagaaggctgagaaggaggtgacacgcatggtggtggtgatggtcttcgcatactgcctctgctgggggccctatactttctttgcatgctttgctactgcccatcctggctatgccttccaccctcttgtggcctccctaccatcctactttgccaaaagtgccactatctacaatcccattatctatgtctttatgaaccggcaggtaagcaaga

SEQ ID NO: 4646 - DNA, 349 bp, Rattus norvegicus; identical to SEQ ID NO: 550

SEQ ID NO: 4647 - DNA, 600 bp, Rattus norvegicus
cagactgctggacaaggggtcggggatcgggagagggaaagggtgtatttgggctggaagggagggcggggagcagagtcggggctcatgagggctttagtaaagggactgcagcctgtgacacaaagcaactctagaaaggaagaaggagctggttgttggacacgtgtcacagcgtggcagccttacttccccagcaccctggatgcgccccttttgtccctgggttaaaacaaggtttcctcttcggtatctttgtaaccctttatgatcctaggggctggagttgactttgtgggttgatttgggtttgtttcttaaattcattgctccaggatcgctctttataacgctgtatgtcatcaccccaggcaccctccctattctggtcaggctctcagtgcccttcaactaaggccagcacaagggacgtgaacagcacttgctctgacaccatgagaggtcagacacctcagtcagcgacgttttaatctcccctcgatggactttttattttctggagtattgtgcataattccctccatgtctccaccttggatccaagtgaaacattacattggctccttcatccctcgtgcc

SEQ ID NO: 4648 - DNA, 600 bp, Rattus norvegicus
ctctacgccaagtattttcaaggagatctgaatctctattccatgtcaggctatgggacagatgccatcatctacttaaaggctttatcatytgagtctatagaaaaactccccgtctttaacaagtcagccttcaaacattatcagatgagttctgaggctgatgactggtgtatcccaagtaaggaaccaaagaatctgtcgaaggagaaactggcagtgtgacggggatctcgcctggcacttttacgggatcaaagtgggtctacggcagtgctgcttcgtgaatgtgtgtggactcttgtttccgcaaaacaaagcaaaacaaaaccaagcaaacgctagaacagacattgatctgaggagggactgagcttggttatgtgaccgggagaagtcagggcagggcttcagtagacaacaagtgtcctggatctcatttggcaatgcagaatgactcgtgactgttccaaatactgaaaagaagtctgcctctgagttacatctttttctcaacaagtacagggtttgaggtttgcagtttcaacagatggatgttttcgggttcttgctgacatccaaatatattggtgtttagtg

SEQ ID NO: 4649 - DNA, 600 bp, Rattus norvegicus
acaatcatcagcggtctccacagcattgcgaggagcattgagacgaggaactactctgaagggttgaccgtccacactcacatcgtcagcaccagcaacttcagtgagacctcagccttcatgccagtcctcaaggttgtgctcagccagsccagtaagctgggcgtctgagacagctgccatgacctcsgactccgccacttctccaaagaaagccatgctaagactgggaccagcccctcattagcatgtttccatggcacccgccacmcaggagctttgacatttctgcaggcaaactccchtagaactgcttgaaccccccstcccaccccgcccgtgctttcctttgttttaatcccctcgcccattatgattttcccattctgcaaatagtgtctttcstggattacacatagtgtggtttcctgagggattctgacaaaatgtggtttttaaaacttkggtgtactttttaggaaaattgcatctggctgtgtataaaacagacctaaaatagatttctttaatgtcttccctaccttcttcacgttsatcagattaaagttgtaatcccwwmwwaaaaaaaaaaaaaaaaaa

SEQ ID NO: 4650 - DNA, 600 bp, Rattus norvegicus
gagcttctcccattatctctcttctttcctggcctccaaatatacataatagaaaacgtccttcaaagagctatctaggatgataccaccgagtactgcatcagtgatgtaaagaaaaccagtagagctttgtttgttatacagagcataggagagattttaccccaacagttatttttataatctaggataatagtgaactgaatgtcgcaggataaaggtcaagaagggttttgacagtctaagcaagactgttttccaagttctcttttccaatattttatgtaaatctttgataatttaaaaatttttagtattttttggccattttcaatagaaaatatagctcaaactatttccagatgacttcatatccccataaggattatattgtgttacaatacagtgcgtatgtcttgaacctccagaaagtctgaaggctactaatccttatactaagtgaattcagttacatttggaattttttgtctgatagtatattttctcttatgcatctatctatacttctatgtaccctctgttttaatctgttattaaaagaagccaaataaaaatgctacataaaaaaaaaaaaaaaaa

SEQ ID NO: 4651 - DNA, 600 bp, Rattus norvegicus
atgctacaagttgcctaaccctcccttaagctgtaggagaattccttccccaggccctggctgagatcagagaggttggaggatttccctcactgstgggaaattgagactctgccaykmrgtgagcatggaggtgacagcagtcacaagtcacagtgaataaactaggaatttactctaarwrrrrwrwwrrawrttgcttctgaggaagctaggagtatgaataggattgaggaccctgcagggagagcctggggagggttagcctaggggagggttagcctagagaagggttagcmtaggagtgctgatgacagttgtggcagytcatgtaggtgtgattcttcagtttggaaaccatgccccttacccatctcctgcctgcaacccagytcatataaacgaggctaagamctatcataatatccccttttcttgcctcaggggctgtgcctgcctaagstktgacagtactatgcctttgtgtaagtctcagagacccagaaccccctgccttacctmtctstacctgtcccctccactgggcagtagtggtcagtttttactcgwgmmaaaaaaawraaaaaaaaaaaaaaaaaa

SEQ ID NO: 4652 - DNA, 1400 bp, Rattus norvegicus
ctcctcggatgaccatggctctgagcacacagtggatggagtgaagtatgctgctgagcttcacctggttcactggaacccgaagtataacaccttcggaggaggctctgaagcagcccgatgggattgctgtggttggcatttttctgaagataggacgggagaaaggcgagttccarattctccttgatgccctggacaaaattaagactaagggcaaggaggctccttttaatcacttcgacccatcgtgcctgttccctgcttgccgggactattggacctaccatggctccttcaccacgccaccctgcgaggagtgcattgtgtggctgctactgaaagagcccatgacagtgagctcagaccagatggccaasstgcgcagcctgttcgccagtgcagagaatgagcccccggtgcctctggtggggaattggcgccctcctcagccrmkmrrgggcagggtggtgagggcctycttcaagtaaggctctggacgtgccctcttcggaaaggaattcyrkccckgaagagccagcttgcctsctyctggtgctccctgctccaagctatcctacaacmytgagagaaagaagagacgcagtcagatgaaaccgcagtgccttttgrcaygakstaacccagaagcatgaatttcacacstaacctttttaataactaccttttctaaaaaaattagtatttctagtataaattcagtgaagaagaartagatggaaaartaacgacagtgacagtggcytattaagcatattaagtttctcagaatstcagcactcctgttttcaggctgagttactgacaagtgatgggtccatgctatgtatgtggstatgraggcatgtgcccacyttaccacatttgattgmaagmayrrsykargatcactgtagatttcagaaggtgaatacataatgtttacctcaaatrrhacsakcgmtactctatcactttttaaaaatytgcmtaytaccaamkkcgcmwggttttaaattaccgataaacacacacccataaggccaggtcttttaaattttttgatccagcatttaaatttyttcttcataaagatggttttctttgcccaatytagggtcatywatttttyatttcmcyactttaatctttgcatscctattaaaaacaaagcaaamcaamcmaacaaawaamaaaamccmwawwaaaaaaaaaaaaaaaagctgtctctggkgtcttttgagttggaagttggaatgactggttcctgagacaggaaggagggaatgccascactgaagctgagagtttgtactgatcgcagaagcaataaagacgggatggwaatgaaaaaaaaaaaaaaaaaaaaaacctttgcggccgcaagcttattcccttta

SEQ ID NO: 4653 - DNA, 600 bp, Rattus norvegicus
tgctcttctcagctctctggaccttcctgtggtttgtcggtttctgctttctgaccaaccagtgggcagccaccaaacctgatgacgtgttggtgggagcagactcagcccgggctgccatcaccttcagtttcttctccatcttctcctggggtgtgctggcctccctggcctaccagcgttacaaggctggagtggatgccttcattcagaactatgtggaccccacgccggatcccaccacagcctacgcctcctaccctagtgcctcggtggaaaactaccagcagccgcccttcacccagaatgtggagactactgagggctaccagcctcccccagtgtactgagcagccagggacaaagaggcaggagggtgcttggtggggctgcccctccaccctggacttctctcaaggtttgctgtccagaactgtagtcccttggctgttacagttgacagcccgagtccatgcctttctgcaccccagcagccagagcacacctgaagtgcccatgcccagaggggcttcaccgccacccgcctgaccctcaagggcatctttgaggagagggttttactaggccttatccccccac

SEQ ID NO: 4654 - DNA, 600 bp, Rattus norvegicus
agkgtkawwtccayrtygcwtywmtymsggmmmkmmytcascakmyaytatacammcagaacawtttyttttytttttytttttttyggagctggggaccgaacccagaacattttttttttaaataaaaacaatctaattgctggccacacccatcagggaagatactggaatatgtgatctgtttctccagtatcttcagtytggacaatgactgccatctgttggtaacttacagaaagtttagtgttctgttctgccttcagtgacagcaccacagtttcccttactcctgtcagctaatggcttcctcccctggattctcagaccartgtggccttcccagtgttagtcattcctcactgtgctcatgttttgtgggtggcacggcctttgagctttgggagaaaasaagatgaggctgtgacactggtggccctgtgtttgagataataattattgcttgtctctgaatttgatgaaaactgaagtacattytaaagaaagtatgtcttctattgtgttcccaaaccaagaacttgtcmwyrwrttcatataaattgkwttattacttttaaaaaaaaaaaaaaaaaactcgag

SEQ ID NO: 4655 - DNA, 1400 bp, Rattus norvegicus
catctcctgtcgcttctgtgctgcttcaagacactaagcccacgtttgagatkcagcaaccatctcctcccattcctcctgtccawcmtgacgysymgtkaaaaacgctgcccttctatgacgtccttgatgttctcatcaagcccacaagtttagttcaaagcagtattcagcggtttcaagagaagttttttatttttgctttgacaccccagcaagttagagagatatgcatttcaagggattttttgccaggtggcaggagagactacacagtccaagtccagctgcgactttgcttggcagagaccagttgccctcaagaagataactatcccaatagtttgtgtataaaagtaaatgggaaactctttcctttgcctggctatgcaccaccacctaaaaatgggatcgaacagaagcgtcctggacgccccctgaatattacatctttagtgagattgtcttcagctgtgccaaatcagatttctatttcttgggcatctgaaattggaaagaattactccatgtctgtgtatcttgtacgacagcttacatcagccatgttattacagagattaaaaatgaaaggtattagaaatcctgatcattccaragcactcattaaagaaaaacttactgcagatcctgatagtgaaattgctacaactagtcttcgagtgtccttgatgtgccctttaggaaaaatgaggctgacaatcccgtgccgcgcagtgacgtgtacacatctgcagtgctttgatgctgccctgtatcttcagatgaatgagaarragcccacctggatttgtcctgtttgtgacaaaaaggctgcctatgagagtctgatactagatgggctttttatggaaattctcaatgactgttctgatgtggatgagatcaaattccaggaagatggttcctggtgccccatgagacctaagaaagaagctatgaaagtaaccagccagccctgtacaaaagtagaaagttcaagtgtctttagtaaaccttgttcagtgactgtagccagtgatgcaagcaagaagaagattgatgttattgatctaacaatagagagctcttctgatgaagaggaagaccctcccgccaaaaggaaatgcatctttatgtcagaaacacaaagcagtccaaccaaaggggttctcatgtatcagccatcttctgtaagggtgcccagtgtgacttcagttgatcctgctgctattccaccttcattaacagactactcagtaccattccaccacacgccagtgtcgagcatgtcatcagatttgccaggagaacaaagaagaaatgatattaataacgaagtgcagcttggaacatcttctgatactgtgcaacagtgaatgcaaaataaaacakaatttgta

SEQ ID NO: 4656 - DNA, 600 bp, Rattus norvegicus
actatagycttggcaatctaaaaccatttaaagctaggagaagggaggaaagcaactgcctcagagaaaagcatgaagggaatttcccacgcaccgccctatttattcaggacagmcmtctctccttccactaagcaggctgaggataaaggcagaagkgggcagacagcagtgtatactcaggaggacagagagcctgtgggagtaagcaatcactgacctctcagaacctgacatcacaggtaatgagatgaaaggaggaragagaaaggaggagctgcttcttgttttctcaccaagggccccagcatcttgagaagaaggatgtgtaacattgcattccctgactctgcctggggccccaccctgctctcttgggttgctgtctttctcctgggaacaagtaagtactgggtgctggcaggattgatcctgaactcctctgcttcggctgctgctgtggctgctgttgcatagacctactctttctctagctgctcacccctgtctccttcctccacagatccagcaaattctggggtggtccagtctccaagacacataattaaagaaaagggaggaaggtccattctgaaatgc

SEQ ID NO: 4657 - DNA, 600 bp, Rattus norvegicus
tcagagaaaagcacggcttccycatacccagccctatttattctcatcagccatcttcccttctactgagcaggcggagactaaaaaggaaargcttgagactaggtgcactagtacagagagcctatgggagtarccayataacaggtcactgacctcagaacctgacatcacaggcaatgagataaaaggaggcaagagaaaggaggrgctgrctmstgctctctccccaargagatcagtatcctgagaagaaggatgtcaaacactgccctctctaactctgcctggattaccagyctgctgtcttgggttgcygtctttctcctgggwacaagtaagtmctkagtgctggcagggstgatcctgagctccaytgttgctgctgctgcttctgcatggatctactctttctctagacccttactcggtgtccttcttccccaggttcagcacattctggggttgtccagtctccaagacacataattaaagaaaagggaggaaggtccattctraaatgtattcccatctctgaacataacaatgtggcctggtaccaacagactcatgggcaggaactaaagttcctcatccagc

SEQ ID NO: 4658 - DNA, 600 bp, Rattus norvegicus
agtccctctcgtcctcgtgtggctttcattctgatgaatgataaacgctgctgtcaaaggctgatccaggcccttggaagggttgcctggctttgatggcaagattttgaaatttagactgaagtgcggtttaaaactcggtctgtgaacctattgataaagcaaagcaaaggttcactttgtaaataacactggtttagtgatgacagaattagcctaatttatgaacaagagacaaactctgtgtagttttagataaaaacagttttaataaaaggtttctgtcttgtatataaatgttgtctactgccctttttcacagacctagaacagtcagagagcgtgtaattggtttgggctctcagataaatgtggattgagscsggaaatgtcascagcacatccttggctsacgtaraggatctgsctgctgtggcaatatctgwgtttgttccttctatccctcatgctgtcmcttrmwgctgtcccacactaatgtgaccatggagaagcaagcaaatgcataggtttcyycgmrcygttgcaccatccctactcaacmcaataaacgtttaaaarctrwaaaaaaaaaaaaaaaaa

SEQ ID NO: 4659 - DNA, 1246 bp, Rattus norvegicus; identical to SEQ ID NO: 563

SEQ ID NO: 4660 - DNA, 600 bp, Rattus norvegicus
ccttacccagaggactatggagacattgagattggttctcacaagagttccagcagtaacctgggggcagatgatggctacatgcccatgacccctggggcagccctcaggagtggtggccccaatagctgcaagagcgatgactacatgcccatgagccccaccagcgtgtctgcccctaagcagatcctgcaaccacgttcggcagcggccttgcccccctctggagcagccgtgccagcacccccttcgggggcgggcaggactttcccagtgaacggaggcggctacaaagccagctccccagcggagagctccccagaagatagcgggtacatgcgaatgtggtgtggctccaagctgtccatggagaacccagaccctaagctgctccccaatggggactacctcaacatgtcccccagtgaggcaggcaccgcagggaccccacctgacttcttctcagcagctttgcgtccaggcggtgaggccctcaaaggcgtccctggccactgctacagctctttgccccgctcttacaaggctccctgtacttgcggtggtggagacaacgaccagtatgtgctcatgagctcccct

SEQ ID NO: 4661 - DNA, 600 bp, Rattus norvegicus
tgctgggacccaaagcccggcgactggatgactactcactagagcgggtaccacctgaggagaaccaaaggtaccaccaacgccgccgggaccgtggccaccgcacctctgagcgctctctgggccgatacactgatgtggacacaggcctggggacagatctgagcatgaccacccaatcgggtgacctgccctccaaagatcgggaccaggaccggggccggcccaaggaccggaagcatcggccacaccaccaccaccaccatcatcaccatcatcccccggccccggaccgggagcgctacgcacaggagcggccggacaccggccgggcgcgggcccgggagcagcgctggtcccgctcgcccagcgagggtcgggagcacgcgacacacagacagkagcagtagttccgtcagtggaagcccagccccctctacgtccggcaccagcacgccgcggcgcggccgcaagcttattccctttagtgagggttaattttagcttggcactggccgtcgttttacaacgtcgtgactgggaaaaccctggcgttacccaacttaatcgccttgcagcacatccccctttcgccagctg

SEQ ID NO: 4662 - DNA, 851 bp, Rattus norvegicus; identical to SEQ ID NO: 566

SEQ ID NO: 4663 - DNA, 557 bp, Rattus norvegicus; identical to SEQ ID NO: 567

SEQ ID NO: 4664 - DNA, 677 bp, Rattus norvegicus; identical to SEQ ID NO: 568

SEQ ID NO: 4665 - DNA, 600 bp, Rattus norvegicus
gaagcttgtgacattaatgctatcatctttcacctgaagtcgaaaagatccgtgtgcgctgacccaaagcagatctgggtgaaaaggattttgcacctcctcagcctaagaaccaagaagatgtaaaaacggatgcttttctgggatggaattggacacagcccaaggaggaaatgatcacagctggggttggaggtttcacctgcacatcactgcacagacctgatttgtgtcccagtggtcttgtccaatggatgaagttgattcatattgcatcatagtgtgtcatatttaagctcatattagagttaagttgtatttkgtgttatttatagatccgaattttctatgtttagctatttaatgttaatttcccacaatctatgargggcgcttagtaraaggttcaatattatgtttaaggcagtaagtttatatggcccttcttggaaacaataagctattgtaaaaatatttaatgttttctgtgtgcttaattgtttcttaaattgatacgatttacttataaaacagaaaggaattataagaatatattgaaaawaaaaraamtgaaaggcaaaaaaaaaaaaaaaaaaaaaa

SEQ ID NO: 4666 - DNA, 1400 bp, Rattus norvegicus
tccagttcagaggcaatcttcctcatgggtctttataccttaccttcagtatgtgttggatatttaattagtggctttattatgaagaagttcaagattactctcaagaaagcagcattcatatcgtactgcctaggcatgtccgagtgccttctgtccctctgtaactttatgctaacctgtgataacgtcccaattgctggcttaactacttcttatgaaggaattcagcagtcttttgatatggagaatacggtcctggccgactgcaacacaaggtgcagctgcttaacaaaaacatgggatccagtgtgtggagacaatggcctagcatacataacaccttgccttgcaggctgtgagaagtcagttggatcaggaatcaacatggtgcttcaggattgcagctgcattcagtcatcaggaaactcgtctgcagtcctcgggctgtgtaacaagggtcctgattgtgccaacaagctacagtacttcttaatcataacggtgttttgttccttcttctactcattatcactcatacctgggtacatgatttttctgaggtgtatgaagtctgaagaaaagtcacttggaattggactacaggcattttgcatgagaatattgggtggcattctggcacccatttactttggagttttgatagacagaacctgtttacattggggaactcagaaatgcggtgagcctggggcatgcaggacgtatgaaataaatagcttcaggagcatttaccttggattgcctgcagctctaagaggatcaagctatctgcctgccttcttcattctaagacttatgaggaaattccagttccccggggacatcaactctccagtaactgatcatgtggagatgatgctcacagagaaggaaagcgagcacacagatgtgcacagaagtcctcaggtcgagaatgatggagaactgaaaacgaagctgtaatgagttttctactgccctgttcaaggccatgaacagaatgcacacttcccttcctcggaatcccgagagatacaataggaaccttctctttaaggacctcaatgattatttttctcactataaaaataattgctgatatcactttcagaacttcagggtgatatttaagatttccccgggaaagacttttatggtgacccccacactacactttaaagcttccttcattttcacataacattttctcttaactcaatcaagggaagtatgtgtttcccacacagcttcaaatgagtttaaaactttcctattccagaaacactatttaatttcactgaatttaaatttccatactgggggtaattagaactgaaaatatgccccctggttgtgtcatactgaaataaattgttcaaattcattctttctatgtg

SEQ ID NO: 4667 - DNA, 471 bp, Rattus norvegicus; identical to SEQ ID NO: 571
  misc_feature (2)..(4): n is a, c, g, or t
  misc_feature (6)..(6): n is a, c, g, or t
  misc_feature (8)..(8): n is a, c, g, or t
  misc_feature (17)..(17): n is a, c, g, or t
  misc_feature (34)..(34): n is a, c, g, or t
  misc_feature (36)..(36): n is a, c, g, or t
  misc_feature (47)..(47): n is a, c, g, or t
  misc_feature (108)..(108): n is a, c, g, or t
  misc_feature (114)..(114): n is a, c, g, or t
  misc_feature (189)..(189): n is a, c, g, or t
  misc_feature (212)..(212): n is a, c, g, or t
  misc_feature (226)..(226): n is a, c, g, or t
  misc_feature (229)..(229): n is a, c, g, or t
  misc_feature (237)..(237): n is a, c, g, or t
  misc_feature (275)..(275): n is a, c, g, or t
  misc_feature (296)..(297): n is a, c, g, or t
  misc_feature (299)..(299): n is a, c, g, or t
  misc_feature (334)..(334): n is a, c, g, or t
  misc_feature (337)..(337): n is a, c, g, or t
  misc_feature (353)..(353): n is a, c, g, or t
  misc_feature (356)..(356): n is a, c, g, or t
  misc_feature (359)..(359): n is a, c, g, or t
  misc_feature (362)..(362): n is a, c, g, or t
  misc_feature (380)..(381): n is a, c, g, or t
  misc_feature (385)..(385): n is a, c, g, or t
  misc_feature (391)..(391): n is a, c, g, or t
  misc_feature (397)..(397): n is a, c, g, or t
  misc_feature (407)..(407): n is a, c, g, or t
  misc_feature (415)..(415): n is a, c, g, or t
  misc_feature (422)..(423): n is a, c, g, or t
  misc_feature (429)..(430): n is a, c, g, or t
  misc_feature (434)..(434): n is a, c, g, or t
  misc_feature (436)..(436): n is a, c, g, or t
  misc_feature (438)..(440): n is a, c, g, or t
  misc_feature (445)..(445): n is a, c, g, or t
  misc_feature (447)..(447): n is a, c, g, or t
  misc_feature (454)..(455): n is a, c, g, or t
  misc_feature (457)..(460): n is a, c, g, or t
  misc_feature (464)..(464): n is a, c, g, or t
  misc_feature (468)..(469): n is a, c, g, or t

SEQ ID NO: 4668 - DNA, 156 bp, Rattus norvegicus; identical to SEQ ID NO: 572

SEQ ID NO: 4669 - DNA, 432 bp, Rattus norvegicus; identical to SEQ ID NO: 573

SEQ ID NO: 4670 - DNA, 600 bp, Rattus norvegicus
tgggtccaacaaacccgcgtgtgacgctggccccaccttggaacggcctggcccccccagccccaccccccccaccccggctgcagatcacagagaacggcgagttccggaacaccgcagaccactagcccacccagcatcacagacctccttccctgtgcaccctaccccggcccacccagcgtcacagacctccttcccagtgcacccgaccctggaacatcaccaaccaccaggactggacgtcaccaagggacagcgggattgtctcccttaacgcctccttggggcacgctctgtcaaccccactgctccattccaggagggagagtgggaccctcagctgccctctcaccccaggacaccacctaccccacacagaccccttcactctggggtgctatccccatcctctgcctcacagttcccctgagcactgggggacagaccctcacccccacactgggggtgtggcacctccaaactttcaacttcagggtgatttttttagcagtaaccagagctgacaatctataacccccctctaccaccccattttggcctcccctgccccccttgttatggggaggggaccccggg

SEQ ID NO: 4671 - DNA, 600 bp, Rattus norvegicus
gtctcccttaacgcctccttggggcacccatctgtcaaccccactgctccattccaggagggagagtgggaccctcagctgccctctcaccccaggacaccacctaccccacasrgassmykkswstytggggtgcymycyycatsctctgkcccctgggggaggtaggacagggctgggcttccctctcaccctccccctcacccagtctccctccctcccgccagctccacgctttttcggtgtttyctgtacatagctctctggcggaacaggggaggtaggatggatggggtctgggtgggtaaaccatgaaggggagaaacccctcctgggtacccctcttctctgactgctgccctctacccagccttgtctcttcaccccttcttgcgtttggtattgagaattcttcccasactccakactcgacctttcttttgtatgaacagctctycttcaaacttacccctytacatacacccacccagccggggccaaatttatacttatataaaagttgtaaatatgtgaaattttatcccattccctctcctctgcttccctacatcaggccttacccttgtacctcctcccctc

SEQ ID NO: 4672 - DNA, 600 bp, Rattus norvegicus
cctcatcagaaacatccttgcacctcgttctcccaagtaggtcagaggagggcagcatcactcatggacctgtgagttctttcagtttggaaaacttaccaggatcttgggaccgagaaggaatgatgtcagcctctacagaacccttggagaactttccagtagaagttgtcacaagcacagcggatgtaaaagacagcaaagccataaacgtataatatcagcacataagggcagctttcaatgccaaatccactgctgcatgacagctctagtttgcctttgtggcttctagcaggtgtggagcctgagcaaagttaggaattctgcaggaaagagggcaaggggccagtaaaaggcagagccacctctatactgtagcaaacaatttctagatcgtagaagcataaaaccttttctgtacaggtattaacttactggtctgattgacagactttggtaacaatcctatgacccagagggtctgagcagatagaaaccccagacaaagagtttggggattagttttgtcataagtggatttttttgtgaagtgcagcaaaggttttttttcctgagtgcctggttgtcattcctgaa

SEQ ID NO: 4673 - DNA, 600 bp, Rattus norvegicus
ctcagtgctgccgtgtcagcaggaaaggtgacccttgacagtggctatgatgttgcccagatagcccaacacctagatttcattaatctcatgacctatgatttccatggaacctggcgccacaccacaggacatcacagccccctcttccgaggccagcaggacactgggcctgacagattcagcaatgtggactatggtgtggggtacatgctaaggctgggagcccccaccaacaagctagtgatgggtatccccacctttggaaagagcttcactctggcatcttctgagaatcaagtgggagctccaatctcagggtcaggattaccaggccgctacaccaaggagaaagggaccctcgcctactacgagatatgcgacttcctcagaggagctgaagtacatagaattcttggccagcaggttccctttgctaccaagggcaaccagtgggtggggtatgatgacccggagagcgtcaaaaacaaggtgaagtacctgaagaacaagcagctggcaggagccatggtgtgggcagtggatttggatgatttccggggctccttctgtgggcataacgtacacttcccgctcacc

SEQ ID NO: 4674 - DNA, 600 bp, Rattus norvegicus
ctttatkttttatwccaggtaaatactcaacgaagagtwgaggaagagcagactggggttggtcctatgttgactgtttctcacagaaccttcyttggcttagagggaatgactdtgctcacaagcryacgtagkgtcttaggcgasgtctttsgactaggcmgtaagttwgtcaatcctgatgtgttytagggcacagaaaatcactgtgttgacttactagggctktttactttttcattacagtgcacataatacttccctgtatttatattatdacatgtatagtgtaaaatgtgaatgactttttctttytktgaatgaaaatytaaaaaaatctttgtaactttttatatctgcttttgtttcmccaaagaaacctaaaaaytcttcttttamhwmmwwraaaaaaaamaaaaaaaamstkwgcggcckcrwgcttattccctttagtgagggttaattttagcttggcactggccgtcgttttacaacgtcgtgactgggaaaaccctggcgttacccaacttaatcgccttgcagcacatccccctttcgccagctggcgtaatagcgaagaagcccgcaccgatcgccctt

SEQ ID NO: 4675 - DNA, 600 bp, Rattus norvegicus
gccatgaaccgtaggctggcctcggacagtcccgccctacccaaggcctttgccagagtgaacagtatcagccctggttccccagccagtattgcgggcctgcaagtggatgatgaaattgtggagttcggctctgtgaacacccaaaacttccagtctctgcagaacgtgggcwctgtggtgcagcacagcgaggggaagcccctgaatgtcatggtgatccgcagaggggagaagcaccagctcagactgactcccacccgctgggcaggaaaaggwctgytgggmtgcaatattacccctctccaaagatgactgcttcctgggagctgcaggagagcttcttcagctgggcccgcgcttggcctgggggatttcctcattctctcggctccctcaagtgtaaggatctggaagagagtggcggacgcctgagcgtcgaggtggaagagacgctttggctgcctgatgtagtctctgggttgaggcattattaaaaatgtggtttgtgcttarmwawaaaaaaaaaaaaaaaaaaaaaaaaaaaaaaaaaaaaaaaaaaaaaaaaaaaaaaaaaaaaaaaaaaaaaaaaaaaaaaaa

SEQ ID NO: 4676 - DNA, 600 bp, Rattus norvegicus
ggaccagcagatgtacctctgttactctcagcctggaatccccaccttgcccaccccagtggaaataacggttatctgcgctgcccctggtgcggacggggcctggtggcgagcccaagtagtggcctcctatgaggagaccaatgaggtggagattcgctacgtggactatggtggatataagagggtgaaagtcgacgtgctccggcaaattaggtctgactttgtgaccctgccattccaaggagcagaagtccttctggacagtgtggttccgctgtcagatgatgatcacttttcacccgaggcagacgcagccatgagtgagatgacaggcaatacagcactgctggcccaggtgacaagctacagtgcractggccttcctctgattcagctatggagtgtggttggagatgaagtggtgttgataaaccggtcgctggtggagcggggcctggcacagtgggtagacagctgctatgccagcctttgaccgtggctcctgggctgcttcggtcttctttgcactgttgagaktgggtytrgmacccaggacagagatttaacagcagagtaacgaaaaaaaaaaaaaaaaaa

SEQ ID NO: 4677 - DNA, 471 bp, Rattus norvegicus; identical to SEQ ID NO: 581

SEQ ID NO: 4678 - DNA, 600 bp, Rattus norvegicus
cacacttatcagtcagcttgactactcttctggacaagttttcaaatatttctgaaggcttgagtaattattccatcatagacaaacttgggaaaatagtggatgacctcgtggcatgtatggaagaaaatgcacctaagaatgtaaaagaatcactgaagaagccagaaactagaaactttactcctgaagaattctttagtattttcaatagatccattgatgccttcaaggacttcatggtggcatctgacactagtgattgtgtgctctcttcaacattaggtcctgagaaagattccagagtcagtgtcacaaaaccatttatgttaccccctgttgcagccagttcccttaggaatgacagcagtagcagtaataggaaagccgcaaagtcccctgaagacccgggcctacaatggacagcaatggcactgccggctctcatttcgcttgtaattggctttgcttttggagccttatactggaagaagaaacagtcaagtcttacaagggcagttgaaaatatacagattaatgaagaggataatgagataagtatgttgcaacagaaagagagagaatttcaagaggtgtaat

SEQ ID NO: 4679 - DNA, 600 bp, Rattus norvegicus
ttccaaatgactatatgataaccctcaactatgtcgccgggatggatgttttgcctagtcattgttggttacgagatatggtaacacacttatcagtcagcttgactactcttctggacaagttttcaaatatttctgaaggcttgagtaattattccatcatagacaaacttgggaaaatagtggatgacctcgtggcatgtatggaagaaaatgcacctaagaatgtaaaagaatcactgaagaagccagaaactagaaactttactcctgaagaattctttagtattttcaatagatccattgatgccttcaaggacttcatggtggcatctgacactagtgattgtgtgctctcttcaacattaggtcctgagaaagggaaagccgcaaagccccctgaagacccgggcctacaatggacagcaatggcactgccggctctcatttcgcttgtaattggctttgcttttggagccttatactggaagaagaaacagtcaagtcttacaagggcagttgaaaatatacagattaatgaagaggataatgagataagtatgttgcaacagaaagagagagaatttcaagaggtgtaat

SEQ ID NO: 4680 - DNA, 1078 bp, Rattus norvegicus; identical to SEQ ID NO: 584

SEQ ID NO: 4681 - DNA, 600 bp, Rattus norvegicus
gcggcgcgtctggcgaaggccctgcgtgagctcagtcaaacaggatggtactggggaagtatgactgttaatgaagccaaagagaaattaaaagaggcgccagaaggaactttcttgattagagatagctcccactcagactacctattaaccatatctgttaagacatcagccgggccgactaacctgcggattgagtaccaagacgggaaattcagattggattctatcatatgtgtcaagtccaagcttaagcagtttgacagcgtggttcatctgattgactactacgttcagatgtgcaaggacaaacggacaggccctgaagccccccggaatgggactgttcacctttacctgaccaaacctctgtatacatcagcaccgacgctgcagcacttctgccgactcagcattaacaagtgtaccggtaccatccggggactacctttaccaacaagactgaaagattacttggaagagtataaattccaggtataagtatttctctctctctctctctttttttttttttttaaatgaatgcctcatatagagtatcaccgaatgcagctatgtgaaagagaaccagaggccctc

SEQ ID NO: 4682 - DNA, 1400 bp, Rattus norvegicus
tggtgctgcgctcaggcaaagacgactacatcaatgctagctgtgtggaggggctctcgccatactgtccacccttagtggccacccagcgtccgctgcctggcacagctgcagatttctggctcatggtgcatgaacagaaagtgtccgtcattgtcatgctggtgtctgaggctgagatggaaaagcaaaaggtggcccgctacttccccattgagaggggccagcctatggtgcacggggccctgagcgtggccctgagcagtgttcgtactactgatacccatgtggagcgagtactgagcctgcagttccgggatcagagcctcaagcgctctctcgtgcacctacacttccctacttggcctgagttaggcctgccagacagccctggcaatctgctgcgcttcatccaggaggtgcacgcacattatttgcaccagcgacccctgcacacacctattgtcgyacaskgcagctcgggggtgggccgcacaggagcctttgcgttgctgtatgccgccgtgcaggaggtagaggctgggagtrggattcctgagttgcctcagctggtgaggcggatgcggcagcagaggaaacacatgctgcaggagaaactgcacctcaaggttctgccacgaggcattggtgcgacatgtggagcaggtcctgcagcgccacggcgtgccgcctcctggcaagcctgtggccagcatgagcgtcagcyagaagagccaccttcctcaggactcccaggatctggtccttggtggagacgtgcccatcagctccattcaggctaccattgccaagctcrcatccggcccctgggtggcctggattcccccgctgccagccttcccagccttgtagagcccccaggtcttccaccagctagccttccagagcccacccctgccccaccttcctcgcctccccccccctcttcccctctgcctgaacccccccagccagaggaggagccatcagtgcctgaagcccccagcttagggcctccctcgtcatccctggagctgttggcctctctgactccagaagcattttccytggacagctctttgcggggaaagcagcggatgagcaagcagaactttctgcaggctcacaacgggcagggtctcagggctgcccaacctacggatgaccccctcagcctcctggatccactctggacacttaacaagacctgagaaggctttgcctgtytggtccttacactacacctcccatccctgctgccttcagctgtgccagatggagatgcacttcaggcctcagtcaggctytgctccttcctttgcggaacctgacatttttccagccctgggctattgacataataaacttactctgtgrmmarwraaaaaaaaaaaaaaaaa

SEQ ID NO: 4683 - DNA, 600 bp, Rattus norvegicus
catagttagaattactatgcttcygtctacacaggaagtgctgtagctctcaagtgctmtagaggccattggttggagaggaaggaatgcatgcttatgttatgtaagcaactggactcccgctcagtacaggcctggagctccaggccgagtgcatactctgctgctttgagtgctgcaggagtgcccactggcctggctgtgaggctgatagctttttcaagtgcaggytgcaggattaarccaactmttatgcaactgactgtccttaatgatgatctcataaacatttgtgtgtgggggtgggaggrtttgsgtgtcgggatggggaatgaatttgaagtctaaagttaaagctagaaatcagatgatcagcttctgctctgtctatatagacgattggatttatgtggaggcaggccagatggcaactgatgacttgtgtgcaaacaagcatttatccaggttgcaatatccaaawtgryttgttaaaaactmtakgtcacattcttacactaagaaaaacagtaaacatgagacaaagtttaggaaaaactaatwaaagaaacctgtcttaamwwrraaaaaaaaaaaaaaaaa

SEQ ID NO: 4684 - DNA, 600 bp, Rattus norvegicus
accaccasgaccctggacgacatcctaaaatccttctctgatgtcagtgtcatccgagtggccagtggytacctactgatgcttgcctatgcctgtttaaccatgctgcgctgggactgctccaagtcccagggtgccgtggggttggctggtgtcctgttggttgcactgtcagtggctgcaggattgggcctctgctccttgattggcatttcctttaatgctgcaacaactcaggttttgccatttcttgcccttggtgttggtgtggacgacgtctttctcctggcccatgcattcagtgaaacgggacagaataagaggattccawttgaggacaggactggggagtgcctcaagcgcacgggagccagcgtggccctcacctccatcagcaatgtcactgccttcttcatggctgcattaatccctattcctgcactgcgagcgttctccctccaggctgctgtggtggtggtattcaattttgccatggttctactcattttccctgcaattctcagcatggatttatacagacgtgaggacagaagattggatattttctgctgtttcacaagcccctgtgtcagcctcgtg

SEQ ID NO: 4685 - DNA, 600 bp, Rattus norvegicus
agctaatgcatccactctcttttccacaaccacctcaagcacttctgtagaagtgaccagtatgacagagaactagtgtgatttggaatgtgatgccttaagtaatgttaaacttatttaacttattgatattacactattcccttmcatgaatactagaawtccttaaatgcaagatgtagatccatttttttatttctctgtgaatcctggttcaacactttcaatgtatgagagatgaatgggtaaactttgtgtttgagagtccaaggtattgtttaaaatattattatggatattcctaattattaaaagaaatatattattyttgtmmamaarwmwramwwwmrrwgttttctgagggaaatggcaaagctaagagtacataagaacacacaggaggacatcacaagatgggacacatattgagggggggatgggggaatgaatgctgcactcttttgtattgagtggtctcatgtgagtgtcataaactctttgagacagggtccagtcagggatgctagtaccatagttccaatccccaggactgcttctcagacacatgctcgataaaagccccagtccttcccagtcatg

SEQ ID NO: 4686 - DNA, 254 bp, Rattus norvegicus; identical to SEQ ID NO: 590

SEQ ID NO: 4687 - DNA, 600 bp, Rattus norvegicus
atcagaaacatcctgaagcagggkattgaaaccccagaggaccagaatgacctaaggaaaatgcagcttcgagagttagctcgcttgaatggcactctacgggaagatgataacaggatcttgagaccctggcagagctcagagacacgaagcattaccaacacgactgtgtgtactaagtgtggaggggctggtcacattgcctctgattgcaaatttcagaggcctggtgaccctcaatcagctcaggataaagcacggatggataaagagtatttgtcccttatggctgagctaggggaagctcctgtccctgcatctgtgggctccacctctggacctgccaccacacccctggccagtgcaccaaggcctgctgctcctgccagcaaccsaccaccaccgtctctcatgtctacaactcagagtcgcccaccctggatgaattctggtccttcagagaatcggccctaccatggcatgcatggaggtggtcctggtgggcctggaggtggcccccacagtttcccacacccattacccakcctgacaggtgggcatggtggacatcccatgcagcacaacccaaatggaccacca

SEQ ID NO: 4688 - DNA, 600 bp, Rattus norvegicus
ccttgccagtcttcttttaggatcaggtttgcaaggtacagaatcacagcacacgtggggaaatatactgaggaaagggtggcttttgattaagtgaccagggttctttgggswsrakrggaacatttyttacaactcccctkgascargtttggcaggattgaccagctccagcatttagcatgaagtcctcagccctytggtgattccmtcactytcatgtcaacctgggttatytcaagccagtgtggscctgtggtcttcaggttytctgtaaractcaagtytcctctcattctacctacctctgyttgtraragggaggctttggagcgcttgggtytcagcacttagtgcatytacttggtgtatagaccytcgctctyttcaggtggtacatgaragacaggtmcatgagagagstcvccaggacctyttatgcagtgtgctatcctytaaactcctaagstaggccmccctggtgtcattytgtcatytgtgcaattyttakttcctttgggagtttcctcctcatgcattttgttcmtagggaataaaaatagccattwgmcctkaamaaaaaaaaaaaaaaaaaaaaaa

SEQ ID NO: 4689 - DNA, 600 bp, Rattus norvegicus
acaagacacatagctctataaggctgcatacggtgcatgcatgtgaatgaaactgtggaagccaaaggggcccacttggatcctcactatgactgtgtaagctcatatcgtgttgatggaaacaaagtcattcaaggacaaaacttaggagctttagaaagcttcaggaactagccacatttcctgtttgattctatggatgagaaagatgccatttttatcttaaagtagacttctatcaatggaaaatctgccctctgcgctgggaagtgagccagccaatcagtgacaataagagactgtcatacaaagaatcagtaaagactctaaccttctcaagctctggtgtttgaagcctttgtctgagtctgggtccatgcttcagaaggggtaaggtgacatccactgactgtacctctctgaacccaaggtacagaagaacaggaagccccaatcaacttcataatcaacccagatgctgcagcccatacagaatttggcctgaatgatttcctgtggagcattaaatggaggccaagtccactctttagatattaaatgaatattcttttgcaaaggaaaaaaaaaaaaaaaaaaaaa

SEQ ID NO: 4690 - DNA, 1400 bp, Rattus norvegicus
ccaccgtcccacccaggagccgtcgggtttgccctaaggtcaggtgtacgagcctctcatggaagccctgtaaggttgagaggcggatctgggtacgcgtctacagtccatatcaagactactatgaggtggtaccccccaacgcacacgaggccacgtatgtccgcagctactatgggccaccttatggtcctggtgtgacacatgtgatcgtgcgagaggatccctgctacagctctggcgcccctttggccatgggcatgcttgctggggctgccacgggtgctgcccttggctcacttatgtggtcgccttgctggttctgagccctggggctccaacctctggatgtgcacgtagaacgcaaaacccttttcttctggaccctctcctatctaccacctaaactctgtcccattttgacccctttctctscattaagtcctctaggcttggcccattcttcccaccatttatcctccacttatcctccttccctctcagagaaagctaacatctcagacacagacacagcggaacgtccatacacctactgccaggcaacctcataaatcacatgggaatttcctctagacacagcaaacataacttcatttggctttaagtgtctgaggaatggaactcacaagagagcaaacaacaaagttacagttacctgtctggcaaggataagtgggggcaagggcaaggcagacagtttaggtgcctaaaggatcacatgacagttggcttggcgttgtggcaggggttgtagtggccttagctttaggcgaaggagcttgctggataaaggcatgatggggctttttatgaagtttctggatttcaactataatgaatactttgcttgtmwagttagwactggcagaacmtacaccyttatccagaacacggcatttggcaccttttccccacttgbtagcttcchtatgatagttcagctaaccytaaggtttcctagctgtggaacaggtgagctctttgggacctctggccttacaaagttgctyccattaggaaatgcctttctgatcccaggagctcagctctgactttgactgttaacatcwraagmtttttctcttccttcactctggagggaaatggaattattttgctmtagggcctgacccaccttggcaccagcttggggaatctctcatgtgcctgtctgtaggyskcrwgcmatctttccatttgatcccattccaaactattccatcagtctgtcccaattgccaatagaaaagctaaaatcyctggctcagaggccagagtgcccactaaaattcctagcatatgtgagggcaccactggctcagctgcagacactaataaagatatgactggscscrraamaaaaaraaaaaaaaaaaaaa

SEQ ID NO: 4691 - DNA, 195 bp, Rattus norvegicus; identical to SEQ ID NO: 595

SEQ ID NO: 4692 - DNA, 400 bp, Rattus norvegicus; identical to SEQ ID NO: 596

SEQ ID NO: 4693 - DNA, 462 bp, Rattus norvegicus; identical to SEQ ID NO: 597

SEQ ID NO: 4694 - DNA, 600 bp, Rattus norvegicus
tggggtcatcccatgggtggcacaccacaagcttggggtcatccgatgcaaggcggaccccaaccatggggtcacccctcagggccaatgcaaggggtacctcgaggtagcagtataggagtccgcaatagcccccaggctctgaggcggacagcttctgggggacggacggaacagggcatgagcagaagcacgagtgtcacttcacaaatatccaatgggtcacacatgtcttacacataataattgaaagtggcaattccgctggagctgtctgccaaaagaaactgcctacagacatcagcacagcagcctcctcacttgggtactaccgggtggaagctgtgcatatggtatattttattcgtctttgtaaagcgttatgttttgtgtttactaattgggatgtcatagtatttggctgccgggggtttttgtggttggctttttgtttctttgtttttaacttttggaaaaattttaaagtgggaaatagataactatttcatgtatgtggcaaaaaaaattggctttatagaaggggtattatctgaacaatataaaaataaaatgaagcaaactaaaaaaaaaaaaaaaaaa

SEQ ID NO: 4695 - DNA, 600 bp, Rattus norvegicus
tttcctggtgtggcactggcctccaggctgtggccagcactttaagagaatcaccagataagcagaccagccttagccagggcacctccttgcctgctgcccacttggctatacggattcaggcagggctaaatgacatgacgtcttcaaactgccggctctctctacacgagagcatggcctttgagcctggtcaaggatccttcccaatgaagctggccatccagtcctttatccaatagtaggtccctggtctgtggcccctgggtgtttgaggaattgggaacaccttggcctctactctggtgaggaataatccctgtccatcctgtgagtgggcatcttgggccatcagcagctgactttagagggaaacatggtagatataatagagccctcggttgtggccccataatatctggcccagaggtgcctggcattaaatgataacattttggggtgggggccctaaaccctcttgccctcagttttcctggtcactgaggacaagcgctacagagcttgtgcttgggcagagctttatttacttcttccacccttttgaaatgtgtgttctggcaggggtagaggcaacttggg

SEQ ID NO: 4696 - DNA, 1400 bp, Rattus norvegicus
gaagatttctcctgcaagatcgtgccctatatcgaggtagcttctctgggtgtcactaccttcaccttatgtgcactgtrcatagatcgcttccgggctgccaccaacgtccagatgtactatgaaatgattgaaaattgttcttccaccactgccaaacttgcagttatctgggttggcgctctgctcttggcacttccggaagttgtcctccgccagctgagtaaggaggatttgggctttagtggccaggctcctgcagaacggtgtgtcataaagatctctcccgatttaccggacaccatctatgttttggctctcacttatgatggcgcacggctctggtggtatttcggctgctacttttgtctgcccacacttttcaccatcacctgctctctagtgaccgctcggaagatccgcaaggcggagaaagccagtacycgtgggaacaagcggcagatccatctagagagccagatgaactgcacagtggtggctctgaccattttatatggattttgcatcatccccgagaatatctgcaacatcgtcactgcctacatggccacgggtgtctctcagcagaccatggacctcctcaacatcatcagccagttccttttgttcttcaagtcctgcgtcacccctgtactcctcttctgcctctgcaggcccttcagcagggccywcrwggagtgctgctgttgctgctgcgaggagtgcatccagaagtcttccactgtgaccagtgatgacaacgacaacgagtacaccacagagctggmgttgtcgcccttcagcaccatccgcagagagatgtccacctttgcctctgtggggactcactgctgwmggaacggcktggktagctcagattccttcgattttcatagcctgtgawaatttttactcsatatttttccttacaggggaacaaygcamacattttgaaaagcamgtagagggagacatattaactactctagaactgattttgcagattaatatttgtgctctgggaaaaaaaagtttctatttagttatgtaagaagaaggcagtcaacagtctcagatcatttttcctgctctggtgctaatattttattcaagagtcattgcaccttaaccatattaattgttcgatttctttctttttctttcttttgaaaacmtagtcgttgtatattgaagaaggrcctgggattttgctagttattttgtttttgmgttgtgaccgaaagtacattgtatctgaaatgatttgrttttrtcccasccatgaaacttagcaccaaataaactccccatccttmtttaacctgamtgtcaatmtacttttaaccaagactcaataaatttttaattgccttaaatacacaaaaaaaaaaaaaaaaaaa

SEQ ID NO: 4697 - DNA, 1400 bp, Rattus norvegicus
ggttgctacttctgtctgcccatcctcttcaccgtcacctgtcagctggtgacatggcgggtgcggggcccaccgggcaggaagcctgagtgtagagcgggcagacatgagcagtgtgagagtcagcttaacagcaccgtggtgggcctgactgtggtctatgccttctgtacgctccctgaaaacatctgcaacatcgtggtggcttacctctccactgagctcacgaggcagaccctggacctcctgggcctcatcaaccagttctccacgttcttcaagggcgccatcactcccgtgctcctcctgtgcatctgcaggccgctaggccaggccttcctggattgctgctgctgttgctgctgtgaagaatgtggtggggcatcagactcctcagccactgtcagcgcggacagcaagcttaaggccgaagtgtcctcctccatctacttccacaagcccagggagtcrcccccactcctgcccctgggcaccccttgctgagcccatgggggaacaggagcaggcacagagcaggcaggggaggggggccatgccgatccatggcggtctgctgattctttcacatggtctcactttggcctctctctcatcctgctgtttagagatggacttggcttattttgtcaacgactgggcttttcaaagctccatctacaaacaatgctgttcttaccctcagagggacctgccagccttgtccttcccacttgtagatggagatctgtctagccrttagagttgcccagcatctccatctggccaccctcgagcccgggcawggccttttgcctgttctccctttggtcttaggatctgactattggctgagcccctccatcatcatgatggatcctgtgttgatgagctccaactattgttggaccmctawrawrwmrawrawmawwtctctacttctacctagctccctatcctggaccaggcacttctaggggggctcacctaaccaagcccaggattccattttttttttttttggttctttttttcggagctggggaccgaacccagggccttgcgcttcctaggtaagcgctctaccactgagctaaatccccagccccccattttttttttggttctttttttcggagctggggaccgaacccagggccttgcgcttcctaggtaagcgctctaccactgagctaaatccccagccccaggattccattttctaaagtgggtctgtcttagccctgaatgtcccttcccttttcccagaggagtctctcacttctgtcttccgttcttagaggtactgcggttgcattgcctgacccctgcctcccgttaggtgctttcctgtagaaggccattctggaaaaacaataaagtaggtacaacaaaaaaattaa

SEQ ID NO: 4698 - DNA, 600 bp, Rattus norvegicus
cttcmaaatcaagtacacaattcacacaggcttcccctttaaagaacaaacaacacattgcatttattaataagtatgtatatgtctgacagcatgtttgtgatcgagaagactgctaaactgacttagatgaatttttatccrcgatggaggaaarctataaattagaatgwttttywtkttttktttagaaagcaagcatgtgatgtgtgtatgcagtatgcctttctttaaagataamaggayactattytaaatcttctagggaatagaagagtbtrgwwwmrwrmrraaawmarwattcatttaggctatggaagaaacctaccagttaccttttaagtaatgagacacacatgaaaggcaaaggaatgtgagcttgtcacccaaagagtgtgtactctgcaagctttggagatgaagtgctgtagcgttgtccctgcacagtgaggatatccaagttcgttcttggtgccagagcgtcggtgggatttgttttaaagcctgtggttttccaagttataaaataatacttactatagaaaacttgaaaattgcagaactctgtgaaaaaaggaaaaaaaaaaaammmwmgtgccg

SEQ ID NO: 4699 - DNA, 600 bp, Rattus norvegicus
gatctgtgagtcttctctgttcaggatgctacagatctgagttctccatccatgggaaccatcttggacagagctgagcgccctaaatgtttgacatctttctgaaaaagggcagaaggtccagcaccttcttccaaggtcagtaggggtagagatttcgtagtcaattatcacagggttctcagctggacagccaaggtcccttcctcccctctccgaggagaaaaagaggaggtagctgaagaaaagattgattctctgctcctccctttctctgcctgtttccctcacacccacctctcccccacagcagccttctcccccacagagaccgggataggacagagcggggcggagttggggattgaaggcttggaagccccacagtgccctgtatttgtaggaagccttggctgaggtagctgtgctggtttttgctggtttatgctgtccagctggcatccttttgcaggatgctggggacactggggctttggacactgcttcctgcggcagcacaaggtaagagtctacagagcggggcggggtctttacaccactcagtaagggaaaaggtgtacttgaagcagcagccaccca

SEQ ID NO: 4700 - DNA, 600 bp, Rattus norvegicus
cccctaactggggaagggaccgcagggggagggggtggaggccggcgtcacatccggatccggtcactaaaaattgagctacactcacgctccggccactggcagagcatcgacttcaagcaagtgctacacagctggtttcgccagccacaaagcaactggggaatcgagatcaacgcctttgatcccagtggcacagacctggctgtcacctccctggggccaggagctgagggctgccaccccttcatggagcttcgagttctagagaacacaaagaggtcccggcggaacctaggcctagactgcgatgaacactcgagtgagtcccgctgctgccgataccctctcacagtggacttcgaggcctctggctgggactggatcatcgcacctaagcgctacaaggccaattactgctccggccagtgtgaatacatgttcatgcaaaagtatccacacacccacttggtgcaacaggccaacccacgaggctctgctgggccctgctgcacccctaccaagatgtccccaatcaacatgctctacttcaatgacaagcagcagattatctacggcaagatccctggcatggtcgtc

SEQ ID NO: 4701 - DNA, 1400 bp, Rattus norvegicus
tgtggtgatcacacagactttcaaggaccaaggattggaagtcttaaaacaagagacagcagttgtcgacaatgtccccattctggggctatatcagattccagctgaaggtggaggccggattgtgctgtatggagactccaactgcttggatgacagtcacagacagaaggactgcttttggcttctggatgcactccttcagtacacatcctatggtgtgacccctcccagcctcagccattcagggaaccggcagcgcccacccagcggggctggcttggcccctcctgaaagsaygrrrggaaaccaccttcatcgctactccaaagttcttgaggcccacttgggagacccgaaacctcggccccttccagcctgtccacacttgtcgtgggccaagccacagcctttgaatgagacggcrcccagtaatctttggaaacaccagaagctgctctccattgacctggacaaagtagtgttacccaactttcgctcaaatcgccctcaagtgagacctttgtcccctggagaaagtggtgcctgggacattcctggagggatcatgcctggccgctacaaccaggaagtaggccagaccatccctgtttttgccttccttggagccatggtggccctggccttcttcgtggyacagatcagtaaggccaasagccggccgaagcggaggaggcccakggcaaagcgtccacaacttgcacagcaggcccaccctgcaaggaccccgtcagtgtgatcatcacagtggccagacacagaagctgacaagctttgaacccctctggtggccacacagcatcagagagcatcctgggaagtgcctgtttccaaggagccctatctctggattgtggctggcttagtgtgttctgcccagacgtctatgagkwacatcctgcagtgcctcactgtgtttggctstggccgaaggtgcccagtagytcascctccggtggcatcakgcccagtgacagtkcaccaaagacacagagcctggaagggctgtcgggacatactttctacmtartgctacaaccctgaccaagcgaagacatgcwgrwtwcmggcwmkwkkcyatmktkmykgtgggagtcactttaaagacttgtgctgtctggaagcagagctgttytcttgtcagtcaagtgcagcgacatcctgaggaatcagattccgtgacctcctctttgaygagaggacacatgaactgaagggaacgtgcacagatgtgggagatgcaggtcttcgctttattttttataactatcaactgccrcmatgttttktwwtttggggtctggatttcacygwtgkwggtgaaggaaattttcaataaatatgcataacctthmaaarmwaaaaaaaaaaaaaaaaaa

SEQ ID NO: 4702 - DNA, 600 bp, Rattus norvegicus
gactgcggcatacatgtttacatgtgtgtgcacaccacacacacacacacacacacacacacacacacacacaccacacacaccacacacacacacacacaccacacacacacacacacacacacacacacacacacacacacacatatggggtaggggtggtgggagtggggggtggtgggagggttggaatcatgtcctcctgggtctctctgctctctgtgtagccctggctgtcctggaactcgatttgtagaacaggctggcctcgaactcacagagatctgcctgcctctgcctcccaagcactgggattaaaggtgtgcaccactgcccggctgcagtgaaataactttctggatgggggtcaccacaacacgagaaactgtattaaagggttgcagcatgaggaaggtggagaagcactgctctaggggctcatagatccaggagatgtatgaaacttacacacactcacactggtgtgagccgtggtgctatcaagttagacctgagagagcccactgcagggtggcagcagccaggctgcctggtgctcactgttgtctgttttacagcggctttagctctgcagaaatg

SEQ ID NO: 4703 - DNA, 1400 bp, Rattus norvegicus
atggtcatgagcttcgtcaacctagtggagcacgacaaggaattcttccaccctcgataccaccatcgagagttccggtttgatctttccaagatccccgagggagaggcggtgaccgcagccgagttcaggatctataaggactacatccgggagcggtttgacaacgagaccttccagatcacagtctatcaggtgctccaggagcactcaggcagggagtccgacctcttcttgctggacagccgtaccatctgggcttctgaggagggctggttggtatttgacatcacagccaccagcaaccactgggtggtcaaccctcggcacaacctgggtttacagctctccgtggagaccctggatgggcagagcatcaaccccaagctggcaggcctgattggacggcatggaccccagaacaagcaacccttcatggtggcyttcttcaaggccacggaggttcatctccgtagcatccggtccacggggggcaaacaacgcagccagaaccgctccaagactccaaagaaccaagaggcactgaggatggccagtgtggcagaaaacagcagcagtgaccagaggcaggcctgcaagaaacacgagcygtatgttagcttccgagaccttggctggcaggactggatcatcgcacctgaaggctatgctgcctactactgtgagggasagwgkgccttccctctgaactcctacatgaacgccaccaaccatgctatcgtccagacactggttcacttcatcaacccagacaccgtacccaagccctgctgtgcccccacccagctcaacgcgatatctgtcctctacttcgacgacagctcyaacgwmwtcctgmagaagtacagaaacatggtggtccgggcctgtggctgccactaggtcttcctgagaccctgaccttttgggaccgcattttttccagatccccaatgtctcwccacctaggtctctcactgcccaccttggcgaggagccaacagaccaagcacctctcytgagccttcccmtcacctccccagctggaagcgtgcaaggcattagaaacctgagcacaccgtggttgataagcagcayactttcattccggcacatkccgcttgagatcstacacactgcctctggaaacgactagcaggaaaaatgtcttccaagaaagaatccgttggccatgttggtccctggcgctcggaacctttgaggggtaattacaagcacctccttcggctgcagcaggaggaagggcataaccagggtgggcgcttacgtctgtgctgaaggaaaaccaagcagaagtccctgtaataaaatgtcacaataaaammaaammmwmctgawramwraaaawrrwwaggatgttacagaaaaaaaaaaaaaaa

SEQ ID NO: 4704 - DNA, 600 bp, Rattus norvegicus
tgcacatttgtggagtgcctctacttcatcagcatgtacgggagtgtcttcaccatctgcttcatcagcctggacaggctcctcgccatccagtaccctcttctggtcaatcacttccggtcccccaggaaaacctttgggatctgctgcatcatctggatgctggtatgggttggaagcatccccatctacactttccacaggggagtggagggatacaagtgcttccacaacatgtctgacagcacgtggagtgcgagagtcttcttccccctggagatctttggcttcctccttcctatgggcatcatgggcttttgttcctataggagcattcacattctactgagcattcagggggacgaccagtgggtccgaaagagagcctgcatcatctggaccattgctaccaatcttgtcgtcttcgtggtctcctttctcccagtgcacctgggtttgttcctgcagttcctggtaaggaacggctttatcttgaattgcagagtgaagcagggcatcagcttgttcctgcagttgtctctgtgtttctctaacatcaactgctgcctcgatgttttctgctattactttgccatcaaa

SEQ ID NO: 4705 - DNA, 1400 bp, Rattus norvegicus
ccagtagcgaggaagaggaccacagtcgggttttaagcaaaggcatgcgtgtcaaagaagagactcacatcaccacaaccacgaggatggtgtatcactccccgcctggcagtgagtgtgcctccgagaggattgaggagaccatgtcagtccatgacattatgaaggcttttcagtccgggcgagacccttccaaagagctggcggggctgtttgaacacaagtcggccatgtctccggatgttgccaagtctgctgctgagacctcggcccagcacgcagagaaggacaaccaaatgaaacccaaactggagcgtattatagaggtccacatcgaaaaaggtccacagagtccttgtgagcggacggatatcaggatggcaatagtagccgatcacctgggacttagttggacagagctggcaagggaactgaatttttcagtggatgaaatcaaccaaatacgagtggaaaatcccaattctttaatttctcagagcttcatgttattaaaaaagtgggtgacgagagacgggaagaatgccacaactgatgccttaacttcggtcttaacaaaaattaaccgaatagacatagtaactctgctggaaggaccaatatttgattatgggaatatttcaggcaccagaagctttgcagatgaaaacaatgttttccatgacccagttgatggttggcagaacgagacgccaagtggaagcctagagtccccggcgcaagcgcgaagaataaccggtgggttactggaccgtctggacgacagctctgaccaggttcgggatcccattacctcatacctcacaggagaagctgggaagttcgaagcaaacggaaaccacgcagaagtcattccagaagcaaaggccaaggcctactttcctgaatcccaaaacgatatagggaaacagagcatcaaggagaacttgaaaccaaaaacacacggatgtggtcgcgctgaggaaccagtgtcgcccctcacagcctaccagaaatctctagaagaaaccagcaagcttgtcatagaagacgcacctaaaccctgtgtgcctgtcggcatgaaaaagatgaccaggactccggctgacggcaaagccaggctcaacctccaggaagaggaggggtccgccaggtcagagcctaagcagggagaaggctataaggtgaaamcaaagaaggaaatccggaatgtggagaagaaagcccactagtgacggtgacgtcagtccaggtgggaagcacacttatgtccgcagctagatttaaaagtctcgagaagtttctgagttcgtctttcctttctctttctttactgcaatctcactgggagatgaaattaaataaatcctgtcatttctttatacgaaaaaaaaaaaaaaaaa

SEQ ID NO: 4706 - DNA, 600 bp, Rattus norvegicus
ttagttggatgaggtacactgtaatgattttaatgctaattaatgaatatttcatacttgtgcagtgaaaaaataatttaatattgtattatgaaatgtttttcttccwgttgctgcagtgtgtggtattgcataatatgaatacctgtaaaaaatataaattgcttaaaaataaaaatattaccagttggtaccagatctttttagatagctaaataatttgctaagtatgcttgatagcaaatrtctttctaacaaaraaaaatctatgcttctttctcacaaatgaaatytygtksygaatwmaaatcacattgatytgccttagaattgcctctgtgctctaaccattwtcatgtgtttttaagtatatctaaagattggtagttcttggtatagagaaataagtcatatttattttattggcatttaatattaatgaaattytcttgggtcatgttccctgkttaaatctgagtaaaactttatgatctgaagaattttggggggacagggggttcctcattaatgagtgtggtgactgtgtattaattttcaaataaaatcccttagtttggctttgaaaaaaaaaaaaaaaaa

SEQ ID NO: 4707 - DNA, 898 bp, Rattus norvegicus; identical to SEQ ID NO: 611

SEQ ID NO: 4708 - DNA, 1400 bp, Rattus norvegicus
ctctgtgctggttgccgctgcacatcatcaactgtttcaccttcttctgctccacgtgccggcacgcccctccgtggctcatgtacctgrccatcatcctctcccacagcaactccgtcgtcaaccccttcatctacgcctacaggatccgggagttccgccagaccttccggaagatcatccgaacccacgtcctgaggcggcaggaacccttccaggcagggggttccagtgcctgggccctggcagctcacagcactgagggagagcaggttagcctccgccttaatggccaccccctgggggtatgggccaacggcagtgccacccattccggacggcggcccaatggctacactctggggctggggggtggagggagtgcccaaggctctcctcgggatgtggagcttcctacccaggagcgccaggaaggccaagagcaccctggcctaaggggtcatctggtccaggctagagtaggagcttcctcatggtcttcagagtttgccccttcctgagggaaagacattttaatatttttggttggctggaccaatctcactaagggaagagaaacccaatgggcgcgtggctcccactttgaactacaaagagggggcatgaagttggagcagcatgaarcccagtaagaaargcctggggtggaggaagcgatgcttctgcttmgtgctacggggccctgtgttaggtcakggctgcagtagcatctgcaaargcagggcccagktcccctgctccagaagcgtscaaaaagctgtcttgtctctctakmrcgrdkgtggcttagaggactggcctggccygatgctagaatataggagcttcasacctcctgytgtagtacactactctccccagactgtctagggctcagggagctgctggcctaraagtggcacttggctatttctttttcaagaagwtaaaaatgtgaggaaacccwttctattttattgacttcccccytcccctgcmtgmtgggtctgtggtcratcctgmykggaacccccccaaccaaggaattgaaggtggtcttcttgggctagcccaagmtaccatgcacttagtcacagggmtatctctgaccaacaaagctggcctggaagacagcaactatgaagggaaggattccagagcatgggctcaggtcccatgagagagattagagatgtcaagccatggacckgmmcmkgggtagttcagcgmtaccctgtytgaggccctgamtactkcctttccttccagagggacwtgkttgtttgtwtgtttgtgktttttttkttccctgaggtaaamtaaaatgagccmcactgtgttttwaawwwraaaaaaaaaaamdramabtcgasrdsgrrbyckagyacccaattcgcccg

SEQ ID NO: 4709 - DNA, 600 bp, Rattus norvegicus
ctaaagtgtgaacccaaagaaggttccctcccactgcagtatgaatggcagaaattgtcagattcccagaaaatgcctactccatggctagcagaaatgacttcaccggttatatctgtgaaaaatgccagttctgagtattctgggacctacagttgcacagtccaaaacagagtgggctctgatcagtgtatgctacgactagatgttgtccctccctccaacagagctggaacgatcgcgggagctgtcatagggacgctgcttgcccttgtgctcatcggggccatcctcttctgctgtcataaaaaacgcagagaagagaagtacgagaaggaagtgcatcacgacatcagggaagatgtgcctcctccgaagagtcggacatccaccgccaggagctacatcggcagcaaccattcctccctggggtccatgtccccttccaacatggaagggtattccaagacccagtataaccaagtccccagtgaagactttgaacgtgctcctcagagtccgactctggcacccgctaagktcarstrcscytamyctaagtcgaatgggagcggttcctgtgatgatcccagcacagag

SEQ ID NO: 4710 - DNA, 1400 bp, Rattus norvegicus
gggctgttctcctgtgtcatcaatggggaggagcatgagcaaacccatcgggctatattcaggtttgtgcctcggcatgaagatgaacttgagctggaagtggacgaccctctgctggtggagctgcaggcagaagactattggtatgaggcctataacatgcgcactggagcccgtggtgtctttcctgcctactatgccattgaggtcaccaaggagcctgagcacatggcagcccttgccaaaaacagcgactggattgaccagttccgggtgaagttcctgggctctgtccaggttccttatcacaagggcaatgatgtcctctgtgctgctatgcaaaagatcgccaccacccgccggctcaccgtgcactttaacccgccctccagctgtgtccttgaaatcagcgttaggggtgtcaagataggtgtcaaagctgatgaagctcaggaggccaagggaaataaatgtagccactttttccagctaaaaaacatctctttctgtgggtaccatccaaagaacaacaagtactttgggtttatcactaagcaccctgctgaccaccggtttgcctgccatgtctttgtgtctgaagattccaccaaagccctggcagagtctgtggggcgtgcatttcagcagttctacaagcaatttgtggaatatacctgtccyacagaagatatctacttggagtagcagcaacccccctctctgcagcccctcagccccaggccagtactaggacagctgactgctgacaggatgttgtactgccacgagagaatgggggagtgagggctgttggggtcggggggcaggggtttggsgagrggcagatgcagtttattgtaatatatggggttagattaatcyayggrggacagtacaggctctctcggggctggggaasggcarggctggggtgggggtcaggcatctggccacaaagggatcccctakggacmgaggcgmtgcaccatcytgggccttgtttcatactagaggccctggctttytggctcttgggtcctsccttgacaaagcccatgccmcctggaagtgtcaccttcccttgtccacctcacccagagccctgagvtcatgytgagcccaagcmcctccgaaggamtttccmgtaaggaaatggcaacatgtgacagtgaggmccctgttytcatytgtggggcctccggcagytccgacctccagcytggccagcacgctgmccctggcaagsttgtgtgttcaaagaaggrgrgggccacagcaagccctgcctgccagggaaggttccctytcagctggccccagccaactggtcactgtyttgtcacctggstwstactattaaagtgccatttcttgtywvrawwwaaaaaaaaaaaaaaaaa

SEQ ID NO: 4711 - DNA, 1400 bp, Rattus norvegicus
aggtctcactaagacaagcctgaggacgacctggttctctcagtacttgagtttcccacttcgtcagtgactgtgagagtggctttattctctaacgcagagtcagatgtataaagacccattttcatatttagaacttagcagttgctttgatgccgttcagtttactatattgtcctggctaaatgtagttctggttttcagagagctgtagatagaggacaagatatattaacttcttaagtcaacattttgtttgtgatttttaaagtgcagtctccattttatacttaaaaaaaagcaatttatatattttgttacaagtcccagttagcacttcctgtgcatgcaggtgtcctttgttgttgcaaccatatctatattgcaccttttattcagctgctttccaaaaatgataccactcaagaattgaatcttgaaattatcaggcaggctgcttcaacaagggcattctgaacacttggcttttgatttctttatacaaacgtatgatgctccttttttctctaccttggtatctgaaaaactaattttgtatttccatataactttgtaaatgccttttttttattttaaagattagatcctataaaaggtaggtttattggaaattgaggccattgggaagggtggggggggagaaagggcytgaacataggaaggaagaggagaagagaaaatgcctttcgtattttatcaggaaagtaaaaatttccccaaaaaccaaaaggattttgcaykargacagcagtattgcagacatgtaatgagtggatgaggggaatgagcagttcgttcactctaatcatctgtgtataaggcagttatttcagtgggctrgacccgttcaccctgactggtaaatgcactcccaaggtgggaagtgtcctttgagctccggtacaattgtgagggaaacaaacgccttctttaacagatgcacctgagaggacaggaagttstgttggcacactgattgcttttaatccagaagtgaacccwkammaaskyrcagwctcgwcywcgkatkwktcmttwsaratgcccatttggggatggaatctgctttgacagctagcaaagtgacacgctgttcttgatgacagcaattcaggggagacttgattaaaacaaggtgaaactaccaaggccagtgtattgcagaaccgagaggcagcttgtctcgagtgactagcgagaggagcgagcgttttgtcttggaggttaaagcccactgtaactggctgttaggaacagggtgggtagttgtgaaaagcactttttaaaatggaataaatgttgaatgcttacatggtcttaaccactgtaaacaccaaataaacacttatttttacattaaaaaaaaaaaaaaaaaaaaa

SEQ ID NO: 4712 - DNA, 600 bp, Rattus norvegicus
atatccagtctcgccctggatgcccccttctgacctgccacaccctacatggtcccctgtgtagcttgctagcctttgtggggaggggctgtcacttaccaccgcaacattcctctcttgggccaatgaacgctaattcctggtcctccatgcacgcacaccaactccaaaagtgccttagtcaagagcatttctcctttcaggcacacagaaactgaaaacggtcgagagagtgggatatcggatttgtgcctgtctccggcattccgtcctaacaatatttaaatatcaggctggtagggttcggtggtcagcgaggggattagcagggtgatgcctgtgtgtggccatatgggcacaaatgcagaacacattgtggggacgatcacttcccccttaaatatggtctatccttccagagttggaacttaagttatatgtggtaggctatattgactccaaattcatcagcctctctgatgggcctgtataaaaacctggagaggcccaggccatctgatgatgtcacctgtcctgcccmgagratgcmsmsactgkgagaagggcgctgactttaaaaagggtttcaggtgaacttct

SEQ ID NO: 4713 - DNA, 600 bp, Rattus norvegicus
cagcttgcagcagacaggctgccytgcgctgtgcagccagagctgtgtgtcaaagccagcatcaggacagactcttctggacacgtgtacaatagaatcttttgtgtttcttcaagtttttacttggtgacttttgkmwykargyyytaagactttattttctcactatggatgtaccttataaatgcatttgaaagctaaatatattttaaatattgkatgggaggtgtaargctgttgtatttgsrscaygtaggcctcagattagcaggactctgagttttgactaargatgmcattcattgttagctgattcgaaatgatataaatatatatamaatatraatatatatwtaaatttatgccagtcctggctggaatgttttatthmcaatagttwtatatctgtgtggtgtttaatgctggcacagcatatggaacggaaactgcccagcaatgcagtttgtgacacgamccgtattgtagagttacgtttygggctscmaacccgtgaacagaggaamcagcattctctygattgtaagttatttttttaataaagatttttktttcctwwaamwraaaaaaaaaaaaaaaaaa

SEQ ID NO: 4714 - DNA, 600 bp, Rattus norvegicus
cagtaagaactggtcagaagatgatctgcaattattaattaaggctgtcaatctcttccccgctgggacaaactccagatgggaagtcattgctaattatatgaacatacattcttcttctggtgtcaaaagaactsccaaagatgttmttggtaaagctaaaagcctccaaaaacttgaccctcaccaaaaagatgacattaacaaaaaggcatttgwtaagtttaaaaaagaacatggcgtggcccctcaggctgacagtgcggcaccctcagagcgatttgaaggtccctgcatagatyccatcccwtggacaacagaagrgcagaaacttytagaacaggctttgaaracatacccggtaawtactccggaaagatgggaaaagatcgcggaagccgttcytggcaggacgaagaaggactgcatgaggcgatacaaggagctcgtggagatggtgaaagccaagaaagctgctcaggagcaggtgctgaatgccagcagagccaggaagtgacgygggcaggcggtctcggtctgtgtgcacttttwtartaaaactcaaaatactgtamamammmmaaaaaaaaaaaaaaaaaa

SEQ ID NO: 4715 - DNA, 600 bp, Rattus norvegicus
tcttccgggaacatttccttatactgttgcagcattttcgaccttcccagagcaaacatcggcaagtttgacaggatttgggatagaggagcattggtggctgtcaatccaggcgatcgtgaccgytatgcagatataatactgtccctgytgagaaaagggtatcaytacctcstggttgtcctttcttatgatccaacaaaacacacaggcccgccattwtatgttccagatgctgaacttaaaaagttatttggtacaaaatgcaacatgcaatgccttgaggaggtggatgctcttgaagaaaggcataaaacbtggggagtcgactactttttsgaaaaattgtatctccttacwgrgaagtrgcaaaaacaaaarcaaaaccaggccagtaccggagcacacsttttatcccagcaggytagcbtggtmwacagagtgagttccaagacagccaggatacacagdgaaacsttgthtrgaaaaaccaaatrgaaaaccarccaaccaayttaaccaaaaaacacccagtcaatccctgtaagagtttytgaacgattaaaaattctgttgaaggttaaaaraaaaaaaaaaaaa

SEQ ID NO: 4716 - DNA, 600 bp, Rattus norvegicus
gtgccatgtccaacctctatgccatgcacaggcgccagaggcaccatccccgccgctgctccagggaccgcgcccagtcaggctcagactacaggcatgggtccccgaatcctttggaggagctggaccactttgttctgctggctctcacgacagtgctcttcaccatgtgttccctgcctttaatttatcgtgcttactatggagcctttaaacttgtggacagagctgacggagactcggaagacctccaagccttgcgttttctgtctgtgatttccatcgtggacccctggatcttcatcattttcaggacttcagtattccggatgttatttcacaagrctttcacaagacctctgatctacagaaactggtgcagccattcctggcagactaacatggaatccactttgtgagggctttgcatgttctggcaagctgaaaatacagcacacattcggacaaagaactgtggttggaaaagccttacaattgaaatccttaaaaaatacctcccacggggagctaaagagatgcatcggccctgaaagagcatttacttttcttccagaagaccggagttcatttcccagcacc

SEQ ID NO: 4717 - DNA, 1144 bp, Rattus norvegicus; identical to SEQ ID NO: 621

SEQ ID NO: 4718 - DNA, 600 bp, Rattus norvegicus
ccaaatcaaataagcgtagccacattactgttcgagggagaccgtgagaaggttcttcagcatgaaaaacaagtgtatgacatcgcagcaaaatttggtggtctggctgctggagaagataacgggcagaggggttatttgctgacttatgtcattgcatacatgcgtgatttgggtttggaatactatgtagtaggagaatcttttgagacttctgctccttgggacagggttatagatctgtgtagaaatgtaaaagaaaggataagaagggaatgcaaagaaaggggagttcagtttgcgcctctttctacgtgcagggtgacgcagacttacgatgcaggtgcatgtatctacttctattttgcctttaactacaggggaattagtgacccactgactgtgtttgaacagactgaggcagctgctagagatgaaatccttgccaatggagggagcctgtcacatcaccatggagtgggcaagttacgaaagcagtggctaaaggagagcatctctgatgtcggctttgggatgctgaagtctgtcaaagactatgtggaccccagtaacatctttggaaacagaaaccttttataa

SEQ ID NO: 4719 - DNA, 600 bp, Rattus norvegicus
gatgttcacaaccggattgtgatccgaggactcaataccattccactgtttgtgcagttgctttattctcccattgaaaatatccaaagagtagctgcaggggtcctctgtgaacttgctcaggacaaggaggctgcagaggccattgaggctgagggagccacagctcccctgacagagttgctccactccaggaatgaaggcgtggcaacatatgcggcygctgttctattccgaatgtctgaggacaagccacaggactacaagaaacggctttcggttgagctgaccagttccctcttcaggacagagccaatggcttggaatgagactgctgatctcggactggacattggtgcccagggagaagcccttggatatcgccaggacgatcccagctaccgttcttttcactctggtggatacggccaggacgccttggggatggaccctatgatggagcatgagatgggtggccaccaccctggtgctgactatccagttgatgggctgcctgacctgggacacgcccaggacctcatggacgggctgcctccaggtgatagcaatcagctggcctggtttgataccgacctgtaa

SEQ ID NO: 4720 - DNA, 600 bp, Rattus norvegicus
acaagaaggaggtggaaaggaagaagctagaacaggagcaagaaggggagaaggacgcagccacagaggagcctggttcacctgtaaagtccacacctgcgtctcctgtgcagagcccaacgagggcagggaccaagagtccagcggtctctccttccaaggcttcagaggatgccaagaagacagaagtcagcgaagccaacacagagcctgagccagagaaaccagagggggtggtggtgaatgggaaggaggaggagccgtgtgtggaagaggtcctcagcaaaggaccgggccagatgactaccaatgctgacactgatggcgacagttacaaggacaaaaccgagtcagttaccagtggccccttgtccccagagggctcgccctctaagtcaccctccaaaaagaaaaagaaattccgaaccccctccttcctgaagaagagcaagaagaaggagaaggtggaatcctgattagtggctcagtgggtcctgatgcatccctgccctccttccttaccttctcccaactctgagccctgaacgccagggccaaggagggcaagaggagatcctgggtacacactcagaaccggtt

SEQ ID NO: 4721 - DNA, 600 bp, Rattus norvegicus
cagtctcaagtatgataggatatacagtaacaagaattccctgtgctacgtgttcctgatatggacactgacactcatagccatcatgcccaacctgcaaaccggaactctccagtacgacccccggatctactcctgtaccttcacccagtccgtcagctcggcgtacacgattgccctggtggttttccatttcgtagtcccaatgattattgtcactttctgctacttaaggatatggatcctggttcttcaggtcagacggagggtaaaaccggacagcaaacccaaactgaagccgcaggacttcaggaactttgtcaccatgtttgtagtttttgtactttttgccctgtgctgggccccactcaacttcataggtcttattgtggcctcagatccggccaccatggcccccaggatcccggagtggctcttcgtggctagttactacctggcgtatttcaacagctgcctcaacgcaatcatatacggactactgaaccaaaatttcagaaaggagtacaagaggattatcatctcactgtgcacagctaagatgttctttgtggacagttcaaatgatgcagcagataagat

SEQ ID NO: 4722 - DNA, 600 bp, Rattus norvegicus
gcagtgcaaggcccaggctggaggaggtgccaggcggccaggggcggcccgaggccggcaggcccgcctcggaggcggccgatggaaaggaggcgctgcgcggccggcgcgagggccccggggccgcgggcgcgcgggaggccgaggccaaggtgggcgtgcgctcgggggcccgacccgcagcacggcccacggggggcggcctggcgcgcaaagcggcggtggcaccggggccctggaaggtgccgggctccgacaagctgccgggcgccctgcagcctggcgcctcggccgcgggcagatgagccccgaggcggggcccccgcccgcctccccgcaggccgatcttcctgggttccgtctgacggcgttttaatttatttccactgtcacacgcatagatctacacgaggcgccgaggcccgggagcaccggcgtgcgacgcgcgtgggcggcacggcagggtgtgcgcgcaggcagacctaaactgatcctaaagcccccggttccatggtgggagctttggcagctatggaagaaccaaaatcacgcaaacatcacagagagactcgtgccgaattcctgcagcccgggggatcc

SEQ ID NO: 4723 - DNA, 747 bp, Rattus norvegicus; identical to SEQ ID NO: 627

SEQ ID NO: 4724 - DNA, 307 bp, Rattus norvegicus; identical to SEQ ID NO: 628

SEQ ID NO: 4725 - DNA, 600 bp, Rattus norvegicus
gaaatgcaacaaggccatcacatctggaggaatcacttaccaggatcagccctggcatgccgagtgctttgtgtgtgttacctgctctaagaagctggcggkgcagcgtttcaccgctgtggaggaccagtattactgcgtggattgctacaagaactttgtggccaagaagtgtgctggatgcaagaaccccatcactgggtttggtaaaggctccagtgtggtggcctatgaaggacaatcctggcacgactactgcttccactgcaaaaaatgctccgtgamtstgkcyracwagygmtytgwctktsatmatgagcwggtstattgwyctgactgtgccaaaaagctgtaacttgacaggggctcctgtcctgtaaaatggcatttgaagcawamwwwrwrwmhwwwrmtcactctctctgcaccatccatagggcaagagtgggctttcacctctttcaaattgctctttctgtctttgctctcattttacagtattaatcaaccgaggacacacagtgatcatattagaatttagaaaagagcaacctcgcaggaaaaataatttctctgttgctgcaatggcaaaaaaaaaaa

SEQ ID NO: 4726 - DNA, 600 bp, Rattus norvegicus
  misc_feature (309)..(309): n is a, c, g, or t
tggttaatccatcaagagagctgggccatcccactccagggcatcgtaagkkmwtctagtcatgaataggacaggatattctctatgcacttgcaggtattcacaaccttcatgcagtgtctgtagagctatggtggctgggatacccaagctggttcacagtgtgctatgccataggcaccatactcactgtttccttagtacagggagcagaagctcttggttaccactacacatggaatagcaaacatatgaaagtaagacactttcatgtcctatgtcgagaacgcggtctacacgtctgacctnttatacggcgtggcgggaacttcgatgtaggaccgtcccgagggagtgcaacactgacgcccaacggatccgcgtcccgctcttttctccacacggaaagaaaagcctcgatttgttacaacacacagagcaacacacgacacacgaccacccacaacgcaacaagaagaacacaaccgatcacgacaacgaacacaacgcgcacagcacacaaccgaggaaacaacaaagaacaagcacgcagcggactgacgataagcaagtacagacagacacacgacacacaaacgt

SEQ ID NO: 4727 - DNA, 522 bp, Rattus norvegicus; identical to SEQ ID NO: 631

SEQ ID NO: 4728 - DNA, 525 bp, Rattus norvegicus; identical to SEQ ID NO: 632

SEQ ID NO: 4729 - DNA, 600 bp, Rattus norvegicus
cgggaccgcatgtggcttaagatcaccattgccaatgctgtcattggtgagtccctggctgtgtgggaaggacccagtctgttcttcattctggtgtagcttcccagggctcagctaccctgactttcatgggcctatggccaggggcggatgtggtggactggctgtacacacacgtggagggcttcaaggagcgaagggaggcgaggaagtatgccagcagcatgctgaagcatggtttcctgcggcacacggtgaacaagatcactttctctgagcagtgctactatgtctttggtgacctgtgcagcagtgagtaagggttatcgggtagggattattgtggggctcatccatttgccctcacttacccttccactcccttcccgccagacctcgcatccctgaacctcaacagtggctccagtggagcctcagatcaggacacactggccccactgccccacccatctgtaccctggcccttgggtcaaggctatccctaccagtacccaggacccccgccctgcttcccacctgcttaccaggaccctggcttcagctatggcagtggcagtgctgggagtcagcagagtgaag

SEQ ID NO: 4730 - DNA, 600 bp, Rattus norvegicus
aattcccccaaatcctgcttcaaagagcctgctcccagagggcaggagaggaagctgagtcaaagacactaacagggggtgggaatgagaggatagaacctacagtgtggggaggggctccaggctgccctctggtcagggagaggggtatctcagaagcccaaggaagagtggtcttgggcttcargtcttccagtcctmtacaaggctgaccactcagggccttcagacctaggactagatggcccctccaccatgcgtaccctccttccttttcccacagattctgcagtttgcaaaaactcaaccacttccctgagtgctgtggtttcctgtgggtctggggtcctgcctgacttggcagtgggggactgtgggcagggcataaaggagtgggtagtgtaagcactttctttgggctgccccacacacacacacacacacacacacacacacacacacacacacacacccacaccctgagtcagcgtaagcctggagggaggggcggggacactgattcagttttcgtgcctctttaaaacctccgcaaattctgcttcacccagaagcttcggttctcaccatgaacccctggca

SEQ ID NO: 4731 - DNA, 386 bp, Rattus norvegicus; identical to SEQ ID NO: 635

SEQ ID NO: 4732 - DNA, 591 bp, Rattus norvegicus; identical to SEQ ID NO: 636

SEQ ID NO: 4733 - DNA, 600 bp, Rattus norvegicus
cgggatggagtcctcctcgtcctcttcgggctcggctttgsccgmsgtggaccctcagctgcagcatttcatcgaggtggagacacagaagcagcgcttccagcagctggtgcaccagatgacggaactttgctgggagaagtgcatggataagcctgggcctaagttggacagtcgggctgaggcctgttttgtgaactgcgttgaacgcttcattgatacaagccagttcatcttaaatcgacwsgrgsagacccagaagtccaamcctgtyttctcagaaagcctttctgactgatytcagcattmcctctttggaaaagtagttcaagaagggaagagctgctgctgagtcggttaaagaaatggctatggggggattaactcccaattctcttcatcatcttgggacawattgtcacctgagaatgaacaaagaccaatttttatgtatgggarwwrararwmamrwrwatttggttgtgttttttaagctaactgtgtggtaataatttagataaatggaagthtgrgamrmrwawwrmwrwrwawtgggacggcgctttctcaaggtcccttattaactactttatagaattt

SEQ ID NO: 4734 - DNA, 1400 bp, Rattus norvegicus
ggctatcacttcaatgtcatgacctgtgaaggatgtaagggatttttcagaagggccatgaaacgcaatgtccggctgaggtgccccttccgcaaggggacctgcgagatcacccggaagacccgacggcagtgccaggcctgccgtttgcgcaagtgcctggagagtggcatgaagaaagagatgatcatgtctgatgccgctgtggaacagaggcgggccttgatcaagaggaagaagagggaaaagattgaggctccaccgcctggagggcaggggctgacagaagaacagcaggcgctgatccaggagctgatggacgctcagatgcaaacctttgacacaactttctcccacttcaaggatttccggctacctgcggtgtttcacagtgactgcgagcttccggaggttctgcaggcctcactgttggaagaccctgccacatggagtcaaatcatgaaagacagtgttccaatgaagatctctgtgcagctgcgcggagaagacggcagcatctggaactaccaacctccctccaagagcgacgggaaagagatcatccccctcctgccgcacctggccgatgtgtcaacctacatgttcaagggcgtcatcaacttcgccaaagtcatatcccacttcagggagctgcctatcgaggaccagatctccctgctgaagggggccactttcgagatgtgcatcctgaggttcaacacgatgttcgacacggaaacaggaacctgggagtgcggtcggctggcttactgcttcgaagaccctaatggcggcttccagaagctcctgctggacccgttgatgaaattccactgcatgctgaagaagctacagctgcgtgaggaggagtacgtgctgatgcaggccatctccctcttctccccagatcgccctggcgtggttcaacgtagcgtggtagaccagctgcaggagcgatttgccctcaccctgaaggcctacatcgagtgtagtcggccctatcctgcacacaggttcctgttcctgaagatcatggctgtcctcaccgagctgcgcagtatcaatgcccagcagacccagcagctactgcgcatccaggacacgcacccctttgccacacctctcatgcaggagttattcagcagcacggacggctgagtggctgcccctgagtggagatctcacggagcagccagacccagatgttctgaattgccacttctagggctatcagatggacacactgataactaacaatgcctctgtctgcagctggctagcatttctcaggaaaaggacacaggagctcagcctgtggaaagtgctggcctagaaattagaccatctctgtggttgggaataaaccttcaaatcctgctaaaaaaaaaaaaaaaaaaaaa

SEQ ID NO: 4735 - DNA, 600 bp, Rattus norvegicus
cacaccaggcacagacacacacacacaccaggcacacacacagacacacagacacacacaccaggcacacatacacaccaggcacacacacacacacacacasrcacacacacacacacacacccaggcacacacacccagccctagccttcctttaaaggttatgctgtgtttcatttgctgcttwtgccttctaggagatgaaaaggctcctggraggtttctgattgccttcccacctcttcgtatgtgtacactctagctgggtggctaaaaaggcagtggctgtgccagctctgtccamtcagctatggtcagytgctccccttcctgcgctgagctgcagaagtcacacaactgtcacccttcactaacgctaagtgcatgccttctgttcacaagtccctggccgtttctgcacataccagacagtctgtgcctgtgttctatggttgtggagagtggatgaacaggtaaatctgtagaacaggttcccttggtattggtcaattatcctagtgtcttgtttatagctgtattatcctaacaatattctataattaaaggtataatttttaaactcaaaaaaaaaaaaaaaaa

SEQ ID NO: 4736 - DNA, 600 bp, Rattus norvegicus
mmattatttgattttggttattcctgtggtgatactcattggagattagtaacctataacaagtacacgaaaagataaataaagagctgtcaggattaaagtcaawwramaaawrwmaawmawrdtgaaagtaagcaatcattttgtggttgattactccaagtgagtaaaaattgtgcctttatgtactggtaagtatggttttttttttctttgcaagctaamtytgaaaatctatcatctcctgatggtaacatttctctttggggaaacaaatgccatggataaaccatttctacttatatcagtagaratgccattaagatgtacttaattttgttcttgattgrccatgtaaaatggcctttammagmmsskryykkmrktgtaaatataaataymwrcycrgrmyktmratgattgtaatggtttaaaaatgcacatgtatgcccattttctttcagatattactatctcactgacaaaatttgtttcagaacaacagtattttatgaagtaaacaagtraattatattctgaatatctgtataattacattaatctcaaaatcaaaawraaaacaaaaactcaattcctttc

SEQ ID NO: 4737 - DNA, 703 bp, Rattus norvegicus; identical to SEQ ID NO: 641

SEQ ID NO: 4738 - DNA, 600 bp, Rattus norvegicus
cgcagtgagtggaaggccctgccatccgagtgctccaagggcctgaagaaaccagtccgctacgtggtgatctcacacacagccggcagcttctgcagcagcccagactcctgtgaacagcaggcccgcawtkygcwgmttyacsrwmtkmarcmkckgggmtggtgsgatgyagcctasaacttcctcattggagaggatggtcatgtctacgaaggccgaggctggaccatcaagggtgaccacacagggcccatctggaaccccatgtctatcggcatcaccttcatgggtgactactcacaccgggtacctgcaaagcgggctctccgtgctgccctaaatcttctgaaatgtggggtgtctgagggcttcctgagatctaactatgaggtcaaaggacatcgagatgtgcaaagcactctgtctccaggtgaccagctctacgagatcatccaaagctgggaccactaccgagagtgagatcttgagaccttgtggagttcccaccctgaaatccctcctaccacctgctgcttcccagtgaccccaataaagacgcagccccaccatgctccagggaaaaaaaaaaaaaaaaaa

SEQ ID NO: 4739 - DNA, 600 bp, Rattus norvegicus
gggactcacagaataagttatatgctctctaactgagcccttttccttcagcttcaagaccaaaaagggcatggaagtctgtgctgaagcccatcagaagtgggtygaggagsccatagcatacttagacatgaaaacttcaactccaaagccctgaagacagatgcctgaacagaaaccaaccctgaagtcaagaagcaaaattcctcacccttgtcytttctgagaactgtgctgaaatgggtggactacggtcctaaggggtaggaacggtctgtaggaatgtgaaatagtygctcctaaggaatggtctttaagttattaatatttttatttaatttgccatgtactttggtgtgatttgaatgtaaagccctggagacctcatgtcactttaatgttgtgttacctgcagaattcttcccccgccccattgactttgttcctgtattatgtagggrcattgcaagaatcagtgyaaatattttatttaaaaatgtttaggacaaaatcataatgttatgatactgtgggatgtttaaatgtatgactactgaagtttcatataaaatgtatttttgcamaaaaaaaaaaaaaaaa

SEQ ID NO: 4740 - DNA, 600 bp, Rattus norvegicus
tccagcagtcccaactaagcagtacccaacattggatgtgatctggccagagaaagaagtgccactgaatggaacgctgaccttgtcctgcactgcctgcagccgcttccccaacttcagcatcctctactggctgggcaatggctccttcattgagcacctcccaggccggctgagggagggccacacaagccgggagcagaggaacgcaagcacctggctacacagggccttggtgctggaggaactgagcccctccctactaagtaccaacttctcctgtctgtttgtggatcccggacaggtggcccagtatcatgtcattctggccmagmwytsggmwsgakkgaagacwgmycyrtccccwtcycwagwraccytstssrgysaswgsmcaggacccagatcagcaggcccaggggccccatgaagccaaccacagcatgaccttgaccrgagcctkgctctcatctacctggagggtgaagtctacaccacaggctgtgattgcctctttccagcggctgaacctcaaactcaagcttcatttctacctagattacaatagttattaagtccttggaaaaaaaaaaaaaaaaa

SEQ ID NO: 4741 - DNA, 600 bp, Rattus norvegicus
gatataaagactcgataccccatgttggagaatccagagattttgaggaaaacggctgatgattttcttagtagaattgcattgacagatgcttatcttttgtacacaccytcacaaattgccctgactgccattttatcaagwgcctctagggctggaattactatggaaagctatttatcagagagtctaakkckkaaagaraacagaacttgcctgtcacagctactggatataatgaaaagcatgagaaatctagtaaaaaagtatgagccacccagatctgaagaagttgctattctgaaacagaagttggagcgatgtcattcttctgaccttgcacttaatatggttacaaagaagaggaaaggctacgaagacgatgactatgtatcaaagaaacccaaacaggaagaggaggagtggacggacgatgacctggtagatgctctctaaccagtgtaaatgactgcagcagtacttactgaccgacggaagtaggaagcatgtctgacattttacttttgtcaaaatagtgcaatgtgaaaacatcgaaaatatattaaacttttctaattcttmwawaaaaaaaaaaaaaaa

SEQ ID NO: 4742 - DNA, 600 bp, Rattus norvegicus
gggtttgathtacataaattccyktgwaatttmtwactgtggtgggagggaggctscctttgatacagagagaaggcattycaggaacaggtgagaggatgcchtaagcctgtgagccccacaaccacactgytgtcagatacctcagacytgytsccactgcacttgctcytggaggccaagaagtcaaccttcacaccactcttgagctcaccytggggtgaccacaggaggggcaaatgaagwggggcakttttgkaaacttggagcttytgtgtcactgatccctttgcattcaaataaaggttrwgktcctacgmaarawrwmwrarmmaamrrwwraaamtgtgcgttccattgccagatacattggtcacattcaagatgtctccaatccgatggcataggttatcacatcagtaagcgatccccaaacttcattttcttccagagcatttcattttgtgttatcctgataatcaccatatcggagccaccatgggggtgagcttgactcccttccctgacacacttttaactggacaccaacagtaaggacctaggcaaaggctaattgatagatagaagtgtatcacagcg

SEQ ID NO: 4743 - DNA, 600 bp, Rattus norvegicus
ggaaagcggcctgagtcagagcaaggccagctgtattgaagtgcagaagatgctgtttgaggaacaaaatcattttgctaaaatagagaccgagttgaaagaagagctggtcagagtggagcagcagcaccaggaaaaggtgttgtaccttctcagtcagctgcagcaatgccaagtgacagagaaacagctggaggagtcggttagtgagaaggaacagcagctgctgagcaccctgaaatgtcaggaggaagagcttaggaagatgcaagaagtgtgtgagcaaaatcagcagcttctgcaagaaaacagtgccatcaagcagaaattgaacctcctccaagtagtcagcaaagagaaaccccatcttgtgagaaatatcccccagtctccggactcttcctttgaatatattccacctaagcccaaacctttccgtattaaagaaaaatgcccagagaaaagcttcgccatcgaggacctgcagtattattcagagacttctgtggctgaggaggagaatgaggacagtgatgaccatgctgatgaggagtggatcccaacaaaattagtcaaggtgtccaagaagaacatccaagg

SEQ ID NO: 4744 - DNA, 600 bp, Rattus norvegicus
ttgcttgtggccctgaaaagttccgctatgctcaagatgacttctccttggatgagaatgaatgcagagtcatgaaagggaatccatctgccacagctggcccaaaagcttccccaacacctcaaaagacatctgctaaaagcccaggcccaatgcgccgcagcaagtctccagctgactcaggtaacgaccaagacgcaaatggaacttctarcagtcagctctcaacacctaagtcgaagcagtctcctatctctacacccacaagccctggaagtctgcggaagcacaaggacttgtacctgccactgtcattggatgactctgattcacttggcgattccatgtgaaagatgataggctaaatcaaagccgattattatagcagaatactttcgctcaagtgaccaacaaggctattggtgcttagaatttttgttgttattgttgcttttcaaaacactctgtagtatgtagggtttattttcttgtgacttctcttctgggccactaattcacatttaccaataagagatagattgataaccatcttttgagtgacttttccagaactgcaaaatgtgctactccatgacctta

SEQ ID NO: 4745 - DNA, 600 bp, Rattus norvegicus
atctttacactatgagggccgcgcggtggatatcaccacctcagaccgcgaccgaaataagtacggactactggcgcgcttagcagtggaggccggcttcgactgggtgtattacgagtccaaggcccacgttcattgctctgtcaagtctgagcactcggctgctgccaagacaggtggctgctttcctgccggagcccaggtccacctagaaactggggagcgtgtggccctgtcagctgtraagccaggagaccgggtcctggccatgggggaagatggcaaccccaccttcagcgatgtgctcattttcctggaccgtgagccaaacaggctgagagctttccaggtcatcgagactcaggatcctccacgtcggctggcactcacgcctgcccacctgctcttcattgcggacaatcatgcagaaccagcagcccgcttccgggccacgtttgccaaccacgtgcagccaggccaatatgtgctggtagcaggggtccaggcctccagcctgctcgggtggcagccatctccacccacgtggcccttgggtcctatgctcccctcacgaagcatggggacacttgtggtggaaga

SEQ ID NO: 4746 - DNA, 1400 bp, Rattus norvegicus
  misc_feature (1359)..(1359): n is a, c, g, or t
  misc_feature (1370)..(1370): n is a, c, g, or t
gagtatgatgacctttctgacctcrykcctgcccagcargagaccctgaatgactgggactctcagttcagttcaccttcaagkaccatsacgtggggwaaactgcttgaakgagsggaggakccgwytgtgtactcggatgatgwwgaacaaaagatgaggctgctcggaagagtgactgwagcagtcagwggagcatatctattkttgtattttgcaaaatcatttgkaacattccagtctgtctttacaacatggwgatttcaatatttwraraarhwwwraamwwgyaagttttttaagtaacatcactagtgacaccgatwwaatcaactcgtcttagaatgcatgatgtgtttgtacgtcacaaatccagaaagtgaacttyagwkctctagatscaaatrgkaaagctgtttctcttctatctgtagktaaaactgaattacamttttattttcctgagakggaaaacttgggttatttccacawactggccwwwtkkshagwgcacacacacacwgtggccmcawmwsgwsratgtactaagwatgaagagagaaggycttakccatgctatagtctgaaaacaagcccattttacccaacagacttaactgcatgattttygdkktatctacctctaaagcaaaactgcagtgttccaaagtctgwggkrktgatymaaaacagaagtccagtaacaaaatgaaaaytcrrtamkrggtttagttggggcaaacacattgcctgwgwtcatggactgatttatcatccctgtccccacgtggacactcccacacmcagtarmtctcasacacytggtaattggcagktggaactacaacagaaatctgaaaattcaaggtagaactttgcaaaagaaaaatctgttgcttgtascagggcaatggwtatgtggwtattggccrarkgtaaawtytgagagcaatwtacrggacaggaacaggtgtgcgcttttcaaaagctkycactgacatctbtgaagaatgdgaaamcmctacatggcacwagmtgggtgattttgaawggaaaatmcattcctaaggtaacagttaamtccttytgttgtyacaaaaytsrtagtygcttyaaaarwrgyartcagstgtytarryytwrswtarwastcttgrktaawastaaayvtwgcttaagtagmcthtgcagktgwawacatttgtaaaagtwttatytgaacaaswagtgaggtttcaractmttgtaatkgtmgytarawmgwcawkgdatwttytkgygagmtgkgttwaakggttttmccycaaatcaraaaaaaawkgaagtgcttggrwcmgktamtaamacggttttgsmmhnwmdharaamwnwaaawwmamawrmrrmhrraamaaaaaaaa

SEQ ID NO: 4747 - DNA, 1400 bp, Rattus norvegicus
  misc_feature (1301)..(1301): n is a, c, g, or t
  misc_feature (1354)..(1354): n is a, c, g, or t
ttgccaacaactccacctttgctcacctccatcccctgggttgtcactctgtgaagcctcgggtccctgtacttcctgtccgtcccctccagctcattctcttccaacgtggcagccgggaagcacttctggctagccttacccaatactactcccactgctttaaatgagacaggtccttgttttggtgcctttggatcctatgatgccttcccagtctccagccttggcccccttctcttcttacatgtagggaacaccaatatctttcaagtatgtgctacccaattcctcttcctcggaggctgctgggaccggaatataccctgctgcaggccctctccagcaccactcacctcccaggcttccatccgtcccagtcccaagccccatgcttcagacttccttggcccccacctacactcagaattctgggagtctcagactggtccactaggccccaagggaggaggtccccacaagagctcctcctgtttctcggtctccagcacaggagtgggctcagaatcagatttctgaaaggagctgcaaattctaccagtaaaattaatctttccccccatccctgatgtaggcaaaagacagtctcctctcaacacggagactcaggttgttagaaaggggctatgtaggtcaactgtgacctaaattcaccaagaatcaacttccatccatccctcttcaaccgaatgttaggtcttttactttttctacttctgactccatgcctgtgtagttgataatcaaagtcatgctatggtgacagtgatcgccatagcttggtattataagctatagttatatttatataggaaagaggataaatatatgtgaggccaaatagacgaactggagagtcttacgacctgcgggcaggaaggaccatacaaagcccttcagaaagcagctggttgtgggagctacaggcacagtggcatagttaaattaaagaacttagttgaaattattcttgagtgggctggggccaagtcaggaatttaaaaatcaattttggtttccctggagacaacagtgccccagggtggggaaataaatttgcttgctcctttggagggaacagtggcctggcttagctgagtgaatggattgcgtgagcctgaggacattgcttttcccctttgagcctcagctgacagaatatgggaccacaaagggttttccccaacccacagggactgacagtgccagccacagctgtgttcagggcttatgtccttccagaaggagcacccgatgaccagggccaccattagtggtantttgcccactgccatgcatgtcctgagggtcacctcctttcctaattttgggnaaataaatgcttgtcaatagtgcaaaaaaaaaaaaaaaaaaaaaaa

SEQ ID NO: 4748 - DNA, 600 bp, Rattus norvegicus
ggtgcacacaacctctcctctgagtggtcagcctccagtgaccccctggacatcctgatcacaggacagcttgatctcgctccttccctctcagtgatgcctaactccacagtacactcaggagagaatgtgaccctgctgtgttggtcaatgtaccctgtggacactttcattctgtcaaaggagggatcaggccagccaccccttcgacgaaagtcaaagttccaagatcaacagtaccagtcagaattctccatgagagctgtgacatccaagctctcgggcacctacaggtgctatggttctcccgactcatctctctacctgttgtcatttgccagtgcccctgtggagctcatagtctcagaatccatcgaagcctccagctggccagctaaaaggttcatcacaacagccaccccagaaaaccaggatcacacaacggagtttctcatcaggatgggaatggctgtcctggtcctcatagtcctttcgattctagctgctgagccctggcaaagtcatagacagacccaccacgcagctggcaaataatctaaagagaaaggacagctttcaatgttctacactctgcaagcc

SEQ ID NO: 4749 - DNA, 600 bp, Rattus norvegicus
attttgatcaacgtgatttagctgatgagccatcttgatagagcttacctcctggggatggaagagagttctgtgaagggagcctaagtctgaggaagcataattccaacctgaggacagagtgcatcacttcttcaagttgtgtgaagggtttcatcttaatctgcaattcaagttgatattcaaaawawaramwwrawwggtttaagtgtctgaaatgtctacggaaagcccacctggcatctgatgagcagttggaacagttttcctcagttgcatgcattgaaaataggccacgtgggacttagtacttaagcggcttgcataaaaactgctgacattttatacagtcccctggtgctgcttcattggttttttacaatatacatatatatttatgttgaaatgtawwwwramwamwmaaawtttacttgactcaaacaaaataaaagacaatggatgtccwwararwwrmaawwmmwamarawraaawrrmaaawctattcatagttaacaaaagtaatccagtgttcatgtttaaactcaatagtcttagtttaattacaccaccaaaaccttttctaaaaaaaaaaaaaaaaa

SEQ ID NO: 4750 - DNA, 600 bp, Rattus norvegicus
aaattgaaacattactcttgcactgctggagacatcgatcatgaagacatcacacgggacaaaaccagcacactggaggcctgcttaccactggaactccacaagaatsagagktgcctggctactaaagagacttcttccataataagagggagctgcctgcctccacaaaagacttctttgatgatgaccctgtgccttggtagcatctatgaggacttgaagatgtaccagtcagagttccaggccataaatgcagcacttcagagccacaatcatcagcagatcactctggacagaaacatgctgatggctattgatgagctaatgcggtctctgaatcacagcggcgagaytctgcaccagaaagctcccatgggagaagcagatccttacagagtgaagatgaagctctgtatcctgctccatgccttcagcacmcgmgtcatgactatcaacagggtgatgaactatctgagctcctcctaaggaggagggctaggagtcaggtagtcctggcctggttgaccttcagctcctgtaggaatctgtaaccccaaaggtggcacggctgcctcagcgtgggcccctccattgtgt

SEQ ID NO: 4751 - DNA, 600 bp, Rattus norvegicus
csctgcttacatgagtccaaaggccgggcgcmccctyaagtagatcccaaactacttgataaactgcacsaatattttcrtgagccaaataagaaatttttcaagctcgtgggcagaacattcgactggcactratttgccgtctgttaggcacgggacttttcctgttgtaacttctggtgtacatctgaagtggggggaggaacaaattttaaaaaagcatttaagctataatttatttgtaaaacccacaaatgacttctgtacagtattagattcacagttgccatatatagyagttatatttytctacttgwtaaatggagggcgttttgtattgtttttcatggwtgttaacattgwgtatgtctctataatatgaaggaacttaactattgcactgaaaaaaataagagatttttttttctggaramrwmwwwwwwwwwwaatataattaacctgcctccaattcaaaatagctctttgtttgcaaccctccttgtcaaatctataatctttttctgcttaaaaaaatttattggtattatggaaaaaaaaaaaaaaaaaaaaaaaaaataaaaaaaaaacacgtgcggccgc

SEQ ID NO: 4752 - DNA, 184 bp, Rattus norvegicus; identical to SEQ ID NO: 656

SEQ ID NO: 4753 - DNA, 600 bp, Rattus norvegicus
ctggagttcctgcagcctctggctgaggacccaaggctggacctgcgagtcatccagctggtgcgcgacccccgggccgtgctggcttcacgcatggtggcctttgcgggcaagtatgagagctggaagaagtggctgtccgagggccaggaccagctgagcgagaatgaggtgcagcggttgcggggcaactgtgagaacatccgcctgtctgcagagctgggcttgcggcagccagcctggctgcgcggtcggtacatgctggtgcgctacgaggatgtggcacgcaggccactgcagaaggcccgagagatgtatcgctccgcaggcatccccttgaccccgcaggtggaggactggatccagaagaacacgcaggcggcgcgcgacagcagcgacgtctactccactcagaagaactcctcggagcagtttgagaagtggcgcttcagcatacccttcaagctggcacaggtggtgcaggctgtctgcggcccggccatgcacctcttcggccacaagttggcaaaggataccgcctcactcaccaaccgctccatcagcctgctggaggagcggggcaccttctgggtcacgtag

SEQ ID NO: 4754 - DNA, 600 bp, Rattus norvegicus
ggaagttcgcgcgctctgacgagcttacccgccactaccgcaagcacacgggtcacaggcccttccagtgccacttgtgcgaccgggccttctccaggtccgaccacctggctctgcacatgaagcgacacatgtagcctgggtcgactcggccagcccatgagcgactgtggcgggttccacgcgccgggcacggcccccttgcaacaaactgactgttatttattggaccctgaggacggagtcggacaagagtggccacaggaaaatgactttgccaccagttccggctcccaccgtgactgaaggctcmaggaaagaagacaggagcctgtgaagaatgttttcaaaatggtgcaataattgacttctttctctcgggttcccactagaggatcgaggctagccttgtgagaaatgcctttgagtttactatccccaactatccccaacgttgtttttataatattgtatataagtgaccgtggcaatctgtatgactataagggagacgatggcatctctgtcgcctgcttcgtttttataactcytttyttmattrammrmgktttggatctttrraaaaaaaaaaaaaaaaaa

SEQ ID NO: 4755 - DNA, 600 bp, Rattus norvegicus
gcctggtggggttcaggctgccccgacaggtgcttcactctttcttgggctagtggaagaaagtgacaaacctcacatttgtgtaccaggcgtggaaatcatctcttgctgagtcccaccctccctgggctgaattcccgagtytctagacatttcttggcagagtctggcccagcctcaaccctaacccaggtcctgacccatttctatccctgaccctgacctctgctacgcttggggcagagagggcaggcaaggtcatctggaaggtgtggcgtcccgagcagaaagagagatgagcacattctctgttggacatgaagrgtagtcggggggattggggaatggagttgttaggagtcatgtgtgacctacggacctgcctgtcttctaggcgatctgccatgattctgtgtccagtgtgggctggagctgtgatttgtttaacccttcagaymcctaccctgaagatagagagtgaacctccttcctgaggggtattcctgggggtgaggcacgctctgagcgtgctcaagggttctgtctgctgatgtctgctttctgattaaagtgtctccttmcaaaaaaaaaaaaaaaaaa

SEQ ID NO: 4756 - DNA, 600 bp, Rattus norvegicus
gccgagtcagtttcttccacagcaggccacctactttcccccatcaccaccgagctcagagcctggaagtcctgatagacaagctgagatgctccagaatctgaccccacctccgtcctatgmtgctacaawtgcttcgaaactggcaattcacaatccaaatttacctgccactctgccagttaattcgccaaatatccaacctgtccgatacaacagaaggagtaacccggatctggagaagcgacgcatccatttctgtgattatgatggttgcacaaaagtttatacaaagtcgtctcatttaaaagctcacctgaggactcatacgggcgagaagccctacaagtgcacctgggagggctgcgactgsaggtttgcccggtcggacgagctgacccgccactacaggaagcacacgggtgccaagccgttccagtgcgtggtgtgcaaccgcagcttctcccgctccgaccacctggcgctgcacatgaagcgccaccagaactgagcactgcgcacaaccggctmgacgcctcgcagtccgctcgccatcctttaaaccgcagacctaacttcatataaaaaaaaaaaaaaaaa

SEQ ID NO: 4757 - DNA, 600 bp, Rattus norvegicus
kgacccygtaktgctrgagattcccaagatyaaagarattgctbsaaagcayaagaaaacwryagcycaggttctgatycgrttccatrtmsaraggaacgtggcmgtgatccccaagtctgtgacactctcacacataaaggagaacattcaggtctttgacttccagttgagtgaggaggacatggccgccattctcagcctcaacaggaactggagggcctgtggcctgtttgtcacaagcgatgaagaggactttcctttccacgaggaatactgatgttggttcgcttgatgagattcaagccgggtagattcctttgtccttgtgtgagactcactcctcctgaagcagattttagccacgtctctctaaaacaacctggatgtaggctaccatttggccatgyaggatttaaatttttgtgttcatcaaggtgcagactctcacagggaaaagtgagtccagagaaactaaggtcaatggttttcactaatgagggctgagcaaatgtttctcatcaggaatgcattaccatggtaacactggagacacagagataaaacaataaaatgtaataacagtaaaaaaaaaaaaaa

SEQ ID NO: 4758 - DNA, 600 bp, Rattus norvegicus
gyrgscksaggcctcmacakrwgymcrsaysccctcmagytrycaggggaagaagcttccacagacagaacctgccctcaggagactctcagggggacacaacgtcaggtactgcggctgagcgtcctgcgtctgctcctcttcaagctgcttctgctagatgtgttcctgacctgcagccgcctctgtgtgctggcgggccagcacmtattgccaccaccctcaagcaagcaagccccagcttccacccaccaaagttggacttaatgaggttatgagcttgatcttgtccacccatctaagtctagggtggtaacactggacactactgctccctggggcaggaaacacaragtcccggagctggtgatccccgctcagtgtttcttgttcaaactggggacttccttgtttttgtgtatgtggtctccctcttccygtgattagagctatcggggactggagtcttgcctcccctatcagactgagactttgggaggaaaaggactatgtctctcccatcagactgggcaggaggatgtgcccggtaactaggcacaatataaaaggtttctacaacactaaaaaaaaaaaaaaaaa

SEQ ID NO: 4759 - DNA, 287 bp, Rattus norvegicus; identical to SEQ ID NO: 663

SEQ ID NO: 4760 - DNA, 600 bp, Rattus norvegicus
aacattctgatgtccggtaggaagacgttcagcctgtctccaacagtgtggttcctcagggagggcagtatgttcgtagccctgggcgcatccacatgcagcttattggccattgccattgagcggcacctgaccatgatcaagatgaggccgtacgacgccaacaagaagcaccgcgtgttccttctgattgggatgtgctggctaattgccttctcgctgggtgccctgcccatcctgggctggaactgcctggagaactttcccgactgctctaccatcttgcccctctactccaagaaatacattgcctttctcatcagcatcttcacagccattctggtgaccatcgtcatcttgtacgcgcgcatctacttcctggtcaagtccagcagccgcagggtggccaaccacaactccgagagatccatggcccttctgcggaccgtagtgatcgtggtgagcgtgttcatcgcctgttggtccccccttttcatcctcttcctcatcgatgtggcctgcagggcgaaggagtgctccatcctcttcaagagtcagtggttcatcatgctggctgtcctcaactccgccatgaaccca

SEQ ID NO: 4761 - DNA, 376 bp, Rattus norvegicus; identical to SEQ ID NO: 665

SEQ ID NO: 4762 - DNA, 600 bp, Rattus norvegicus
ctctgcctcaaatttgctatgctgtgtactcttaacgacaggtgcgaccgcctccgaaaggcctacggggaggcgtgctcagggatccgctgccagcgccacctctgcctagctcagctgcgctccttcttcgagaaggcggcagagtcccacgctcagggcctgctgctgtgtccctgtgcacccgaagatgcgggctgtggggagcgccggcgcaacaccatcgcccccagttgcgccctcccgtctgtggcccccaactgcctagatcttcggagcttccgccgtgcggaccctctgtgcagatcacgcctgatggacttccagacccactgccaccctatggacatcctcgggacttgtgcaactgagcagtccagatgtctgcgggcatacctggggctaattgggactgccatgaccccaaacttcatcagcaaggtcaacactactgttgccttaggctgtacctgccgaggcagtggcaacctgcaggacgagtgtgaacagctggaaaagtccttctcccagaacccctgcctcatggaggccattgcggctaaaatgcgtttccacagacaactcttctcccaggactgg

SEQ ID NO: 4763 - DNA, 600 bp, Rattus norvegicus
gacccccagggtcgtaagtytaagaagatgggcgggggagcgggctgggggctggggcagacggaatgtcatctgcagatatcacccctagggtaccaatgtttgtggtattaggtttgctttgyyttgttttggtcttttgttgttttattaaagaaaagstaaagaccgtgwrarmmmwrmwrrwrrrmtttccatggatgtagcatatggaagagagtttttwtattgcatttttatggattattttataatgtgggactcagtctgggaagaaagatgagggtgtctaaaacctgcccatctccagtgctccaactgagcggctgccccgaacaggatgtatgttgggacatggaaagaccgtggcaccccgcaccttcctgagaggcatgtcgacatgcctgtctggagtctgtccatctgtctctgggtttcagatgatcactggccaccacttgttaaggctctagccagaagggagggttagggtggaagagagttattcctgaagaaaaaagaaaaattgaaacatcattgtaatgaagctttttatatttttaaaagttactatttaaaaarraaaaaaaaaaaaaaaaa

SEQ ID NO: 4764 - DNA, 600 bp, Rattus norvegicus
atgaaacaagcctttcaaggggccgtgcaaagggaattacaacacattgtggggccacagcgcttctcaggagttccagctatgatggaaggttcgtggctcgatgtggcccggcggggcaagcctgaggctcagccgtttgctcacctcaccatcaatgctgccgacatcccatcgggttcccataaagtcagtctgtcctcttggtaccatgatcgaggctgggccaagatctctaacatgacgttaagcaacggaaaactaagggttaaccaagatggcttctattacctgtacgccaacatttgcttcaggcatcatgaaacctcagggagcgtacctgcggactatcttcagctgatggtatatgtcgttaaaaccagcatcaaaatcccaagttcgcataacctgatgaaaggggggagcactaagaactggtcagggaattctgaattccacttttattccataaacgttggaggatttttcaagctccgggctggtgaggaaattagcgtccaggtgtccaacccttccctgttggatccggatcaagatgcgacgtactttggggctttcaaagttcaagacatagactga

SEQ ID NO: 4765 - DNA, 600 bp, Rattus norvegicus
cactcctcctctagacccacgggaactagaaattctcaagactgtgaaggaaataacagggtctttgctgattcaggcttggcctgaaaactggactgacctccatgcttttgagaacctagaaataattcgtggcagaacaaagcaacatggtcagttkwcwstggckgkwgtckgcctgaacatwryaycsckgcygtggmagrttbmakcrctgtcrtggcaggctgtgacaaggcccttgcaccctytggcccaaawwagagtcagctgggacactgggccctgaccttgtaagcttcctgtaatgttagcctgcccatggcaccccaacagcaagatcctgaagctcaagtttgatcctaacaaaaccaccgstgctgcggtttytgggaraagcaagcatttattcacctgcaagatcacatccctaaccttgactttgcttaagagtgctgaatgaagatcctgtccctaaatcataactcaattcttttgctcaaggaaaatgcacttgtcttcttccaaaaaaaaaaaatcaatatgcaaaatggaatttgaaataaaagcttttctaaaartgaaaaaaaaaaaaaaaaa

SEQ ID NO: 4766 - DNA, 600 bp, Rattus norvegicus
gtgccatggggtgtcaggctcctgtgaggtaaagacatgctggcgagsggtaccgcccttccgtcaggttggccacgcactaaaggagaagtttgacggcgccacgraggtggagccacggcgcgtaggctcctcccgggcactggtaccgcgaaacgcgcagttcaagccacatacggatgaggacctggtgtacctggagccaagtccagacttctgtgagcagracatgcgcagcggcgtgbtrgkswcgassgkccgcacttgcaacaagacgtctaagrccattgacggctgcgagmtactgtgctgtgsccgcggyttccacrcagcgcamgtggaghtggcagagcgctgcggctgcaggttccastggtgmtgcttsgtcaagtgccgrcagtgccarcggctcgtgragatgcacacgtgccggtgaccgtgcccgcctgtgcccaggwccacctgcgtggcccagggaaggccaataacttaaacagtctcccgccacctaccccaaamgatactggwtgtattttttgtwwtggtttggtttttgggtcctcaagttatttattgccaaaaaaaaraaaaaammwcgtg

SEQ ID NO: 4767 - DNA, 259 bp, Rattus norvegicus; identical to SEQ ID NO: 671

SEQ ID NO: 4768 - DNA, 600 bp, Rattus norvegicus
tcgggccttcctgtcctctaggctgcaggacctctacagcattgtacgccgtgctgaccgcagctctgtgcccatcgtcaacytgaaggatgaggtactatctcccagctgggaywcsywskwskccggctcccagggtcaactgcactctggggcccgcatcttttctttsgatggcagagacgtcctgagacacccagcctggccacagaagagcgtatggcatggctcagaccccagtgggcgcaggctgatggagagctactgtgagacgtgraggrctgaagctactggggttacaggtcaggcctcttccctgctgtcgggcaggcycctggracagaaggccgaragstsccasaacagctatatcgtcctgtgcattgagaatagcttcatgacctctttctccaaatagggcctctrccagctaaragggcggacaraggcgatgcagaactttgacacagtgcagggagcatccagccascacccagggtctggctaggatacgaccctgtgtagttcacattttatgtaatcstcaagaaataaaaggaagcymwagrgymwrhddwhwhrarrmawaaaaaaaaaaaa

SEQ ID NO: 4769 - DNA, 1400 bp, Rattus norvegicus
atggtttccagctgtctggatacaccaacaggcatatcccatgaagacctcatccagaacttcctgaatgctggcagcttccctgagatccagggcttcctgcagcttcggggatcaggccgggggtcaggtcgaaagctttggaaacgattcttctgcttcctgcgtcggtctggcctctattactcgaccaagggcacctctaaggacccgagacacctacagtacgtggcagatataaatgagtccaatgtgtatgtggtgacccagggccgcaagctgtatgggatacccaccgacttcggcttttgtgtcaagcccaacaagcttcgaaatggccacaaggggctccacatcttctgcagcgaggatgagcagagtcggacttgctggctgtccgccttccggctcttcaagtacggggtacagctatataagaattatcagcaggcccagtctcgtcacctgcgcttatcgtatttggggtctccacccttgaggagtgtctcagataataccctggtggccatggacttctctggccatgctgggcgtgtcattgagaacccccaggaagctctgagtgctgccacagaggaagcccaggcctggaggaagaagacaaaccaccgtctcagcctgcccaccccgtgctccggcctgagcctcagtgcagctatccatcgcacccagccctggtttcatggacgaatctcccgggaggagagccagcggctaattggacagcagggcctggtggatggtgtattcctggtccgggagagccagcggaacccacagggcttcgttctgtctctgtgccatctgcagaaagtcaaacattatctcatcttgccaagcgaagatgaaggctgcctttacttcagcatggatgacggccagacccgtttmacaracctgctgcagctggtggaattccaccagctgaaccgaggcatcctgccctgcttgctgcgccactgctgtscccgtgtggccctctgaggccmcacaagctgttacagccatggggctgcttatcgcccttctgctccgttcagwggactcgstgcagatgggtgggatgatmaacagatgaagagctccccccacttttctcccactttttttttttacctccctcaggtaatgaaacatcccccasccctgttcatccctgactcctgtccccaaagkaggcattgtggtcctctccccttggtasasctcctgmggcagtgaagggcattatragaggagtaggggcmscccgggtggtctcatgccccacccacactctgtacagactgagaggccagttgatctgctctgttttataccagtgataataaagattattttttgmtmcammmamaaaaaaaaaaaaaaaaaaaaaaaaa

SEQ ID NO: 4770 - DNA, 600 bp, Rattus norvegicus
tgacgccaccaaggctacgggagaagaaatatgatcatcacccccagcaactcaactcctttcatcacaaccctgcacatcagagtaccagcctcccccctagcccactgaggatagtggaggatgaggagtacgagacgacccaggagtatgagtcagttcaagagcccgttaagaaagtcaccaatagccggcgggccaaaagaaccaagcccaatggccacattgccaataggttggaaatggacagcaacacaagttctgtgagcagtaactcagaaagtgagacagaagacgaaagagtaggtgaagacacaccattcctgggcatacagaaccccctggcagccagccttgaggtggcccccgccttccgtctggctgagagcaggactaacccagcaggccgcttctccacacaggaggaattacaggccaggctgtctagtgtaatcgctaaccaagaccctattgctgtataaaacctaaataaacacatagattcacctgtaaaactttattttatataataaagtatttcaccttaaattaaacaatttattttattttagcagttctgcaaatactcgtgccgaattc

SEQ ID NO: 4771 - DNA, 600 bp, Rattus norvegicus
aggagcctaaaagacctcatattaagaagcctctgaatgctttcatgttatacatgaaagaaatgagggcgaatgtcgtagccgagtgtacgctaaaggagagcgcagctatcaaccagatcctgggcagaaggtggcacgccctctcccgggaagagcaggccaaatattatgaattagcgcggaaagaaagacagctacatatgcagctctatccaggctggtcagcgagagacaattatggcaagaagaagaagaggaagagagagaagctacaggaatctacttcaggtacaggtcccagaatgacagctgcctacatctgaaacatggtggcaaaagaaactcattcccaacgtgcaaagccaaggcagcgaccccaggccctctcctggagatggaagcttgttgaaaacccagactgtctccacagcttgcccggctgaccccaaggagcactgacagcaactttaccctgaggtcactgctagcgctgactccacagacacagtcactgccagccctcccttctgtctactgcaagcgctgacttccaaaagaaagccgaatacggtcgtttctgaaaaaaaaaaaaaaaaa

SEQ ID NO: 4772 - DNA, 600 bp, Rattus norvegicus
cctccctgcatccggtcatagtaaactcctatccttccagccaaactctacatttcaggataattatcagaaccagattatttcatgatcaagagcattgttggagacagacaatcaacttgtgttttgcctgtagtagtttttcgataatatgtcccaattgttgtttaaaatatggcttcatatgacagaacaaagcaagtcagtcaaaattgcagtaagaacggacatgctagtgagagccacttcacacttcttgcaaataggaaaaacaaaagaggaaacctcaaattcacacacacacacacatacacaccaaattgaacaaactggaaattctcactctgtgaaaaggtgtacttcacatgtttctgcacagaccacaagcagtgttgtttccctagtgtttgagattcttcagttctgtgtgctttcgttgtttgtgtgctgtttgctgattctttttgccccgttgcctctctttctctgtcttcattgtatttattatttccgctagctttttttttttcatttttttttgtctttgtctttctttgctttgccatgacaggattaggtggtgttaacagagactgcttc

SEQ ID NO: 4773 - DNA, 600 bp, Rattus norvegicus
ttatgacaaaccacacgtgttggtggacgtgcccgtggatggggagggcaaggagtctttgattgggtatagactcacgggtgatacccaggaactgtcctaaggccgccgagtcctgacggtgctgaaggatctgcctytaggcagttttcctgytttgttctcgtgaaagactttgcacgttagccgattctgaccgcagcgtccctaatgtgacacsmggmtmrkgmskytgtgtgagcgcactgcccggtctacycygcawatgccaakactgccagakggatgaacrgtcmcytatgakctcctgcctgggtgggstggttctcctcctctagccttgcttcctccagcmgvtgctcctccacctcactgcctcacgggacacgggggacctgtcctcacacacctttgtwtctgtaagtccgtgtatatagtgtgtttgcagtttcactttaagggaaagmtgaaagccmctgcaggtgactccgttcgtgacaagtttggtaggacatttgtgggcgcatacgttttttwatggggcatcacttatgatttttaagtaaaatgttttgaahccrraaaaaaaaaaaaaaaaaa

SEQ ID NO: 4774 - DNA, 600 bp, Rattus norvegicus
ctgtacacttccacggccacagcttccaatacaagcacaggggaattcatagttctgatgtctttgaccttttycctggaacataccaaaccctagagatgtttcccsrmacgmskggaacctggttactccactgccatgtgactgaccatattcatgcggggatggtaactacctacactgttttaccaaatcaagcatcgtctcagagctacaggatgacctggaacatactctmkrcackrkkaatcagcatgactactttattccaaatatctaccaaggagtagccmggmamrwrrggtgttttcaagaacattctaaaaatgaagatggttgtacagctcatttccctgcaacaagaccagtccctcagctcaggggcttcctccatcaccagttccatccaggagccaggattccaaagctcctaaatgtgatcaactatagactttgcccctcaaaagctatattctaaattaacaagacatgtgctatcacgccatatttaaattgtatacgatatcgaaatatattgcataytttaaaagtaaaararrmawwwwwawwtammwrwarwwwmaaaaaaaaaaaaaaaaa

SEQ ID NO: 4775 - DNA, 600 bp, Rattus norvegicus
ctcattcttccctctacttcaagcctctgactcaaaagcacaagatccttgcatgcacacctcctccaccctcaatcctgggctgctacagcttctgttatggacttggagaatgacccagagggaccccaatgtcctggctggttccttagccctagagaggtgttgataggggatggatataggagactgagtggctccctgatcatccatctggaggtttgaagggaagagtagaagaggtaggagtctgtcttcagagtgatctgagttgcactaagtcaaggcccattctccccttgcttgcactgacttctgrtcctcttgcacacttgggtatgcaacaggaagggaacctggaggtagctkctgtgtttgatcctactctacctaaggagagataagacagagagaaaactgcctgtcccttcactgcagacaatcttaggmtatagtactctgctgagaccctgagacagctagatgagttagccacagtgaacaaggctccacctcaggcttttaatgcagcttataatctagtggttttgtgaggagraaaatcacaatactgttcrrrwwvawaaaaaaaaaaaaaaa

SEQ ID NO: 4776 - DNA, 600 bp, Rattus norvegicus
ctctccttcatcgtgctctgcttcacgtacctcaaggtgctcaaggtggcccgtttccactgcaagcgcatcgacgtgatcaccatgcagacgctcgtgctgttagtggacatccatcccagtgtgagggaacgatgtctggaggaacagaagcggaggcggcagcgtgccaccaagaagatcagcaccttcatagggaccttcctcgtgtgctttgcaccctatgtgattaccaggctggtggaactcttctccacagcacccattgactcacactggggtgtgctgtccaagtgcttggcctacagcaaggctgcttctgaccccttcgtgtactccttgctgcgacaccagtaccgcaggagctgcaaggagcttctgaacaggatcttcaacagacgctccattcactctgtgggcctcacaggtgactctcacagccagaacattctgccagtgtcggaatgaaggacagctctcctgttggggagttcagaatgaggtggccagagcagagggaggtggtctgggactcctgggtggacaggaactgccaccattgtctggcgattgacatgatgctgatgtctgaacaagatc

SEQ ID NO: 4777 - DNA, 1400 bp, Rattus norvegicus
gggtcatgctgagatttgccagcacaaagacactccaccaatagcatatggtacgatattgctacttatattcatccgtgccctcrcsmgkgcacaatggagcttttataactggggtttttctaagaaattgtattaccctaaccagttagcttcatcctcatcttcctcatcctcatcctcatcctcattttttaaaagcagtgattacttcaaggtctgtattcggtttgctttggagcttctcgcttccctggggcctctgggcacagttacaggtggtggctttgctgggagccctggggagtagcaaccttccaccagagcaggtccgaggaatgctgcagggcttgtcctgcagggggcgctcccggacagattccttgccgagagtcactcagctcaaggttgggcagaggctcctttttccagttcagtgtcaggggtagggaagcttcctttagaaggtacccctggggcctgtgctcagagaccctttcctagccgttcctgatctctgcttgcctccaaaagcatgcttcaactggcttccgcttctcacctctgtagcctgacctgccaatgctgcagtggaaggaaggagaatgttttggggggcgcttcctccctctcttccctttgskywcswskcacttgggccytttgtgagatttctctttggcctcctgtagaatggagccagcccctcctggataatgtragaacatgcctagaattaaccmcagaacmcaagtytgagaattatcsgaaacgcaattttaaatttgaaaactttraggaattggacttttgcaattgcccctgagtcctatatatttcaacagtggctccgtgggctctgagttttsgaatatcagagwtgaaaaaaatgaataasccagaatcttbccgtgaagccmcagtggggatthtgggttccaatcagaaatgggamcaagataaaattggwtacgtcmtaatgatcayagacggccctggtggttktgataactatttgcaaggcattttttacawawatttwtgtgcactttwtatgtktctwtggaagacaaatgtatttcagaatatatttgtagtcaattcctatatttgaagagaagccatagtagtgtcagtagataacctbtacggtcttgaactactggcgatttgtaaagaaatmtatatgacatatagatgtattgtagcttgccaatgtcagccagtgtatttttccmcttgtaatgaaattgtatcaactgtgacmctatatgcmctagcaataaaatgccaactgtttcgtgctgtaarmmwmmwamwrwawrwgggaatttatttacctgaaataaaatctwctagttgttaaaaaaaaaaaaaaaaaaaaaaaaaaaaaaaaaaaa

SEQ ID NO: 4778 - DNA, 428 bp, Rattus norvegicus; identical to SEQ ID NO: 682

SEQ ID NO: 4779 - DNA, 600 bp, Rattus norvegicus
atgksaccaaagatcmatttgaaagccaccttcgagattgcccagacccttgtataggctggtgagcacacatcagccagcatacaggrcagacatactcagacctgaagatgtgttytccagcatgcstggtctccttccataggctaagactcaaggcctcttgtctttagtcatgattgtcctcatgtttctgttgtttacagatgttttgttgtttgtttggtttgatcaccatcatcacttccacttataggtaaatcctttaagggacgccatgtagatagaaattgccagttcatttcacttcgacactgaggaagtggtaacctgacctctatggaacccatcaaggttctctgatggtgtttaatccagtgccctgtgtgattaatgtaaaagtcattcaccttttcttttttaawmwamawawwwawrwwtttctgtacaccagtagctttcttttttcctggttctctcttagaaccaccatgtcattcacctttgctgttagtgacagcagtgcaatatcactatgcttggctggagttcctcagatggatatttgacacatattttaatgggcagatcaatagacct

SEQ ID NO: 4780 - DNA, 600 bp, Rattus norvegicus
tcctgggtattgatatgcactgggatgaggcacagaaccaggttcatgggttttaaacctgttctgcccttgcaagggactttaaggaacttcttgattgatgggaggaaaactagttcctgggttgcagaggctgctgcctttccttctcccaagacaatgactatcttttctccccacactcaggaacagtgggtagatgcctttcttcacagtttttctttgtagactcttgctgcttgagcaaatctaaaaggagttgtggtgatcagagcagaggacccttctctggtggcagagcaaccctatgctatagagatctaccccctggctcttgtctgtgtaggcccaatctggctcaattgaccctctggcagatggcccttatcaggggggctttgaagagggtcttacttgccaaagcgcttgctttcagtacagagctggtgagccaaagcttggttttatacaagttttaatgacattgtccatttgttttttgttttttagtctagcagtttataatcaaaaggtatgaatttctaataggcttaaaagatgcagcccatgcaggcatggtggattggattctatgagatt

SEQ ID NO: 4781 - DNA, 600 bp, Rattus norvegicus
taccagtacagataaaggcccaggctgcccctctcaaccttctgcacctctgcctccaacttgtctcgggagattgagtctgcacatcaccagttgccatgtccactgggccagtgcccacccgtccacgttgctgacgttgccacgctgtgaggcgtggtggtccctgggacccgtgcygttgaccctatttarctgtgttttggactcagtgtcttcagtggtttgttagttaccattacaccttgtctgagtagtgttccgagttcttgccgtgcggaatccctctgtctgtttatgcccggtgtgagttccatcgggtgtctttaaatagttgcagaagggatacgtcatctgttaatgctttttgtgaagtgagttaaatgagctttcattattttaawrmwwarwrwwwmarttttataagtgaaaattttattttaaaaaacagtggggtttgtttttttgtttttttgtctttgtttttttttttttttttggtatgtctggatcattcaggcagtacatttgaattccgctgaatgtagataaataaaagaaaaacaaaacagmaaaaaaaaaaaaaaaaaaaaaacattg

SEQ ID NO: 4782 - DNA, 500 bp, Rattus norvegicus; identical to SEQ ID NO: 686

SEQ ID NO: 4783 - DNA, 560 bp, Rattus norvegicus; identical to SEQ ID NO: 687

SEQ ID NO: 4784 - DNA, 1400 bp, Rattus norvegicus
gacaacctctattcagcctttaccagtgatggtgccatttcaataccaagcctttctgctccaggtcaagggaccagcagcacaaacaccgttggaggaacagtgagtagccaggctgcccaggctcagcctcctgccatgacttccagtaggaagggcacattcacagatgacctgcacaagttggtagacaactgggcccgagatgccatgaatctttcaggcaggagaggcagcaaaggacacatgaattatgagggccctggaatggcaaggaagttctctgctcctgggcagctgtgcatttccatgacctcaaacatgggtggctctacccccatctctgcagcatctgctacctctctaggtcacttcaccaagtccatgtgccccccacagcagtatggttttccagctgccccattcggcactcagtggagtggaacaggtggtccagcaccacagccacttggtcagttccaacctgtaggaaccacatccttgcaaaatttcaacatcagcaatttgcagaagtccatcagcaaccccccaagttccaacctacggaccacctagtcagcagcaaggatgttaactgagtagatctgggggcaggaaatggaatggtgatggggtggggggtggggaaatagcctatatactaactactagtgctgcatttaactggttatttcttgccagaagggaatgtttttaataccattttgagccctcagaatggagaaccaccctccttctccatttgttggagttaaaaaagaaggaaagaagagctttctggtggaggggctgcctgagactgcttttctgtttttgtacccaccagtaaggcctaggggctagaagagagccttgttaccagaaagcctcatgtaagccaaatcccatatgtatctgaagtgggtagagctcttaattttgacatgtgcccccgaaactccttattccctcaacagtgcacaccttaagacaaaaaggttctctcccactcggatccctacccccactkwwyttttwcctttwacaacstaktgaaaaacaccaggggaytggggttgcaaccctttyttatataggtcattaatgctttaagcaaaagattagcagctttgactgcagcattagcaattagggaaaacaatgacgttccstgcggacatgttaactttgccatcagttttgatgtggaaacactgtgatatataaatgttgttggacaacattagttytaagagtaaaatttgaaaggtttaaaaggttcacacacaaagstagctmtgtcctttccttattaagacactttaactytttcstttgtatttccattgtattagataaataaatgtgaatgtaaaattgtrwaaaaaaaaaaaaaaaaa

SEQ ID NO: 4785 - DNA, 547 bp, Rattus norvegicus; identical to SEQ ID NO: 689
  misc_feature (334)..(334): n is a, c, g, or t

SEQ ID NO: 4786 - DNA, 600 bp, Rattus norvegicus
ccaccaacaaaagactcttttccatcggcctttgcctcaggagctgcacagcagacacagacacaggtgaaaacccctctgaacttagcagacctagatatgttctcctcagtggattgcagtggggagaaaccagtgcccttttcagctgcatttagcacctcaaagtcagtttcctcaagacctcagccggcgggttctgcagcagccccagcatcactggcatccactaaagcgtccagtttggcagatgattttggagagttcaacctctttggggaatattcgaaccctgcgtctgttggggagcaggacgactttgcagatttcatggctttcggtaacagctccatcccctctgagccaaaagcagatgacaagtatgaagccctcagagaagaagggagccccggcgccttgtccaccagcactgtggagggtgcacacaacccacctgtttcgtcatccaagtacgacgtcttcaaacagctttccctagagggagctggactggccatcgaggagttcaaagagaacactccttccacaaaaagtgacggtgactttgctgacttccactccagtaaattctcatccacg

SEQ ID NO: 4787 - DNA, 1400 bp, Rattus norvegicus
tgatgaggatgagaaggagatgatgctcttcttgtgtagagatgtgactgagaacctggctccacccaacgtcagggacctcctggattgtttaagtgagagaggccagctctccttcgctgccttagctgagctgctgtacagggtgcggcggtttgacctgctcaagaggattttgaagacagataaagcagccgtggaggaccatctgtgcagaagccctcaccttgtttccgattatagggtgctgctgatggagattggggagaatttgaatcaatctgatgtatcctccttaattttccttacaaaggattacacaggccgaggcaaggtagccaaggacaagagtttcttggacctggtgattgaactggagaaactgaatttgattggttccgatcagttgaatttattagaaaaatgcctgaagagcatccacagaatagacttgaagacaaaaatccagaagtacacgcagtccagccaagaagcaagatcaaatatgaatgctctccaggcttctctcccaaaattgagtatcaaggaacatttatataactcaagggtgagtctggagccagtgtgtggaatatcagcatgaaccagttccagagatgtaataaaaatatacaccgcatgtcatatgttgttatagctaaacaaattctgataggcgtgtgtttggtaaagaatgtgtgtgacttcttatgattaaaccttagtaatgttcaaaaatatatttggggaaagttattaaatacatagtaagaaaataatatatatacccattacctaggcatgactactgtggaatgctttctttcagtctcgttccgaatgtaaatatagaaagaaaaaggtaaatgtccctaaagagattttaaagttgttcactcccacctcgtagaacccatgtcccacttcctttccattaaggagactatccttgactagtttctccgataaccaagcacagagcctgcctacttaaagtgtctacttttgtacacgtggtagcatatcatgtctgctcctctgaacagagaagtcttagacattgttctatatggttaatatgagattgtttkkmwykarkcgttatttgtactatttggaatgacacccccacccctttattttcttttgtgacaagaacttacctgtaacccagcctggcctaaaatccattatgtaacctaggccagccttgaatttcaatgagtcttctcttgcttcagcctcccaagtgctgacataggcatgtcctgccaggagggctcatggcttctattttctgcatgtactaaaatgtattcagttctttcttgctgatatgtacattgcttcctttcctttgttcctggaaacgatgctgcwaaataaamttyctgattctt

SEQ ID NO: 4788 - DNA, 1400 bp, Rattus norvegicus
tgcttgggtaattgtagggccaggattgtgaatgaaacttgcaaagttgcttagcaataatggaaggtctttctcaatcacacagagaaatcaaaaccaagccaggctgtgtaaaatacagctgtgacatccagacagaaggctgggctggctgtcaggtctcagatgacagtttcaggtgccaggmactatttccattctgtatttatccgagagttattaaaatttaaagttgcamamarwhvwmdwarmmatgctttttcccctgaggtttaaattatgtgtacacaaatgtgttgctctcaaagattattcagaaatcactttggctactctttggtaattcttggactttttgattttcgaataaatataaaccctcttcatgtaaaawaaaawaaaawaatctgtagtatmamgrgrccaaaaattaaaattccatagaagcagattttccaggcagtctgcagctcacctcatttagagtctgaatatgttggactctatccttgtctggatgggaattagttttaagagagaaatactttaccgctccaaaagaacaaatggaatatatgagtcttctcttggaggctctctgagcaaatgcagtcctggggctgtgctagcatcgttactgtagcaaaacagctgaggtgattaayttatgcattttttaaaaagggttaattgggttcagcatttcatgtttctgtcatgatcctattgcgttgaaactatagagaggcagcacaacacggcaggggcatgtggtagagtcaagctgctccctttctggctaagagagagggcaatgtgcagtcttgtccaggggtctgggcactctcacaaggacccaccccgtaaagaccamtctrcagccttgggtttagttactcttctgggtgctacatcaaacacccaacaagaagcaacytgagggaggagggtttatttgggctyytggttcaagcagggagtccttrrtggcagggagggtatggcsttagagtgtggggmyccwtcccgcagtatagggratcgggaagcaaaggaagcaatgtaggactcagctttctccctctttcccttttyatttattmtgggaccccaacccttggggaggtgccacccacaataagggtgagttttctttcctcagaaccctctggaaacttstggytaatagatatgtgcagagktgtgcccctaagtagtcaactccatccggttccaagacatataagcgwkacgcactaactytgccacatagcaccgagtccctcttaaaascctttacttytcatccgargatwtcacagaaaagagatgtcgaaacatttagaaaagacaataaatgtacttgmtgaarwmwaaaaarawawaaaaaaaaaaaaaaa

SEQ ID NO: 4789 - DNA, 600 bp, Rattus norvegicus
cagccttcrytgccccatgaggtstccactatgatctccagaccgcatcccactgtgggcgagtccctggcytccatccctcaacccgtggcaacagtccacagcaytggccttcaggcagggagcaggagcaccgtgccacagcgtgtcaccttgttcagacagatgtcctcgggagccattccccccaaccgaggagtgcctccagcacccccrccaccagcagytgtgcagagagagtctccctcagtcttaaataaagacccagatgcrgaaaaammmmrwwwwrmwwcgaatttatgattcttgctgattgtcaaagcagaaaagaaatactctaataaacagaatattctcagatattattttattctatctcatgatagagccctatagcctactctaaaaagatattttagaagctctggcgtacatgcaaatgtaaaaacatatatacatatattattaaatatatatatatatctaaatgcccaagagaagttcaaaagacttgtataactttcagtgttatgtcttcctttctttaaaaccattaaaggatttaacacattgttgtaagatcaaaaaaaaaaaaaaaaa

SEQ ID NO: 4790 - DNA, 600 bp, Rattus norvegicus
tgggccctaactcagtcatgccagcctatggcagccaggcacctcataacaaaatgatgaaccccagttcccacacccaccctggacatgcacagcaaacttcttcagtcaatggccgtgccctgccccatgtggtgaacaccatgcctcacacatctsccatgaaccgcttgaccccagtgaagacacctttacaagtgcctctgtcccaccccatgcagatgagtgccctgggcaactactcctctgtgagcagctgcaatggctatggtaggatgggtgtcctccaccaggagaagctcccaagtgacttggatggcatgtttattgagcgcttggactgtgacatggagtccatcwttcggaacgacctcatggacggagataccttggattttaactttgataatgtgttgcccaaccaaagcttcccgcacagtgtcaagactacaacacacagctgggtgtcaggctaggagttagtgagcaggcaacatttaaaagtccttcagattgtctgacaccgggaactgaggagcagtccaaagatgcccttcacccctccttttagttttcttgattaaaaaaaaaaaaaaaaaa

SEQ ID NO: 4791 - DNA, 600 bp, Rattus norvegicus
gaggtgacctgggcaccatccatgacatgaaccgacccttcytgctcctcatggccacccccctgraaagggctcaacacytgcacagctccaggcaccggagagccctggataccaaytactgyttcagctccacagagaagaactgctgtgtacggcagctgtacattgactttaggaaggacctgggttggaagtggatccacgagcccaagggctaccatgccaacttctgtctggggccctgcccctacatttggagcctggacacacagtacagcaaggtccttgccctytacaaccaacacaacccgggtgcttccgcatcaccgtgmtgcgtgccgcaggctttggagccactgcccatcgtytactacgtgggtcgcaagcccaaggtggagcagttgtccaacatgatcgtgcgctcctgcaagtgcagctgaggccccgccyccgmcccgccccgcccctyccggcaggcccggccccgcccccgccccgcccgcagtgcccggggctgtatttaaggacacctgcaccccccccaagcccatytgggggcccattaaaggtgacagrggraaaaaaaaaaaaaaaaaa

SEQ ID NO: 4792 - DNA, 505 bp, Rattus norvegicus; identical to SEQ ID NO: 696

SEQ ID NO: 4793 - DNA, 426 bp, Rattus norvegicus; identical to SEQ ID NO: 697

SEQ ID NO: 4794 - DNA, 1400 bp, Rattus norvegicus
agttcatcgactcactgcctgagaaatacaacaccagagtgrgagacaaagggactcagctgtcgggcgggcagaagcagcgcatcgccatcgcgcgcgccctcgtcagacrgmsksrsatcttamwkmkggrtgwwkcsacatyarctctkgrtrcggakwgtgaaaaggtcgtccaggaagcgctggacaaagccagggaaggccgcacctgcattgtgatcgcgcaccgcctgtccaccatccagaacgcagacttgatcgtggtgattcagaacggccaggtcaaggagcacggcacccaccagcmgctgctggcccagaaaggcatctatttctcsatggtcagtgtgcaggctggagcaaagcgctcatgaactgtgaccatgygagatgttaaatatttttaatgtttgtattaatatatgacacttaatcaaagtcaaaaggaaaacacttactagaatagtcagttatctatttcctgtcacaaaggaaagcatttagtccattttagagtcttcagagactttgtaattaaaagaacaaaaatagatacatcatcaartggagagtaatagtttaaaatgcactataaaatttacaaaagagttaaaagtaaatatttgataatatatacttttatttatactttctcatttgtaactataactgatttccttgcttaacaaattatgtatgtatcaaaactactgaaatgtttgtataaagtatatatatatrgygaaamwraawrwwwawawwwwwwracttgttttgctcaaaatgcatgtgaaattatatattctaccaactggagtattgtacataattttagcctttaaaacttagtctatgggggaggggtcactctatgggtaatgtgcctgataatacacaaacatgagtatctgagtctagatccctagcacctatgtaagcagaaaggtgtggtatgtttgtaatgccagggctagaggcagaaacagacagatcctatgggctccgtggtcagctagcctagccagcatagggagctccaggttcagtgagaagacttgtctcaaaaataagagggaaaaagcaaatgaggttgtcacaaatgtgtactcgtcatacaaatgccatccatgcaaatgtatacacacacacactcacacactcacacacacacacacacacacacacatacacacacacacacacatacccattaacagaggactagcaaggaaaaggaaggggattaacaggagtgggaccaggacaaaggaggttacttggatgaatatgactgaaggatgttatgtacatgtatgaaaatgccgtactgaaacactatgatgtatacttaatatatgctaataaacatttttaaaaggaaaaaaaaaaaaaaaaaa

SEQ ID NO: 4795 - DNA, 855 bp, Rattus norvegicus; identical to SEQ ID NO: 699

SEQ ID NO: 4796 - DNA, 600 bp, Rattus norvegicus
akmkgcgatgaactgggagtgaagcsgccaacctctgtgaargwwttttcaggcaaaagcgagcgtagctcctctgggctgctggagtgsgactccaagartsacgccytggagaccttgggctkcbtgamccattaccrgatgaaaaacccaamtggccmgtatccatacactmtgaagttgtgcttytccacmgyacagcacgcctcctaattagatgctgggaaggaagactcyatccgagcagraagatgtttctttcctttatrctgktggtttctwtgtwytgkctttattkttgcagttctttttttccatttaaatgytaggtcagtagaggcttaaccacaacaaatgstggaactctgraggkggggaggggaaytrgtatctcccaagattaaccttcacttwttaaaataactgtatgtgtgattctttttttcctgttcatacatttgtgctgcccatgtatcttggcmcatttcaataaaattgtttgrraahhaaaamwawhmrmwrrrraaaaaaaaaaaaaaaaaaaaaaaaaaaaaaaaaaaaaaaaaaaaaaaaacccaaaaaaaaaaaaaaaaaaaaaaa

SEQ ID NO: 4797 - DNA, 193 bp, Rattus norvegicus; identical to SEQ ID NO: 701

SEQ ID NO: 4798 - DNA, 600 bp, Rattus norvegicus
agtcaatgttctggagtgatttgggtcctgatgttggctatgaagctattggtctggtggatagtagtttgcccacagttggtgtttttgcaaaagcaactgcacaagacaacccaaaatctgccacagagcagtcaggaactggtatccgttcggagagtgagacagagtctgaagcttctgaaatcacaatccctcccagtgaccctgcagtcccacaggtccctgttgaaggggaggactacggcaaaggtgtcatcttctacctcagggacaaagttgtggtggggattgtgctatggaacgtctttaaccgaatgccgattgcaaggaagatcattaaagacggtgagcaacatgaagacctcaatgaagtagccaaactcttcaacattcatgaagattgaatccctatcatggaatacacaagcacttttccatccctgacagggaatgggtggataaaagaacattttttattcagcatactttttctttatgtaggagcaggaatcgaacaagcctctgtgaatattttcatctgtataaatgcacatcacaaattaaaatctgattctttwmaaaaaaaaaaaaaaaaaa

SEQ ID NO: 4799 - DNA, 600 bp, Rattus norvegicus
tcattccygctcgtggcgggggccaccacgctcttctgtctactgaacttcggggtgatyggtcccaacaaggaggagaagttcccaaatgggctccctctcatcagttccatggcccagaccctcacactcagatcatcttctcaaaactcgagtgacaagcccgtagcccacgtcgtagcaaaccaccaagcrgaggagcagctggagtggctgagccagcgtgccaacgccctcctggccaatggcatggatcycaaagacaaccaactggtggtaccagcagatgggctgtaccttatctactcccaggttctcttcaagggacaaggctgccccgactaygtgctcctcacccacaccgtcagccgrtttgccayttcataccaggagaaagtcagcctcctctcygccatcaagagcccttgccctaaggacacccctgagggagctgagctcragccctggtatgagcccatgtacctgggaggagtctyccagctggagaagggggacctgctcagcgctgaggtcaacctgcccaagtacttagacatcacggagtccgggcaggtctactttggagtcattgctctgtga

SEQ ID NO: 4800 - DNA, 393 bp, Rattus norvegicus; identical to SEQ ID NO: 704

SEQ ID NO: 4801 - DNA, 169 bp, Rattus norvegicus; identical to SEQ ID NO: 705

SEQ ID NO: 4802 - DNA, 1400 bp, Rattus norvegicus
tgtactgratggaggcaaatccatgagccacaatgaatcaacgtagccagtgagggcaaaacgagggctctataacagaaccttacctccaggtgctgttgaattcttctaacagtccttcatccaaaagttcagacttatcagtgaggtttaccaaacacacaggcagagttccctattctatctgccattataccttgttatcatccgtactaaagccccataatttagattaagcttgtgcaaaaagaatgccaagcattatcaatgaactaaacctggaagaaggactgccaaattttctcatgatctcacctatactttgtgaatagataacagagcaaaaatatttaacagcacgaatgctggtcaatttgcttcccaactaagaaaatgtaaaagaccacagtaattattaacaaaacaaaacaaaacaaaacaacaaagttaactgcttaaatgttttgtaggggcaaacaaattctgtgaactgtgctgttttcttggcttcgtgttttctatctctgcttgattcaaatgtactctttactttcatatagtgcaactttatggtttctgaaaattaatggttctattgactctatcacttaatccaaatcaaccgaggtcagggttgaatctgaattggcatctgagactcagagtaacggcgttcttaaggtttttcctctttctccctctccttcctactgtccctcttcctctctctcctttttctgtgtcaattagaactgtagcattctggtcaagttcttgtgctgtactttgtgcgtagaaattgagttgtatcgtcaaccccagtcagtaagataagttgaaacaagattatcctcaagtgtagatttctcttaattccattcgtgtatcacgttamksyaykrkkgtggcttcttgtgtaaagacaggaactgtggaacagtggcattgtctttctcgtgtgtttaaataagaaatgtytcatctgtacatgtaaaagtccttctgtcattggatttggcacgtgaacattgtgtacaagacaatgttaagactggttccccctaaacaacatatattatacttgctactggaaaagtgtttaagacttagctaggtttccatttagatcttcatatctgttgcayggmasrargwyrgaatcttrgcatakmrttgcaykmtatgyaagatktgtgcmttaataattgttaaactctgtgttccaaaagtgaacatagcatgtacaggcagttttytgccctgtgcataaaaagttaaaaaaaagttgtttaatatttgttgttgtatacccaawtacgcaccgaataaactcyttwtwttcattcmaaramaaaaaaaaaaaaaaaaaaaaaaaaaaaaaaaaaaaaaaaaaaaaaaaa

SEQ ID NO: 4803 - DNA, 1400 bp, Rattus norvegicus
gagcagatgaagmggmcactgggmacacagcaraacccagcccgtamctgcaaggaccttcaactctgccatcctgatttcccagacggcgaatactgggtcgatcccaaccaagggtgctccagggactccttcaaagtctactgcaatttcacagctggagggwccacgtgcgtcttccctgacaaraagtctgagggarsyaraatsrcybsytggcccaaagarmasccwksywcctggtwyagtsartwcaagcgkggkwmmctgctctcctatgtggatgctgaaggcaaccctgtgggcgtggtacaaatgaccttcctgcggctgctgagtgcctctgcccagcagaacatcacctacaactgctaccagtccgtggcctggcaggatgccgccacaggcagctacgataaggctatccgcttcttgggctccaacgrtgaggaaatgycttatgrtmacrasscctacatccgtgccctggtggatggctgtgctacmaagaaaggctaccagaagacggtgctggagattgacacgccmaaagttgagcarktccccattgtggacatcatgttcaccgactttggtgaagcctcacagrmaykwggatytgaagtaggsccascttgcttcytaggctaggagctgctgagcccaccggtytccagagcaacctygtgacytcagcaccccacctgtgggcgtcctgtgcacggcccatcccggacagtgaacctttctcacccctgcctgcctgactcatstgtgcmtcggagcctccgtggcgttggaccccatgcccagasrgmacmrvgggrwwkwkyyktktyymmayggwgccgartcacatgacvtagccacamcacagcytcttgccacgmttcagctctccggataggttcatcgaaggtgttaatggaccgttggccgggagtggggcgggacagtatttgaaaatcactttttaaaaaaattcaacttgaagatatgtattccccctgaccttcaaaagatgttctgaggtggtyttgtaaaggtcrccaaagcctccatwwaaaaaaraaaaaawraaaaaaaamcaascskcmrcatatccactcagaggccaaatgtcattccacatgtgcctttccgatggattaaaggtgcttatgtttttgtgaraawwwwaarwaaawatttgtattgtattgttataaatgttaagtgtgcctggctttcagtcttgcatggaaacccagcctcaggsccatggggaaagcgggcagctgggacaaggcacccgcatgggcttacatccggctctcggtagagggcatctccttaaccccaaaccccacaagaatgtgcaataaattggaaattcgcccagtcagcaaaaaaaaaaaaaa

SEQ ID NO: 4804 - DNA, 600 bp, Rattus norvegicus
gattgtgacatgacttttccttgtttctcggagcttgtctctcaccaaaccatccacgacatggagaaaactcataagtgcaaaacatgtgcaaagacctttgctttagagtccgacctcgcgagtcacgagaagagccacagaagagaggagccctttaaatgtacagtgtgtgggaagagcttcagagtaaacgtgcagctcatcgctcataaacgaacccataggagaaacagcaagtaaatacaggcttttgctactgttgggctgctcggtgtctgtctgatggtaaactgctctgcctctgtgcagggccctgtgctaagcaagcactttacacacattccatggagtgtcgcagtattacttactactgattagatctgaggagataaatcagtgttaatacatagtgggcgaagccgggatttgaactcggtttctgatcaaattccatttatatgagccagagaaacatcaaactttaaaattcagtattcgactgctgggcatggtggcctacactttaagtcccaagcactcaggcagcagagacaggagggtttctatgatatagaggccagcctggtctctcgtgcc

SEQ ID NO: 4805 - DNA, 600 bp, Rattus norvegicus
aaactcagaggagaagacctaaagccmtggccccctgcwccacaccctgaactccaccacactggctgccctatagcatgtstgaaacagttatcaggagacatgatgccatttgattaaagttttccgagctaamwwrwmwwaaaahaawrwrrrwrwrwwmttcccgcagtctcttttagggccttctttgtgtatacagattaccttcagtcaggagaatctcatttatagaggcagaatctcctgctctgcctctactccatatcatgtggaaaacctgagtttgggtccatatttgcaacacttctgccaagcgattggctatttctgaaaactgactggagtcactccctccttgtgggtggcgttcagttttggaaggctgcttattgcgttctccatggtaaaccctgtctacagtgcattcagtattctacccacaggagctcgtaggaaacctaatcactttattttgtgcccaggttgtgtgtgtgtgtggggggggggggggaggatgttccccctcttgtggttcagtgattcccccactgtagtcttctgagtaattggagctaccacatctggtcaatggttctt

SEQ ID NO: 4806 - DNA, 1400 bp, Rattus norvegicus
gaattcatgagagaactcacactggagagaaaccctataaatgtaagcagtgtgggaaagtcttcagtgttgacagttccctccgatgccacgaaaggattcacagtggggagaagccctatgtatgtaagcagtgcggaaaagccttcactcgtcatacctcccttcggtgccacgaaaggattcactgtggggagaaaccctataaatgtaagcaatgtgggaaaggtttcatttcttccagtaactttcgaaaacatgagtggactcattctgragmkawryastrtgtatgtaaattgtgtggtaaagccttcacgggtcatagttcacttcgacgccacgaaagaattcacagtggagaaaagccctatgtatgtaagcactgtgggaaaggkttctcttctttgagtggctgtcagagacatgaacaaattcacactggtgagaaaccccatgtatgtaagagttgtgggaaagcctttactaatcccagtgccctccgaaaccatgaaaggattcacagtggtgaaaagccctgtatatgtgagcagtgcgggaagggtttcatttcttttagtaagkttagaatacatgaacggattcacactggagaaaaaccgtacaaatgtaagcaatgtggaaaagccttcactggtcacagwtcccttcgacgtcatgaaaggattcacagcggggagaaaccttttgtatgtaaacagtgtgggaaatccttttatactttaagtgattgtcaaagacatgaacaaattcacactggtgagaaacctttcatttgcaagcagtgtgggaaagcttttacccggtccagctcccttaaaatacatgagaagactcacagtagaagaaattcctaagtgtagaacacgtcattcttagcatgacagtgcgtagggcagagaaccagggccatgttgtctgtaggaatgcctctagtcatcttggtggtagtcacaaacataatagctcataccatagcgggaagttcccacatgatgtcaagagagacacataccttaaacggatgtatatagaagtcttcagttggccaacctctgagaaggtacccagtatcaaaagttgtttaacaaagttatcaaaacagttcacaaagctttatgaaaacccctgaagtaacagaattcattagtcctttttaagatcccagtgaataaacattaaatggtcagtaattcacaagataaatctctagaatgtttacttctaattttgtaaataaattttcaggtgacctaatctctgagcgtctttaagcaggaaggtgtggatttaatgggctgtgtctttacacatcatgtctattccttctcttcttgtgttggatacatagatgtatccctgatatgtttttagagtaa

SEQ ID NO: 4807 - DNA, 1400 bp, Rattus norvegicus
ctcctgaggaagcgctgctctgggcagaagcatttgatgaactgctggccagyaaatatgggctkgctgcattcagrgcgtttttaaagtccgagttctgtgaagaaaatattgaattctggttggcttgcgaagacttcaagaaamccaaatcaccacagaaactgtcctcaaaagcaaggaaaatatacaccgacttcatcgagaaggaagctcycaaagagataaacatagactttcaaacaaaaactstgattgcccaaaatatccaagaggctacaagtggytgcttcaccacagcgcagaagagggtgtacagcytgatggagaacaactcttatcctcgtttyttggaatcagaattttatcaggacttgtgtaaaaagccacagatcaccacggagccccaygctacatgagacagggagacccccaccgaggacattccattytgtctcccgagagcaaaggctgtaacctgccavrarraaaaarmmaamwgaccttgaattcagcctgagtgttaggaaaacatcgctcagaactattgattcaatgttgggtagtgaatcaggaagccagcaacctakgagagtctctgtgagaagtttcccttgctgtgtgaagagcagagggrrggaacagggttctgaatgggttcgtccytgtcaggaaagcagggtgtgagatgaaagatacaatggaatgttgttggagcatttaaaatcaataggtctgggattatgtggccttagctarctggctgtacacctttccctgaactagtccatgttmccacgtagtggttttagtycwagttttaatattttagtactaagtaacawtataatgtttactgtgtgcmagggwgttgactgacgttcttaggactacagatcattaatactattgtgtcaygtaksactgaaactgamaaagcgtgtttgcattgttaaatggtgtgtgtgatagagtgaatgctgtgccgtgctgtagaaccagtgtccgttccgagtgccaaaaactgtcttgcgggcagctaaactctgaagtggtttttkwwtwyttttgaataaatttattttgctaaawaawrwmmwwraamawwwrraarwmmavatgtggttctgttgttcgatttcagtaactggaaacatgtcasatataagagagaatgactttctagtaaagaggtatcagtgtgggttaattgttgtgcctgtccactgakaaatcgacagccctgagaagtgaagaatgattgcttccaggaagatgttctctttaatcctatagacatgatgtagtcttaagaaaatcagatcacattcctaggaccactcattgtgaaagtcaaatgtgttatttaataaaaraaaarraaaaammmvmwmrwrmmg

SEQ ID NO: 4808 - DNA, 600 bp, Rattus norvegicus
gatgtcaggctcaaaccacttctcaggttaatggaccctgtccgttgctctgtgcaactgctagcagtattttaagggrgaagataagscmgggagagagtaggaggtaatttcccasytgsccagctggtgggggacaggtgactagrgcgcggctggcgactgctctttytaatttcastgtgcshtggaakmcagccatcagtstgggattarctgatgagagasccgcaaaragaaacagaggagtytggcgacaacagakkyamdastgactggctgttttgtrgacttgctgtmtgrtgagcccagtagttgcgcaagggagtgaaaacacagtgtttaggtttaggtttgtagtgtttggttttgtgcctcccctctccagtgttgggaattgaacccagggcaaaggcattaagtgtaccmctgacctgtagctccaagtgatgttctgaggctccaagtgatgscctttytgaggcagtcaatttaattgaggttttggaagaaaaaacttgttcatgggctgtttctattttaaaagatgtgaagaaaaaaammawwaaaawwwtwaamgcrmaaaaaaaaaaaaawaaa

SEQ ID NO: 4809 - DNA, 1400 bp, Rattus norvegicus
gcggtgaaagcctctcccaagagggaggacactttacagtagatagagcacttagatactggtcctccctagcatggagatgtcaggagtttcatgacaatgggctgaaactctgagtctagccatcctcatttcctttcagaataaataagtaaatttatgtgacatggagcagaaaactgaaaaaaaagtttggtaagaatttaacatccttggcctcagttgaaatttcttccctacgttttgataaaaagcgtcatgttttcatgattcactggtgtgccaatgattactcttggttttaggaatttctgtatacaaaatcattaaagagaaggaatgagttttcaagttctaggaccgactatatttttaatgttttgtagttttttttaaccattagtatcagcattgattcagtatttgacataataaaatgcattcaagttcatagatttttgtattttttattagcgtatattgtatgaagtaatgagttcgttttccttaatgtgtacgatgtatctgtatgatgtgctttgattatatccattgctcttaccctcacctccacctcctggttctcttcttcctcccagagagttcccttcccacttgaattgttgaccctgggattctgtgaatgacagaaawtgtctttggttatttttccmcatctgctttactgtgtttactgtaatgttcyccagttctatccatttttcgccaaacaacaggattttggcttctttttttttttttttttwwytwwttyyaactaatawgttyktcatagtgtctgatgcyttaatgaaggggtraaaaggtcymmawrwrrmwwwwmwhhtgwtygtttyyttgwttaccatattcctyagagatttcaargaatccmamgtgagaaaytgcrgacctcctcctaagaccattacttgcratsctgatgccctgcytcttgctttcttgaaatgggaatggtttatgttgaatcatgccagtgscytctkggcgttcctttgttctcttgcaaacagggsctgcatgaataawctatgttmccaagaaagcctgacttacttctggctaaagaactacagtgtcataractgagctttgactgccgctgactgagwcagatgtgtgtctacaagttcctggagccctgttagaacttaactgttctttactttttagcagttgtttaagaagactagcggacatcctttttcgaatgctaagcctgagttcctagttaacccttagttcaagtttttgtttattgaatgctaatgttttctgatttttataatctcacttcttcctgtattaatgacaattatccyyaaaataaagattgagatwtttttgcstmvwdaaaaaaaaaaaaaaaaaaaaaaaaa

SEQ ID NO: 4810 - DNA, 600 bp, Rattus norvegicus
gaagataaacggcggcmccagtttccaaggcaagaggaagaaacggcgtgccattggaacragactcccttggtgcttgsgaatagagactgctctgctcacagtgtggaagctggaaagcgtccgctcctgatccagcctcagctaygtggctgctttgcaggatgcacagatggtctcttagagctggggacttgaagcactcattttgctcatcccttcaagagtttgagcaccagccatgcaccaggcactgtgcccaggcctcgggagatgagcatgggtctgtgctagctggcgctagtagaaagccagggtgttcgagatgagaaggagccatgccccaacattcttctgtgccctttggcttctaataaaatgggcctggggtgttgtctaccgccgagttytaggtaaagcaggaacccacctcgacaagtagtaatcctttgktttgaaaacatctctttccaaacctgttcttagtagtacgtttaaaaatttgtatactgtatatattgtaaatgcatataatatataaagttatatatttwtarrwaamawrarwwwawmwmwwwagctgaaaaaaaaaaaaaaaaa

SEQ ID NO: 4811 - DNA, 600 bp, Rattus norvegicus
atggtccagatccttgcgacatggttaagcagcccagataccgaaaaggacctgatgtctgctttgataacaatgtgctggaggattataccgactgtggtggtgtttctggattaaacccttccttatggtctatctttggactccaatttatactcctttggctggtatctggcagcagacactatctatggtgaccctctaaacccatgatctgcaacttaattccatgccctgccaaaacatgagccctcagttacattaaaatagagccckttgaagaagctccacagarccttagctgggcctytaccctgatgtaactgtgaggcttagattcctgaccatcgctggctgcatgtcagggtgttggaaactgaaactcgtgtgaacatgctgcatcatctgtgtccaacatcaaagcaaagctstactcattctctgtgggaggtttgggagttcgctgttgcactgttggagattacgtggaaaaggctcccccacgcaggccttatgaaaagaagcagtcttgactttgacctagcatttcaacytgytgcagttttmccawgaararraarraaaaaaaaaaaaaaaaaa

SEQ ID NO: 4812 - DNA, 1400 bp, Rattus norvegicus
gacatcgctgcggaactcagtcacgtggctcagcaggtcatcataagctccagaagtggttcttgggtgatgagccgggtctggaatgatggctacccttgggacatggtggtgatcacacgatttcaaacatttctcaagaacaacttacccacagccatttctgactggtggtatatgaagcagatgaacgcaagattcaagcatgaaaactacgggttgatgcctttaaatggaacactcaggaaggagcctgtgttcaatgatgagcttccagcccgcatcctgtgtggcactgtgtccatcaagcctaatgtgaaggagttcacagagacctccgctgtgtttgaggatgggactgtgtttgagggcattgactgtgtcatcttcgccacaggctatggttatgcctaccccttcctggatgacagcatcatcaaaagcagaaacaatgaggtcaccttgtacaaaggcatcttccctcctcaactagagaaaccaaccatggcagtgattggccttgtccagtccctgggtgctgccatccccacaaccgacctgcaggcacgctgggcagcacaagtaataagaggaacttgcattttgccttctgtaaacgacatgatggwtgryakwgrygagaaaatggggaagaagcttaaatggtttggcaacagcaccaccattcagacagattacattgtttatatggatgaattggcctccttcatcggagcaaagcccaatatcctatggctgtttctcaaggaccccaggttggccatagaagtgttctttggcccttgcagcccytaccagttccggytggtaggcccagggaagtggtcaggagccaggaacgccatcctaacccagtgggaccggtcactgaagcctatgaagacccgtgwcgtcggtggtattcagaaacctkgcttgtattcccattttctcaggctcctggctgywcsagkgctcattgctttgttcctygtgttgatctgattgagattccctctagaatgtctgcgagtcaccgacaataaccagacaagaactttgctatttaaaattaaggttttcatacctctymmwwwmmwrwwmaarawmatttgccagaactctagacatttattagtaagcaagacaatgttttgctctggcmttgtaaataagtcacctttcagaatcatgctgacccgcagtgagcataagtcatttctcctaagttccactaacaatttgtaacargaatggtatttttatggacaacttgaatcatctcctgaaagkgttgaacagattccatttctcttttaaacratgcttaaaagatatacttcagatcyrgacagggaataaagtacagcatttagaawawraaaaaaaaaaaaaaaaaa

SEQ ID NO: 4813 - DNA, 1400 bp, Rattus norvegicus
tacctcactggttacatggtcagtgggtagcagggttcagatgtctatccactgtctccaccttctctgcttcactcctaccatcctgctgtctgtatttgggagacttatagatattaaatacatggcaactttttttttttaattcatcaggatgtggagtgctaatgtgggtaggagagccagtcaccctgaggacagctgagacaatcactggaaagtatggagtatggatgagagaccccaagcccactcacccctacacccaggagaccacttggaggattgacacggttggcacaggcatccgccaggtgtttgagtacagtcagataagccagttcgagcagggctatccttcaaaggtccatgtgctcccccaggcactggaaagcacaggtgctgtggtgtatgcagggagcctgtatttccagggtgctgagtccagaactgtgctcaggtatgaactgaacacagaaacagtgaaggcagagaaggaaattcctggagctggctaccatggacagttcccatacgcatggggtggctacacagacatcgacttagctgtggatgagagcggcctctgggtcatctatagcacagaggaaaccagaggagccatagtcctctccaaattgaacccagagaacctggmacwkgagagtacctgggagaccaacatccgtaagcagtctgtggctaatgcctttgttatctgtggcatcttgtacacggtgagcagctactcttcagtccatgcaaccatcaactttgcctatgacactaacactgggatcagcaagaccctgaccatcccattcaagaatcgctacaaatacagcagcatggtcgactacaaccccctggagaggaaactctttgcctgggacaacttcaacatggtcacctatgatatcaagctctcagagatgtgaggagcctctatccctaccagagaaggcagaaaaagggggaagttccaggctcccaggtgaagcagctgcaagaggaggcagccagatgctgggggcttctgcttctcaagattttgtttgtccaggtcaatacctcggggcttgtacagttgcatatattctgctctcttctgtcagctttcaaaggggtgttcayctkkwaaaaawmawatagtgtagcagtccagagaaaaactagaagtgttgtttcctcatgaaaccattgcttttgcaagctgtatggttactacaaaccttgagaggcagcaacagttctaccaagaggagggagataacggggagggggtgaccaccactcctgtggttagaactgctcctgcagtatttactccagtttctaaggctacagatatagcatgtacattaaaccctttgccctgtgaaataaagttatcttacacg

SEQ ID NO: 4814 - DNA, 190 bp, Rattus norvegicus; identical to SEQ ID NO: 718
  misc_feature (135)..(135): n is a, c, g, or t
  misc_feature (164)..(164): n is a, c, g, or t

SEQ ID NO: 4815 - DNA, 600 bp, Rattus norvegicus
acagtgctgaccgccgcactgttgctgtccgggattccggctgaggtgataaaccggtccatggacacctatagcaagatgggtgaggtcttcacggacctctgcgtctacttcttcaccttcatattctgccacgaagtgcttgagtactggggtccggaagtgccctgaaacctgaggaacttggaagtttacgagtgaaarctacttcccttstacactgcagtgtctytaaagggggcaaatcggtttrtaacttcatcaaattskktggctytacagaaaacccagttaatcgtttcmccgatttaaaaggswygartktctatcaktycaggtbtgagttaccacatagggtaacaatggcattawcaatttktcttgtttaattarragtccagccttacrcctctcccstaatgtbtgwgatttgtgacccccccttacaggcccagghtggtacttgtargggaccagacggacaggtytcagctggcctaaarkcstaaaccttgtayttgtgtcattccttcctgagaartgaamccwtcctaaaaataaagcaaatggaactgrawwrwmwaawaaaaaaaaaaaaaa

SEQ ID NO: 4816 - DNA, 600 bp, Rattus norvegicus
tttctactggctggggttggggatcagcttggaaccatatttggaaaaggaattgccaaagtggaggacacatttattaagtggaatgttagtcagaccaagattcgtatcatctcgaccatcatcttcatcctgtttggctgtgtcctcttcgtggctctccccgccgtcatattcaagcacatagaaggctggagtgccctggacgccatctactttgtggtcatcactctgaccaccattggatttggcgattatgtggcaggtgggtcggacattgaatatctggacttctacaagcccgttgtgtggttctggatcctcgttgggctggcctactttgcggctgttctgagcatgattggagactggctacgggtgatatctaagaagacgaaggaagaggtgggagagttcagagcgcatgccgctgagtggacagccaatgtcacagccgagttcaaggaaacaaggaggcggctgagtgtggagatctatgacaagttccagcgtgccacgtccgtgaagcggaagctctctgcagagctggcgggtaaccataaccaggaactgactccgtgtatgaggacctgtctgtga

SEQ ID NO: 4817 - DNA, 600 bp, Rattus norvegicus
agctttcactcttcgaaccatcagccactgcttacacttgggtttaagcaaggtctcttacagtccaggctaaccttgaacccctgacactcaaagcctctaccttccaagtgctaagactgcatgtattgtaccaccatgcccagcttcatttggtacagtctgcttcaacagtccatatgtcagtaagctgctcaaaccagcttaaatcctccaggatcaccaatacatggctgtcttcctcaattctgtctttgacctcacgttgccttatatccttttcccttggtagcctctttaatccctgtgtgtatatgaggaggaagagggacagacagatgacagacagacagacaaattatctaataggccacatgctyccagccccccatgctgagcctgcttctatcactgttcatttgggagacctcagacttcagtttgccttatttaaagcaagggctgctaatatttagtctctccacatcatagaattatgagggcaaaatcaagctcaatggcatcttgaaaagtacakarctmgatgatgaaaataaatgtgagacttgcctgctgtcamcararaaaaaaaaaaaaaaa

SEQ ID NO: 4818 - DNA, 453 bp, Rattus norvegicus; identical to SEQ ID NO: 722

SEQ ID NO: 4819 - DNA, 600 bp, Rattus norvegicus
ctggcccctctgaattctgtgttcaaagatggtgtcccccgcattgacggccaaatgaagactttgcttctgaaccacatggtcaaagggcagttggcctccaaatatttgtactccggacagacagtggacacactgggtggcaaaaagcttcgagtttttgtttatcgaaatagcctctgcattgaaaacagctgcattgccgcccatgacaagaagggacggtatgggaccctgttcaccatggaccggatgctgacaccccctatggggactgttatggatgtcctgaagggggacaaccgttttagcatgctggtggccgccatccagtctgcaggcctgatggagaccctcaaccgggaaggggtctacactgttttcgctcccacgaacgaagcgttccaagccatgcctccagaagagctgaacaaactcttggcaaatgccaaggaacttaccaacatcctgaagtaccacattggggatgagatcctggttagcggaggcattggggctctggtgcggctgaagtctctccaaggggacaaactggaagtcagctcgaaaaacaatgtggtgagtgtcaataaggaacct

SEQ ID NO: 4820 - DNA, 600 bp, Rattus norvegicus
tgtggtcatgtgtttcaccagaattgcattgttatgtggttggctgggggccgacactgttgccctgtttgccgttggccttcatataagaaaaagcagccatatgcacagcaacagccgttgtcaaatgatgctccatcttgaccatgtgcaagttgtccaataagctttgagtatcttacagcttgcctttttaatgttagtcacaatgtttttgtggtttgaagtttagtttaatgttaskgcagwgrcaggaaatacacattatgctgatgttgatgacagaatttatttggatgccttgtgtgtcaattgaatgcatacyaaactgtwaawaaattatttacagcattgaaaattcagaagttaatggttttttgtaagcacaaaasargwatggtagaaatttatcttagcaagactttatgaggcaggatcaaatcctagtgggcctgagctgatttcttaccctaaatgttttttccctttttacaatctmtgtccagcacmtyttggttaaataatgtatgctmtgwgacatgaaattaaaacagatctrtaaaataaattattttaaargcaaaaaaaaaaaaaaaaaaa

SEQ ID NO: 4821 - DNA, 600 bp, Rattus norvegicus
tgcytcactcgtgtttgggktttagaaagagatgaatgggaagacagagctgtgctcaatgagggtagaagggcgaggctgaaccttctaatgggccgaacacaaacacaaagctagagggttcgagcggccatgacgttgttcttcatgaagtgggctttcttctcttatttcggttattttgatggaatgacttaatcaacatgtcgatggcttatctgtgggtgccatgggtgacgatgttcgttttaagcttttgcctgtagtacaagcacatgatgctactaaatattttkccmcttgsarrctgtgagctggttgttgcattaaacacrcaaacgmaatcmcaaacamwrwrramwwwtactcaagctggtctttcattcccagtgtagggaatcctgcctataaacaagagcaatcactccactgtgacgctgcgcagttagggggctaggcgggcattgtgcactgtagatcagagagaccagatcgtcctttgcagttgaagtgttttcccatcccaatccgaaggggggcgggaaatacatccgcggggaacctggtttgcagggaccccggctggaaaaatcggctccg

SEQ ID NO: 4822 - DNA, 600 bp, Rattus norvegicus
tggagagagacaccatcctcgtgtgcttggattgttgtataaaaatagtgaatctccaaggaagattgaaatccagcagaaaattatcttcagagctcaccttcgatttccagatagaatccatagtttgtctacaagacagtgtgctagctttctggaaacacgggatgcaaggtagaagttttagatctaacgaggtaacacaagaaatttcagataacacaagaatcttcagacttcttggatctgacagggttgtggttttggaaagtagaccaactgacaacccaacagcaaatagcaatttatacatcctggcgggccacgaaaacagctactgacactggtgtcgtgacagtgacctgtggagacagggggccacagccgctgcaaccttagtggatccgcgaagctatgcgggcgctgcaggaacctggctctgttccttatagtttactgtggcgaggcagatgggagaaggctttgttttaagtggtatggatctgtttagcatattgaacacacaagtgcttcagccattgttatgtaatctttgtacatagaagcagtatttttctgtgagacttcatattgctgaag

SEQ ID NO: 4823 - DNA, 600 bp, Rattus norvegicus
gcccttctccggaggcagcttctttgagcacgagggtcgcccactgtgtgaaaaccatttccacgctcagcgtggttcgytgtgtgccacgtgtggcctccctgtgactggccgctgtgtatctgctctgggccgccgcttccacccagatcactttacctgcaccttctgcctacgcccactcaccaaaggctccttccaggagcgtgccagcaagccttactgccagccttrcktyctgaagctctttggctgacctcytcttgkgatcacagacctccaaaaccacgcctccaaaaacctgttctccctgaaaaagactgggccctccagatccctagctctggagctgcccaggcattcttgsctgtactyccacctycatycccactatggsmcgrssrctgkarrgtgctccaggtttgtcaagctcagcaagggccccactagctctcactttgacacgattctggttttmtaatctgacggattagaggccaagatgtcccwgttcacccatrgctcactgttctgtactttttttttytacaaacataaaaacacgctccmcawmwmammrwraaaaaaaaaaaaaaaaaa

SEQ ID NO: 4824 - DNA, 768 bp, Rattus norvegicus; identical to SEQ ID NO: 728

SEQ ID NO: 4825 - DNA, 1400 bp, Rattus norvegicus
  misc_feature (1360)..(1360): n is a, c, g, or t
aacaayaagatctgtgatattgccatcaactgggctggtggtctacatcatgccaagaagtttgaggcctctggcttctgctatgtcaatgacatagtaattggtatcctggagctgctcaagtaccaccctcgggtgctgtacattgatattgacatccaccatggtgacggggttcaggaagccttctacctcactgaccgggtcatgactgtgtccttccacaaatatggaaattacttctttcctggaacaggtgatatgtatgaagttggagcagagagtggccgctactattgtctcaatgtgcccttacgggatggcattgatgaccagagttacaagcaccttttccagccggtcatcagccaggtggtggacttctatcagccgacstgcatcgtgctgcagtgtggcgctgactccctgggctgtgatcgattaggctgcttcaatctcagcattcgaggacatggggaatgtgttgaatatgtcaagagtttcaatatccctctcctggtgctgggaggtggtggttacaccgtccgaaatgttgcccggtgctggacatatgaaacatctctgctggtagaagaggccattagtgaggaacttccctatagtgaatacttcgagtactttgccccagatttcacgctccatccagatgtcagcacccgcatcgagaatcagaactcacgccagtatctagaccagatccgccagaccatctttgaaaacttgaagatgctgaaccatgcacccagtgtccagattcatgatgttccagcagatctcctgacctatgacaggactgacgaggccgatgctgaagagaggggtcctgaggagaactacagcaggccagaagcacccaatgaattctatgatggagaccatgacaatgacaaggaaagcgatgtggagatttaagagcagcatggatgccgtgtccccaagagttccttgtcacctctgtggtgggaaggaaagtattgctctcccaggtctgaactgggtatccccagggtgtttactaactctggtaacgggtttggaaaccacatctggttctagagtcaactaccccctttcctcaaactctcatatacccgatggacaggtctctggaacattatgggtaatgagccctagcagctgaccccagcccctcttccccttatttgttcctctgtccttccagcacagagactgttagagatgaaagtctggacggtactaaggtcccctctgacttccttctgggttctctactgcagttcttgcttccatgcaaggtgaacctgaggggaggaaggcatgccaaccggctttatgtccattttactgtttttgatcntaataaaccaattggtattttttgtaaaaaaaaaaaaaaa

SEQ ID NO: 4826 - DNA, 600 bp, Rattus norvegicus
accatcccaaattgcagcagttgtggctgaaagcgcactacgtggaggccgagaaacttcgcggccgacccctgggtgccgtgggcaaatatcgggtgcgccgaaaattcccgttgccgcgcaccatctgggatggcgaagagactagctactgttttaaggagaagtctcggggcgtgctgagggagtggtacgcgcacaacccttacccctcgccgcgggagaagcgggagctggccgaggctacgggcctcaccaccacccaggtcagcaactggtttaagaaccggaggcaaagagaccgggccgccgaggccaaggaaagggagaacaccgaaaacaataactcctcctccaacaagcagaatcaactctctcctctggaagggggcaagccgctcatgtccagctcagaagaggaattctcacctccccaaagtccagaccagaactcggtcctcctgctccagagcaatatgggccatgccaggagctcaaactattctcttccgggcctaacggcctcacagcccagccatggcctgcaggctcatcagcaccagctccaggactctctgctgggcccgctcacctccagtc

SEQ ID NO: 4827 - DNA, 600 bp, Rattus norvegicus
gtgggcttcgtcactagcttcgtgggttggattggcatcatcgtcacaacgtccaccaatgactgggtggtgacctgcagctacaccatccccacctgccgcaaaatggacgaactgggctccaaggggctgtgggccgactgcgtcatggccactggtctcyaccactgcaagcccctggtggacatcctcatcctccctggttacgygcaggcttgtagagccctcatgattgctgcctcagttctgggcctgccsgscatcttgctgctgttaacagttctcccctgtatccgaatgggccacgagcctggagtggccaagtacaggcgagcccagctggctggggtgctccttattctgctggctctctgcgccattgtcgccaccatctggtttcctgtatgcgcccaccgcgagatcaccatcgtgagctttggctactcgctgtatgcgggctggatcggtgctgtgatgtgcctggtgggtggctgtgtcatcgtctgctgctccggggatgcacagtcgtttggagaaaaccgtttctattactcttctggttccagctcgccaacgcatgccaagagtgcccatgtctaa

SEQ ID NO: 4828 - DNA, 600 bp, Rattus norvegicus
gacatgaacctgcgtggctgcctggagaacatccgcgagactctagaaagccctgcccactcgtccacgacccacctcccgcgataaggccacacccccacctcaggaacgggactcgaaggaccatcctgctagatgccctgcttccctgtgaacctcctctttggtcctctagggggcaggctcgatytggcagccacttccttggtgctaccgacttggtgtacatagcttttcccasctgccgaggacagcctgtgccasccacttgtgcatggcagggaagtgtsccatytgctcccagacagctgagggtgccaaaagccaggagaggtgwttgtggagaaaaagcacaatctatctgatacccacttgkgatgcaaggacccaaacaaagcttbtcagggcctcctcagttgatttctgggcccytttcacagtagataaaacagtckttgtattgattatatcacamtaatggatgaacggytgaactccbtaaggtaggggcaagcacagaacagtggggtctccagctggagcccccgactcttgtaaatacactaaaaatctaaargtgmmwaaaaaaaaaaaaaaaaa

SEQ ID NO: 4829 - DNA, 1400 bp, Rattus norvegicus
  misc_feature (785)..(785): n is a, c, g, or t
  misc_feature (1302)..(1303): n is a, c, g, or t
  misc_feature (1315)..(1315): n is a, c, g, or t
  misc_feature (1325)..(1325): n is a, c, g, or t
  misc_feature (1351)..(1351): n is a, c, g, or t
gaccttccaagccttcattgacttcatgtcaarggagaccacagacacagacaccgccgatcaggtcatcgsctccttcaaggtcctggccggggacaagaacttcatcactgytgaggaacttcggaragagctgccccctgaccaggctgagtaytgcatcgcccgcatggcsscctaccagggccctgatgctgctccaggcgcccttgactacaagtccttctctacagccctctatggggagagcgacctgtgagccctcagccaccctgaacagactcccttggcctccggaggrhtgaggagccytgccccaccytgactcagkmwckakgcwaagagctctktgtggtytctagggkvwsaggcagggaggggctaggcaggcctcttttctcagtctgryagggragatgrrggcwtgtcgatcagcgcttctggtctgctaaatatatatgttgtattgtgggttcttagcmtatatgaaagraacaacrracamvwrarycmytmwrrvmmmmararasawmkwwhwaaammcagstymmmtstgcccmtgaggccagccccktcaaagcctctcacatmcaggccaaagccccatgtgccttgthcaggaaccgcmtgccmtaagaagtccagcagagggcacccagctyccstggaccagattvtagtggctcctcccacctychtgccctgtgtcacaccaggagcagaggacctgccataacccctctctgcctccacagtggstgmtggggcaatcgmyyyykyyswyntggcmktgtttcacmtgggctmtgagtctcagattttytaaggrccawarccaacaaaacmcamagaayggmacmgaaacaaacmaacmaaawaatcmttwrmrrmamrarrarrraaagaaaaaaaaaagcttaaaaaamkscwmkadwwwwttwwwwyyttyywgagaattactatttmctttattaamttmcggakwkrytatataawtatatatccatmtagctgcawatmtctgccacctctcycactmtsatamtgaaracatakctratyygctgccytcccasccccmtcytgattttcccmwyatgrcgstgggcagggktmwacggkgacctcctgaggtggaggtggscgmtggcytgcctgcmtggtcgttaatgggtttctctcmayccasccccttgrgwtyattctgattgattwwwawwtwmwtgshtyvtggataaaccaccctctggggatgggagaataaaacmagkaatattwwtwrrarrramwmdrvwvdmrdvnnvkccstgcgtcnccgtcattcnccagggagcttgcagtgctcactggnccagtgcctgtgtgtggtttatgggcctccatgcagggactgacatgca

SEQ ID NO: 4830 - DNA, 600 bp, Rattus norvegicus
ctatttgaagggtttccctatgagaaagtggtacagaggatcctctacctccaggtcctggattatgaccgtttcagccgcaatgaccccattggggaggtgtccatccctctcaacaaggtggacctgacccagatgcagaccttctggaaggatctgaagccatgcagcgatgggagtgggagccgaggggagctgctcttgtctctctgctacaacccctctgccaactccatcatcgtgaacatcatcaaagctcgcaacctcaaagccatggacatcgggggcacatcagacccctatgtgaaggtgtggctgatgtataaagacaagcgggtagagaaaaagaagacggtgacaaagaagaggaacctgaatcccatcttcaatgagtctttcgcctttgacatacccacggagaagctgagggagaccaccatcatcatcactgtcatggacaaagacaagctcagccgcaatgacgtcattggcaagatctacctgtcctggaagagcggaccaggcgaggtgaagcactggaaagacatgatcgctcgtccccggcagcctgtggcccagtggcaccagctgaaagcctga

SEQ ID NO: 4831 - DNA, 600 bp, Rattus norvegicus
ttcataagttttaccatgatgccaaggagatctttggccgcatccaggacaaacacaagaaactccctgaggagcttggaagagatcagaacaccgtggagactttacagagaatgcacaccacctttgaacatgacatccaagctctgggcactcaggtgaggcagctgcaggaggatgcagcccgcctccaagcagcctatgcaggggacaaggctgacgacatccaaaagcgtgagaacgaggtcctggaagcctggaagtccctgctggatgcttgtgagggtcgcagggtgyggytagtagacacgggagacaagtyccgcttcttcagcatggtgcgtgacctcatgctctggatggaagatgtcatccggcaaatcgaggcccaggagaaaccccgggatgtgtcatctgttgaactsttaatgaatartcatcaaggcatcaaagctgaaatcgatgctcgtaatgacagttytacagcktgcattgaacttgggaaagccctgctggcaaggaaacactatgcttctgaggagatcaaggaaaagttactgcagttgwcggagaamaramawraaaaaaaaaaaaaaaaaa

SEQ ID NO: 4832 - DNA, 600 bp, Rattus norvegicus
  misc_feature (135)..(135): n is a, c, g, or t
ggggtaacattgctacccctgctgttgtttctacagtggcaaatgaaacagtgctctgatgcattgccaaagaatgtggaaaaccgttttcttttgttcaaccttctgtaagctgtgtaggttctcaaggctaanttatctgagaggaagggacctgcagaggccatgaccacagattgttgtacagctaggggctaaccttggtactcaattcagtataactgctgctcctcccaaaatatgctcagttctattagattctatcagaagtacaaacatcagcaaaactttgcctcctaagatataaaatctagaaacagagctgtgttccatcctctggaagatagtgcccaaatacaacttatatgttaagagcacagaagggacttatctttagttgaatgccactgtgtgccagtcacttccctatctttaatgccatcaccactctttctgggcaaggtcatcatctctgttcagatggggaagttgaggcccagagaatttacagcacttgtctatttctgttgtcatggatgaagctaggtttgtctctcaaatcccatactgtcaaaagttaaagtatgatgcttctcgtgc

SEQ ID NO: 4833 - DNA, 600 bp, Rattus norvegicus
ggcagctcatgccatcctaggagggctgcacctgaccttggactgggccgtgcggggcctgctgttgttaaagactcggctgtaactcaggactgaaagccaccatcgacatcgtcctttaaagccagatcttatttatttatttattttggtacttggagcgggggagcatgatgaacaggggcatgccacaccccaaacagccacacccagctagataaagtccttccaggagacctgggtgagggggatcacctatggcttatttatacttatttatttaaagaattggggtgggtgggtgcatctgagaccctgaggagcagggaactgagatcctgggtcctgggtctttacgaagtctattcacagtgtcttcctcacttttttattatttattaaacaattacttttatattaagaggaggaaggagggaagccgggcgtggtggcgcatgcctttaatcccagcactcgggaggcagaggcaggcagatttctgagttcgaggccagcctggtctaagagtgagttcgtgagttccaggacagccagggctacacagagaaaccctgtctcgaaaaaccaaaaagcggccgc

SEQ ID NO: 4834 - DNA, 1400 bp, Rattus norvegicus
tacgtctgtcggacgctggatggtgtatttgggggcatggtgaccctgaagctgggctcccccccagctcggccggaggtctcctgccaagcagtagactatgaaaacttttcttgtacttggagtccaggccgggtcagcggtttgcccacccgctaccttacttcctacaggaagaagaccctgccaggagctgagagtcagagggagagtccgtctaccgggccttggccatgcccacaagaccccctggaggcttcccgatgtgtggtccacggggcagagttctggagtgaataccggatcaatgtgactgaggtgaacccactgggcgccagcacgtgcctactggatgtgagattacagaggatcttacgtcctgatccaccccaagggctgcgggtggaatcagtacctggctacccgagacgcctgcatgccagctggacataccctgcctcctggcgtcgccagccccacttcctgctcaagttccggttgcaataccgtccagcacagcatccagcctggtccacggtggagcccattggcttggaggagttgataacagatgccgtggctgggctgccccatgcggtacgagtcagcgccagggactttctggatgctggcacctggagtgcttggagcccagaggcctggggtactcctagcaccggtcccctgcgggatgaggtacctgatgggagccggggacacgaacagaagctagaggcagcagctcaggaggacagccccgctcctccaagcccttccttgcagccagacccaaggccacttgatcacagggaccccttggagcaagtggctgtgttagcatctctgggaatcttctctttccttggcctggctgttggagccctggctctggggctctggctgaggctgaggcggagtgggaaggacgggcctcaaargcctggctkctyggmdccvatgrtcychskgkwcwwgcttccwggaatcccaamcctgcagaggaccccagagaacttcagctratykcatctgcaaccctgtcagactggggyggywmrakggacagbcaggaggaggcaggacagcggatccctatggatggaggtctcasttcsaagtctkgascacttttctttgacacctgaactccaaacttgctgccasctgctcacycyctssacctctgatsccgyccytgagktgraagkccbcytgaggagcgtgtatcgaagtctgtgtccctgtgactgtgtgtgtgtgtgatggggagagcacgttchccgtatgtgtgtgyatmgatgwttggagagtgtgtgtgtggtcttgggcwtgrctctcytggggmgcatggagcgtgaaataarraggcrgacgtttttggararaaaaaaaaaaaaaaa

SEQ ID NO: 4835 - DNA, 544 bp, Rattus norvegicus; identical to SEQ ID NO: 739

SEQ ID NO: 4836 - DNA, 314 bp, Rattus norvegicus; identical to SEQ ID NO: 740

SEQ ID NO: 4837 - DNA, 600 bp, Rattus norvegicus
tgaggctktttggyrysacwggaaactgygctgcctgcagcaagctsatcccmgcyttygagatggtgatkcgkgccmrggayaaygtstaycacctkgactgcttcgcctgycarctctgcaaycrgagattttgygtsggagacaaattyttcytraagaacaayatgatyytstgccagacagmctacgaggaaggcctaatgaaagaaggttacgcaccccaggtccgctgatyccgcaacatcacccctaacaacgcaaagcactccatccttttatccgttgtgctcacgtgtatataagaaccgacacaggaacctacaaaatagggtagcgatagagcggcagaatggccgtgtggaagagaaggcggactgcatctgtatgtagtgaaatggccccagtccaagagttgaatgttcattattaaagagagagaaaggaatgtatatattgcgggatttttttgcttgcttatttgtttctgtgtcacttggcatgagatgtttattttggactactgtatataacgtattgtaaatccgaagcacaaatgtaatacagttttattgtgttmccmaaaaaaaaaaaaaaaaa

SEQ ID NO: 4838 - DNA, 600 bp, Rattus norvegicus
tactctgggaaatcttcacactgggtggcaccccttacccagagctgcccatgaacgaccagttctacaatgccatcaagaggggctaccgcatggcccaacctgctcatgcctccgacgagatctatgagatcatgcagaaatgctgggaagaaaagtttgagactcggccccccttctctcagctggtgctgctcctggagaggcttctgggtgaaggctataaaaagaagtaccagcaggtggatgaggagtttctgaggagtgaccatccagccatcctgaggtcccaagcccgcttgccgggtctccacagcctccgatcccctctggataccagctctgtcctctacactgctgtgcagcctaatgagactgacaatgactacatcatccccttgcctgaccccaagcctgatgctgctgatgagggcctcctagagggttcccccagccttgccagctccaccttgaatgaagtcaacacttcttccaccatctcctgcgacagccccctggagctccaagaagagccgcaagcagagcctgaggcacagctggagcagccacaggattcaggctgcccaggacctctggctg

SEQ ID NO: 4839 - DNA, 1372 bp, Rattus norvegicus; identical to SEQ ID NO: 743

SEQ ID NO: 4840 - DNA, 600 bp, Rattus norvegicus
aacgccagggcagttgtgaggatttgcccatcccaggcacctaccatcgtggacggacctcaggaccaggcagggctcagggttcctgggcagcccctcctcagaagggtcgactgctctatgcccccctgttgctggtggaggaatctacagtgggtgaaggataccttggcaagctcggsggcccactgcgtaccttcacttgtctgcaagtgcctggagctccttcagatcccagtcaccgcaagaggggcagtgctgacagtttggtggaggctgtgcttatctccgaaggcctaggcctctttgcccaagacccacgatttgtggccctggccaagcaagagattgcagatgcatgtcacctgaccctggatgagatggacagtgctgccagtgacctgctggcacagagaaccacctccctytacagtgacgaggagtctattctctcccgctttgatgaagaggacctgggagaygagatggcctgygtccatgccctctaaactcttacccctcacctatcgctcaataaattccctgcccttccttcccccagagggaggcaagcatggmccacaaaaaaaaaaaaaaaaa

SEQ ID NO: 4841 - DNA, 1313 bp, Rattus norvegicus; identical to SEQ ID NO: 745

SEQ ID NO: 4842 - DNA, 797 bp, Rattus norvegicus; identical to SEQ ID NO: 746

SEQ ID NO: 4843 - DNA, 600 bp, Rattus norvegicus
aatctctagcgtaggytgagctctctatatggatgaaatatgatagaggcttaggactcgaaaaggtgataaaatatttaatggcgaggcatacgaggagtcctcaagcctytgggatctytcgtgttctttacaaaatgaatgcattggccytggtaacaaggtgctacagtagttgacgrgattgtaaagtmggywcgkagcgtatcccacttattttaatatttatgtttcagtrmttggywsgarrtattccatttttatgcaagaagggagatacagagacaaggctgacttggcagtgtttatagggcttttwtyttttaagttcaatcatgtctgtggtccagaggaagttatttaatatgcatctttaagaatattataaaaaaaaaayytyrmgcmwmgkgsckcttcmtatgcactgtggcttgcggctgtcatggcggytgctcccgaccgtcaactccaccgtgggtgatcaccgaatcttttgaatgaactgtcaaagttaatgctcctcaccccacctcccccaacgttggaaaatytgaaagtcacttgtttcatggctcaargrgtammamaaaaaaaaaammc

SEQ ID NO: 4844 - DNA, 600 bp, Rattus norvegicus
gtggctcatctgtggagccctggctgcctgttgcggacactgctcatggtggctccttttcatgaaagggaacatatgagttatgttttccccttccaagccagagactcagtgagagggaaagaaagagagagagggagggagagagggagagagagaacgcaaaggggcagccaccccacagagaaatcaaatgaacacaacttgctgacgatggccagtgaataaaataaataatgtttttaatatatatatatatacatatatatgtgtatgtatatatatatgactaagcagacctgtgtaaggcagacaacggactctgccccaaagtcctgcatccctagtttgcccggactcccaaagactggcaggctgattggaactgagcagacagagttcctttcctgtgccagcacgtcacaacctcctgaccacccggccctgctgcttgcagtgacctagtccagaatgcactgtaggtggaaggccaggaagctcagacacacccattgaaactaacacatacacccgcatgccaaaaccaaccaggcaacagctcaggttccgtctcccctaccgtgtccgcggggaaacgcc

SEQ ID NO: 4845 - DNA, 1400 bp, Rattus norvegicus
cacaccaccacccaccaatcacaggaagcagtatgcaccacgctcacttcttgcttagtgtggacacaatactggctgtggcctgcattccacacttaattcmtscargcysataggarcaygaagatrsggsatgtctcaaaccccctcagcacctctgccccagttgatgccaycgctgggcccaatctcawtccasacctcattaccamratcccctgkyctcgctggatactctttattgccatccttgctgctggartcctcttaktctcctgtctgctctgtgtcatctgttactgttgccaccgccaacgccacakgaagcawcccaaggataaagagactgtgggcctgggcastgctcggracagcaccactactcacctggttcaaccagatgtggagtgcctagagccctgctctggaggggaccaaccgtgggggcaactgctgctctccctggagtatgattttggaagccaggagattagagtgggcctgaggcaggctaaaaatctgaaggctgagggcacagcagacccctacgcccgtgtcagtgtttccacccaggccgggagaagacatgagacaaaagtgcaccgtgggacactctgtcccatgtttgaagagacatgctgcttcctggtcccaccagcagagctgcccaaagccactctgaaggtgcagctattggacttcaagcggttttcagaacatgagccactgggggagctccagctacccctgggcactgtggaccttcagcatgtcctggagagctggtaccagctaggccctccaggttccactgagtctgagcagatgggggagctgtgcttctcactacgctatgtgcccagctcaggccgcctgactgtggtcatactggaggctcggggcctgaatccggggcttgcagaggcctatgtgaaggtccagcttatattaaaccagagaaagtggaagaagaacaaaacatcctccaagaagggcacaactaacccctacttcaacgaggccttcgtcttcctggttcccgttasccagctccagagcrtggacctggtgctggctgtctgggcccggggcctgcagctcctggctgagcctgtgggcaaagtgttgctgggtccccgggcttcaggccaacccctacagcactgggcagacatgctggcccatgctcggcggcccatcgcccagtggcaccacctgcggtcacccagggaagtggatcgtgctctggccctgcagcctcgtcttcccctgcttaggcctcgctcctgaaagaaccgtaggtctcagctttccccagtggagagctgtggccatttgtgcaggctcttcggatctctctgtaataaatgcatcctctctcacaaaaaaaaaaaaaaaaa

SEQ ID NO: 4846 - DNA, 600 bp, Rattus norvegicus
gcgtgagagtctcagtgtgatctccagaatccatgtgaacagacagacattgtggcacacattggtcatcccagagctggggaggcagagacaggaagatctgagcctcactaaccaggccacctggcctwacttacttacttggcaagctccaggagagtgagacgctgtctcaaaaaaaaaaaaaaamaamtmvrrrrrssrrcmmvggtrsmwaktgcctkagkaatdwcacccgaggttgacttctggcctccacatatacatgtgcacaagttaaggcccatatttatatttacataaagatgcacgtgagcaatacacacacatacacacacaccgagagagagagagagagagagagagagagagagagagagagagagagagagcgagagcgtcagccatgtcatctcctacttgcttttacacctgatttacccttttcttttgtgtcttttacctcctctattgccatcgttcgtttaccatctccctttgcgttctctctttctacttcgcctcccctcactctcccttcgctcctcttttattttctctccctatttctctttcctcttagctctccctcccctttcc

SEQ ID NO: 4847 - DNA, 600 bp, Rattus norvegicus
ggaggaggaagagacttttgaatggttctattttaagcaaaggaaaggcaagacagcckwrkttctttaagactccaccagggggctctcactctaggcccctggcgtgacaaaggaaaagaggttcctggaatcatttgatactcacgtcagaaactcgggatgagaactttgtatggcctcagttcatcacttctccaaaagggaagaaatgtcccctgccatgtactcacagtgttccccaagagaagtgacagtgtcccgagtaacgggcatggagcacacctgtccacagagggtgaccctcggaagggacaaatgtgcttttctctatgagactgtgtggtttctggtcacacatgctgaacgaattctgttgaaatcatgggaacgtccagttttatttatgacagaatcgagttgtgatttatattttaaaatgtaatgttgaacatcaatgagtgttgcaagtaggaacccctgtaaaagctggccttttgtgtctgtgttcctgtttgcatgacctgtccaaatgagatatttttgcttwmctaaaacacgacaacatttggaaggtactgttaaaaaaaaaaaaaaaaa

SEQ ID NO: 4848 - DNA, 115 bp, Rattus norvegicus; identical to SEQ ID NO: 752

SEQ ID NO: 4849 - DNA, 115 bp, Rattus norvegicus; identical to SEQ ID NO: 753

SEQ ID NO: 4850 - DNA, 114 bp, Rattus norvegicus; identical to SEQ ID NO: 754

SEQ ID NO: 4851 - DNA, 219 bp, Rattus norvegicus; identical to SEQ ID NO: 755

SEQ ID NO: 4852 - DNA, 1400 bp, Rattus norvegicus
gggcccagctaccctcctttcctgccagaccagatgcagtcgcaagtcccctctctccattatcaagagctcatgccaccgggatcctgcctgccagaggagcccaagccaaagaggggaagaaggtcttsgscmcggarrrgaacasccacccacacttgtgactatgcaggctgtggcaaaacytatacgaagagttctcatctcaaggcacacctgsgaactcacacaggcgagaaaccttaccactgtgactgggacggctgtgggtggaaattcgcccgctcagatgaactgaccagscactaccgcaaacacaccgggcaccggccctttcagtgccagaagtgcgacaggsccttttccaggtcggaccaccttgccttacacatgaagaggcacttttaaattccacatcgtggacatgacccacactgccaggagagagttcagtatttttttttaacctttcacactgtcttcccacgaggggaggagcccagctggcaagcgctacaatcatggtcaagttcccagcaagtcagcttgtgaatggataatcaggagaaaggawgagtccaagggmcaaaaraaaaraaaaraaaaaaatactaaaaaacaamcaamcaaaaaaaaaaaamaaaaraaaaaaatcacagaacagatggggtctgagactggatcttctatcattccaataccaaatccgacttgaacaagactggactwacaaaatgccaaggggtgactggaagtttgtggatatcagggtatacattaaatcagtgacctggggggagggaagaccagagttcccttgaattgtgcttcaatgatgcaatatacatggaaagaccaccttgtatgctctttgccttctaaaaagccattatgacgtcagaggaagaggaagcaattcaggtacagaacgtgttctaatagcctaaacgatggtgcttggtgagtcgtggttctaaaggtaccaaacgggggagccaaagttctccaactgmtgcatactttgacaaggaaaatstatttktgtcttccgatctacatttatgacmtaagtcaggtaaataagcctggtttatttctgtaacattttttatgcagacagtctgttatgcactgtggtttcagatgtgcaataatttgyacaatggtttattcccaagtatgcctttaagcagaacaaatgtgtttttstatatakttgccttgccttaataaatatgtaatrtaaatttaarmaaamwwmwawwwwrwawawwwrtaaactmcaaagtaaaaaaaaaatgaacattttgtggagtttgtattttgcatactcaaggtgagaaataagttttaaataaacctataatattytatctgaawrraaaaaaaaaaaaaaaaaa

SEQ ID NO: 4853 - DNA, 600 bp, Rattus norvegicus
gatgatgacgccgtcgagaatgtcgtagttactactcctgttcctcctgctgttgctgctgctgctgctgctgctactcctggtcccagtaccaggaatgtccgggctacagtccactcggtttcctgcagggttgaagagatccctccggacgtgctgaggaacacctacttccggtccccattcggcgccatccctcctggaatgcacacctgcggggaaaaccacaggctgcacatccgtcgcaagtccatctaagtgtggggagggaagtacacggaagaatcatttgtcatgcagatgtaagtttcattgtcccaactcctctctccctccttatttattattattctctttttttgtgcttacagtcatcatcattcctttctctcttccctcctctcctgggttcatttctttccgacctttccagccaggcagagctgtccaaagggcaaatagaggcccatcctctctgaagctcgcacctgagcatgaagcatggattccttcctttctccccaccagagttatgccttacatttctccccaccctgcctcctctctctggggtggctttcctaggacaggtgtgagaac

SEQ ID NO: 4854 - DNA, 1400 bp, Rattus norvegicus
atgcccatttaaatatggatctgcatgtcttcattgaagtctttggacccccatgtgaagcttatgctcttatggcccatgctatggaagaagtcaagaaatttctagtaccagacatgatggatgatatctgccaggagcagtttctagaattgtcctacttgaatggagttcctgaaccctctcgtggtcgtggggtgtctgtgagaggacgaggagctgcccctcctcctccacctgttcccagaggacgtggtgttgggccacctagaggggctttggttcgtggaaccccagtaagaggctccatcaccagaggtgccactgtgactcgaggggtgccacccccacctactgtgaggggtgctccaacaccgagagctcggacagctggtattcagagaatacctttgcctccaacacctgcaccagaaacatacgaagattatkgatatgatgattcataygcagaacagagctacgaaggctatgaaggctattacagccagagtcaaggggagtcagagtattatgactayggacakggggagcttcaagattcttatkaagcctatggacaagatgactggaatgggaccaggccatcactgaaggctcctccasctaggccmgtgaagggagcatacagagagcacccatatggacgttattaaaaacaaacaggaggggaaaatatcasttatgagcaaacttgttactgatttcttgtatcccaggattcctgttgctttacccacaacagacamgtaattgtctamstgtttttctwtgtggtccctttcttttccccaccttcctccattcttaactctgcattctggcttctgtatgtagtattttaaaatgagttaaaatagatttaggaatatcgaattaattttttaagtgtgtagatgctttttttctttgttgtttaaatataaacmgtgtaccttttataataaaaaaaarwwrarttaaaaaaammmmmaaamawrwwarwwwmaaaagtggcattgcttgcttaaaggttctgaagtaaaggcttgtcaacgttttcttagctttgatttgaggcaccccgtaaagtcatagttgcagaatcccaaactaggctacatttcaaaattcagggctgcttaagctgtaaaatcacaatgttaacggcagtaggtgccaccatgtaaaagtgagctcagatgtctctaaaaacatttcctttaaaagcacatggcggttgaatcttaaggttaaattttaatatgaaagatcctcatgaattaaatagttgatgcaatttttaacgttaattgacttaaaacaacaacaaaattaggtttgtaaaatgactttttcattctgtgggttttgaaatctagccccagacatactgtgttgag

SEQ ID NO: 4855 - DNA, 600 bp, Rattus norvegicus
aacaatgagatcatctttaaaaatggcgatgacttacggcaagacatgttaacccttcagatcatccgaatcatggagaacatctggcaaaaccaaggccttgaccttcgcatgctaccttatggctgtctatccattggggactgtgtgggtctcatcgaggtggtgagaaactctcacaccatcatgcagattcagtgcaaaggaggcctgaarggggcactgcagttcaacagccacacgctgcatcagtggctcaaggacaagaacaagggcgagatatatgatgcagccattgacctgttcactcggtcctgcgctgggtactgcgtggcaacctttatcttgggaattggagaccggcacaacagcaacatcatggtgaaagatgacggacagctgtttcatatagattttgggcactttttggatcacaagaagaaaaaatttggctataaacgggaacgtgtgccgtttgttttgacgcaggatttcttaatagtgattagtaaaggagcacaagagtacacaaagaccagagagtttgagaggtttcaggagatgtgttacaaggcgtacctagcaattcggcagcatgcc

SEQ ID NO: 4856 - DNA, 1016 bp, Rattus norvegicus; identical to SEQ ID NO: 760

SEQ ID NO: 4857 - DNA, 777 bp, Rattus norvegicus
cacgaggtgaactaaaaggtggctgtgaaatgggagagagctgggggccctggaggaatgaaaaatctatccagatgacgttaatatctttccatcccgcctagctaccactgatctgcacccaaacctgagctcctagcagccacstytkgcagmscwcskssrwcktctacctcccaatggtggtgatgggtcttcattcaggccccatctcagaactgacaattcctggggtagaagacattgagaaatccagaggttttgctggttgctggcccctcaatctctacaggaaatgcctgtggwgttctacagtttggcaaactctccaccacwttaaggaagcttggatttggtgtatgtaaggcagcagagcagtaracctggccagtggctccttggcctttggctatgaggggctgawgtctccccacttcccaactcccccatccmtacgctgcactctgtgctcattgactcagaactgagcttgggagcttctggcaatcttctaagagccggagaatgatttggagttattttaaaagataaatattatattatatatatatttccccgaaggaaccaaagcgaattttaagatgcaatgtagaggggggtggggataataaaatatttaaaggctctatctgtttacagtgttccaaggtttaaactcgctcactgctaaaatatttgaatgtatgcttcatacakggatggtgttcaaaagacttgtaaataaagaaatcatamcctaaaaaaaaaaaaaaaaaa

SEQ ID NO: 4858 - DNA, 672 bp, Rattus norvegicus
ggcacgaggcccttaccagggtaggctttgaagacagcagttgagatgtttcctctgcaggagggttctgccttgtagaggtactgttgattcaggactgtgcccgtagaggtaccctgtagttttctggctagaaagtkcgccccttcagttcttgatagkctgttcagtwgcagagccaactggawcatagggcagcmcaccgttttccakatgacytaggacccgtcaracaacytggccamgscayghkgtsccacagcagtggaaaggaccaagcctctgtmtgttmtgttaggcctgcccatggcccctgmtgagtacccttcacyttytmrgswyraracctttgaakgattcctccataaatggttgtcytttctgtcccagwgtctctgttactttctaaaatkggkgaaccagttytacagggtcctgatgaaacctabcccaccccattgtcacytsccattcatggtgatstcgcaggttagccttggcaatgtstgcgttscctctttscttttgttgtacagtcagtactataaaatctgttttgagttttataactttgtagcattttagataaggttgtstttgtacttgtgtagagtgaaaggactgttgaataaacctagggttrgrgtgcaaawwraaaaaaaaaaaaaaaaa

SEQ ID NO: 4859 - DNA, 577 bp, Rattus norvegicus
ggccccacgctgtttcggccctcggagaaggagagcaagctccctgctaaccccagccagcccatcaccatgactgacagctggtccctagaggtcatgtcccaggtccaagtawtgctgtatttcstgcagctggaggccatccctgcccstgacagcaagagacagagcatcctgttttccactgaagtctaaaagcctggagtcagtcatctcattaaagaggcytacagaatgacccggaaacctgtgacaagagaacccacccacggagttgggaatgagacccttcttgtggtgtaacctagccattccgaagctstgggccatctgccaagagacaagtacccaaagcaaaagccaagggggcctacatgcacccaggtgtggtccgcaagccccaggctggccccagactgtacctttccctcgctgccaccagagggcaccccaagccagccmrtctgcwrgsyggacaagksaagwkwrgcksagmmkwgyskwtwyymtsmmycttaatttatcagagttttaaaaaaraaaaaaaaawmwmwamwggaaaaaaaaaaaaaaaaaa

SEQ ID NO: 4860 - DNA, 600 bp, Rattus norvegicus
tgggggtgaccagttcatcsatgagcaggacctgaactggctgcagcaagcagatgtggtagtggcggaagtgacacagccatccttgggtgttggctatgaactgggccgggcagtagctcttgggaagccaattctgtgcctgtttcgaccacagtctggccgagtgctttccgccatgatccgcggagcagcagatggctcgaggttccaggtatgggactacgcagarggaraagtggagaccatgctcgatcggtactttgaggcatatcttcctcagaagacggcttcctccartcamccaagtgcctgaccmccctactgtattaaaadgwwwattawkwttkawwwwwwdwwwwmvwawwstttwamtrmwgkmygkwtgtmrmmacmtccatcstggtgcccagaggtcagaggagggtaccattctctggaactggcattagmgatggctkcaggcctccatgtgagtgctggaaactgagcccatgccytttgcacgagtgacacgtggtgctcttaactgstgagccttctctttggccctggccstactktrytaaatgctaacccctgaaaaaaaaaaaaaaaaaa

SEQ ID NO: 4861 - DNA, 771 bp, Rattus norvegicus
gcttcaggtgttgactgaggccttccgggagaaggatacggctgtacagggcaacatccggctcagctttgaggactttgtcaccatgacggcttcaaggatgctatgacccagcctgcctaaagggtgtggagcacaccaggggatgtgggcctctcctttcctcctctcctagcaaaaagtgtttcctggcctgagctaggaaggacagaggttggctatcmtgggctgtggagtggcatggccctggagtaggggccytagagtagcaatgggttagtgtctggtcagctgtcytggcytytgscyttccccccttytccbtgatsccagtgctaagtgctcyttgghtggcmtacctgtcatctctcactgaccaccaggtcagaagagcccagtttctgcacagtggagtcagactgagcgggagggagatttgctgggaccagagcctgggattcttcagctccctcaagccttgtatyttaacattaattttcctgaagctttgcstgagcaaraagcttgggcattctgccatcttggccatatctgatgaggctcatgacctccaaaacttggacssywcgbwggcmtgccacgtthtactcagcttccctccccaggggcattgtcacatcctactgccaatgttgtttstaatttgctttttttttctttcccatttggggccaaaagtccaggaaactgtargagtcaataaaagactrcagtcccatgttwmmmmmmrwraaaaaaaaaaaaaaaaaa

SEQ ID NO: 4862 - DNA, 898 bp, Rattus norvegicus
ccgaaatgcaaagattcaacagggaaatttgggcctcctccacctattgtcaatggagacatcacctccttgtcattaccagtatatgcaccattatcatcagttgaatatcaatgccagaactattatctacttaagggaaataagatartaacatgyagaaatggaaagtggtctsasccaccaacctgcttacatgcatgtgtrataccagaagatattmtggaaaaacataayatagttctsagatggagrgaaaatgsaargatttattcccaatcaggggagaatattgaattcatgtgtaaacctggatatagaaaattmagaggatcacctccrtttygtwcaaartgcattgakggtcacatcaattatcccacttgtstrtaaaatcrcwatabawttattagtaaaycttatggatgrrbswkkgttyrgaaatrcacatgywtattaytaaywcartttsaayttacakttgaaataktgtttasctcatttcytctaataagyatataaayttttttkwtatgrtggttratcagtaayyttasvgaytgttgccacamwgcaagaabaytrmattcawarytyytaakccaaaatatgakatgtyyaaggacaaaytatgtcyaagyarramaataaatgtwagttcttywmtgtchgwwwwwawwmarramwtttyagattttcttggataccttttgttgttaggttytgattcayagtgagtggaagayayaytgaytctgayttcaaattagtattacttgycaatayataayaaccaaactatcataatatcayaaatgtatacagctaattactgtgtyctacctttgtatcaataaagaaatctrrgraarwdmdwrmwwaaaaaaaaaaaaaaaaa

SEQ ID NO: 4863 - DNA, 560 bp, Rattus norvegicus
cacgaggacacaatatcttacatgtatagacttgaaggctaactaaggatccaaggatattttcttgagtagtccctgatcaaagccaaaaaataatggaaaatggtctagaaagaactgttctcacccatggccacaagcttctggccgtcctccttacagaaagcatctagtctttggscttcctcttttctttgggatcagctgctgttccccacggattggtcaagcataaagaaggaacttggactttcattcctctgtatgagctggatggaggggggactttaggacttgctggaaggtcawagacaaaccctttcakcaggtcagatgagcttcctgsactcttggycagaaatgtakcttgatccttggatttcctgatagtagcctcctgaaattgctatggactcaacattttccacagtgcgccacaatacaggaaacaaactgagcatctttgctgtttttaattattatatgtgccattattatgggaaattgtagggtagactttaataaattatcttwtwmcaamwaaaaaaaaaaaaaaaaaa

SEQ ID NO: 4864 - DNA, 540 bp, Rattus norvegicus
tacgaggggaagcggaatgggatgayscgaacctgatgatttccgagcttgcctcatctccatgggctatgatctgggagaggtggagtttgctcggatcatgaccatggtggaccccaatgcagctggggtcgtgaccttccaagccttcattgacttcatgacccgagagactgcagagacagacacagstgaacaagwwgtagcctccttcaaaatcctagcaggagacaagaaytacatwaccccagaagasctgcggagggagctcccarccgagcaggywgagtastgcayccgtcsgatggcaccctayaaaggatcggsrgctccgtccgggsccytggactacgtggctttctmtagtsccctctacggagagagtgacctctgacattcttagtggagaagasgagagggcayttcctgtggtggattccactgtccctcagagcamgggcttcaaatcatccagcaccaaccacatttytgaataaagatcgsrttgtgggcctcwmmmmwmaaaaaaaaaaaaaaaaa

SEQ ID NO: 4865 - DNA, 536 bp, Rattus norvegicus
ggaagtagaaagaagacagcaagaaccgcaacttttccaacatacagtcaactttcgataaaagtttgactactttgagcaccttccctgggcttgtcacagaactcattcaaacaaaactaaagtaacacttggaacagtgttgtgtytgaatccttaatggccttaatttctktccaattawarccgkaattcmccttwtttagaattaagaggaaatgatgggcccttccaaagytgcmcaatgccctcaatcacggaggctgagaatgtagtggttawacctctaactgtgcaaaacagtgaaaccctaattgtagaatgacttgcttggaatatytatgccagggaaaaaatactggcaaatattttgtcmctgctgtaaagcaaatttgtttaagtgccaaaataaagtctgtcgtgccgaaagtaamwmamwrwawaramwmacatccagttttctgtacgctctctgcttagtgctgtttttttaacttttaaggtgcagtaaataatatcataaaaaaaaaaaaaaa

SEQ ID NO: 4866 - DNA, 824 bp, Rattus norvegicus
gttccaggagggggaccccattcgtctgagatgccatagctggcgaaacacgcctgtatttaaggttacctatttacagaatggcaaaggcaagaagtatttccataggaattctraactcastattwcaaaagctacgcacgccgacagwggttcctacttytgcagagggatcattggacgcaacaacatatcttcagcatccttgcagataagcataggagatccgacgkstccctccagctttctaccgtggcatcaaatyactttctgcctgctgatrggactcttgtttgcaatagacacagtgctgtatttctcggtgcagaggagtcttcaaagttccgtggcagtytatgaggaacccaaacttcactggagcaaggaacctcaggacaagtgagccctcgtctyatgggatgaggagagcaatagcgyasratbkaktagcttccctgtggacttgygacctcrccatctgcatcggcaccaagtttgagtggcaggaataayacagaggcccctcccstaactttktttttkwktttggtgttgtatgtttgttgkttgwttgtcwmtmkccaatggrcaatctcagggraaarasawarchtggggtsttmcrggaccarcagcaaagcagsgatgagcrmacrgytgccctcccaagaagsrakgcttcagagktttactmtttctytgccccaaacattttgttgtcagagcaaagcagcagcaccggcgttgggtgatgaccccwttytgtgcttaacaattgttcctaaataaacttytggrgaaargtrwaaaaaaaaaaaaaaaaa

SEQ ID NO: 4867 - DNA, 821 bp, Rattus norvegicus; identical to SEQ ID NO: 771

SEQ ID NO: 4868 - DNA, 600 bp, Rattus norvegicus
aggcttggtcatattctgtttctgttttgtgccctataacatcaacctcattttgtattctctcgtgagaacacagacctttgttaactgctctgtgggggctgcagtgagamcgatgtaccccatcactctctgcattgctgtckccaactgttgctttgaccccattgtttrstacttcacktcagacacgatccagaactcaawwaagatgaagagctggtctgttagaaggagtgactccaggttctytgaagttcagggcaccgagaattttatccaacacaacytacagaccttaaaaaataagatatttgataatgaatctgcaatataagctgcctgactaaaccactgggactgctccgtgttcaactgtgaaaactgtgctytgggaaactatttykccagctccaacagaaaattaacstacggacggttacctgtttttaaagaaagtttgtgtmtgatgagttaacattaaaatatattstattcttgtawrmamdmmawwwhamwwtcttgaactactttcacgtgttctttcctcattaaaaagaaactataaagttaarawmwaaaramaaaaaaaaaaaaaaa

SEQ ID NO: 4869 - DNA, 1225 bp, Rattus norvegicus; identical to SEQ ID NO: 773
  misc_feature (989)..(989): n is a, c, g, or t

SEQ ID NO: 4870 - DNA, 354 bp, Rattus norvegicus
tgctgcgtccccaacaagtctacaatgattaccgtcaggttcgactgccccggcgaggggtcgtttaagtggcagatgctgtgggtcacatcttgtgtgtgtcagagggactgcggagaamcaggagacatattttstgagstcrggatcmtatagagccagacggggaggaagggttaaggytcaatcagsccgcaatgaaaacactgaggtgtctgcaaaagggcacggcttasttaagggatttaaaacacaagagtgactattctttgcctgttatatttgtgacaatagaagtttctaaaacatatacaataaaacaaaactgaatgcttgaaaaaaaaaaaaaaaaaa

SEQ ID NO: 4871 - DNA, 471 bp, Rattus norvegicus; identical to SEQ ID NO: 775

SEQ ID NO: 4872 - DNA, 600 bp, Rattus norvegicus
tcttccccacatcattcacacttctgtaaaatatttatatacactgctttccttttttgaaactggttcatggtgacagttaagtgacacaagtgtttctggtcagggctgtgtcatcagaaagggcatgatggctgggatgckgtacggaagaacgaakasgckggtttcargacgtctagaagatttcwtkaaaytactgatcagttacctaggttaasawccctctcgagtrtttgctgtctgtcgggttcagcatttttgttccgttcttgtgtatatgtgtgacgttccgggagaggtttaatcagtgtgataggaggggggaaaaagacattttatagtagtttttatgtttttatggaaaacagtatcatttgcctttttaattcckktkstywsrsktssacymgaaagccgtagcctcttcgtgtgttgtttccgttgctgttgctatcgctgttttatatactgcatgtgttcactaaaataaagttggaaaactaacgtctcgctggacacaatttgctgtcgagccacgtgcctgtcactactggtctgtactctttggattggcttttttttttttttgtattttgt

SEQ ID NO: 4873 - DNA, 600 bp, Rattus norvegicus
cgagcgactctactatyccatraaaggsgctggaamagatgactccaccytggtcaggattgtggtcactcggagtgagattgmcctcgttcagataaaacagwtgttcacccagatgtatcagaagamtctaagcacgatgattgcaagtgacacsagtggagattacaggaagctgctcytgsccatcgttggccagtgacggggatttttttccctttaaggaatgaagctcttcagggcmtatctttctgagcaatgagacctgcatgcagccacgtcagacrccaactgvscagagtgyttttmmwmtgaggcytgtyagggggtgtkytgygtttgcacatgttgtmaytgccttaattytaatgttagtctctttctttctgtawccaatcagtgtaaaagccwtgtcaatgacatwgtaatgtaaatttgtaaagyttcactcccactgctttcactttaatccggatttcaaattaaaaaaaattcmmrgcmawmwmwaawwmwrwrwaacgttaaaagaatgagagaatgagaacggtgttcattctcattaaaacatgccgttctggtttgaaaaaaaaaaaaaaaaaa

SEQ ID NO: 4874 - DNA, 321 bp, Rattus norvegicus
  misc_feature (116)..(116): n is a, c, g, or t
tgaggagctcaagaacaggttggatgtcctggcccaggaggtggccctgctgaaggagaagcaggccttacagactgtgtgcctgaagggcaccaaggtgaacttgaagtgcctcntggccttcacccaaccgaagaccttccatgaggcgagcgaggactgcatctcacaagggggcacgctgggcacgccgcagtctgagctagagaatgaggcgctgttcgagtatgcgcgccagagcgtgggcagcgaggcggagctctggctgggtctcaacgacatggcttcggaaggcgcctgggtggacatgaccggcggccg

SEQ ID NO: 4875 - DNA, 486 bp, Rattus norvegicus
tgagagagatggttgactcttaacagccttgagggtctgcaatcaccggacagtccagatctgactgacgtccatctactcacttctgtgggttcccctctttctgttcctagctcaggcaggtgggggtggtagtrgwgactgcyccacaccktwggacatgtcaccaawgcagcccwgcmtggcaggcccaccgcstktcaactyktmtcccswtmtccascagtgytgggcaatgcactgaarctgrtggscaytgggaagaaaacgcagaaatgggcstcattagrctgaagtgtctattctaagggctctagatctccccctccacagactyctgctcctgtcwwwwtcactctaacggatatttattttacactctcwwtttgacactctctggggaaaaagaagcctctgggagtttmcaggctgattaagkgacatggacartaamccagtaaacacaaacaaaaaaaaaaaaaaaaa

SEQ ID NO: 4876 - DNA, 600 bp, Rattus norvegicus
cgagggcgagctggagaagcgaagcgacagcctgttccaggtctggaagaagaagcgctgcgtgctcacggccgatcgcctgcgcctcttctccggcaacagcgatcggcccaaggagctgtacttccattccatcctcaaggtggactgcgtggagcacacctccaagtacgtgtacttcaccatcgtcaccaacttttacaaggagatcgacttccgctgcacagtcgagagctgctggaacgcggccatcaccatggcgctgatcgactaccaraaccgtcgggcgctggaggagtttcgccgcttcagagacccacgggagtagtcgagccgggaaccagcctacgctgccgcatcagaccggagtccaggggsccaggagcccagaggatgccccgggtgacgccgccgctgttcttcaccgaagatattcccgtgcttgctgagccttgccccgctgtgcgggtgcattaacttattggaccgtatttatattggttacctgctttcaacccaccattccgtgttaatattttttataccatattttcatcccaaataaacagtgccaactttttttaaaaaaaaaaaaaaaaa

SEQ ID NO: 4877 - DNA, 509 bp, Rattus norvegicus; identical to SEQ ID NO: 781

SEQ ID NO: 4878 - DNA, 447 bp, Rattus norvegicus
ggactttttcaccagcacgctctgtgccatcgacttgcagtttccctaactgttttctatctttgttcttttccatctggtcctccttggctgttgggggcaaaaatagagccttctccactcctagtcacatttatgtgtttgttaaaatccaggtattaacgaattagtgtttaatccagtccttttcaatttttaaaaccacacaaaaaattccacttgataaaacttcttccaacgaaatctcaggaataattaaactctagtgggagagggttttcttacaaagaaatagagggacctattttcctctttttttttaagttttagattgtagattatttattaaaattgtttaataataggaaagggggaaagtatttattgtacattattttcatagagtaaataaatgtctttataatmmgraaaaaaaaaaaaaaaaaa

SEQ ID NO: 4879 - DNA, 425 bp, Rattus norvegicus; identical to SEQ ID NO: 783

SEQ ID NO: 4880 - DNA, 502 bp, Rattus norvegicus
ctgtgtgtgaccggcgcttcatgaggagtgaccacctgaccaagcacgctcgtcgccacatgacaacaaagaagatcccaggctggcaggcagaggtgggcaagctgaacagaatcaccttagcagagagccccaggagcatcctcgaacctttgccggcctctggctgaggcttcctgtggcatccatcacctgtgggcttcttcgaaaacctcttcaggaatggaacctgtgtgttcctctccaaaaataaccatggtctctgggctgttgaagtggggagctggttctgatggaagtgtattaattttacttttctggttgagaccctgttctatatcttttgtagtttcagaactgtctgtctgtctctgtgtgtctctgtctctgtctgtctctctcttttgtaaggaaatggaagaaaatttgatctaaatcaccagcattcaaacaaatattcctgcaataaagtttacaaagtctggaaaaaaaaaaaaaaaaa

SEQ ID NO: 4881 - DNA, 436 bp, Rattus norvegicus; identical to SEQ ID NO: 785

SEQ ID NO: 4882 - DNA, 600 bp, Rattus norvegicus
gaagccaatggaaaagacaggggagagatggtgggaagaagaggaattctgggtacagggctcccatctctggtgatcttggtctttctgtatccgattgagctgtgccttgcacatgtgctccgctgatgttcgtatttcggtcttgtctccgccgttacactgggatctgggttacccagtgcctggtttatcctctttttcgtccccatgacagtcaccatcttctgctattggcgctttgtatggatcatgctcacacagccccatgttggggctcagaggcgacgccgggcggtgggcctggctgtggtgacgcttcttaatttcctggtgtgctttggaccttacaacatgtcctttggccattgcaccatcgtcatcatcgttcagtacctgaactcaaccgagcaggtgggcaccgagaaccaaatcacctgctatgagaacttcacccaagcgcagctggatgtggtgcagatccatgtcttggtacccatctgtctgacattgacaatgacctgcatggaaagaaaaaacaaatctggtttggcaggtttaaaataaatattatgaaagtctgaaaaaaaaaaaaaaaaa

SEQ ID NO: 4883 - DNA, 422 bp, Rattus norvegicus; identical to SEQ ID NO: 787

SEQ ID NO: 4884 - DNA, 510 bp, Rattus norvegicus; identical to SEQ ID NO: 788

SEQ ID NO: 4885 - DNA, 600 bp, Rattus norvegicus
acgaggggtaactggagaacgtacaggggggacacattcggctccgtgaatttttaactcgtgggtcttcatttccttccaactccggcgatcctgaaagcaaagcgcgaaccatccacggaccgacgagatgagcgacagcccttgcctgagtcctccagcaccaagccagggtcctactaccccacgcaaagggccccccaagttcaagcagaggcagacgcgacagttcaagagcaagcctcccaagaaaggggtgaaagggtttggagatgacatcccaggcatggaggggctaggaacagatatcacggtgatctgcccctgggaagcattcagccacctggaactgcacgagctggctcagttcgggatcatctgaggactcgaggcttggctgctctcgggagcatctgctgctcttgagtgccttgattttgcccagttggtctctcggagtcttgaaatccagtattcaggaggaatttccttgcattcccatgagtttccgtcgtgttctttccttcgacggtgaataaagcggcacttttgttgggggggggggtccctcagcttcacacctaaaaaaaaaaaaaaaaa

SEQ ID NO: 4886 - DNA, 538 bp, Rattus norvegicus
tgacctgttcactcatcacacttagaaacagaatccagtgtaaaaatcagatgcacrrmayragagaggaccggaccagcaaatacgacgctggccccgtggccagggaccggcgggcctaaactgctcttgtagggagtttctatcgcaactctggggcgtgcggtgaggcctgacccaatgccatttctcttcacgttgcttttcctggaggatctggctgcaaagactcatttggaacagaactgcacgctgagcgcctgccmttgagtctcctgtgggtatttcatttgtcgaaaggacggtgttatatatatatatgtatgtataacttttcctttgaaggtttctttttaaaaaaaacaaaacaaaacwtawawawrmwrwwwawwwacttatttaaaagacttccatgataggtttctctgtagcttggggaacttgctgttctaaatgagcgagctcatgcattctgtgtgaagaagccaaataataaaacaccttggtgagtaacctttcttaaaaaaaaaaaaaaaaa

SEQ ID NO: 4887 - DNA, 354 bp, Rattus norvegicus
cggcacgwkkyttkwwtwkyttatgtttaaaaaaaaaaaagaactttttaaatttyawawtawtwtraaattgtttttggggggttaggttaccttggccaacccactggctgtgagaattctttgcagtctatgggctagtggtgtgctgatctttcaagtgtccccacccaattgccatgttcaggtggtttcttctcagcctgttaggtgggcgccctgcagattcctggcttgtttgtactcctccaaccggagaaagagawccctgtagtgcaactgttttgatactgaatagtgacaagtgacattttgaataaagaaccagtccctccawaaaaaaaaaaaaaaaaa

SEQ ID NO: 4888 - DNA, 559 bp, Rattus norvegicus
  misc_feature (25)..(25): n is a, c, g, or t
tatttttaggtaaggcttgaattcntgcagatcttggcgctcctttaattaactcctggaaagtgccataaaggaatgactatatggaatggctgaacacatacattggttccctcttcttaacgcttgtcacattgcagaacaaggtggaaaggtattcttttttcttgttgttagctaagcctaataggaatgatgactttgtgcacatgtgtggctgttaagtgcatgtggccacrgaacatatagtaatagtaaccatgaatgttctacacaagctgtccaatcttctctttacagaatagaagcctttgttagaaaacatggctaaacccaacccaggrccaggcagtatcttgaatagtctaggtgggagaagactttgctcagtattgtttatgttttcctgtcactggatttctcaccagaaatgttaatgacatttatttgtgatgtttttcatttcaattttgtttaaaaaacaatccacaaaacattagttatkttttttgctgtttcaataaagtccaaattaaaacawraaaaaaaaaaaaaaaaa

SEQ ID NO: 4889 - DNA, 534 bp, Rattus norvegicus
cacgagggtaccagcgtaagccacgacaagcttcctaaggttcagtgttatgaccagtgtgaaaacagatggacagttccagccacctgtccccagccctggcgttacacagccgcagctgtgctggggaaccagatttttatcatgggtggggatacagaattctcagcctgctctgcttacaagttcaacagtgaaacttaccagtggaccaaggtaggagacgtgacagccaagcgcatgagctgccatgccgtggcctccgggaacaagctttacgtggttggaggatacttcggcattcagcgctgcaagacgttggactgttacgatccgactttagatgtgtggaacagcataaccacggttccctactctctgatccctaccgcgttcgtcagcacctggaaacacctgccttcctaatgcagagcaaaccaaggagagcacgagtgagctcactctgacacacacgagatgtcgtttctgctctgaagaaggcaagtttaatgaagagaaagaaaaaaaaaaaaa

SEQ ID NO: 4890 - DNA, 384 bp, Rattus norvegicus; identical to SEQ ID NO: 794

SEQ ID NO: 4891 - DNA, 385 bp, Rattus norvegicus; identical to SEQ ID NO: 795

SEQ ID NO: 4892 - DNA, 600 bp, Rattus norvegicus
tgatgaggaggcagtccaggtcaaagagcagagcatccttgaactggggtctctcctggcgaagactggacaagctgctggtcgagctatgtttagaatgcatcgaatgggccaaatcagagaaaagaaccttcttacgccaagcattggaggcaaggctggtgtctttgtattttgataccaagaggtaccaggaagcattacatttgggttctcagctgcttcgggagttgaaaaagatggatgataaagctcttttggttgaagtacagcttttagaaagcaaaacttaccatgctctgagtaatctgccgaaagcccgagctgccttaacctctgctcgaaccacagcaaatgctatctactgcccccctaaattgcaggccactctggacatgcagtcaggtattattcatgcagcagaggagaaggactggaaaactgcatactcgtacttctatgaggcattcgaaggctatgactccatcgatagccccaaggccatcacatctctgaagtacatgttgctgtgcaaaatcatgctcaacaccccagaagatgtccaggctttggtgagcggaaagcttgcacttcggtatg

SEQ ID NO: 4893 - DNA, 504 bp, Rattus norvegicus
cacgaggtccacttcttccttgagtacacatcattatggagactcctcttgagaaggcactgaccaccatggtcaccactttccataaatattcagggagagagggtagcaagttgaccctgagtaggaaagaactgaaggagctgatcaagacagaactgagtcttgcagagaagatgaaggagagcagcattgataacttgatgaagagcctggacaaaaacagcgaccaggagattgacttcaaggagtactctgtgttcctgaccacgctgtgcatggcctacaatgacttcttcttagaggacaacaagtgaccagctaccctcaccagcagccccttgtcctgacctctgcagcctctttaactgcccctcctaggccccctgcccttctctttcttccagatggattcttccagcagagaaataaagccttatccacagcaaaaaaaaaaaaaaaaaaaaaaaaaaaaacattgcggccgcaagcttattcccttta

SEQ ID NO: 4894 - DNA, 568 bp, Rattus norvegicus
agttaaaaactccaacatgagtgaattgggggtagtctgcagaagattctacacgttgctggaggacttttgccctcrgagagatgcatatcacaccctgccaatgaatctcagttcttacctagaggaactgtctagaaaggctaatgtgattgasccagtattaaacctcatttytaagctrccaaacaggtcttaagrgasccacttctgtccacctaaccaccttcagctctgtgtccaactgagatctctattgtttcctcttgaatgtccatgaaccactgtacagcatcagacccttaaatgagtgtgcaattgtttctcttgaagtwtggtccattcgttactttgaattaactgcactccttgatattcaaatgttctattaaaaaataattgtgaaaaacactccactcctgtagaagaaaraggtggtgtaatgtkaccaactccaaccacaacagtgttctttmagagatttattgtacgattatgagaaatgaagtmatcgtctaaataataaacaaagctgtcmgtaamwrwwaammaaaaaaaaaaaaaaaaa

SEQ ID NO: 4895 - DNA, 600 bp, Rattus norvegicus
tgactttatgttgtgtgatyccaatctctgtttggcacttgtatttaattccccacctttgtaatacatttgtatattgcggatgtgttcattgaagctatttaaaacctggcgctgttaaatacacagtacttcactgtacagactgttttactgttwwaawwrwrrwwctgtgtgcttttcttttctttctttttttcttccyttttttttttttttttttttgaatgaggctggcatgttttatttgttttctggcaatacatgtgagaattttgaagcgttttgttgtggatgctaacgtgtcagaatccttaatcctttacattgaacctttytaagaaaagcattttcagtcttgtaatgtgtgcttacmgtaactaatwktgttgaaaaatggtttcaagttactcaaatttstacagactgtaaagatttgttgacagcaaaatgttgaagaaaaactaatagawtaaaastataaagtatatmttaggatctgcaaacatgatgaattatgtaatatattgtacaaatgtaagcagaagctctgaaataaaatgccatagtttgtgaawmmwwraaaaaaaaaaaaaaaaa

SEQ ID NO: 4896 - DNA, 560 bp, Rattus norvegicus
cacgagcrctttatgkasttgaakarcacyytatwkagttamskyaacctawarggttggcctcataatccartyatggaagttttgtttactaggagcctgacttcccarctcacaargkgtgaaagctgaagtacagataggatcttagtaggtatyttcgrtmcagggctatgaakacttggagagttcamatggttgggaaagggattgatttakaaggaaagcagcatgtggtctgagtgctgactagatgaatagttgaggcacatcctccaaagtgtgaaragggagggsctgtttggaaagatggctctcagcaaattctgtttgtcttacacgtctytmagggaaaaaacatgcagtcttcaagcatcgtccatgtacattctgtctggggtgaacaccttcattccktagagcacctaacattttaacacctgttcccgaaagggttaggaccaactgcaagttaatgtgggttgtaaatgttccccagtctgtttcttctgaggaaaaaataaaccttttcccccccraarwaaaaaaaaaaaaaaaaa

SEQ ID NO: 4897 - DNA, 569 bp, Rattus norvegicus
tgccacatttcaaactcagactgtccccagatgtcaggacccaccgtgtttgagtttgtttgcagtcccctcggcttgctggtaattgtgctgttttgttttcgatgcaaatgtgatgtgatattcttgttttctttggatcaaarctggactgaaaattgtattgtgtaattatttktgtgtttttaatgttatytggtactcaagttgtaaataacgtctactgctgtttattccagtttmtactacctcaggtgtcctatagatttttcttctaccaaagttcactctcacaatgaaattctatgtgmtgtgtgactatgattcctaagacttccagggmttaagggctaactcctattagcaccttactatgtaagcaaatgctacaaaaaaaaactctgggttaagaaaatttggcttaaatgtatcctttgttattttaaatatatcgagatattttaattaaaatttttacccctttgaaccaattttatagtatttgtacctattttggtgttttgtctttatagtaaataaaagtttttgaacaaaaaaaaaaaaaaaaa

SEQ ID NO: 4898 - DNA, 600 bp, Rattus norvegicus
acaagcagcggatraagcaggagctgagctcagagctgagcacattgctttccagcctctcacgttacttcagaaggggagcccccagctcccctgctgctggagtcctgccctcaccacagggcaaagccacctctctatccaaagctagcccagagtctcaggmrcswskgatccaacttgtgcaagcctttgtccgscacstgcagagatagggcaaaggagrrctgtmtacttrctgctccctcccascytgcactgcagcytgggcagagsctgctgccactgagcaagccactccyttygtcctcctcacgcccgcccgctgacattatttttatatagctgaagaggtcaacagcacgggcagaggacaaagggtctgggtgctcagastgacwgcaccmtaaggtggcsccgtcytytgagcgttccsgtggmayttamccagccagggagvcmcaggktsccgcagcacasgagagacytgtgtgagtgaggktttyccatratctattsttgcagttttyktgataatactgtggtctatytrtacaaatattaaaagtgctgtttwtaramwraaaaaawaaaaaaaaa

SEQ ID NO: 4899 - DNA, 562 bp, Rattus norvegicus; identical to SEQ ID NO: 803

SEQ ID NO: 4900 - DNA, 600 bp, Rattus norvegicus
cagagtttcacggataggttaaatagagagctttctcagaaaactccgccragtatgcggttgaaactgattgcaaacaacacgacgktggagcggaggttcagcycgtggrycggmggstccatcctagcatctttgggkacctyksaacagakgtggwtttccmaacaggaatatgaaraagkagggaagcagtgtgtagaaagaaaatgcccttgagggstccaccytgcytgcccatcmcctcacgtctgtagctttaggacactcaggaaaagatkaccatcttttgtagaatgtttawacatgtttgcatatttcaatttccmcttaaattttttaaggctttaactggctctataaattaaatgagtttgtgctttccttgagawrmamwwawwmwwawwacaggcattttwtaawwwwrwawraawrwmwattttctctaaatattttgctttcagtaagtactttccagctctcctgtgggttggtggaattactctttattgactagtaaaagttactgcctatgctttttaccttaggcttacaaaattaaataaaaatcactactgtcctaaaaaaaaaaaaaaaaaa

SEQ ID NO: 4901 - DNA, 546 bp, Rattus norvegicus
ggcacgaggtttttttttcccagcatcagtgtgcatcagtctgtccctcttgtaatgtctctgctcttctcaccatctagtggctcaggatatttaggccagctgaggtaaagtaggattttcacgcaatcacacattctaggacaccaactctttstacaggtcaatcccttccatattttatgccctcrgmacakgctaaaccatggtcaacttggtagtttccctttggggccaattacttgaagtatccatagaagatgtaaactgctccccttattccccttcaaactgttttttgtttatgtggcagggagcagtagacaattatgggctagatgattaaaactgaactctgaagctaacgttagactagtggttaacagagctaagaaataaggctaaccatttcagagagcgtgggctgtgggtaaattagctttgctctttagatgcaagtgactgaggccaacaggtgcctggcaaatgttaactgttcttggaaaaaaaawaaaaaaawaaataatgaaagaaaaaaaaaaaaaa

SEQ ID NO: 4902 - DNA, 890 bp, Rattus norvegicus; identical to SEQ ID NO: 806

SEQ ID NO: 4903 - DNA, 526 bp, Rattus norvegicus
cgctccagccccgcccctccagcctccccatcctccctytgccctcactacctgtatctcaccggcgtgtgttcaccctctgggtggttcacacacamtcattcacacacacacaaatytcaggaacaaacggtcccagagtcctcctyggcccctgccytgggtctctgcagktctytgccccacgcgttcccttcgctgacaatgccaccagctgcctcctttaagcttggtgctccggctytgggcctttcttgcgctctttttytctttctctttctgttttcttcctttttttttttctttwtttyttttttaagaaaacawaaaargmcawtgaaaaaaaacggaaaacgtcatgtgagtgaagagatgtcactgtctgtggtctttggagaactagtytcgtagctgaggggaggggattccctcctstggggcgctggcacccacagcaggactcgccagtctgatgccaggactgaataaagtgtatttgccccgammwmaaaaaaaaaaaaaaaaa

SEQ ID NO: 4904 - DNA, 1172 bp, Rattus norvegicus
acctgatggcagagtaactggtgaagcagatgttgagtttgcaactcatgaagatgctgttgcagctatgtcaaaagataaagcaaatatgcaacacagatatgtagaactcttcttgaattctacagcaggagcaagcggtggtgcttacgaacacagatatgtagaactcttcttgaattctacagcaggakcaagcggtggtgcttatggtagccaaatgatgggaggcatgggcttgtcaaaccagtccagttacggtggcccagccagccagcagctgagtggtggttatggaggtggctatggtggccagagcagcatgagcggatatgaccaagttttacaggaaaactccagtgattttcaatcaaacattgcataggtagccaaggagcagtgaacagcagctactacagtagcggaagccgtgcatctatgggcgtgaatggaatgsgagggatgtctagcatgtctagtatgagtgktggatggggaatgtaattgattttgatcactgactctwggtcaaaaagaaatttttktaaaacccttcagtttaacagtttttgcaatccagccttgtggttwtaatgcctgctctcttaagtgaactttgscatsgrwmgctcaaagarggttcaatgttgaacatagcagtcacctaggatgatagggcaaagttgagtaactttawctgttaaacttaakkcvkrgcttttctctagyyatgtakgatgtacstaagcagtaagtgtatttaggttaaagcagttgamttatgytaaatgttgctcttatacatacatacattgaacactgttgatgcatgttgaaaagacatgcttyttttgtaaaactatakgagctgcgtctacaattaaaagtgaaacatttggcatgtttgttaattstaraykcakytsmtarsywbkarrrhwvrwgmgdyyrmrgsybttttytttttttaagttaatggagaaattytgagacgcaatmccattactytttaggatttttggtyttggtgyttgtacgaaattctgagsccttgatttaagtcyttcattgtattgtgatttamwtywaggtgwattkcgmtaagyraacmwwrwmaaawaaatcttccttttaaaagctamaaaaaaaaaaaaaaaamwcgagactagttc

SEQ ID NO: 4905 - DNA, 398 bp, Rattus norvegicus
ggcacgaggcggcacgaggkgmwcrwsscrrttcgmtgckkcacswgsgggaagatcgtcggtaacaaatgggaascctacctgggtytgctacaggcagagtacaccgagggggatgccctggacrctctggscctgaagcgttactgctgccgccgcatgctgctcgcacacgtggacctgattgagaaactgytgaactatgcacccctararaagtgaytgmtagagcctgccctcctcagytggccaagggcaatctgtcctgctgtattcaaaytraggtgttgggratgtkagtgtattgcctggctgtggccctgtggmtaagtcctgtcatcctggaaggaactgtttagtaaagatctwtgcagamccmmmaaaaaaaaaaaaaaaaa

SEQ ID NO: 4906 - DNA, 478 bp, Rattus norvegicus
cccttgaagaaatcctgaggctttgtagagtgctccttgaccatgtttaataattcttccctcccctgcttgtctattttcttctcttcacggctcttcctataccttaggccagtctcaagcactcactggagacccttgggccttgggcgaccattgagtcctagtctcccttgtttgtgcccctgtaggaggtaggtccttttctcctccggcctagtaggggaccttgggtaacatcccatttttcggccaaggtgagttgttttaggataaaaaaatttaccacaaattctcatttaaatttccacagaaatcctgttcgtatccccattttgatttccctaagttccttgttctccctctaaaaagagaatgattgcaccctgcctgtttacctcaggattgttgtgattgtagaaacgaagctatgtgaaaattatataagtattataaaggtgaaatacttttgctctcc

SEQ ID NO: 4907 - DNA, 520 bp, Rattus norvegicus
ggcacgaggggctaaagaaaaaagcwacacttaacawaaacgtggctatccttcatctacctaaaaagggggatgatgtgaaaccaggaaccagatgtcatgtagcagggtgggggcgttttcacaataagtcacctccctctgatactctgagagaagtcaacatcactgtcatagacagaaaaatctgcaatgatgaaamacaskataattttaaccctgtaattggactaamtatgatttgtgccggaaacctccgtggtgggaaggactcatgctacggagattctggaggmyctctgctatgtgagggtwttttccgaggcatcacagcttttggccttgakggaaggtgtggagaccccaaagggcctggcatctatactttactctcagacaaacacctcgattggataasgaagactgckaakggcgctkkttaaagggtgactctcactccatccgctgtcgcttctgtatctgagcacaaataaaawcaacttaaagarmwrmrmaaaaa

SEQ ID NO: 4908 - DNA, 671 bp, Rattus norvegicus
  misc_feature (516)..(516): n is a, c, g, or t
gatcactgttgtggactgcccctttgatgatggggcgccccctcctggcaaggtggtagaggactggctgagcctgctgaaggccaagttctacaatgacccgggcagctgcgtasctgtgcaytgtgtggcgggcctgggaagggcytccagtgctcgtggctctcgctctcatcgagagtgssrhswwstwcdabratsmcrbssrgytcrtvssabwgmagyksygtggggcmatcaacagcaagcagctcacctacmtggaraagtaccggcytaagcagagactgagattcaaagacccacacacgcacaagaccagatgctgcgtcatgtaskgcrsswkstggytctgtacgccctgkactccrttacwkcagggtctaaggagtccaacggstgtgtgcgttcmtgckctgtccccatctgtgcccacgrstgtcttymtgaggccgtccytggacytkmtrscagtcctgkccaacccmtccacccaytgsccgggcctvktccccntggcctgtgtatcgcaggtggghtctttttaaccactgggccgagagcctcagcggcggcgccctcaccctcacctttmtccagcacctttgtyamcaggtgctytggacthtcaaggcaataartcwggagctgtgraaaaaaaaaaaaaaaaa

SEQ ID NO: 4909 - DNA, 757 bp, Rattus norvegicus
cacgaggggctgctggctctccggaattgatgttagtacacagatgcttaaccagcagtttcaggaaccatttgtagcagtggtgattgacccaaccagaacaatatctgcagggaaggtgaatctcggcgcctttaggacatatccaaagggctataagcctcctgatgaaggaccttcagagtaccagactatcccactcaataaaatagaagattttggcgtgcactgcaaacaatattatgccttagaagtctcatatttcaaatcctctttggatcgtaaactacttgagctcttgtggaataaatactgggtgaacaccctgagttcctctagcktgcttmccaatgctgactataccacaggccargtrtytratctgtctgagaagttagagcagtcggaagcccagctggggcgtgggagtttcatgttgggtttagaaacacatgaccgcaagtcagaagacaaacktgccaaagytacgagagacagctgtaaaaccaccatagaagccatccatggactgatgtctcaggttattaaggataaactgtttaatcaaattaacgttgcttagttactgctgagtactcttcctcagagctggcgtgcggaaggasamgargctcaaggaacattctaacccagttrccasaactcagatagaagaytaaggtsctgtgtgacgtcctgagtattagcactgtaatwaaactgtcmcmtgwaawwraaaaaaaaaaaaaaaaaaaca

SEQ ID NO: 4910 - DNA, 489 bp, Rattus norvegicus
ttcggcacgaggtggactgaacacagtcggccgacaactttagtaacscaggaagatggatggatggtcactagcttggacaacgtctgcaaaatatgagaytatttkccacctgggaaaaaattataaccacaaaaacagagagaaagawgtatctaagtgattgccaagattatgccaaagcctrttggcagagcactaagagacttttatttttmrgycwkgctattttcacagatttatgstgatcatgtgactctagggatrccgatctatgtatccttccaaatacagtgtttacatggagtrtcataagagsccacstggggaaccagggcagcagcagggaaattgagtgattagcaatttgactttgaatatwttctaagtatttaaatgaawtwtcaaaatatagagcagcaaktagacataactgctgttcctggaaataaagtctgtttcawgtamwrmmaaaaaaaaaaaaaaaaa

SEQ ID NO: 4911 - DNA, 461 bp, Rattus norvegicus
aagccaggcaaaggtagctactggacgctcgacccggactcctacaatatgttcgagaacggcagcttcmtgcggcggcggcggcgcttcaagaagaaggacgtgcccaaggataaggaggagcggscccacctcaaggagccgccccctgcytcggccaaaggcgccccgacagggaccccggtagctgacgggcccaaggaggccgagaagaaagtggtggtcaagagcgaggcggcgtcacccgcgctgccggtcatcaccaaggtggagacgctgagtcccgagggcgcgctgcaagccagtccccgcagctcagcckccacgcstgccggctccccagacggctcgctgccggagcaccacgccgccgcgccyaacgggctgcccggcttcagcgtggagrccrtcatgacgctgcgcacgtcgcctccggrcggcgatmtgagcccagcggccgc

SEQ ID NO: 4912 - DNA, 461 bp, Rattus norvegicus; identical to SEQ ID NO: 816

SEQ ID NO: 4913 - DNA, 574 bp, Rattus norvegicus
cacgagggagatttactaacagtgagacagcagaacacattgctcaaggcttacgtctctacaggcctcatttggcatcagacagggtatataccatcatgtacagctgctggcatgagaragcagatgaacgtcctagtttcaaaattctcttgagtaacattctagatgtcatggatgamgaatcttgagctggctgataagcttcatggatctactcskcwckwskacaagccccaattccattttttcctgaggaactccctggttcaagggctctagccttccacgckcctactgtacatctaggaatgcctttcttctctaactcsccagcatagtgcttctgagcaaaggccaaggaatttctgggcctggtattacttcaagactcctaacagactgaatttgggatgggaacatttcaggggagggaagatgtaaatagccccactagttgttcaacagcttgttggttaagtgttaagagtttgggggtaagaatggtgccattaaaatgggagggattgttttgatacaataaaattactggaaararaaaaaaaaaaaaaaa

SEQ ID NO: 4914 - DNA, 296 bp, Rattus norvegicus
atttcaggaactcmcastacacccagtttacagcagctacaggagcacttstgctttctttaatggcagaaggcaagtatgtcagatatcstataaaatgattttgggtcaaaatcatggtgacaaaggtcccatttataytgactttgatagctgaaaggtwtttwtgttgtatttatattttcaattagctactgccagtaaattaaaattttttacatgtatattttgatatgtggcytttgggggatccsgtgttcaataaagtttttttaarggaaaaaaaaaaaaaaaaa

SEQ ID NO: 4915 - DNA, 532 bp, Rattus norvegicus
cggcacgaggcttctgaggcatgtggccagccgtcatcaggagggcagacctcatttctgccagatctgtggcaagacckkcaragsagtggaacagttacgggtgcacgtcagacgacacaaaggcgtgagaaagttcgagtgcaccgagtgtggctacaagttcactcggcaggctcacctgcggaggcacatggagatccacgatagagtggagaactacaaccctcggcagcgcaagctccggaacctcatcatcgacgatgagaagatgktgktgktggytctccagccacytgcagacytggaggtgggctccgcagaggtcattgtggagtccctgacccagggtggccttgcctcccaactccytagccagagactgtgttcagaggagagctttgctagctccggggtcctggagccgtctytmatcatcacggctgctgtccctgaggactgtgacacgtagcctgtccagtgtccccttgaccaataaacatgtgacttwggraaaaaaaaaaaaaaaaaa

SEQ ID NO: 4916 - DNA, 544 bp, Rattus norvegicus; identical to SEQ ID NO: 820

SEQ ID NO: 4917 - DNA, 600 bp, Rattus norvegicus
  misc_feature (581)..(581): n is a, c, g, or t
atagtgaactctgtgggcatctccaagtattacccctggacgataggaattgactccggcgtgcacacatgtacacacccacacacatctatctatacatgctggmttaagccagcctcttgtcttgcagatgtaraaattgttgctttgtttctctgataaaactggttttagacaaaaatagggatgatcactctcttagaccatgctaatgttaatagagaagaagcattcttttctttcttctatgtgaaacttgaaatgaggaaaagcaattctagtgtaaatcatgcaagcgctataattactataaataaraaaawwmaaraarattcaatcactgtayagaatggtaacsywcswrctcatttcttatatcatattgttaaataaactgtgtgcaacagacaaaaarrrwrrwmmwwmttgaattcatgtacatggtattaacacttagtgttcgggggtttttttgttatgaaaatgctgttttcaacattgtatttggactatgcatgtgtttttttccccattgtatataaagtatcgcttaaaattgatataaattactgaagtttttnccaaaaaaaaaaaaaaaaa

SEQ ID NO: 4918 - DNA, 525 bp, Rattus norvegicus
ggtcttgtggaagtttggagataccactgttcctctaaacgagcttcttcagcaacagcccccgcccaggctggacctgcatacagtgttcctacctcaggaataatctctctctctgtggctcttgctgttcagctgccctcctgaaccagtayccattctctcastggccttggccagcttagaccttatgtctatgtgtgctagttgctcggcagggccagcatcgcctgcagtgagcgtgagcaaatctgtctttctctgggtggacagaatgccaggagtcccctcccagcaacttctgcaccagccctcacacagtgacccctccccaaggcacagttcctatatcttcatcccactcatgtatgagacttaggaaggaaaagccgacgacgttcttggggtgttgggacagaagttgccgtcatttccgggttgaaagagaatagttgttgaaactatgactaaacactattcattaataaagattctattttatcagtaaarwawarawmamawwct

SEQ ID NO: 4919 - DNA, 441 bp, Rattus norvegicus
aattcggcacgagggttgaktactccgcgtwtgagtcagaggataggttgaacagtktgaatgaggaggtaacaacaacagaagcggtggagactagcgcttcctcgtacagtcttcataccgaacctgtggaccatcagaatcctgtaaccacgaaaccagtgactatgaaaccagtgaccacgaaaccagtgactaccaaacaagtgactacaaaacaagtgaccacagaatcaagtccagatcagaatgatgccatatccgctctgcagagtcctgtgtcctgtcttctgttatggatcctccttcaaggagggatgcattttatgtagaaggtgagagaaggctgctatgactcttcggactagaattctttggcaagaatttggatggaaaataaaaaattaagttttgcctgcttcttaaaaaaaaaaaaaaaaa

SEQ ID NO: 4920 - DNA, 557 bp, Rattus norvegicus; identical to SEQ ID NO: 824
  misc_feature (516)..(516): n is a, c, g, or t

SEQ ID NO: 4921 - DNA, 600 bp, Rattus norvegicus
tgctgctgaagaggaggaagacgagtattcgggaggcctgtgctagtgccctgcctgcagggatgagaagacgggatgctgacgagcctttstcatggaactaggactcgtcctgtggacgcctctgcttcaycgaagttctgatgttgaatgttaattatctgaagttttagttttccatttsccacaccagccattgtatctactgcctgtgaggcattctttcctttctcttgtaagcagaaaataaatcgtcatattttaacaattgawwwaaaaawvwmdarrccaaattccagataaatgatatcatcagcaaagcaggaaataggtatactcartcttttctcttgggttctttttattgttagataattktctttgcattttatttaatgccatttctaaacatgctgggttttgggtgaaaataataatttcaaaactgatctggttctttccaccgtcttmccatgttgtcacttagcgcccacrcatgtccccgytaagagcatcaacaatgccaaaaagaaaggcagacagcggttctcagcaggttctcctccaggaccgtcttctagtctgactagatgtctgact

SEQ ID NO: 4922 - DNA, 432 bp, Rattus norvegicus
ccagaacacaggacaggaggtggcatggccggcgggcacaggaatccagaggccggatggtgcctcagactctgccctcmttgggcaaccccgggcaggcaggcaagcggctgtggacatggacaggcctggtgtggccagcgtccccaggatgcccacctcagccaccactgcagaggactgcctgcggcccaccagcctggctccgatttttagataccccmtamccmktgggaascrgccagacccccccactcchttmcaggaccytgggcccctcccagacccaggcagagagcatggtcctgacccagagccccccggggaaggactgagaccactctggaaagaagcagggtggggaatmtattttttctctccttttcttttcttcaataaaaagaattaaaaacccaaaaaaaaaaaaaaaaa

SEQ ID NO: 4923 - DNA, 642 bp, Rattus norvegicus
  misc_feature (22)..(22): n is a, c, g, or t
  misc_feature (594)..(594): n is a, c, g, or t
  misc_feature (606)..(606): n is a, c, g, or t
cagactgcgcgtaggaaatggnatagagacagactgcaaacatgacctgcactttgactgtactgaggtttcactttatatctaagtcatgctgtttctgaagcagcttcctagtttgtaaatagactttcatggaatatttgtattttagacaaaaagaacatacgcagaaatgtaagtaaaccctgtctgcaaaactgtatagctgtgacactgtatattgtacatgtgtacattgtgtaaaatagagcttaaatcaacctaacgttcccacactgtcttgattgacttcctgtgatgcccgaggcttattcttctggagtagtttctcatctcctttggaggaagatgatgattattcttataaattaccttcagccaatactagataagccactaagtaaaaaataataatgatgaccacctcaactggttagtaaaatatctaatcagaaaacaacagtttgatgatttccccctagagtcaatattttatcaccctaaataaatttcagtaaaatctawawwwmwraarwwwwatactttattctgatcatctatcctctttgttttaaagaggtttttataaaccanttattaggtgtnctggtatttcacttacaacttttggaattttttacc

SEQ ID NO: 4924 - DNA, 507 bp, Rattus norvegicus
  misc_feature (25)..(25): n is a, c, g, or t
cagacacaagaggaagcattcaagngagagaccatatgcgtgcaggcagcrwgraytmrgcwydarkaattgctcagctttaatcgcacataagcaggtacattttgaagagaagcttagtgtgtgcagagagtgtgsccaagtctttatccagaagtcacgcctcaccttacatcagatgacmcmcaagggggagaagacttwtacatgcaagacctgtggacaaggctttaggcmgacacaggaagatgaaatgtgcccaccgcaaactkcccttccagcctgactctgaagcctatttggggtgatcttctgaccccttgtgttctctctgaaaacggaaatggtggaaagcattcactggcagaattcttaaacttstacgaagtagaaaaatgcactctgtaagrccaaaggacagtaastacttcctttccagtytcatgtatggccttttgtctagtaaactttgcttctttacaaawwwrvaaaaaaaaaaaaaaaaaa

SEQ ID NO: 4925 - DNA, 1400 bp, Rattus norvegicus
stsgwgcaatkcktkcgcccgcaatgagcttcctcaaaagcttcccgccccctgggtccgcagatggactccggctgcagcagccagacaccgaagctgtgctgwacgggaagsggctcggcaccggcacgctttacattgcggagagccgcctgtyttggctagatggttctggattaggattctcactggagtaccccaccattagtttacatgcggtatccagggacccaaatgcttatcctcaagaacatctgtatgtcatggtgaatgccagatttggagaagaatcaaaagaacctttctctgatgaagatgaggacgacaatgatgatgttgaacccatttctgagtttagatttgtgcccagtgataagtcagcattggaggcgatgttcacagcaatgtgtgagtgccaggccctgcatccagaccctgaggatgaagactcggatgactatgatggagaagagtatgatgtggaagcacatgagcaaggacagggggacatccctacattttacacctatsamgarggactatcccatttaacagcagaagggcaagccacgctggasagatkrgaaggaatgctttctcagtctgtgagcagccagtataatatggcaggcgtccgaacagaagattcagtaagaacttacgaagatggcatggaggtagagaccacaccaactgttgccggacagttcgaggatgcagacgttgaccactgaggatgactcgtgtgacttacaattctgctcataactataggcaagaacttgatgcctcttcactccagaatggagctggtgaaaggcttwttttcttytccaaaactcatttctcaagacaaaytataatgagacagcaagctgtcaccagcagaaaagactytgacctctattaacaaaggtgaatwaactgaacgggtttttgtagtttctcatttacccmtaagcttcctgtgtctagttwtcttctgagagcctctaattcctgctttgctgtgtgcaatctgtcagctacgagsctgtgtgtcswgtgcwcaskcybacgctggcaaaagtgaggtgggagcttagatgtctctgggacttaggaggactctctgatccytgagataaaaagcaaaggcctctgagggcacagctttagcattctccacggacgcatgggccctctactggggctcamccacatctcgtcatgacaaatgcttgtgtgctacttctgttcctcckcatttaccatcagctctgttacattctcctagcttaggtccttgactgtcacagagtaaatcatctgaaatgaagtctgcaaagtactctcaatgatattttgtctttgtaatagttaaataaatctgggttttctwwaaaaaaaaaaaaaaaaaa

SEQ ID NO: 4926 - DNA, 600 bp, Rattus norvegicus
mtaattcatgacaagccaagtgtyttttaayytaggcaatcatagaactgtcccacaaagcacttctgtgctgtttccatctagtggaagggatgtgcttctgcttgtgaagcaccaaatatcaatagttaactatggctttatcataaaaygatctccctagrgatttaatttactgatcagtggcatgtvtactgcttgaatagataccacactkttggttcaagctggcttggtggcaagggaaggtagccagatgacacataratctgtctgrtactatgcctatatttmcaagaagtytwttgcrgrgrgtwtgmccttagcccmttttytaaaktattttcatgtgttccmgrtgacaatkattbtagtraactgctgttttgygtcwtawwmwrwrwrwamwmwmtgattaaattcaatgtmctgrgtawwmwrrwrwmwarwwwgcatacttcctgaattttctatgtagaactgttcatttccacccagggtatctgctgcctctgaaaatatttttttctagctataactactctatttttaatatgtaattgaattttaatgtaagattcacagaaacctgatcattga

SEQ ID NO: 4927 - DNA, 600 bp, Rattus norvegicus
agtgccactaccaacgtacccgatgggggtcatttttgttcaaatccaagcaggcccagaaatgaatgaattgtagtrrasgakktgaactttagctctttcctcaaraagcagcarattygtrgagtccatgatatttyttcaaggtccccatattaagagttttytywagcgaaatgaagccaskaggatatatyttcstcstgcttgcactgtagcccmwacattbtgccttcatcctyttacctgtcatgtgttaggaggggggaggcararacatggcctgctctgctaatgataattgtcaacttgaaataaaatyagagtcmctagggaaaagggcctttatgaatgtctgytgaagtgggaagactcacccatcacggatggcaccattccctgggtagaggatcctgsgactagaagagtasagaaagagtggagcaactsccatgtgtgcattctgatygrttctcacgcagatgccttgactccccwgccmtkrcckactstaaccysarvcyakgakccwaaataaacytscwctccwkyharwwraaaaaaaaaaaaaaaaaaaaaaaaaaatagtttgtcggccgc

SEQ ID NO: 4928 - DNA, 770 bp, Rattus norvegicus
  misc_feature (603)..(603): n is a, c, g, or t
cacgagggggtatctgaagaagtatcacatatacctatacccacacttcaatgatatcgtgggacagcattcaccgtagcgctgggaaaactttatccatagtgagaacagacaccttgtcagccccgaggcccttgatcttcttgacaagctcctgcggtamgaccatcaacagagattgaccsccaaagaggccatggagcacccgtacttctacccggtggtraaggagcagtcmcagccttgtgctragaacaccgtgctttccagtggtctcaccgcagcacgatkaascctggggaatcgacggtctgttgcggttcctcmcacttttccatargcasaacargamccaaatcraaacgtmktaacgsgtgtagsgagatmacgtcccgagagcrgacmcaaaatgktggcaggcttggcgaacakgaahtwgrccacccgaaskgyagcccrccrcygtaratcagwcctcacttccgaatgtaaaaggtkcacatgcctttggctwcctgttgavttcytcmtgacccagraagcatgsgrmayswrragggtawgcaaaaatggttgttggttwmtgttgctcwccgtgccctngacccatcccgtkvvtgcctgttgmtccagcaaaccccaaggabtagctgrccmcagwccacaaatgggatgggggcastgtatggcatggtgsrcasytacatattattttaaaagtmtatataktattgaatamaacgttttaaavrraamaaaaaaaaaaaaaa

SEQ ID NO: 4929 - DNA, 600 bp, Rattus norvegicus
ttctgtgggacacctggccaccactgaggraaaccagtgctgtggtatatgatacacagccttgcactccttaactmtgctgtgtdaggtgcaargtgggtgcctggragagcctgggctggcacagggctgggcacatagcaagtggagatgmcctacrcaattcgtgggtggrcggggggcmcacwccagggacctragkaaggcmctggcttctgtaawatttcctctgcctctaacaggaaaacttgagtctctctgttctttgtwagwatctrtcttctatwatagcaaatcctatatccatggctttaatggmcattctaaaatttgmtgcactgacagtcttaatatttctattcctstccctctctatamtcwttgaaracctcctgawtrrccctragraagtaccaggggtaacagtatctytgggtccctgtccctcagcccataggccmctgtgataattgtctgcttagcatttccatatttattgtaccaatgattgtaatgaagatmtacactgaaagtttgagattataataaaaacatttttcmcawmwramhrawwwwwwwmmmraaaaaaaaaaaaaaaaa

SEQ ID NO: 4930 - DNA, 600 bp, Rattus norvegicus
agttcccaccttgctgaacaccagtgcacctcattaggcagctgcttcgaagacwcaaagtttctccaatatatgtgagtttattattctgttatagccagttagaggacatggatgtatttattttgaaaacatgtaatatgtttgactctataaaaggtactttctgttgcaatccttammwrrawawmmaraamcacaccctggtttaattaagtaataatattttttcgtcttgtcattttgccaactggttctgtgttaatagttgtattctcaaatgtgtctcctaaacgttgtccagactgtatacacgaaacacacactgtctygtgtatgcacagaagtgcacagcaggcgccacactggagacgtctttggcaggtcccctatgatttacacatctaaactgtgtagcatagagcttggctgtcccctccagaaacatgtagaatgtgtttattgtcccttctacagcatagttaagatgaggttttcatgacgataaccaccataagcatctttaaccctacatatatattttttctttagtcatgaaacagaaactatagagcccagatagaaaaaaaaaaaaaaaaa

SEQ ID NO: 4931 - DNA, 600 bp, Rattus norvegicus
gtgctggcttctgcagtggaccaagcaytggtggcttcagtggtggaccaagtacaggacctggctttggtggaccaagcactgcaggtggctttggaggaccaagcactgtagctggctttggtagtggactgaacaccaatgctggattcggcrgwggaccaaacaccagcactggctttggtggtggactgagcaccagtgctgcattcggcggtggaccaccaagcaccagcactggctttggtggtggactgagcaccaatgctggattcggcggtggaccaccaagcaccggtactggctttggtggtggasccaatggcctgggttcctgtggcttctcttacggctagtaaagtttcaggcytgttccccgtttacggataacgctaaccgcagcagtacttcctacggagccaatgtgcggctttggaattgttgtccacacagcagcctaagcactattacccatcagctgagtgaaacactgaaaaatctgctgttcctgctttgtgttgcttcctgtgttgttgtcctattktggtatcagagttacattaaatttsccaaaggaarmwdaaaaaaaaaaaaaaaaaa

SEQ ID NO: 4932 - DNA, 600 bp, Rattus norvegicus
gactgcaatgcgatattggtcttttgctgcacttcaaaaccaactaaccagtaagacaatgtgtgtgtgtgtgtgyatatgtayacacacacmctaaatrcmmmtgttswgatgaatatgyamccagaaaaargwgctatkttttcactgwaskgtacgattaacaaaatggcgccaaacattccccctgttcgcacgctttagcatttctctagggtgggccgggcccgatttcaccctataggggtcaagtcacccttaattgtacagccttttaccactaagagagcgttaaaacactgccggtcccctgggttaccccactaatacactttccgttcacccccttttattcagttcgaaaaacaaaaagagcccgcaccgaaaggcttttcaaactttgtgcgctggaaaacaaaggccatttttcccctaaattttgttaaaatccggaaaaccttgtatttaccccatttttacaatacgccccatctgaaaacccctaaaaacaaaaaaatcccgcgttggccaggggtttccacgtcttacaaagagccccttaaaaacggttctggcaagacccattaaaccgtcgtttcg

SEQ ID NO: 4933 - DNA, 600 bp, Rattus norvegicus
tgcaatacagtgcttakagcatcctggawccgggctgaggcccctcccacttgctgtaagtcactygagagtccaatcacccggttggggctaaaacatgtcttchtsrtgmsgtcaactccaatgcgctcagtgtcataatacgcatacttcactgtgagaggggtgaacatcactcccatggtccyccymgdgmcgcccattaaagtgctgacataggccttgatgctcatgcgcccattctgaagacccgtgtccactgtraggtgaatggggttcggggcctccctgctgtagtactcatggatcagcaccgagtgctctgtgatgtcgtgccctgtggcataccagcctaggatgagctcatttggggagactttcttatgcaattcatacatattcwtggcaaattccatgtcaacagccacttcatcttmtractcattgtgtggcactgaaamgcagytgkygacwtstrcsgagtgmttgwcaacagttcccagcagggttccgataaswcgggcagctccctcgktgcggcgttcatagmtgwcmamratcgaggccraaatgactggatgtagcctgdccwmkyggccg

SEQ ID NO: 4934 - DNA, 1097 bp, Rattus norvegicus
gctggccccgacgcccggctagctcctgccctgcccgccatggacgggccacagmssccgrcccywtgkksytcmttggasamcwgsstyycckmwcttcagccagaagctgcaaggkgaatacttcaggtacaaaggcattccctttccagtcggcatgtatacaccagagagcctcagtctggccgagaacactagcamtgtgcgggacgacgacatcttcatcgtcacctaccccaaatcaggcaccaactggatgattgagatcatctgcttaatcctgaaagatggggacccctcgtggatccgttcggagcccatctggcaacgtgcaccctggtgcgagaccaccataagtgccttcagccttscagagcggsccagtccccgcctcatgtgctcccacctccctattgaactgttcacgaaggccgccttcagctccaaggccaaggtgatttacttgggccggaacccccgggacgtcgtggtctccctctattattactctaagattgctgtacaattaaaggaccctggtacacctgaacagttccttcagaatttcctcaaaggagaagtgcagtttggctcctggtttgaccacatcaagggctggatccgkatgcggggccgagagaacttcctgtttatcacctacgagragctgcagcaggacctgcgaggctccgtgcaactcatctgtgagttcctgggccggccactgggtgaagaggccctgagctctgtggtggcccattcagctyttgctgccatgaaggccaataacatgtccaaytacacgytgctgccgsccagcstgmtagaccaccgccagggggcgttcctgcgcaaagggatcagtggcgactggaagaaccacttcactgtggcgcagagtgagacttttgaccaggtcyaccgagagcaaatgcacgggctgccgagcttcccstgggacaggtccgcagaggacggcagccctgatggcgagactgagcccagccctagccccagccytggcctagcctctgatgaccccaacccaggatcctcacaataaacttgtcactccagccaaaaaaaaaaaaaaaaaa

SEQ ID NO: 4935 - DNA, 724 bp, Rattus norvegicus
gcctctgggagckwttcaractctgaggggcctgagacagatacccaaagaaacttccgaggccatacccctcttgacctcactcgcagtaccaaggtgaagaccctgctgttgaacgctgctcagaacaccacggagccacccctggccccacccagccctgcagggccagggctgtcactaggggatgcagccctgcagaacctggagcaactgctakatgggccakaagcccagggcagctgggcwgagctggcasagagactggggctgargagcctggtggacacatacwrgaagaccccctyccccagtggcagtctccttcgtagttacaagctggctggtggagacttggtgggtctattggaagccttgtccgacatgggtcttcatgagggagttaggctgctgaaggcgcytgagacccgagacaagctgcccagcacagaggtgaaagaagacagtgcctacgggagccagtcagtggaacaggaggcagagaagctgtgtccaccccctgagcctccargagggctytgccacgggcacccccagcctcaggtgcactgaatgctacccggtcaacttccacctggatccctctgtacagcatccctgcctaattgaaatcttatttaaacttcaagcccacacctcagtgggccaaataaagggaaagacccctwmmmarwwwamrrwamrrmaaaaaaaaaaaaaaaaa

SEQ ID NO: 4936 - DNA, 600 bp, Rattus norvegicus
aagaatttctagaggcgaaaactgtctttgttctacgcagccaacaaaatttcatcgagcccttgagcacagccgtgatatcaaatytgggcaagtgtcscacacacaacagatgcctggcttctaaagccacacatgacaaagcctccggagtcttmtgaggcttgcatcaccaagctccaggcttggtgctrccgtytggytghtgktgagctagactttcagcagstgcattttgastcrccyttgagcccytgcacaaagtgtgtctcagagatccgtacaaatggtytgggggttccmccasggttgkagaccaccaggsttgrcywccagaaccttccatgtagckttttgagmccatggaatttcatcmwtamytmgatcccatgttcaaggcttattccacatttgcctcttaaataaaactcccctagacggttgtggatgtagcttagtggcagaatacttggtgtttgcacggacytaacccttgaawgaacatttcctggcttctcaaattcccytaaatmtatctcgcttkccgctcagcatwtcagagtaaacacgtcaytgttatctaaaaaaaaaaaaaaaaaa

SEQ ID NO: 4937 - DNA, 600 bp, Rattus norvegicus
gcagaagggagggaaagggatgtgatgggatgttskscamkarrytwagcgtgaaacttgagatttacaaacccgttcgttctggccagccytgaaattcacaaggcagcggaaagtaaggggtgaggtgcagagcctttgtcaccaacaggaagggtaaggatgtttcggatgtggtgcatctcattcccacrgaagtaaagtccaaccawcgaaggcagggcagtttactgctgccaatcaaaccttctcttccctcttgttctggctgatttctctgtcagcgtcggcattcgtcatcgtcctcccgttgcacaagaaatgaagtrcatgactcttgtgagagaaagaaaaccaatcccatatcatgttgctcctggtgattcggtgacaaataagtccctctttaggcatcctgcaagacaaacgacccacgcatgctatttccactagtcagccctgttgagttggagtactaattagacacttagagtctcgcgtgctgtttgtatattttgatgggatgttgtgatgatgacgtacgtggacgtgtaaaacggaataaaagaaraaaaraaarawraaaaaaaaaaaamwwra

SEQ ID NO: 4938 - DNA, 778 bp, Rattus norvegicus
gtcagcattacaggcagcttgttatatacgatcttcaaagaactgttttcctcatccagtcctaacatcatctatgggaaagccttagggaaatgcagaacacaccctgaggtgatcagtgtctttggcgagcctgtgaaaggctatggggaaatgtcgagacgtgggcggagacaacatgtcagctttactgaatatgcaaacaacgggctaaagcgcatccgtgtgaagttctatatcgagggctctgagccagggaagcaaggaacggtacacgcagaagtggaagagaacccgaggagtggccagtttkattttcgatatatatttgtggacgtggctcctaaaagatctattgttgttgaagataaccgtttccaacaaagttaaaagcctcaagccagtgcrgtgcttcmtgccgagaatgaagggatccgttctcaytgcgatcstcacaactctsttccagaatttgttcaaaaaaacargaataawgtatgtcacwtggaaarrarrwrmaawrwragtgagtgttcatgagtttggagaagcagatctttcttgtgaaaaatcatgagatgtagcaaattmtatattatccttgacttgccgatcatgaccgtakttcagctmtacattcatggtaaacctttgttastaaaatttatacaccacwtawgtaaaacmktcaatakdktrtgytawttaatattgtatggcttttrtataatcaacagaataaagrttwavctwwcwaawraaaaaaaaaaaaaaaaaa

SEQ ID NO: 4939 - DNA, 600 bp, Rattus norvegicus
tcattcacgccaaaaggacctacagggagctgcgrctkctgwagcayatgargmmcsakaatdtrwkyddbhwkwkgsmwgtaagaaagtgtaaagccaattccagtgttggacgraacaggtctcgtatttaggtcaaggtgtctccattctytatcagtgcagkgaywtgcagttctktkggssagrdtagsamyytksatcatctggaryyywgawggaggccgactggccaggcctcaccgcctcagtatgmagtccagctccacgtcatcccctmacaatggttagtagcaacgtytgggtttgaacsccaggsgtggytatwktattgaggatsccywtgcacatgtgvccatsctgtgttaggmctgtgccccagggcccggacttkaagctakakctggcagaagagctcytggcatccatggtgcgatgctgccgccacccagtttswccattggaagacaagggaatkmgaagactgctgtstatgtgtatttgtgaacttgswtgtgatctggtatrccataggatgtcagacaataycactggttaaagtaaagcmtatttttcagrttcaaaaaaaaaaaaaaaaaa

SEQ ID NO: 4940 - DNA, 502 bp, Rattus norvegicus
cacgagggggatgtgtaggaggcaaaaactgatctcagggagggaaggggatggagaccacagtctcccagtgggtgatgcttktrctgctgcttackccgacctcctctccagagcagaggggggcttggaaagcaaagrccctgccccttcgctcctctcctcawtgcattgggcattagtgcccccccttgaagcaataactccaagcaggctccagcccctggacccctggggtgrccagggccccctatcagctcccacytcaagggatgggggacagcactgcctytacgccctgcagagcaataacactatatttatttttgggtttgrccagggaggcgcaggkccatggggcaarccagggcccagakcccttggctgtacagagactytattttaatgtatatttsctscaawgagaaaccgcttttggttttgaacctttawtgagaaaaaaaatatactatggagctcaarwaaaaaaaaaaaaaaaaaa

SEQ ID NO: 4941 - DNA, 600 bp, Rattus norvegicus
caacctatwtgaagagatcttgaatgaaatcccagaagagcaacaraggctctactcaggccaggatatcactatggacatcccagaagagcagccgcggcatgatacaggccaggatgtcgttcaccttccttatagacaggagcttccttataaaaaccactatcaagaccacatacaaacagtcacttcacggtatttactttcttcaccaaagccatctgacgatattgtgaktgacttctcagactctccagagggttcggactcatccacagactcatgaagctgccacctcshttttattggcagcgagatctgcacggttcagaatattacaacatctcaaaaatcggcaagaaacatatgtatatgttktatatmccacaatgtttaaactgktagaacatcatmttcaaacagtagataacaactactaaacattaaaaataaaattcaatcaatgcttcataccactgcrtgaatgtaattctmtggactaaaaattcaaattaattgaatttagtcaaatcytaatcatgtgccatttaactttacataattatactgtatttwamctcttaaaaaaaaaaaaaaaaa

SEQ ID NO: 4942 - DNA, 565 bp, Rattus norvegicus
gcatttggaaactgctggtatcctttcacgaccggaaaagaagttgctaaatttaaagcagaacgatcaaaggccaagtggcaaacgggaaccaatccgctgtacckaggctccrccagcacttttaagaacgtgacctmcaarcacagggagaagcwcmaagtgggccyttcttcagatgggtagacagacctccttcggccagasaaagtcagctstgcttacgttaaaggttaatgcactgtatgatttgtcttcctttgtttcgtcaaaaggaggttgacktaagatactaacaggtcattcagrgatcagtcattcagggcgtgaaggtgagacattgtttgcaagttggaaataatcaagaaaagaatatcccaagcaaagaggtgaattcragatcactwgaagaatatgaaytctgacgcattaatgcctcaaaaaaaatcatcaaaatgattcatggggatttgatttgcatttgmaaaatgktcagaattagratctcatttgcttcctgaatccagctacctaaagtctttgtctctaaaaaaaaaaaaaaaaa

SEQ ID NO: 4943 - DNA, 600 bp, Rattus norvegicus
atttagggaagggcacacttaccctctgcccctaccacagtgaccggcagctcatgagtcaagtgrctgtgscggggctgctcaccgtgcttgtttctttcctggatgtgcgaaacatcattctagggaaatctcactatgtactgtatgggctggtggccgccatgcagcctcggatgctggtwacatttratgaggagttgcgaccattgccagtttctgtccgcgtgggtcaggcagtgratgtggtgggccaggytggkaagcccaaawcgmtcacggggttccagactcacacaactccagtrctgttggcccatggggaacgggcgragytggccactgagragtttytccctgtcaccccaattytggaaggctttgtcattyttcgaaagaaccccaactacaatctttgaaaaatggctgacactagagaccctggstgcagytgactttttttagcargctgtactgcccctgccaggggcagataytgttccagatmtttgggggaattgttacctcctgctgttttgttactgagtaagataatcttgtsgaataaagacctttwtccccaaraaaaaaaaaaaaaaa

SEQ ID NO: 4944 - DNA, 600 bp, Rattus norvegicus
  misc_feature (484)..(484): n is a, c, g, or t
gaccmctgtcagcacagaccaactgggacattgctcacatsatcagtggctttgaatgaaatccagatkaagtgtccagagytaagcttggcccttgtgaacgtgactgtagctggstcamaggsagacttttgtaaaamtaaatcagtccyttgaarwrhwwmamaammmaamaraamaacaacacagaacgacacaaagaacactcgcgggggggccggtacccaattcgccctatagtgagtcgcataacaattcactggccgcagttaccaacgtcgtgactggagaaccctgcgtgaccacataacgcctgtaggaatcacctttgccgctgggtacaccaaaaggcggacgaatgccttcaccagtggcgcgaatgtgatgaatgtcgccaattggacatcgtacttggagcaccttaacaagcaagaatctaaaatacctctggtggctagaagccaaagcgagaccgggcgacatnggggacagtttttgattctccgccatccactcgaagaggatgagtacgaacaattcggtgcaccatgtaaacaagacacacactggcacaacagaacgcgcagcaagaaggccaac

SEQ ID NO: 4945 - DNA, 600 bp, Rattus norvegicus
ttgcatggggtctactcattatttctggtggtttcttaggcttgtgaagagcacgkttcccaagatggttttctatgtgtccacactytcaatgatgcttgcttaccatcctttgttcataccaagagaggaaaacctactgttttccagaccctgtttaragggttmctaaaaattaaggtkgccttttactcytgaaawatttaacawttmgkcaaygaagtkgcttytcctaagtttaaymykgahrwkgtgaaaataaatgcagttcagatttyttattthttaarattcattytkccaaaggatgattaaggaattatgctcataaagaacccaagtaaactgtmttgkgtgtgtgctgtctttacawacawacacatttgtgkgtgttcmraawmcagtgctttttgttcctggctttttttgttgkacatggattmaracttcytaytyttccaggatgatgtttgtatgtaaagcmcatyttatggkatksccttatttttgttgctttattcatggcaaagtgtcagtttdaraatgtatgtttaataagcmaacaataaaaamgttwaadwwaaaaaaaaaaaaaaaaaa

SEQ ID NO: 4946 - DNA, 662 bp, Rattus norvegicus
  misc_feature (62)..(62): n is a, c, g, or t
ttggtgcagtaccggagcacccgagatcgaagctggacggaacaaatagtggatcatgagcntagattctccctgcctagtgtggatgaacagaagctgtacacatttcgggttcggagccgctttaacccgatctgtggaagtactcaacagtggagtaaatggagccaaccaatccactgggggagccatactgcagagggtaaagtgacccaaatgcatcatccctaaatcattcacccataccctaacctttggaacacattttgccaacctggatccaatgcttattgcctcccgctatggctaattttcaatttcatgtcccatgtaactgcttttccattccatacgccctacttgagaatgccccttgccccctttccctgcacaagccctcccgtgcctagtctagtactttttcactttttttttgagagagtcttaccctgtagtccggggtggctgggaacttactacgtaggccagattggcctataactcagaggcgatcatcccacttcttcttctcaagtgtcggcgttcttggcaagcaccaccacatccagcacggccctcttcttttacaggattctccctccctttttctacctaccattcaactgttgccaaatcaataagaaataaagtttttaaccaat

SEQ ID NO: 4947 - DNA, 574 bp, Rattus norvegicus
aagcctgcggtgacgggcagccctgccactcgggacccgctttcttccacagcggtcgtgcgggcagcccactaccaccgccaccgccgccgcccccaytaccactggccagagacggcggcgagaacacccagcccaaacagatctgcaccttctgcctcagcaaccagagaaagttgagcaaagaccgtgacagaaagacggcgattcgaagttagaaggaggagggtccacagcagccaagaggtgatgccaytagtgaaggtggaagccactgaagagtcatggagagccccaccttggacctgatctgagcacaggtccccaagagcgcgctcaccaggccagacctgccccagctctgagcaggscctgtgaacagagagatggacaggcgggctatggcttgactctaagtagctgaacacttgtacccaggcccactggaactttccatgctggctctctacctgggccaagtgttggcatcttgtgtctttaatatgataatataaagtctggaaattttgtataattaaagtgaaacagtatcttccaaaaaaaaaaaaaaaaa

SEQ ID NO: 4948 - DNA, 600 bp, Rattus norvegicus
gctgaatagagagcatttattacctttcaaagcagtcgtttacaagtaaaaatgatgcaggtattttgatgcttttatttcatattgtttgatatattttcatgaagaagtcggctctgctcaacattctcctggtgacagcgagttacatcatatgctttgttccttaccacgctgttaggatcccatacaccctcagccagacagaggtgatatctgactgctcaactacgattgctctcttcaaagccaaggaggccacactgctgctggctgtgtccaacctgtgctttgacccaattctgtactatcatctgtcgaaagcatttcgactgaaggtcactgagactttcgcctcgcmtcaaaagatgaakgctcgggaggaaaaaccgagacgtgagaatgacgtgcaaagtacaggctmtgcgtgttagtcsttcttcmtgactggaccacaaagctggccacagttttcaaagataaaaggcgatgttaagatagaagagtcttaggactaaaggctgctgatagctggtgaacaggttcacgcaggacgtcaacacaagccagccctgcaccctcacagttgccggcctcgtg

SEQ ID NO: 4949 - DNA, 600 bp, Rattus norvegicus
taaattaaaactcagtagaccagcaggagtttgattctgtttctgaaaggtgagttatgtattgctgtcattggscctatttaaaaacaagttttcttgctttcttagtggtagtcatgaattgcagggtatttttgaagtctatcacctgaagccaagaatagtggctaggttaatgctatgatgaaagaaaagaaatttagcctkgggtatttatttaktytyttttgtwatttagaaatgcagtcttgtttaccactgtttyttctccacagccttcgtatgttggctcagctctcttgtgttagcaacttatgaaaagactgtgaaagcaaacgtaatttatctgtttttttttaagggaactcgaaccagaatttaaaattatgaattgatttgtacaaataaaaaagcaggccatcggaaactcttttgtcagatagtgtccaggaaaacaaatctcagtacatgaaggctccatgttctttttgcctggggcaaaatgatgtatcttctgtatttagcttttaagactagtgaaacaaatggcattatttattaaaattctactcmggrtaammrraaaaaaaaaaaaaaaaa

SEQ ID NO: 4950 - DNA, 600 bp, Rattus norvegicus
gaaagctcactyctgtttgtttgatgtcatcttgtaatgaatggctcctttgcttagtaccatgtaggsccgtttctttcctcctacagttttcttaagttaatcacatggattctttgtactaggacttccttgagtaaagctattgacatatttctgctggagcctaatacacatgtgtattaacataggcattgttttatattaatgataaattctrctggcttgctttatgatagtttctgatttctagctgcttatgtggtycatttgattattatttgtgtcagaataatgkgacatttatgattgmtaagctytgagcagaaaaggagtgcccaagaaaattaawtgccyttgktttactgtatgctcaaataagtattgraaatattcaggctttgracccaragttcataggatkgtwatttagytycattttatttacttacagaaatcaaaacmcaaggtggttttaagtaaaaaagcaaaaagtmctaaaatattgtaaaacattytgtgttgctcttactttagaaatttgcctatttytaggttcaaaaataaactttdctmaawwwwraaaaaaaaaaaaaaaaa

SEQ ID NO: 4951 - DNA, 545 bp, Rattus norvegicus; identical to SEQ ID NO: 855

SEQ ID NO: 4952 - DNA, 458 bp, Rattus norvegicus; identical to SEQ ID NO: 856

SEQ ID NO: 4953 - DNA, 566 bp, Rattus norvegicus
cgatgggccgtcttcctgtacgttggatggccattgagtccctcaactacagggtctacactaccaagagtgacgtctggtcatttggggtcctcctctgggagatagtgagccttggaggcacgccctactgtggcatgacctgtgctgagctctacgagaaactgcctcaaggctatcgcatggagcagcctcgaaactgtgatgatgaagtgtacgagctggccggagcaaactgcttccacctgtgactttgaacccttccaacctctgacccaagctgtctcaagaaagtcttttaatttaaaggagaaaggaaaggatccaggaaacatggggtgaagggaaacggggatccccatttttggcagctgctcctatagctaccccttcatattcttccttctacaamkgyrykmsccaytytgatgytgcccaaacccaaaccccayttytgatcctytaccaaaagcagcatgcatgttactaacaccccgtttagstaccctactctytgstcgtactcaaaaaataaatgcttggaacmgcaaaaaaaaaaaaaaaaa

SEQ ID NO: 4954 - DNA, 600 bp, Rattus norvegicus
agcatcrryacrassagtccaacggtgamrckakssttgggcatttgatgggcatccaagcagaccatggatcactgaggcactgacgtaggcccctstgcaattacttcctttgcaccaaagacaacagtctgcaactagtttctgcttttwtgtttgattgagcaaagtctcctagcgayagcaacaccgtgatttttwcttctactgggtggttctgggaatgggagaggggcragctggctatccagcggamatagtcattttcagagccagctwtwttctwcacaaagctgttcamttgyyattggttgggtcgcaaagatardacatacgtcattggaggttaccccttgccctgcgccccactgatgttttgtacatttcctacaactgaagccagaaaaatgatattgtttaaatttcaaggacattaatattattaatataataatggtgatggtgatgatgatgttgaaaactgaggacttttaaagagacattcccttcccaaatgtgtctggacagtacctgattgtatttttttgttgttgttttttaataaaaagcacagwacttttcaaaaaaaaaaaaaaaaaa

SEQ ID NO: 4955 - DNA, 600 bp, Rattus norvegicus
gtatccgcaaggagtcacttaactcaggttacgttgtgacagtattaaaccccaagggcatytggccacgcccagagcttgtaaaggctgggcactcatgcccttcaccctttgtctgcactcatcagtgaagcattgagccctactctggccaaagagcgtktcctgtcytgctgggcttmagaacacgtggtggracagcggtgtaactgggraccctttggrgatgcagccgcctactgtgtgcgcttcgtgtcatactgacttmagagmtaaggtgtgctttgctgacaagttaggtcgttacagaccacaaaccataggttgtgatttctcctttttatmttagaaaacatttctatttacaataaatrgttactatgtaaatagtgtaaatatgtattaatttcttccatgttatacaatgtacatactccctacaacctgcatgaagagagatcctattaatgtccacatcagaatttctggctattgcaaacagctagtgaaatggagggccttacagctgtcagaactattgcaaataccgttttccgtaaataaaaacataccgctaaaammaaaaaaaaaaaaaaaaaa

SEQ ID NO: 4956 - DNA, 600 bp, Rattus norvegicus
aagtattgcaccttttgaartacmccaaatggattgagttcctaattaaaagagttyttttgcccctgtcagtcattttctwatatgcttrgcakagrtttmcaactcactgtgtagtgttcctagattcagctgaagacgagatacacagggtyccttaagggctggtgttgggaaacacagccgcactggtgattgccrkchcbwksargtgatgasgkyacaggcctgcttcattaakaagctatgagcatgtggggtggggavcatacttttavccaacatggsgmccagtcarggctgtacccctttttttctyccatgcctatgaggaatcctkgmacrastggctgaagctctctcaawaatgrcgagagawtcatgactctttataagtgttaatagagactttmtcagattattttgtttgcaagttccagyttttaaaaatgtttaggtaatctccttccccagtcctgatcttgtagattcgttagtrccgaaccaatgctttcttgtgtctcaactctttgtatatgaattcttttcagatgtattaaacaaacaaaacccttmmmaarwraaaaaaaaaaaaaaaaa

SEQ ID NO: 4957 - DNA, 600 bp, Rattus norvegicus
aaaggctgwttgttccctctcacagtagggcatgtctggggcacgggcgtctgagaagaatgttccaagttggtatgagggaagctggcagggtttggggcaaaggsacasgatcccgttgttagrgcamsaggwrgkscgtcccwswkctsccattccwmaggatragmtggkrkcwgmcwgmytrgaaaaaaaagctcctggaaaaggcactmtggaaggttccataggctggggacctacacagtacatmagcttcytagcagaggcccagtgtgatggggtcccagacaagggtcctcagtcaggactgggytagcagcagcccagctcaaggtcagmttgggcgctgcagacgacaccgaccgacacttccacccacaggccttactgstctgtttacagtgacctacctgctccaggcccctccaagaagrgactggggtacctggagggccattctctgggtcatggatatatgatcatttgattyttttttccttaccttaaacctmtaacctggcttttcccatttcaactcctgtgatttatgccaataaagtttgccatgattttcammmraaaaaaaaaaaaaaaaaa

SEQ ID NO: 4958 - DNA, 600 bp, Rattus norvegicus
aagaagaaacatcacggaagagsyttaaaggcagctaraactaaaacccttaaataacttcagagaaaaatggaacattttccaaaagaatgcttatccttgaagacataaaagaacttgtctgatgtttttcttggggaacagaaccccctacctccttttcttctagctttgcaatagtcagccctccaaccctatytcctacctccacctcaccctgcttacattggactgggaacctaaattggaagggagtctttacttacataattggaatttaaatcacaagatttagggaacatgtgactctttcatgcaacctcataaagtagcctcgaatttttgtyytttgggttttttwttttttgctttttttgtcacgttcctcatgatatacaacttttataacttttattcattttactagatcccttctaaaatgttttacatggtaaatcttaagctgtggaaaccactgaaggtgcttattaatggttctccagatgtatacaactattggatgattccttgagtttacagctgtacaaatgtgcagaaaataataaaaaaactgttaaaaataaaaaaaaaaaaaaaaaa

SEQ ID NO: 4959 - DNA, 600 bp, Rattus norvegicus
tgcctgaatacctgtggaccaaggagaacgacatgctgatcractacacctccayyccagagttyctcagcagcccctgggactggatcssactayacaaggtggggatgcgacacattaatgactatgtatcmtatgtctgggtcggtgacaaccaagtctcccgtkrtaacaacccaaaccaggtgtatatcaacatcagtgytatccctgacacggaggagcagtttcttstytgttacwawagcawcaacytgcaytytatagtggggataagtcaacccttcaagatcccgtccggbttctttttraragaggacacactrwytgagcttgaaccacagctytgagcccagatgggagtgaatgaatccagggcggaggctadagctggaasccarytgtgcttyagcaytgccarcagcgytgggtytggcccagcccctgaggaggcatytgagtttyctccagctccccacctcccaggggagctcagccaacctcctytgctctytytagtccagatgaactggccctttaatacaggttttttattacagarawrwvrwwrrramvrmaarrwwwaawtttaaagtcccg

SEQ ID NO: 4960 - DNA, 1038 bp, Rattus norvegicus; identical to SEQ ID NO: 864
  misc_feature (967)..(967): n is a, c, g, or t

SEQ ID NO: 4961 - DNA, 600 bp, Rattus norvegicus
atctskatttgtacaacattgtaamacggaytttaacacmggtagtggagcctgaaagctcataccmyragkrgatytacargctwtaaagcaaaatwcaaccmgtacagaagacactggattgcttgactgctggacwagagaaaatggagacattgmsgtgtytaaatycaatgggggtggggggaggaatcctgagtttmccaraataagctgtgcagggtcccatgatgttctgtggacatgamttccttytgcctcaacactgaaatttcatttgacaactgaagtatyttaattcagcagaaaactgactytacaaattgcttttttttttgtactgcaatttaccttgatgtgtatacagacatgtgcataagtcacagggacctgtgttytgtaataagttgaatttytacacaatattaaagttcmccmctccmgaaaararwrwwrarwaaarwwmmwawwwwaaatttgaraarrrrwmawrmwawttgttggttgttactcagactgcctcaaactcccaattctcctgtaataagttgaatttctacacaatattaaagttcaccactccagaaaaaaaaaaaaaaa

SEQ ID NO: 4962 - DNA, 600 bp, Rattus norvegicus
wcgctcatcttcctctctgtmtacttcatcattacactgtctgatttagaatgtgattacattaacgctagatcatgttgctcaaaattaaacaagtgggtgataccagagttggttggccacacctttgtcactgtgmtgatgcttgtttccttgcastgggtcatmttccttctcaacttacctgttgccacatggaatatatataggttcattatggtgccaagtsktaacatggsagtatttgatccaacagaaatacacaaccggggacagttaaagtcacacatgaaagaagccatgatcaagyttggttthtacvtactctgwttcttcatgtatcystacagtatgattctagcgttgataaatgmctgaagctggagtagccgggttgaagccagchtacaytacacactgcacaatcgaggaaccagagactaaaaccacccttaggaccgtgaccagmscagtatatattttggtctytgaacaaaagaactatttttgctgwatttttacgacataaagtwtttaaaaaaaawaaawwrarwttttgtagatttctgatttctcaaccccwacaaaaaaaaaaaaaaa

SEQ ID NO: 4963 - DNA, 600 bp, Rattus norvegicus
acacaagtcattcagaggattgtcagaaagactgcggtgcctggccttgtgggaaccaaggcccagcactgtaccgcagtcctgtttacagattcctacagtgaaccgagtgggtaccgaggcttcaccaaagaggtacttgttgttattgttattgttttaagaataattatgccaattttaggaacattccctacctacccctactcacaaataaaatgtggtggtgttgccttcaaacaaaaactttgacgtcatgaacatgatcgaagaggaacttgttaaagcgtaactgtcaagtatgctatccacacttaggagactgttaatytctgctagactcgtccccagccccthtgtccctcagacgttyactggtaatatctgtcstggcccactggccaccgtgctgtgcmtaatctgtgttctctgcttgcttttccagtcagtccacaakctgtgttcataactagatggaatgtagaatagttaacattaratgcttttaaatgkttgcttctttttaaacaaaaaskaaaacccagaactgaattwtgmssyggatttttaaataaymaaaaaagrwtgtttgaaaaaaaa

SEQ ID NO: 4964 - DNA, 600 bp, Rattus norvegicus
ccctycatcaacaaccatyttggcctcctccaacaaagtgaraggtggggatgacatcagcgtgctctgyactgtcctaggggagcctgatgttgaggtaraattcaggtggatctttcctggacagaaggacraaaggcctgtgaccattcgggacacctgragactgattcacagaggactgggacacmccacaagaatctcgcagagtgtcattaccgttgaagactttgagaccattgatgcaggctattacatatgcacagctmagaatctccgmggacagaccacagtagctaccactgttgagttctcgtgatytggaaagtgaatggtgacmtaatgggatgcccatctgcacacacagcttsgaggtgctttacaggaggcccagggccaaccgctgcctgtgggtcagacagacatccaaattcaaaggaagtcattagtctattaatagaagtctaaacttttgtaacaaagtatgtattttgactaagccatgtttctacttttataccaagaaaacatgtcaacaactttgtatcagtcatttctattaaatgagcaagattttattttwaaaaaaaaaaaaaaaaa

SEQ ID NO: 4965 - DNA, 736 bp, Rattus norvegicus
  misc_feature (546)..(546): n is a, c, g, or t
ctcagccagswsgwgratttttgcaaggacatgtttgtgttaaagctggttagaaaaaaagcttttagaattcaaaatatatttctagstatatttttataagcttaattgaaataaaaattctgtaatcagagagtgccacattaacttcttggtccatttctgaacaggccggggtgagcacccaagggagaggttgcctttagccctactgtggggcagtatggaatcaaatggccaagggtgacccagggtaaaccatggggcaccttaaactgtgtgagaaagaaggtccagaawcctgaggaataaaacaatggattaccctggaaawwrahwrrwwwmwwtatgaagcagaatgggaattrtgattyacggctaagttactaatgtgctctgctgtaggacactaatagagttgcttttctcgggstagaacgttgtgatgctgtaatcrgaacatgcttcccctgttattccagctggaaatgcaaattcatcgtcgggctctmgtaataatcgcagtktttcctrctttgggctggntaaggasccttgacagcagtgttcgcttaggcaataatttrgactccaccttayttktgattactwtagcaattwccatagctacaagataagattttactgtmttatttaaattttrtgaatctgttttttacamtaattttcccaataaagtbtwttwtgarccmarwhwaaaaaaaaaaaaaaaaaa

SEQ ID NO: 4966 - DNA, 600 bp, Rattus norvegicus
agcaaygccaskgmcygsawktryytrgycakygstgccatccwgctmykctcagctccgcattgcttttaataacactgaaccccatcagagccagaagcaggtgcccgctgcagtttttgacacatgccactttccctacagctggaggccttgggagcccmaasttttttttctccaaagacaaacttggggatccttgtgctacctgtctcctcagtgctcggctccccacttcctcactcaggttcaggacccagcttcgtctgggttctatgctcactgctgtgtcttctggggtcaccactgtgccaaccgthtccaggctgcctgcctgacagctgtggggcgggcagaggkacgagataccactcctttcttgcycctacccmtggcagaaggacagaacttgcccggagacagcacctggctttatgtaaatattcccaagcagctgttagatactagtggggagggcaggaacccytgcactgaatgtacggagacttggtggggacagccctgccctcagttctgtagactartttggagawggaataaacgtttttytcarmmwrwwrwaaammwmrwraaaaaaaa

SEQ ID NO: 4967 - DNA, 561 bp, Rattus norvegicus
aagaaccagacatttgggggagctgaaactgtcccagaagaggtcatagccatattcaacagcacagctctgaaaaaggatggtctwaacttttcctgccaggctgagctgratctacgaccccacggtgggtctctytaccgccgcatctsagastascwgmsycttgamktctmygaaataaggcaagacamccagatggtcatcatcattgtagtggtgtcaatacttctgttcttattcgtgacatccgtcctgctttgctttatcctcggccagcactggcacaggaggcggacaggtacctacggggtgctagctgcctggaggaggctcccccgagccctccggggacgctgacaggcgcctgggagttcccagaactcaacatggcgccttcaaggtgtggttcagygctggctgaaggactgtggcagcagcagaagatttgggggacatttccttttttagcctcaatacaaatacctggatttcammmwrwrmmmammawractgctcctgggataacagtcgacagccatgactacttgttacctgtcc

SEQ ID NO: 4968 - DNA, 600 bp, Rattus norvegicus
aactggatcttcactactgtgatcttggcagkagcmgatgagctmaggtacaaagtgctggcaykgarctaaaatrtcyyatccargtgaachggaaccactggatacatgggactstccygtgragtyctvkkgtyacagscaactstgtagaacttcvhbgatmytgtagtttggtatskrcattgggkataaatssytgccggakttgtgaggttrcagawagttaywkwtaccygakaksractgttatgacaatttstaywtstycygtytyyacaggkkrtvtktskattgccacacrcaycaacaacayyagcawaacttgtrtgaagraaagtatttwtgycyktacawyktcykgtrwawytgttdmyrygymgcatkscakcattacatygkggrtargmsctattatagatrtgctgratkkcaaaccactgggaaggggttggtsgytggcatgaggcaakcatyrdkacaagtyccagcrrcagmaggagacaaagtckggactcragcrgcttcrsacccatgtttcccagtgtgcgttgtggctcctgtggaactgagtgctggctsctcstggaaatcagaggt

SEQ ID NO: 4969 - DNA, 621 bp, Rattus norvegicus
agggggaaaacgagccccattcaccaattttgacccttccagtctccttccttcgtctctggattactggacctactttggctctctgacccaccctcctcttcatgaaagcgtgacttgggtgatctgcaaggagagcatcagtctaagcccagaacagctggcacagctccgtggtcttctgtcaagtgccgagggagagcctgcggttccagttctgagcaaccaccgtccaccccagcsybtgaagggcagaacagtcagagcctcattttgagtcctagcaaagagtgagtcctcagttaggacctggcctccctgcaacagcacccagtawagcaatcrcttttaagaarcakaattatttcagtgbtaagacagtatmcctgcawattaatccatagarytarraagcattcattttaattcstgatgcttaatgcamataatccataagcttgcttacyataatctttaagcatgtgtttgtgcttaaagccmcctagttttttgaggaatgttccataattgcaactaagtggttttttttatatttcctctctcttcaktttaaatggatcmataaattgrctttatcccttmaaaaaaaaaaaaaaaaaa

SEQ ID NO: 4970 - DNA, 1400 bp, Rattus norvegicus
tcgcctccagaaggaaagctagagaccaaagctggacatccgcccgccgtgaaagtcgctgggattcggattgtgcagaaacacccacacactggagatgggaaggmaaagaaagacaaggatgaccaagaatgggaaagcaccagccctcctaaaccaacagtgtacatctctggkgtwattgcccggggtgacaaagacttccccccagcagctgcacaagtggsccaccagaagccacatgcctccatggacaaacatgtttctccaagaacgcagcatatccaacagcctcgcaagtgaccaacgcccagacccctgccacctcagcagcagcagcagcagcagcacctgtgccccctccaggatgcttccccgacaaaatcaactcaaacaccttctacagagtttactaaatttagaaatctmagacaaagcaaagtgggcctcggttgtgkcagatccccatgtttaaaactagaagaggctcaaacaccaaattttgtttctaagagtcctagtcgastgtcagtaaagggtcattgaaccccctagaagtgccaattagcagaacatggcaagtcctgagtawaaggaagtccttcgcactatagcagtagtttaaagtccttacgtcgtggtcctaagaggaagaggccactttggagaggtttgataaggttaggagaagaaaaaacaaaacactatggtatggtccgaacagctgtgctcccttctgcccccagtccatggctgcaaatccctgtttttcagaaaagtcaaagagytagatgtagagccttytggagtgcctgctcttggagggtcytcctggctgtcccagtggcctwcagtggctccagctcagttcacggttgctctatgagcaccatgtacgccaccagcyttyccaggactactacatggcctgtaccatgtcgctaaaggagggatgggctcctcggattttatgagcaatccagtatcccaacagtgsccttcacatggagcrgaacacagccyccaagactgtgttgycagtctcttcyttskamttactmaaatggtgggaacccmrggtcgctttggrgacccaracttgstgcagcctacagccttgctcmgtcatwtggamccaaatytwggaagggmccttwgrgacmgcaacsccagttccctgtgcrgrccttcccacgtgttgcctgcatccgcwtatcccttttagttcagcccvtggggsctaccccgtgttccgtgtactytgrgctagcyccggtgtgtstctgtggactytgggtcmmtaaaggtttgcccgaatgaattyctgaatctttggcgttgrgmmgatkttgrttctaataaagctcctgcatttcwrmmwmaraaaaaaaaaaaaaaaa

SEQ ID NO: 4971 - DNA, 820 bp, Rattus norvegicus
ttatgacatgtccacggttwtgagcccggmaggscccgscccctgagttgcaaggtktggaagtagcactggctcccgaggagttggagttkgaccccatgvccatgacccagaagtatgrggagcatgtccgggagcagcaggcccaagtcgagaaagargacttcagtgacatggtggcggagcatgctgccaaacagaagcrrmasrarsggaaagctcagccccaggacagtcgtgggggcagcaagaaayacaaggagttcaaattttaggtccttctmacatacytggcmttcctttaggccstttgtatgtmtgggctttmtatgtgggttcctgaagmtagttctgtactccctaggcttgtcacttcctgttcttattttagamwtgkhwyryrarkaaagctgtttcccarggarrrwwkrawavmrrmamwmwwraammwmwmwmttttttagcttytgcaaaagaatmtacttcttgcstataatcagactgccccacagaactatgrgactgtagttgctgaaatgactgtgtggataattcamtatctcctacccttcctgtgtatgaaggctctgaggaaagtacctttaggtytgggctgaccttactgctttgtccgtggggaataaaaatagccagcttagcaccctggstakgctgggaagtaactaactgtagrctggggaagtaggccaggtcaggcctgccttattgaccttgtggcaraaaggcytatttmttactattggagaacatctgtatctaaataaaatbtaaattgttccagaaaaaaaaaaaaaaaaaa

SEQ ID NO: 4972 - DNA, 870 bp, Rattus norvegicus; identical to SEQ ID NO: 876
  misc_feature (522)..(522): n is a, c, g, or t
  misc_feature (547)..(547): n is a, c, g, or t

SEQ ID NO: 4973 - DNA, 1147 bp, Rattus norvegicus
agayggcrcgmgggctgttccgcagcgtscatggaccgtggagcagctgcgcagcgagcagctgcccaagaaggacattatcaagtttctgcaggatcacggttcagattmgtttcttgcagaacataaattactgggaaacataaagaacgtagctaaaactgctaataaggaccatttggttactgcmtacaaccatctttttgaaagtaagcgkyycaarggtactgaaactataagtaaagtatctgaacaggtgaaaaacgtgaagcttaatgatgatamacagaaagattccaagtctgaagagaccyttgatgaggswcsasscaaatwtacaaaatccgttctaaaaaagggagataaaaccaactttcctaaaaagrgasaygwkgttcaytgctgkwatacaggaacactcccagatggaactgtttttgatwctaacattcaaacaagtymaaaraadarrwawawwrhcmhkcykwtaagttttwwkgdwrrartwgrmarvrktawhwgmkkatgggatgaagcaytcttaactatgagcaaaggagaaaaggctcgactggagattgarccakaawgggsctwtggaaagaaaggrcagccggrsgccmaaattccmccaaataccargctcatttttgaagtagaattagtagatattgactgaaaccaccagtacatcwgcaaayawaaaaacctaatgtggctaattmgagcttgttactaytgtaaggaaagatcaactggaaaatttaaacaatttaaagcttgtttacttgatctcaacttttgagaaacataatcccctgtaactccctttaagtctcaaatattttcstacagctatgtaaagtattcaagagagctgcttttcctttacctcataaamtaaaggctcaataaaaatgtcatggaktgtyttgamwwawwmwrwrwhmwrwawwctaattcggataagagctagtgactttgcccaaagagttgaactgcttatcaagcctttgtcaaggacatgtaaaaaataatactttatggtgaaagttaaaaggcacaggacttgaaacaaaaccaaacaactaaagcattcttgtaagaagataataaatttagtttacttcaaaaaaaaaaaaaaaaa

SEQ ID NO: 4974 - DNA, 871 bp, Rattus norvegicus
ccgtcgccgggtgctgaagttgggcggatggcaaggagcccgctccgctagaggacggaacagcccagccttgagcacactcggactcggacccggggacggtcgcccacatcccaggccacctgccagtcggattctgaagcagctgacatgagaaaacggcaacagtcacaaaatgaaggcacgcaggctgtgtctcaagcgcccggaaaccaaaggcccaacaacacctgttgcttctgctggtgctgctgctgcagctgctcctgcctcactgtcaggaatgaagaaagaggagactcttcggggagacccccacacaccaccaaaatggagagcatccaggtcctagaggaatgccaaaaccccactgcagatgaagtcttgtcctggtctcagaattttgacaagatgatgaaggctcctgcaggaagaaacmykwkscgagagttcctccgaacagaatacagcgaggagaacctactcttctggctggcctgtgaagacttaaagaaggagcagaacaagaaagctgttgaagaaaaggccaggatgatatacgaggattacatttctatactgtcaccgaaagaggtcagcctcgattctcgagttagagaggtgatcaacaggaatctgctggagcccagccctcacatgtacgaagatgcccagcttcagatctacaccctaatgcacagagattctttcccaagattcttgaactcgcagatctacaaagcctttgtcgaaagtactgccagctccacttctgaatcttaattttcatttgaaaggccaaaaaaaaaatcatttcagagggctgggatgggaaataaamgtawttaamtaacaaaaaaaaaaaaaaaaa

SEQ ID NO: 4975 - DNA, 822 bp, Rattus norvegicus
cacgaggggatgaccccttcttcaaggcccccgtgmmcargyyskcagcakcykyytccttggcgtggcttacttcaaggggmagtgggmaaccaagtttgactcgagaaagacgaccctccaggattttcacttggacgaggacaggactgtgagagtccccatgatgtcagaccctaaggccatcttacgatatggcttggactctgatctcaactgcaagattgcccagctgcctttgacaggaagcatgagtaksatcttcttcctgcccctgacggtgacccagaacttgaccatgatagaggagagcctcacctctgagttcrttcatgacattgrccgagaactgaagactatccaagctgtgctgactgtcyccaagytgaagctgagstatgaaggcgacgttwccaactctttgcaggacatgaagctacagtccttgtytgagtcccctgacttcagcaarattaccggcarmcctgtgaagctcrcccaagtggaamwcagggcascttttgagtrgamtgaggagggggcagggwccagytytaacccagacctccagcctgtccgcctcaccttccmgctcgaytatcaccttamccgaccgttcatstttgttytgagggacacggacacgggggccctcctcttcataggcagaatcytggaccccagcagcacttaatgtcccagtgcgctacagaaaaccccagagggagggaggactgattacacattccaggaaggtggccgatagcttcaatgtagcctctgcaataaaagagcttttccttdraaaaaaaaaaaaaaaaa

SEQ ID NO: 4976 - DNA, 600 bp, Rattus norvegicus
gcttctgtttttatcacttcctcgttctttgactccttttgagaagcaaggtacaaacaaccaggtattaccaacagaggtgaatgaaaatccatttcacattcrwwraarmrwrwawwwwragaaaaaatacccattttaaatatgtaaskcacaggyryattgwagktttwtwttttwwwtttttattaatgaggccgaatctgaataatagaattttcagacttgagtacggtggctcttgcagaagcaaggcaacaaaaggaacgtcatcctktggaaagcttcagaactaagacacgttgtcctgctwccattacgctaagtcytaccaccctccgaagtcgacctgtagtggcggcgagtgtggctgccctgccaagcacaagtgagtctttaacagagtgscaagaccaggaggcgkaacagtgctgggcctgggggaatgaggctcctggattgtctatcctaggtttagacatggctcctgtgaaggaaaaacctagacccaagagtgaaattgttgcagcatccagttcatgttgaagatttcagcactcatgaaataagtgttctggtttcaaaaaaaaaaaaaaaaaa

SEQ ID NO: 4977 - DNA, 600 bp, Rattus norvegicus
caacttcactatcctggccctgggtgtgtgggctgtggcccagcgggactctgttgatgccattggcatgttkmkkggtggcttggttgccaccatcttyctggacattatctacattagcatcttctactcaagcgttgccgttggggacactggccgcttcagtgccggcatggccatcttcagcttgctgctgaagcccttctcctgctgcctcgtctaccacatgcaccgggagcgagggggtgagctcccgctccgcycggatttcttcggaccttctcaggaacatagtgcctaccagacaattgactsgtcagactcacytgcagacccccttgcaagcytggagaacaagggccaagytgccccccgggggtactgaagctgtccytggccgtcytggggcccagcaggatgcttgtcaccttctttactggacctacaatggggtatcctccattccctgccacagaggtggcctgagtcatgtgccctcggaggtcccagctgagaagagcccagtcctaattctccatgctgcccctccattcaagacacctgttaacccytgggctmramaaaraaaamaaaaacaca

SEQ ID NO: 4978 - DNA, 600 bp, Rattus norvegicus
gacamstyrystccggctcttgttagcttgcgtaaccaagtgtaagctgaggctggtctgtgcggtttgcatctgatccgtgtgtgtggtgtggtactcagaacactgctttgcctgggrtgggggcaggggtgcacagatatgggggaacagagaaaggatgaaggaactcaaaagaatttcgggtaaagaggacggaggaaggcaggggagggagctaaagagagagagacagagaaatatatagcggtatgcaaaaaamtaaaamtaaaaaaataaaataaaaacccgtctaaaacctgtgaagctgagaagtgggtgtaggggacagacaggtgacgagggcctagggcccctcctcagggacggtatcccttccgttgacagacacaggtgacccacaactgccagtaagtgtccttgacaagatttccctccaagtgactttcgtgggggtggctcaaagttcctttctgtaccaatggacctcacccgagactttattctttgaagtctagaaaagcctgctttctcttcaaaaagaaaacaaaattactcactgcgtaaaaaaattggagttagttgagttatttcctcgtg

SEQ ID NO: 4979 - DNA, 600 bp, Rattus norvegicus
cccgctgcaaatacagtcacaaggacatggtagctgaggggctgcgccarswrttmggsgargaaaaataccgtcaggacctgactgtaccacccggytactgcacagacttcctactctgtgtgggaggttctggtsctgtgctacctatgaggacacaggaccccttcytgccytacccacsacggccctgccaacaggaccaggctaactctaattccacaacccaagaccctacccaaagggtggtgctgatgctgcgagaacgctggcatttctgccgtgatggcagggtgctgctggkctctcgggctctgagggagcggcacctgggcctaatgggctaccaactcctgccgctgccatttgaagaactggaatytcararmggcckgccccagctcaaragctacctgaggcaraagcttcaggccttaggtyttygctggggacctragggtgggtgagggagtacacmcagtacacatggggcacaggatggatcccctatggggaggagggtkgacagtttgcactttggctccctgttatttttttcattaaaatccctwtccttcctkwwaaaaaaaaaaaaaaaaa

SEQ ID NO: 4980 - DNA, 790 bp, Rattus norvegicus
aagaggccgaaaattaccagggcgaggaagcggcgacaccggaaacttcctacgtgttcctagctacactgggtaccaaggtgcgcgccgcccgcggtccaacttcgtccgctcccttactaagagaagtaaatttcgcttagctctgcacactcccgtttccaaaattagtctcgcctcccccaagccagttgcagtaatcgaggaagagactttgccttgtcattatggttccttacccacgtccatgtccctaacaattaacgaagtaatgtgaaatgtttctcccgacccgatccccytctgamccctgccacttactgaaacttagtatgcccccstgccccagttcgaagagggggtcagtttggtttctgwytgtttttgaatggggcaggtagttttaataaacagattktgctcttcaaacaccgcgccagttaagctggagagaattcatcccccgcttattagcggacgaaagactcaccttcgtggtgactggtttaactatacataaatacgtatcatttgtacacgaagagctcttccaggtggacgctggctgtattccgtatttctgtcctgttcggagtgatcgtgaaatctaaggctgcttggtgtttgttctctgatgcttgtcaatgccccgtgttctgtggctccaccaaacgccaaggaggttcttcgggactcttcttcctctgtaacatacgtgtgaatagccaaattttaattttgctttaatccaataaagtcaaagtgggacttttaaaaaaaaaaaaaaaaa

SEQ ID NO: 4981 - DNA, 588 bp, Rattus norvegicus
tcggcacgaggagatcatcgactttgggttygcgagactgcggccccagagcccggcggggcccatgcagacgccttgcttcaccctgcagtacgctgcacccgagctgctggcacagcargggtacgacgagtcctgtgatctttggagcctgggtgtcattctgtacatgatgctgwctggacaggttcccttycaaggggcctctggccagggtggacagagccaggcagctgagatcatgtgcaagatccgtgaagggcgcttytctctggacsggraagcctggcaaggtgtttyggaggaagccaaggagctggtccgagggctactgacagtkgaccccgccaagcggctgaagctggaggggctgcgtagcagctcgtggcttyaggacggcagtgcgcgctcctcgcccccgctccgcacgccggatgtgctggagtcctctgggccagcagtgcgctccgggctcaatgccactttcatggcgtttaaccgaggaaagcgcgagggcttctttttgaagagtgtggagaacgcgccgctggccaaaaggcgcaagcagaagctccggagcgcggccgc

SEQ ID NO: 4982 - DNA, 600 bp, Rattus norvegicus
gccgcctcatcgcccgccgggctgttggccggcctgccccgcttcagcagcctgagccctccgccaccgccgcccgggctctactttagccccagcgccgcggccgtggccgccgtgggccggtaccccaagcccctggccgagctgcccggtcggacgcccatcttctggcctggggtgatgcagagcccgccttggagggacgcgcgccttgcctgtaccccccatcaaggatccattttgttggacaaagatgggaagagaaaacacaccagacccacattctccggccagcagatcttcgccctggagaagactttcgaacaaacgaagtacttggcaggaccagagagagcacgcttggcctattctctggggatgacggagagtcaggtcaaggtgagtggacctttgacacctccagggatggcttccttcgcacgtgtgcgcgcgcgcggtcatgcgcacgcgtctgagcccctattctctccctcaccaaactaacaaactgggcggaggtgggggtgaagtgagcctggggagaagtggggagcggggagagagttgggggtagcacaagccctggggtcttttggaggc

SEQ ID NO: 4983 - DNA, 448 bp, Rattus norvegicus
gcccctcacttggaactcccatcttcctggtccaacgctttgacccccaccttttccccccatgggcaccatctctgtcattattttacccctccacgggccaggccgggccgggtcccccatttgggctctgcgtcccccccacaccccgcggggytgggcttcgtggggatcaagcttcgtggctttttatgaagaatcccgaaccccgcytaggagcccgccccacyttcccagggctccaccctcagccctytgcccacagggcccagggaccacagtggytggaccaatccaggaccagggcgcytgggcctctctcctttcccacatytggggaggggagacaggggctttccctcaccacacctgtggctgttcccacatccctttgagtatcccaggaaaawtaaaacgcrgaactgcammrraaaaaaaaaaaaaaaaa

SEQ ID NO: 4984 - DNA, 672 bp, Rattus norvegicus
cacgagggagagtccagttctggccacactctaaagaccctcattacagatgtcacaagagtttaagaagaggaagccggcccaccatgcaataacaaaagacataagaggcagaggatgctgatctatgtgtgtggggggggtgtcttataattaatttaattgttaaaaatgagagttcttaactatattggttgtcttgacatttgtgaattatgtcataagcaagccatccctaatgggagatgaataaataccaatcgtaaggaatttatttttttaactctaagtcccatcgaaggttcttctgatagttctaccatttcacttactcaggctctgacacattttcttgtataagaggtggtgctgtctagtgaacacagatgtgcatgtgactcctgtgcagctggcaatctctgagtgcccrtgggaacgttgcatctgcacttcatccaccagacagcagacagggagaaggtgaggactgaaagggagaaaagcagaggatytagtgctcagaccaaggtggggagcatggggcagttctatacatacttgcagtccagctgtttgttagcctttctgtctttctgtttcccttacaaagatgtggaagatgcagtacatttcagaaataaagacacttcrgcwtaaaaaaaaaaaaaaaaa

SEQ ID NO: 4985 - DNA, 600 bp, Rattus norvegicus
taagctagccagattgatccccagaaagacatagagcctagaacaacgtaccagattgagaactttgcacaagcattcggttctcagtttaagtcsggcmgcagggtgccaatgacctttatcactaactctaatggagaagtggaccatagagtaaggacttcagtgtcagatttctcagggtatacaaatatgatgtctgatgtaagtgagccatgtagtacaagagtaaagacacccaccagccagagttacaggtaaggtctcgagagtgaccaggctgggagtctaatgtaattttgttttattttgagaacactgccattggaatgtttctacacgatcctattaagaataatgtaatgccctttcaatgcaacttttcatatttagtttattttgttagtgtgattttagctctgtttgtattatgatttttaatcaaaatcaatagattaaaaatagtttgacattcaaagtgacaatgtttagcaatcaaatttacatgtacagattgtcagggaatagcccaaaagttttaaatgcaaaaacaaaaaaattttaaaaaagcaaaaaaagtccaaaaaaaaaaaaaaaaaa

SEQ ID NO: 4986 - DNA, 519 bp, Rattus norvegicus; identical to SEQ ID NO: 890

SEQ ID NO: 4987 - DNA, 600 bp, Rattus norvegicus
gagtcagggtgactggggaatcctgtgtggaagggcctcacattgtaatcccgtctgtcacatttcgaaagaacagagacataatcagtgataaaaccccacacatcttccgaggcttggataaaactccacactgagcatttcaaagataaccaagactaacatcgcggattgcccaaggcgccctcttaataagcacactgcgcatatgctgtggaaggcaartctgtytgcgcatgtgctgtggaggagatgggcgtggcatcatggctgtgcctagctgccatgtcagtggaaggagacaagtgtccacaatgctgcccggactctgcttttytgcaaggagagccctttttcttaaacacgattgcctataattccaacaaaattggaattgctgcctgcctgagccctccacctttatttttgtatgcctccactcacgttcttttgaggmtaagccctacccgaggagatggtttcaaaggcaccatcggcagtttccccaagtgcccaaaggtatttcttaaagttggtatgcttaataagtgatgtaaatattccagttctctttggtagccttaaaaaaaaaaaaaaaaa

SEQ ID NO: 4988 - DNA, 486 bp, Rattus norvegicus
ccaaggcacatattaggactacctagataggatgcgtgtgtttgacaaagagggcrcgagcaaagtcatgggarcggagctcagacacgttcttaccactytcggagagaagatgactgagsaagaggtagagactgttttggcaggmcacgaggacagcaacggctgcatcaastatgaggcsttcmtraagcacatcmtaagcctytgagctccgcagcccctrgtgccctctagagaggcaaygatcccggtcaaccagacaagsgcaggcagtgcgtttccccatccgactgtagcgcagccgccagcgctggacaactttctttytaccccacccaacwccaccccaccccacgtagaacctgcgggatcggaaacttgccccacctcctgtgcggccagtagtgcgttcctgccactagggggcacttacggttttgaaataaaaacatggttcctgmwwwrraaaaaaaaaaaaaaaaa

SEQ ID NO: 4989 - DNA, 600 bp, Rattus norvegicus
acttcccatctggcccaccacctccagatcctgggctcacccctcagccttctacatcagagtcacctgatgtcaacctggtgacccagcaactgtccaagtctcaggtggaggaccccatgcctcccgtgttctcaggcactccaaagggcagtggggctggctacggtgttggctttgacctggaggaattcttaaaccaatcttttgacatgggtgtggctgatgggccacaggatagccaggcagactcagcctcactctcagcctccctccttgctgcctgacctccaagaaccctgagacccacagcttgtgccttgctgccaggacagacccagcttcaaggtccaggggtgcagtccagagggctgcagccttgagcctggcaggtgaggctcagcttgagttactctgcaggttcatctcagacccaccgttcagccttaagcagccgcctgagccaccaccgagccataacaggatgggaggctctactccttcctgcgcagtcttctccagtgttgtatttttattactgttgtaatatgcatttgttttgccatcgaaatgaggcctgtgaaatacaaggtttccttt

SEQ ID NO: 4990 - DNA, 600 bp, Rattus norvegicus
aaagtrtttmmcatctgctgcaatgggaacatcaacggtggagatcacttgggatgagactgatcacgaaagaatcacgacacygrmcrsaaagtttaaaaagghtgagyttttggacatggactttgaagcytacttggcttcttccagcgaggatgaggaagaggtggaggaagcaccaraaggtgaagatggastcagcatagaagwtgggaaaacaaagaaaagtcagaaggrtgatgaagaacaaattscaaaatatagacagctyttgcaggttrttcaaraaaaavaaaaraaarraaaaraaaatgatatggaaatggaaatcaagtgggttccaggacttaaggagagtgcagaagagatggtcaaaaacaagttggagggaaaggataaactgaccccttgggaacaattcttagagaagaagaaagagaagaaaagactgaaaaagaaacagaaggctcttgctgaagaagccagtgaagatgagattccttctgatgttgatctaaatgatccctactttgctgaagaagttaaaaaaataggtataaagaaaaaaaaaaaaaaaaagccgcccaacatcacctcgtg

SEQ ID NO: 4991 - DNA, 552 bp, Rattus norvegicus
aaccaaccggggggaggggggtggtccctcagtgtcctgtgaagttatgtggaccctcaaatataaataattttggggacccacattaacattaaaatacaaacaacattaggccaaacccactacatggaatgcctctcattttataagacctttatatagtacctgcattgttgtattggatgacttaatgaaacatttctacacctgccttgtactgtactaattgtggctgattcacatgtgtgtctgcatgaagcctttaggaggaggttctccgtaccctccatgactttctctccctctctcggccccacccgcagtgacctggcgcgaattggcatcaccgcaatcacgcaccagaataagattttgagcagcgtccaggcgatgcgaacccagatgcagcagatgcatggcaggatggttcctgtctgagccagtaccgaacagactcaaaactctcgaatagtttacctcatccatgcactttaattgaagaactgcactttttttacttcgtcttcgccctctgaaaaaaaaaaaaaaaaa

SEQ ID NO: 4992 - DNA, 575 bp, Rattus norvegicus
cagaggaactaaagagctctgggatccaagacgtatttgttttctgcaccagaggggaactgtcaaaatatagagtcccaaacyttctggacctctaccaacaatatggaattgtcacccatcatcatccgatcccagatggagggactcccgacattggcagctgctgggaaatcatggaggagctggccacytgcmttaaaaacaaccgaaaaaccctgrtacactgttatggaggacttggmagakcttgtcttgtagctgcytgtctcctcstatacttgtctgactcaatttcaccacagcaagccatagacagcmttcgagatgtcaggsgakstggggcgatacagaccatcaagcaatataactatcttcatgaattccgggacaagtkagctgcytatctstcatcaagagatycactstcaagatccgtgkccagataaggaagarcccagacacgcakccgcagctgaagtyccaagttstctagcgtaatctgtattggagtgmtactgccatcctgaacataaatgttatrtgcrgamwwmwwamaaaaaaaaaaaraaaaa

SEQ ID NO: 4993 - DNA, 600 bp, Rattus norvegicus
agctctcactcctgctcctgaggactctgaagctcgccagraagtcgcccgcaaagcakgctgcatctgacatgaaggytagactgtgagcctttcaaatgggaggatgtgactctgacttcaacactgatccccctcagccratgctgagccctcagaatggactgtctagaggtctcccgcctgccacacagggctcagggcagarcttgctctgatgcccttggtgactttcyccacttgaatggctctctctttagaaagagacctckcaykaaggcccctttttcctttaatgcagttttcmtaaagaggctcagkbtggsvcagggtgcagacatcartctcccttcaggcccwccagaagagaagcytacagggcaytggccstggtacatttctmtgatcyvcaggtcttgaggcctcacattgggagggataaatgcttykttttyhyytwttaatgagtatatyyaagttgtcttgtattwtwytattttccstgatgtgtgctgtagatggagagtgatgacaatcgtrtaaatgtamtagaatttttttattaaaatgaactttttcccaraaaaaaaaaaaaaaaaa

SEQ ID NO: 4994 - DNA, 600 bp, Rattus norvegicus
gttttggtggagcacccagcaccagtctctgttttggcagtgcatctaacaccaacctawgctttggaggctcttccagcaccaactcctgctttagtggtgcaggctttagtgtaagccttagcactggcaatggctttggcagtgggcctaatgccagcttcgacagaggactgaataccatcattggctttggcggtgattccaacaccagtagtggctttactggtgaacccaacaccggctccagctttagtaatggacccagttctattgttggctttagtggtggaccaagcaccggtactggctttggtggtggagccaatggcctgggttcctgtggcttctcttacggctagtaaagtttcaggcttgttccccgtttacggataacgctaaccgcagcagtacttcctacggagccaatgtgcggctttggaattgttgtccacacagcagcytaagcactattacccatcagctgagtgaaacactgaaaaatctgctgttcctgctttgtgttgcttcctgtgttgttgtcctattktggtatcagagttacattaaatttgccaarggaaaaaaaaaaaaaaaaaa

SEQ ID NO: 4995 - DNA, 540 bp, Rattus norvegicus
tgatccaaaagggcctgacttgggaaggtttccggacagctgaaggctgttaccgcactgtatgggaacgcctgggcctggctttccagaccccagaggcatactgccagcagcgagtgttccgctccctggcctacatgcggcccctgagcatctgggccatgcagctggcccttcaacagcagctgtggctgtgatggtccagatggccgttctgtgtggggcccaggatgtccaggataagttttcttccattctctgccgaggccagagcgatcccactgagctgtggaggcccagcctccgcacggggcttccctgcctcttcccacaagtcctgcagccctgagccaataggacaatcatgcccctcctcttcctaccccgctgtgccagtaataaggggctgaggaaccacttatttatttcttatccttcccattccttctgtggatgaagtattcaaggccagtaaatttctccaaatctattcatgggacaacagatacacatgggtataaataaaatgctcatacaact

SEQ ID NO: 4996 - DNA, 628 bp, Rattus norvegicus
accccccattactggctttagtcctgtgccagttgaaaatgtccaattgtatctgtgaaccacagtgtgaaagttccttctgtttataatagtaatctgcccattcctttagaaatatgccacagcccagtggagtcttgywckagagttttcyttccttagagcagctgagtactccaggagacatagcacctgggcttttctctcagcttatccctcacagcagggagttggggagtgtttggcagtttgaagtcattcccacagagaggtctttcctcattgctgagggacctgttttttgaaagctaaagcctacaaggaagtactgagaatcaggtgttgtctcatcctctttcatactcaaaaggggaagctaaggccaaggcygggcttacaagctktaactcagaagcctttgtaaagcttcacagactcctcaaatgacaacaccaggatcatgggtttgctacatgaagtccaatcagaagccgacagaaggtgattttctcttaaaacaactggttatccagtgtccccaggaacatgtccctttaaataaataagtcaaactaawawrarrwwaawaaaggctttaatgtctttctcmcamamaaaaaaaaaaaaa

SEQ ID NO: 4997 - DNA, 600 bp, Rattus norvegicus
ttctcaagtctattgcatctgcagacatggatttcmmcsagttaraggcattcctgaccgctcaaaccaagaagcaaggcggcatcaccagtgaacaagytgcagycakyhccaarytttggaaragccataagmcaaaaatccgagagascctcatgagccagagccgctgrgacaacgkgcttckgsrcbwgcgmtgdagagtggacggcargtcccagtcacggcaytcaactcaaatacacagccctgttgccatmatagagctggaatttggragaagtgsacgggaatytgagtttctgtgtytggagtttgatgaagytaaggtcaagcagatcttkaagawgctgtcagaggtggaagasagtatcagcgggctratgcaggcagcctaaytgagggagggaggagcgttsaagtgaaagtgctcacagactttctccactgacctttttaaagtcctgcttgcccattggtgttacaaaaaaacattgtatgcatgtrtgaamgtcctcaagaataaataaaaatatattttaaaaagtgggtaaaaaararraaaammmwmaawwwmramwmmaaaaaaaaaaaaaaaaa

SEQ ID NO: 4998 - DNA, 718 bp, Rattus norvegicus
cgaggtggaattctacactaaagtcatcatgggcattttccagagattgatgaaaaataaggaactcattcctttggcgttttttataagcgcggcagccactggagcctcatcttttgctttgtatgctttgaaaaaaaccgacgtggttattgatcgaaaaagaaacccagaaccttgggaaacggtggatcctactcaaccccaaaagcttttaaccatcaaccaggaatggaagcctgttgaggagctgcagagagtccggagagcgaccagatgattactcgctgctcctttcttccaaagaacactctatgaatctagtggmrrcackwskgcacaaactcgattttgatgccagtgtgcggaartgcttctgctacatttttagggtttgcctgcattctttggatyctgcataagcaagcgaaggtagcacatagtckaaaatggtttttcgtgtttattggtgtaaatttcaattttacagttgaaattttatgtttgtgatggttggatattttccttgaaatgtataaacawgtaaaaattagattactgcctgtaataaataattagatggctatctgtaaaacgtawrammwrwrmaararatatcaaaaattacttaactttaaaagtggagggggcatctttttatgggaacaagcacattttgaagtaaaaaacttttaaatatcaaaaaaaaaaaaaaaaa

SEQ ID NO: 4999 - DNA, 600 bp, Rattus norvegicus
tcaggsaaatgaagtaaygctgtctatatttgatcttcagcaggggctggattctggraggaaaaacagaaggackgcygrsrgatacatccactattcctcakgaacctgtggaacagatttctgtctgtctgacargaaagccacttccctatctctccttcctstggtagatgaggcatcaggctgcctgttaacaagtatctctggtgcatgctaacctccagacttccccagttcattccaggctgctccagctcagaggattccctttccctcckacaactactgttttcctgtatgacccataaggttttcctactcctgctcttctctctgctcccaagagcagtagccctggctcttgacagcctgcccctctcctctctgccccaragatgtagccattttgaacatcttggaagttccaaaaggctctggctattctgtctctcatttctacaaaaaatataataaaatctatataamccttwawaaaaaaaaaaaaaaaacacatgcggccgcaagcttattccctttagtgagggttaattttagcttggcactggccgtcgttttacaacgtcgtgactgggaaaa

SEQ ID NO: 5000 - DNA, 497 bp, Rattus norvegicus; identical to SEQ ID NO: 904

SEQ ID NO: 5001 - DNA, 843 bp, Rattus norvegicus; identical to SEQ ID NO: 905

SEQ ID NO: 5002 - DNA, 600 bp, Rattus norvegicus
attcattaaatatgcctaagaaaatccacttgctataaaggtctcagcgcccctcccatgaggcctcaagtggctcagcagcatctgcatagggtgtcatgkgyrcagrggaccccagagaatagtgcccctggagcctgcgctaatatggggctcacagaaacaggataagtccaaaggcaggaatgggctttaaacagcagagctgaaactcagrctttaaaagaaaattagatcaaagtagagactggattattctgtgcacatcacacttgctgcaaagctctgttcactcagacagaaaatcggtaaattgagaactccattgtgttccgtggagacgagagcaggtggaagattatgtaaggtctgaaacatggaaactttctgtttctcatcttcagtgagattccaggggatattacagtgacagaacaagaataggctgctttctamaaaaaagtaatcgcaagcttaatagctcctgttaagaaytcagataatgaattgagaatggatactgcttgaaatgaaaattaataagttagaaactaaactttataaaaataaaaaagtgagcattaaaaaaaaaaaaaaaaa

SEQ ID NO: 5003 - DNA, 600 bp, Rattus norvegicus
  misc_feature (510)..(510): n is a, c, g, or t
  misc_feature (514)..(514): n is a, c, g, or t
  misc_feature (518)..(518): n is a, c, g, or t
  misc_feature (523)..(525): n is a, c, g, or t
  misc_feature (532)..(532): n is a, c, g, or t
  misc_feature (547)..(548): n is a, c, g, or t
  misc_feature (550)..(550): n is a, c, g, or t
  misc_feature (556)..(556): n is a, c, g, or t
  misc_feature (596)..(596): n is a, c, g, or t
atctcctctcttgagcctctaatttctcccggtagtttccaggccgtgagctcagacctytcttgtcatctttgkatgtcattagcagagttctcttagkgcttgactctkktgkgtttctaatattgcacagctagacctcgttggatgacaacacctcttgaaaagactgctcacatcatcaagcgcttactggctrgaacttgacyttgtaagcagagcccatgtgcctattcctggaatccccacagagggacagttcagaaagaagaacatctggtgctgagggctggaagtccaagatcaagggtgcagacagtgaggaacttctggcctcgtgattaatacagtgagggtatcatatgggcaagacagaaaatacattgttagctaagttccgacatgtggcacatgctaaataaatgttcattgatgtttatgaaataaggtggcatctytaagtcaatctaataaataagtggctgactccmmagaaaaaaaawaamaaanaaanccanaaaannnacataanaaaaaaaaccacaanncnacatancaaccccaaaaacacaccccaacacccccccccatcaaanccca

SEQ ID NO: 5004 - DNA, 1108 bp, Rattus norvegicus; identical to SEQ ID NO: 908

SEQ ID NO: 5005 - DNA, 617 bp, Rattus norvegicus
gtccaagttcgttgtaacccattcgggatctatgggtcgaaaaaggcgggaatctggagcgagtggagccaccccaccgctgcctccacccctcgaagtgagcgcccgggcccgggcggcggggtgtgcgarccgcggggcggcgagcmtagctcgggcccggtgcggcgcgagctcaagcagttcctcggctggctcaagaagcacgcgtactgctygaacsttagcttccgcctgtacgaccagtggcgtgcttggatgcagaagtcacacaagacccgaaaccaggacgaggggatcctgccctcgggcagacggggtgcggcgagaggtcctgccggctaaactstgaggataggccatcctcctgctggatgcagacctggaggctcacctgaactggagaccatctgtactgtcactttggggcaatgaagaaacaaaccaggggctggggcacaatgagctcccacaaccacagctttggccacatgatggtcaacytyggatgtwccccaatatgggtagggttggagtaatgacaagggttatgcaggaccctccaagagtctctttgaataaataagaaaagagttrwwmaaaaaaaaaaaaaaaaa

SEQ ID NO: 5006 - DNA, 576 bp, Rattus norvegicus
ttcactattacaggaccccaagattaaagagattgccgccaagcacaagaaaaccacagcccaggttcttattcggttccmcatccagaggaacgtggtagtgatccccaagtcwgwgrysccagcacgtatacaggagaacattcaggtctttgacttccagttgagcgaccaggagatggccactatcctgagcttcaacagaaactggagggcctgcctgctgcytgagacagtcaacatggaagagtttccctatgacgcagagtactgaagctgaaccagccggcgagacttctctyytgcagatgcatacctcactcctgcagtcctctcaatcccagcytgcctggcatcatggtgtgggcaaggctgtggttaaatccccatgctgaatcaggaacagmccgttgcgagcagatgtgacttggagaagtgaatggacmtctcctacactaatytgatctgagcaaatgtttgtcaaaaacccggagctytggtaacatttgagggtatgcagataaaataataaagagtcattacattaagaaamrmarmmaaaaaaaaaaaaaaaaa

SEQ ID NO: 5007 - DNA, 600 bp, Rattus norvegicus
ccattctctgaattccccaaagcctccttaaccctcccactmttcccttcacaggggtacagacccccctccccccatttmatccttgtaggatttcatgctgccagtttctttwttggttcctttctgccctggactgcatgagtttccccagccccaagtgggggctgctagrccccttctccctgcctctgggammtargttggtgccctgcccttcttttgcagggytcytmytcytgatgaggtccarggktggggttcttagtccgtttggccttccccatattacacaccagcactttatatatttttggctmacaggaggagtytasgatasggactggggtttctgctttgggtagtagccttgwatttgactttacttggtgggagggcaggacatgaataaaggtcaawgkttghmmmmwrwrwrrmarmwwmmwrwrwttcctggcctaccwwggstgtrarmmwrrarwmmmatctttttctctcttcatttccaagttgctggctaggctgggcccctgtctggagaggccgggctgggggcggaggcagcaggggacagggtggagtctagagtaaagcctcgtg

SEQ ID NO: 5008 - DNA, 600 bp, Rattus norvegicus
ckgtacccttstgcatggaaaatcataaccaacatggctgcagtagacttctttagtggtatccagcaccacttgcagagggctgctttatcataytgtatttgggtgtaggactctagtgttcttgggtgtattgcatgggctgcattatvtacagcattgtacaataacaactagaaaagscagtatacttcactgatgcttgtctggtaatatcacttctgtgttataatggaaggttytttgtgatgtatgaaacttgtgttttttatatataaatgagtatagttagattagtgttgtggtaatgcctgttttcatctgtaaatagttaagtatgtacmcaakgcrmtacttmkgawkyakkrmagtshycakkcctagytkttctywmttaaaacattcagttttgcttcaattttatgtactttagttctaagttagatttgcagatgtgtacagatagttcatatktatgtattgcacataatcatgstrttcagcattgatgctataytgtaytawryaaatawtaaaagsartrtrcmshddraaaaaaaaaaaaaaaaaaaaaaaaaacactggaagcaaccgcaagct

SEQ ID NO: 5009 - DNA, 600 bp, Rattus norvegicus
tacgggctccaatcatacctacctgaaaaacgcctacagcaagccaaagctctgcgagcccgaagaggaacttctccagcagtttaaacgtgaggaggtgtctccgacggggagtttcagtgctcactacctgtcgatgttcctcctaactgcagcctgctwatttttcctaatattgggactgacttacctaggaatgagagggacaggagtacccgaggacggaagactcttaaaaaacccctttgatgaaacatttggaaaaatacaagcaagtgaaaaaaatcttatgatgagcacattatacaaacttcatgatcgattggctcagattgcaggagatcatgaatgtggccgttccagccaaaggatgctttctgtccaagaagcagctgcatatttaaaagatttaggtcctgagtatgaagatgtatttaacacttcactgctgtggatttttaaaaatgggaaagatgttggaataaggtgtgttggttatggacctgaggaagacctgacaaacataaccgatgtgcagtttttacagtccaccagaccacagatgccgttctggtgccgtttccgccgttccctcgtgcc

SEQ ID NO: 5010 - DNA, 573 bp, Rattus norvegicus
  misc_feature (15)..(15): n is a, c, g, or t
gagtgaagggctggnaggctcagctgggatcaggacttacgaccctgagskcaygaksagcttrkgcaasrgmgaktwggmwktscyraccakctrctttgtgccwwmtgawgattttcasccgatgaagctctaggaagttcaaacaccattgygkcmygcwsscggactggtgacttggagagagctctaacagrgcaggatggcccaggatctcagtgagaaggagctgctgaggatggaggtggagcagttgaagaaggaagtraagaacccacgtgatccgatttccaagacaggaaaggaaatcamggaykakgtagaggcccaatcagggaccgaccctcttctgaaaggcatcccagaagacaagaatcccttcaaggagaaaggcacttgtgtgataagctgatggcctaccctcaagaccctcaccctttctctgtccctcctcagtctcaccagtgtactgggatacctagggataccaagtgtattagggatcaatgtttacttcctcttagacaaaagtaawgatgctgagagaaaaacammaaaaaaaaaaaaaaaaaa

SEQ ID NO: 5011 - DNA, 600 bp, Rattus norvegicus
ccatcgtatccaagctctttttggtgaagctgtgcacctaaccagtgacaagctagtgactcagtctctccaacatgtcacaaagtaagagacatttgattaacttacagacatcgaattcatttctctactgaaaccttaaagtagtatttggtcattcattgtatgtgtcttatatacccacccacacacagacacaaaggaaatctatcaaattaatcctgatgtattygaagtggttattcaattcatttatggcagagcaatatcagtcctaatgactcgtgaaagtgttactaactgaatcattatcttacatttactgtttmgtaagcatattttsaaaaatgtatggctagagtgtcataataaaatggtatatctttctttagtaattacattaaaattaatcatgtttgattaamtggttcctctgatgtagtgtgtcatttcttaacatatagagaactgtagagcatttttttatttaatggcagtgtttgcaactcacaggcacagaaacactcagactaatcatttatcatagagatatagaacttacaggttaaagtattcacaatgtatgtaagagagttatga

SEQ ID NO: 5012 - DNA, 600 bp, Rattus norvegicus
tartgaycasracgsygysgrcstswgssgrmsstgracgaactgctctctagacggaaggtctgtgcttaagaatgggaccaaggagaaagacgtggtctgtggaccccmygwggtcagcctctctcccagtaccactcctagtgctgtgactactccagagagagaatcaggagagcgccccttgcaggttcttaccttgttcctggcgctgacattagcgctgctcctgttcctgatcttcatcattctctggttctctgtgcycaaatggstmargaagaagkwcccccmcatmttcmmgywascatttaagaaggcggttagaactgctcaaraggaagatgcttgtagctgccggtttccaraggaagaagaaggaggaggagraagctacgagctgtaatgtgccatcytaggagatgtggggaccctcaggaaaccgagaagcaytaagacccccaccctcytagggagtagcacaagttaccccacccccctgttcttaaaaccatcctagatggcatttgagcacgcaccccgtccaagtctcttctgatgctaatatatttgttaatttttaaaaaaaaaaaaaaaaaa

SEQ ID NO: 5013 - DNA, 600 bp, Rattus norvegicus
gatcgagccaacgttggatgaaytagatcaaaagatgagagaagctgaaactgaaccccatgaggggaagaggaagkykgagtctctgtggcccatcttcagratccatcaccagaaaacccgctacatcttcgacctcttttacaagaggaaagccataagcagagaactctatgaatactgcattaaagaaggctatgcagacaaaaacctgattgcgaagtgraagaagcarggctatgagaatctatgctgtstacgytgcatccagactsgrgacaccaacttcggcaccaamtgcatttgccggkttcccaagagcaagctggaagtgggtcgcatcatcgaktgcacgcactgtggctgccggggttgstctggttgactgacgcccctgactcctctgcatyttggactttggaccttgggstcctgcttattgggccmctgcctcctraagcaactcttytcaraktggcactcagagaaaagacccaggggaagcatgagctctacaggtgmcagctttagtgttcmccagctgagatctgtaaaaataaaacctttagacctyttmmmaammaaaaaaaaaaaaaaaaa

SEQ ID NO: 5014 - DNA, 557 bp, Rattus norvegicus; identical to SEQ ID NO: 918

SEQ ID NO: 5015 - DNA, 615 bp, Rattus norvegicus
cacgagggggacccttctcagtggaggctgacccttccaggttccgctctatccactgccatctgtacccggacacaccctggtgtccccgcactgccatcctstagcaaccatggttgagaccctgtccctgggtgcccctggtatccaaagggcccagggacccctgttgtatgtcctggccttggtgtamgaggctyttcagggctctgtgtatgtgcgtatgtctawatttgtgtgtttgtgtggcgtgcccacccatgttgcagactgctgggcagtcgtgttcttcagggagtggcaggtctgtcmctaactactctatactccaagggcagttctgtgggatctgtgtttggatctytgcagtgggggtgggcgaraggactcakggctcccgtcsggtgtccatggggactgtcttgtagcacagtttcttatgttggggtgctagtgcctactggaaccttccctgtcaattgagctgtattctgtgttctttttgcaaagaccttagctaggcaagctaacaatgataagggaaaagctctcagggaactgatgtgttgttgccatggtgacgtccttcctttgaataaaggtgttctttgcagc

SEQ ID NO: 5016 - DNA, 546 bp, Rattus norvegicus; identical to SEQ ID NO: 920

SEQ ID NO: 5017 - DNA, 600 bp, Rattus norvegicus
  misc_feature (557)..(557): n is a, c, g, or t
  misc_feature (592)..(592): n is a, c, g, or t
gacgcacacaggtgagaagccttatcattgcaactgggacggctgcggctggaagttcgcgcgctctgacgagcttacccgccactaccgcaagcacacgggtcacaggcccttccagtgccacttgtgcgaccgggccttctccargtcsgaccacctggctctgcacatgaagcgacacatgtagcctgggtcgactcggccagcccatgakcgactgtggcgggttccacgcgccgggcacggyccccttgcaacaaactgactgttatttattggrccctgaggacggagtcggacaagagtggscacaggaaaatgactttgccaccagttccggctcccaccgtgactgaaggctccaggaaagaasacwsgwgcctgtgaagaatgttttcaaaatggtgcaataattgacttctttctctcgggttcccactagaggatysaggctagccttgtgagaaatgcctttgagtttactatccccaactatccccaacgttgtttttataatattgtatataagtkaccgtggcaatctgtatgactataanggagacgatggcatctctgtcgcctgcttcgtttntataactc

SEQ ID NO: 5018 - DNA, 600 bp, Rattus norvegicus
taaatatataaacctaaaaagatatattgaaaatataaaactgtgttaaaggctcgattttgtatctgcaggcagacacggatttgagaatctttattgagaaagagcacttaagagactattttaagtattatgtctgtataagtaagaaaatattttgtctaaaatgcctccgtgtatttktwtttttttgcaagtgaaggtttacaatttacaaagtgtgtattaaaaacaraaaagawcaaaaaaaagctgcagaaggagaaatgtatacttttgttctggttttcactttgtacatacctgtaaacgtgtcctcacggtgcctttttacacggaagttttcaatgatggacgggtgtgggccatccctttttgaagtgtaggcagacacagggacttgaagttgtcactaactaaactctctttgggaatgtttgactcctcccacattctgcgtcatgcttgttataattactccggagacagggtttggctgtgtctaaactgcattagtgcrttgtaaaatatagctgtatctgtataaaatataagaataaaacatggaaaagtcgarmmwmgtgccgaawtcwwagggaa

SEQ ID NO: 5019 - DNA, 600 bp, Rattus norvegicus
ggactccatgactggaatcgccgactactgaatctctggattgytgctacttcaagctstcacacttgaaacaagacgattttcttgggggcggggggatgatagcatccaaatattcagaattttagacccttctgagaaatgaccttctagtaagtgkccatgagaaacactgcttctcaagagtgrtgcgtgcgtgtgtgtgtgtgtgtcwgyctgyctgtcwgtctgtctctgtgtgtgtgtctgtctgtgtgtgtctttgtawgcctgtaggtgggtgactttctcaggattcctaacttgattcaaattawtgttgagtttatgtaaagaattcatgtctatacagaagaacaagtgtgttcgttcaccctaggttacaatggtctccatttcatttcagaggagagaatcaggctatctgaatataaacacaatttgatgttaatttattctaagtactctgggattttgattgtcctaaagaattctgctctgtgaataccatgttaattttttytttartttgtggcaggattgtagcgaattatttaaggaaaataaattacatgaatgmttwaarrwrrwaaaaaaaaa

SEQ ID NO: 5020 - DNA, 600 bp, Rattus norvegicus
gaatgctcagtgggtgtggcactsgcccaggtcattagactctttgctgcttcatcgaatgccstgggccctyagccccggaagagagaatgcagyttctccacakgccttattccccctgaggcatcgacatgctggamcagtctgactccaagtactaatacagtttttttgagactgtctacaaaatactattttgttaaaactatgcctttaaatagacactgatgggttatatttgttttataaaaagttgtatacctaatgttcaactgtggttgattttgagattatatataaatgtatatttataagcctgtctwatgtggatttttactytaagaagtgtggcgcattactaataaagatatgggtttctgtttctgtaaagtcattgtagcaacactcctaactgctacctgaacgatgattccactcaccggccaccatacatacttttatctatagaatattaagttatactcagaatgtattaaccaggatgaaactttaagaacggaaactctcaacataatttgaaattcttcctgttgatgtaattaaaactagtttataattccttaaaaaaaaaaaaaaaaa

SEQ ID NO: 5021 - DNA, 600 bp, Rattus norvegicus
tcaaaaatccacgatgtcatcggcaccccttgtcagaagaccctcactaagttcaaacacagcccctgaggcaagaggagggccgtgccaggcgacaggggccgactagtctgacggagctccccaaactgaggctgtctgggatgaccaaactgtcatcttgctccagtcctgcactgcggtcggtgttgggcactggggcaaatggaagagtccccgtgctgagacccctgaagtgcgctgtcgtgaacamgaagacagacactcagaaggacatcaaacctcacctgaaacactgtcacctgcccacgatcaacaggaaagggggagagtactgaacagcccaccacctggccatcctcttggacagcaagggctggcactgtggacaggcttaggcctctgtggccgagggcggatgggccagaggacgctcatgtgctgctgttcctcacaatgctggtggcccaggacatgctgccctgcagcccgtctctatccacaacctggagccatatgtgtttgcaactccaatgcagctgtactgaatgtttcagtttaatatatttgtaaaaccacctcaaaaaaaaaaaaaaaaaa

SEQ ID NO: 5022 - DNA, 1088 bp, Rattus norvegicus
aagttttttaaaattccctttgctggcccaatttccctgctttttagtccaacaactgttgggttttttgctcacgttgtatatgccskwcrywwakrwtttwtttatattgtttaacttttggggaattatctgattggcatgtgtgctctgcctacacctctgtcactgtgtaacccgtgtaacatgattgtgctatcttattaaaaaaaaatccgagtttaagtttcatttgtccagtaaatgttctttctcagtaggcaaaccctagcagccccatctgtgggacattttatcccctgtggtccagggcagtgcagatcattattgctctgccattattggatggctctcatcatccctgaataaaatcagtgaatctcttccctatgtgtatatatgcatttgctgcagattgcatcmtamasatagtgaggatagattgwttttaatgtggactatttaatccastacatactamgggcagaagcgtctgaaaaacccataccaatgtctgttctgtttagatgctaaagatgccagtttcgyactgcacggamccacttttcccacacggtcttgwtttatttggccattagttactttcccttgkgtccctcagaacactcattagacatgtatctttgggtcccgtmttcgcaargtaatgttcctacaatwacagatttgggatttcattkttrtacttraatttaatacttaaatgttaagagttcgtttagatgccactttttttsttawaaccattcktyattcaaataagaatcagatgkcwgmsaatgaactcamttgtctttttgaatcaatgttttaatgcmctaatatgratgctgtaaaaggggctatyttrgatwatcgcttgtgttttawaatgttyyymcacarccgtytghtaawgctggcactgtttaatgtggctytgaaacctttaaatgggaacaagtgaaatattwacaatggaagcagadtaaaggtgattytggacmhvwmdrmwaaaaaaaaaaaaaaaaaaaaaaaaaaaaaaaaaaaaaaaaaaaaaaataaaaaaaaattggaagcggccgcaa

SEQ ID NO: 5023 - DNA, 584 bp, Rattus norvegicus
ggcacgagggaatgaggcgcacccagcccataatagaaagacttaccagatttaactagttggctctcatccttccctccgagaccctaagaaaacgaacagagcaacatctccacatcattagagactgtccacagtaggttcagaagggascagccatgttgggggttctccwtgctccaaggaaaggcactgactgacctagttttasagaacagtagcgggagcatttgcatccacagtgtttgagagggtaataaacaataaaagatgattctcccagcctttgaattcattgttcttaaagatgatgatgcatctaaaacaaagattttttttttctcctcctatgtgggaactttcttcgttgtctgtttacttcatgtttacaaataattgtttgctttttaatgcagtactttaaaaatatatcagccagaaccataacgtacagtaatttcttaggtattmtgaataaaattccatgtctttmgatatgcctactgttsttaggtttmtgcggaacaacaacaacaacaacaacaaaaaaattgtagcattttgtgtaaataacagctttcgat

SEQ ID NO: 5024 - DNA, 600 bp, Rattus norvegicus
gaaagcttagcttccttttgttcaggttgagaagataacggccaaagccgcagtcagataagccttaagtctcagacgagagatggcagcaaaacttccaggagcggagggacaactggggaagttccctggtgaagcatgtctcttaagtacagtcagtctacaggaaacctccaaaggaaaaagtgattttacctaacttgtgggaatcttactaactaaaatggttttcctgtgtaaacacagacaattgtagaagtgatggtaaatcaaacactaaggaagaatgtagtgatattgaaaggcaaatgtaaaattaaagtaattatatgtawramawrrmwwwwaraaaaattcttaactcattttgcctcatcctagttaargacagggaattccgtgatagggwgggcagcaatatcargtttgctatttttattcctttggtacaaaagggttgaacaccaggctaaaacagccatacatttcttattaaacgtttctactgacagtgcactgtgctgggtactgtaatcctacctaagcaggtaggtattcgctccactgtaagtcatgaggggtttccccatcaccattcct

SEQ ID NO: 5025 - DNA, 730 bp, Rattus norvegicus
caaaggtttttttttttttttttttwwttttgwttttttttgctgacttaaaaaggattaatttgggcaaacattmtaaaaargaaagggttaatatattttttggactctgtaggacaaaagacaactggttaaccttraagtgactgttgtacagtggttgtgcacatgcttcaaaatcagcgagggaattgccttccacatgtgagagggaragacggtcasccttaccactcagactttgaagtatgagtgttcacttttccaaagcatcagagtamtagtccttattgstaaaagaatcgacttccctcgggttttactgttttstwttctatttgcattgtgtacattatcgctgcaccagttgtwacmgtgttraraggytaccagttatatytgcygytaatagtctatttgtaggttaggattaaagtgggtttagyccatttttatagctatwtgaatttttbtaaacaggaacagccatttgcaaaatgggttttcatagtgatcgaatcagttakaacgtttwtcattagcagttgrgrgcacatgttcatwtagcaatgtgaaaacmcmctaatgrgtatttggtaatttcccattagcataatttcatgttgtacaagtaaattacaattacatctytaattytggataatattcattggttaacaataaagtgacaaaagctcmwrwmaarmmwmrwdmhaaaaaaaaaaaaaaa

SEQ ID NO: 5026 - DNA, 600 bp, Rattus norvegicus
agccyccactgaccccacagatggcccatgatcgtytttcggctgtctctgctacctgtcaatagctcctccatcagaaacttcctcctgtcaggcgrcggtggtggtgcatgcctttaatccaagcactcaggaggcagagscaggtggatctctgagtttgaggccagggytacacagtgaggtcctgtctccaaaacaatacctcctstggtttccacaactctccagccattctctgaccccatggaaactgmttatggtacamgagattgaacmtagagctgtgtgcctcctgggcaagcactctctaytgagctacatccctgttaaagtgcctttyttgggagctttgtctyccagcctgccaatcaacccacttwayggrygkgcctagattcccctktgctstgcagtaccagcagccagacatgagttctgcttgaaccatattccccacataagctacaaamtgagctacccastacaaataagaacctttctctgtgtggggtgagctgtgaagggctaaataaacaataaaaagtattgtcaaagtcwwwaaaaaaaaaaaaaaaaacacatgcggccgcaggctta

SEQ ID NO: 5027 - DNA, 482 bp, Rattus norvegicus; identical to SEQ ID NO: 931

SEQ ID NO: 5028 - DNA, 600 bp, Rattus norvegicus
  misc_feature (592)..(593): n is a, c, g, or t
caattyygcactgtgtkksagagacttaasagaaatttctatttgcatttccccccctttcttttgwatccraatgtgcytgaactttttcawatatgtaaatgctgccatgttccaaacccatctttagtgtctytgtatggagctgtgcaccctggaaataaacatmcagtcccatgagcaggtgcctaagacattggacccctttgtmkkcacagagaggtcataggtcatckagayttgaattaataagtkacattatgccagtttatgttccttcacaksctacaaacaatgcttsttgtgcactacatattcttcartgtagagctctygttytttttgaggaaaggcacakatgcccaatkgtgtytgatggattactacactcttctgatgcatactactattgatgtsakcctgttttgtcrcagctytgctttgtttaatgaaacacactgtaagcctcttttgcaccktgaaatggtagagaatccagtgggatgctcaagcacctgtaaaccatcttctrtaaacatatttgatgktcaaatarrrataaaataaaggcaamaaaaaaaaaaaaaaaaannaccattg

SEQ ID NO: 5029 - DNA, 600 bp, Rattus norvegicus
  misc_feature (580)..(580): n is a, c, g, or t
tcagggggcaytttgaccactccaaggagttgwmcataatgcctcggaccatggtggaccctgtccragaggcacgtgatgctggcagattatcctcaactraaagtggggcmyaygdkgtwactcctttccattgctctgacttggragtcmccatcctggtcaatagagggtttgttcccagbaakaaagtgaatccggakaccaggcagcaagkccaggtthtgggasaagtagacctagtaggcmtartgaggctgacagaaawcaggaasccstttgttcytgagaacamcccagagagragtctytggtattaccgggacytggacgmtatgscyargagaacaggaacggaccccatcttcattgatgcagacttcaatagcacaacacccggagggcccattggaggtcaaaccagagtaacccttcggaatkagcacatgcagtacatcattacctggtatggactttgtgcagytacatcatacttgtggttccgaaaatttgtgcgtcggacaccaggtgtgtgaaaataatgaacctgttcctaaccactataaaatattttgrtttntwaaaaaaaaaaaaaaaaaa

SEQ ID NO: 5030 - DNA, 600 bp, Rattus norvegicus
tacagatcgaacacatatctagcctcatcaaactctccaaggccgacgtggaaagaaaattatcacagatgattcttgacaagaagtttcatgggattttggaccagggggagggtgtcctgatcattttcgatgaacccccagtagataaaacttatgaagctgctctggaaacaattcagaacatgagtaaagtagtagactccctctacaacaaagccaagaagctgacataggtgagtgctggccccgggacacagggccgggcagcgctgtcttctgcctgtcgacactggacaccgtctggtcctcacggcttccccgattgacactgctctgtcttctcttgcagagttggatctgtagcggtcctttggagagtgtgtgtggcgggagagtgaacccttggggaaatgctaggagattcttttctttctgktctacttttcgctcggaaagtttttaaccctcattggtgcatctgtatccagcgataggcggccggttctcatgtaatcagcactggccaacatgggagtggggaaattgcttaaaaaaaaraaaaaraaaaaaaaagattctaaawaaaaaaaaaaaaaa

SEQ ID NO: 5031 - DNA, 600 bp, Rattus norvegicus
caccaatgccrcassmctgtcagatgagkgygacctcaaagccycaktgtgctcggtatccagcaggccattttgccatccgtcagaagcatgtgaaatcasatcatggytattacagggatggkgtgaatttgctattgtggtttttactmtkgggtattgtatttatgaygactkgwggatttatgtytcaatgtrtkggaaactywccattttaactgacaaatctcttycatgttacaagccttgattaaagraagtttttttwrwdwammmwwaardmwrwrrwwataaaaccgtcctatccctgtgctattgtgtgcccctcaccccttcattccctctgagtcatctccctcctgcaaccaaggtgattgactggaatcmttstgattcttacrcccttcaggtggataatggaaacctgactcttcacagtaatgaggtttagttgaatattgcaataacaaatttatactgttttaattggacytgatgtaaaaacattcgctgaaatgtatttcactgactactagcctatgataattattttattggaactgtcttacctcatcaaagcagatgaactgttgtacagag

SEQ ID NO: 5032 - DNA, 573 bp, Rattus norvegicus
tggtccgaggcttaaagcgaraggatttgaggcgtggtttggtcatggtcaagccaggatccatccaaccccaccaraaggtggaggcscaggtttawatcctcagcaagraggagggtgkccgccacaaaccctttgtatctcatttcatgcccgtcatgttctccctkaccwrkgmcrtgkccwgwyragtyrycytgyctycwsskaaggarcttgccatgcctskagaggacttgaagcttagcctaatcttgcggcagcccatgatcttagagaawggccrrcgtttcrctttgagggatggcaacaagmccattggcacaggccttgtcaytgatgtwccasccatgmccsaggakgacaagaacatcaaatggagsygagtctggactkmtgctcaggwtgwtgagyttwwwgctgcmctggtcagcattcccacbtgtggacmcaagstgcatccaaccagagtacacstatggrcatttctratcstgctcmcaaggartgagtggcccgccaagaraggttggcaaatmmwmstgttcygtgwwtwawrmaaaaaaaaaaaaa

SEQ ID NO: 5033 - DNA, 1400 bp, Rattus norvegicus
atgaagtgactcattaaagaawctacaggtcacaaaaaacchtcagtgcttggggtagragctttcacacgtgttttgwtctacactgwttttcagcttstgctccaaagagagtacagtgagttttccakaagtgagsttcactcctaaatcmttagtgwtttgggtataaasgtaggctcttgggtcccgtttcatattgcacatgcaggaacrctatataaasgagtgccttttattctcatacagtaagtcatagcatgrtcccattgcaggcctgttaacttcatggagttgtcagtagccttgaaaagatgtacatatatatgtgaaatcggagacttcctcactaaagcagggtgtatcatgtgaattcagatttacctcataagaattatgtttagatatgaaaaagwcttgttttgatctcaggtagaaaaatagattgctttgagttttgwatagttttagacatttaaaargttataatctgttaytaaaagtyrykwggaaaawwawrmhwwwrawtaattattgatgaccacactgccattctytmtgccttacacacagaatcaagtttgtgtagaccctgaagtgttatgaactggtatttgtcacctttgtttaaaaatcagcatgtacaattgctgattgtagatcgcaattagcgcaaagtagatcggtttgaccagtaaccattgcttgattcttacaattaaattttgtaattaatggtattgttcttcaaawrrrwrawrwwwmwatgacttattygtgggggcaatcattttaccagcttttgttaacattrgataaagcaaatgtccatacgtcatgcactccaatagaaagttgcattagctcttctctaattttcaccagaagtgtgtacaggacttchtacggtttgctttgagttcattctagacattacttgtcttagtcgtttgaacttaaatacactactgagtatttctgagtgagaattcaagtcatgtattgaagaagatgcatctagcatagcaacattcagagggtgaagaggacartgtgcaaaacaaagcagtgttccatgccagagtgaagagcttattgggtacagatacctaatgtatgaagtatggctgagtgtaaaacactggactgtgctgtgcccaaaagtgcttcccttagtcatttaaaaacaacatgctkatttgtccaaaggamcagtaccaaaaggtagtatccaaggtatatttggctagaatatgcactaaagcaaccctttgctcttgctggctggtgtgaatgcatgcttatttcttgccttaatttctatatctgtaaatgggaattaataaatcctgttttataamctaaaaaaaaaaaaaaawaaaaaaaaattggaggcggcc

SEQ ID NO: 5034 - DNA, 367 bp, Rattus norvegicus
ggcaywagggtcatagaaggtkayktkgtctctgccctcaacaaggcytggtgtgtgagctgctttgcctgttccacttgcaataccaaactaacactcaagaataaatttgtggagtttgacatgaaaccagtctgtaagaagtgctacgagaamtttcctttggagctgaagaaaagacttaaraaactatctgagaccttaggaaggaaataacttttggtgtcttttttctctttcttttaaccratattacttaacctgatccmccctcatctacttttgcttaaaactgtatmaaagcattaaaaaaaaaaaaaaaaaaaaaaaaaaaaggaatctcgcggcggcaagctaggtcccttta

SEQ ID NO: 5035 - DNA, 600 bp, Rattus norvegicus
gcaaagctgaaacttaaaggaattgacggaagggcaccacaaggagtggagcctgcggcttaatttgactcaacacaggaatattaatactgcttcagtacaatgtgtttatgacagcttttggaatgacctctttcmccmttgccatwttgatcactcaagtgstgggcwatgtccttgctgtggtcggratgtgtytytgcatcatggcttgtgaaccmgtgcacggcccccttttgatttcaggtttgggaatcatagctytagcagaattacttggamtagtttwtwtgaagtttgtcgcttccaaccmgcgrrstwtacaacctcctaggaaagctgtagaggaaccccttaacgaataactgaagggaagtgryggactgtaacttgaaagtcmgaagtggaagaattcmgttgtytgrgcmccatggccttcacaactcacrgstggaaggracacmcaacmgtgactgactttcatytytgaaaaaagtcattgaaccmtaaatgratwttmcmgttaagtttwtwttaaagcmgctgtaatttacgtaataaaaaatwtwtgrtgtgctgtgtaaaaaaaaaaaaaaaaaa

SEQ ID NO: 5036 - DNA, 600 bp, Rattus norvegicus
tgccgagaytaagggmtgggaccatagaggctcagatctctgctccmtgccactggatgagggttcctgtactgcctataccctgcgctggtaccatcgagctgtacctggtggcacagcgtgtcatccctttgtctacggtggctgcaaggggaatgctaatcgttttggaacccgtgaggcgtgcragcgccgctgcccaccccaaggggtccaccgtcagaacacaggtgctgcctagggctkaggcccaratgwtgcacttggtgsccagcaatccctggaggtggcaggtytcagccgggtcctgctatcctccatttggtgctaragttgtgtgtrcgcatgggcgtgtgcacgtgtccmctatttcagtgacttggtcctgtgggtctagccttcccccctgtggacaaatccccattgtggsgmccgctttcctggcaratgactcactgttgggggtggttgtgggcagtgaatggatgtgactggtgtccaacctgccccttgacccaaggctgtgataccatggtgctgatgggaggggaggggggcattaaagctgctgttttaaaarrmaaaaaaaaaaaaaaaaaa

SEQ ID NO: 5037 - DNA, 566 bp, Rattus norvegicus
attagcagrgmaysgrmhrragwkysabcmmwrtbamakhkrkkrrkragggtgcttggggggragggcaatgaykraygargctaattakaagaggcatcacraatctgctttmtaccstcattaacaattagcagggcaccggccggagtgtgagccctgttttactcttaactacattctgtktgctctttgtatatttaagtgttgtaatgagatgtgtttcaatcaaacctgaacatgagttawaaaggmamragasgtggcttttgtgatagwtctatcrcagacactyttattgkatytctgtaaaatmcaatgtatgtatgcatstrarwrwwmwwvwmmwratgttgytccgcccatgacaaaggttaaaaaaaamraaaaraagaaaaaaaaatgaggctcacagccgctactatgtagaaatccccccctacttctaatttgctgaatgaagwaaaaaaaatcttttatttgtgatattttcagagacatttgctctagtatggtgtatttaaataataaaaacttaaargarmmaawaaaaaaaaaaaaaaaaa

SEQ ID NO: 5038 - DNA, 552 bp, Rattus norvegicus
  misc_feature (28)..(28): n is a, c, g, or t
cagcgccttcctcctctggacccttccncaggggaagccttaattaatctcctcgaccttccctgtgsacctccaaccccagctccaatccccagtgkcrgmgygtyysagcsymagsgcmymcagctgsatctttyctysatgmggcsctykgmmacccstgcyytgstyttagycmmtgccaycaccaccaactcytcagaggaggctgttacccacttcgttygccaggcggctgtgcccaagagtttccagytgcagttacaggcccccagtgggaacacaattccagctcagggtggtcctcccatcacccaggtyttcagaatcctcaatcctaacaaggcccctttgcgactaaagcttcgcctcacctacaacyactctggccagccagtgcaggagatcttcgaggtggacaacttgcctgtggagacgtggcagtaacttactgtggtcagtgtctggcctgggtttctccaggctcttggtgtctcgttcaagaaatagaartaaaggcacacgtaaattgmraarwaaaaaaaaaaaaaa

SEQ ID NO: 5039 - DNA, 1063 bp, Rattus norvegicus
gatttcaattagtctaggtttaggcccttgtacattttgcccataactttttacaaagtacttcttttattgcacattcagagaattttatatatatgtcttgtgtgcgtgtccttaaacttccaatcttattttgtctcttggagattgttgaacgcagcttgtctaggaaagggatgggactagattctaaaatttatttgggaccatgggaatgatagttgggaagaaaactttgcacacgacagatttctagatactttttgctgcwagwwttmkgyaakatttattgaacattttgacaratwtttatttttgtaagcctaaaagtgattctttraaagtttaaagaaacttgaccaaragacagtmmaraarcactggcacttgaatkttkaatktcaccgwatgcgtgaaattatatatttcggggtagtgygagcktktaatgttaagycataataaactcttaagkcaaattaagcagacccggcattggcggtgtagccataaswttykgaygwkdgtaaaaacamaattggcgacttkaaactaaatcatgccaaggttttgatacacttgtcttaagatattaatgaaacacttcaaaaacaytgatmcaaagtgtccagattctcagatgtytgytgtgtgagytktgbttagwtgtaytttttttcagtgaatgtmtggcacattgcaatccycaaacatgtggttatcttygktgkawtggcatattcagwgacttggrcattcagcgatagcattggagcaagtcttatcagcaagcaatgttttcagwtatgtttcaaagttaagaatgggtttaaacttgctgaacgtaaagawtgaccctymagtcactgtagctwtagtacttgcttattgkattagyttagatgctagcmccscatgtgctctgcatattmtggttttmttaaaawamaaagttgaactgcmcarwmwmmwwwddwrdwawmaawtgtggkktactyttagaggtgaaaataaagktgwgctcttgcytgawwaaaaaraaaaammwrmawctctttttatt

SEQ ID NO: 5040 - DNA, 600 bp, Rattus norvegicus
gaaacagactcctccagcctcctccccatgggatcctaagggtgggaaggagaaaaagaacaaaagtacactgatgtcctygkcmygwrkcaactatcchtgggkcayswgscrsscaskwkscaagacctttctcctactcaaccaggaagccgtggtttctgcaatccarggccatggcaactgtgactccaagctctctctgtctcatccagtcaamttttctgcctcctaaccaaggaattcctctacgcaggctcttgttgcccmksstagccctctttttcagccaggatgtggagctgaaggagaccctagtgtttactttctccagtcctagctctgccatataaacactgtttcawgctgtgcttcttaaatgataaaggacacagtgacttttggggatagatttgtctggragatgatgtragtccgggaggcattactcttccctgcctcacatcaaggtgccattcaggtatttggctcctagctacttaaagttaaaaataatcactctaatatttgwatcatagaaactcaaaaaaaaaaaaaraaaagtcacagaaacataatcaaatgggagaaggcaggaga

SEQ ID NO: 5041 - DNA, 1400 bp, Rattus norvegicus
  misc_feature (1025)..(1025): n is a, c, g, or t
  misc_feature (1110)..(1110): n is a, c, g, or t
  misc_feature (1277)..(1277): n is a, c, g, or t
cttgagcgcgtacgacttggtgctggctgaggatgaggagatgaatcscatgcatgagagcatgaagctgtttgatagcatctgcaataataagtggttcacagacacctmcatcatcctcttyctyaacaagaaggacctgkttgragagaagatcacacagagccccctgaccatctgtttccctgagtacacaggggscaacaagtatgacgaggcagccagctacatccagagcaagtttgaggacctgaataaacgcaaagacaccaaggagatctacacgcacttcacatgcgccaccgacaccaagaacgtgcagtttgtgtttgatgccgtcactgacgtcatcatcaagaacaacctgaaggactgtggcctcttctgaggggcagtgggcctggcaggatgggccaccgctgactctgctccccactacctgtgaggaagatgggggcaagaagaccatgctccctgcctgttccccmagytgcttctcccctgtctmhkmwytcksywcksagctcccctgtcccctccctcggctctagacttgggggasggswygssacaggcctccctgtytaaaacccacctttgtytgaggtgccgggagtgsccatggtacctccttactgggcatccattcgggttttctaaccattgtcttgttytgggggtgarcggggagsgcatrcaragtttcmcaaggcctatgtytggaggagtaccaattcctccagcctaracccctggytttgwcmaacaccagccctgacccaagtccaaatgtttacagggagsywcswgsstwymccaytythtgmygsttggaggccscaaaggaaaaagcmcaaraagsgtgaragrcvcyvccmtycmtgkmkrcaaagsscmcvwgstcattytbgtagctttmaaamaaarrraaarrdaarrmraawaahaaarrdmmaybgcrrvdskarraaactttytrrrsaahcbtatttawaactgtcaggtcytgaccagcatbcstcscnccgccchcagcmcytttmcagtgahycmgtrmcttgagtgwgwytgcctgtttacamccatccctytttgggmrssmssmtgccntgccctccrhrgaattsgryhcsargggvtrwtscwvwcarctgccaatgtcastkakggycctgccctgaagccbtgggcccaggstccattaacctwaatgtagctcstyasmgbtaatvtaggaaccgmcgstgcctghtgagggtcakgcccctcamgccytnkccccargcccgggacctmcagcgttgaacacttccwygctkttttcacatgtywtatggaattgwtcacatgatttgaaataatwaaakgtrgaaaraaammrrraaaaaaaaaraaaaaaa

SEQ ID NO: 5042 - DNA, 468 bp, Rattus norvegicus; identical to SEQ ID NO: 946

SEQ ID NO: 5043 - DNA, 600 bp, Rattus norvegicus
aatagctttgactagktkaaartcatgtgaataaatatkttsaykwstaaaaatsttaacacttaaccatgttggkktaaaaatattttcattgcatgttacttggacataattaatccttttcttwtgcatttaatacytcagagtaggtagaatctaatgattctcctatagatgtcaggaatgactgataactggtataragatgtgtgccttctgggattgagaagcaatagcctggcccttgtctgtctcaatatttcctgtgcccmtacagacatgtcaggttcgaattacaacacatgggaactgtttgtgggctggtggtaracactctgttctttaattaggtagattttgcgccctcttgtcaagatcacttcagatgcttgtacagtaacaagcgagaagacctgatgtctttakacatccttacagctccatttttgtaactgggatmtaaataacttgagagaaaaggrgaathtakggttyttaacactcyctgatggtggggcatgtgtgtttgtgctttggatgtttttwtaaagtatgtwataaaaataatccmtgtthmhwwaaawrwaaaamwaaaaaaaa

SEQ ID NO: 5044 - DNA, 600 bp, Rattus norvegicus
gagsttagaactcagccacccaccagcagcagccaggaggctgccacaccagatactggaaagcttgttcagtgscctttmactgtmmccagcgcggmtgacatamagcagtgggggtgtagaaytaaacmctacatacatatcaagkccaactccaggktccctmcccgtygcacccagtggcctgaaaagcmggaatytygttgcmgacattaaagccmgtgrggctcttgatgggctcggatgctkccaactcasggcttarccggaagtwtgggmggggacactgggcttggggatctttkaggccttttytgtggrgaacatccgrggttytcctgtgrarccgctkttythtthtgatgrcggcgggagrgcgtcggtgtcmmtaaaatkttaagrgcctgaaaccmtggaaacgctgstaatatttttwtattgacatacattttcacggtacttcattgtaattttttcmttaatcaagcmtattaaatttwtaataaaaaagtgcccctcaaaarwwmamwwmwraarwmwwwwwctytcagmgkyctcaaaaaaataaaaactatacaattcgaaaaaaaaaaaaaaaaa

SEQ ID NO: 5045 - DNA, 735 bp, Rattus norvegicus
tggttcatcagcatgtccctgtcacagtagcagtattctctctcatgtagaatgactctctttcmcctttttattactttgttttgccagckkcagagtgtcttggccctgggytgaatttaacttcccttcatcagcccatggtttcgggttaaagctgtcagtsttagagattggttacagctcttcttgcagaaatgcagcccattctggtgtgtcctcacctttccctttggaygwsccgamagststcactcggctcagaaggtgsmamgtcctaragaaagttatwtggaactgamkscwcbwskagcagtcctgattcatacctcccagtgstgacaacccagtcctcctgatawttttaggcatattctrgaaaaatmcctgttcgtgtagaaawtttatgatytgccmattttggtgcccaccccgattctaccttytagtatgttggcatggamctttagaaaaatcggacatttcagaataaagacatctgaytgggcmgaawhwrmwwarrmwwtacttttgagtgtctctttttratatagattgtttytggaccagttystytaagtcmtgsctmttrttggctcataysaaatgtcatcttcactttgtataytatgtataaattagaaaatgaaacgtgtgaataacmttgwawraamwaaammwrrwmwwrtgtttttctctarawaaaawawmmmwwwrwaaaaaaaaaaaaaaaaa

SEQ ID NO: 5046 - DNA, 983 bp, Rattus norvegicus
tattccaaggtgacctcagacagtcggtatggattcattctgatgggaagaaagcacagagaccacatgtgtgtgcgttgactcacacgctgctcaccgtcggcttggactagcmcasgaggtatagcaggcttgcacacttttcctaagtggttcttgccaaactggagggtgaggcgatgcccttcagaagggggcacagccccagccggcccagggtccctctgtggtcatgactgggtgtgagcacagaggctggacttgggatcactgtgagttttgcacacggaaagatacaggctgctggcctacatcatctctaacactagagaaaacgytragtagcacaatytaaaccccmygagktactttttaagagaaggctgataactcgttataatttaagtttatatcctgtaattctttttggatgtytcaagattcagaaaaaaaaatcagtacstgcatctagtaamccaccaccattccctccgtgtctgtactcacacytgctgaacactgtctgtgtaatttttaaagcccagaaggaaaaggagtcctctacctgcaatcgmaaaaccgatttcttttccttmtgggggaggagggatgggctwacgtgagcacgtggcattcagatgaaagtcttaagaagtaaacccaggatgtttaaaaacacgaaaagattcatattttccgaaatttgaatttaagctgtaaatgtaaatatatccagttcgcttgcagagagtacttttataaacctatgaagattctaaccaaaattttagagtgtggggctctcttacagagaaagctatacccatctcctgaatagcccttcttgaaggctratgtggtgggatgtaccacgcataaactgtgaactggatggacaaataaagtttgtaattaaaawmrraaaaaaaaaaaaaaaamattgcggccgcaagcttattccctttagtgagggtttaatttta

SEQ ID NO: 5047 - DNA, 600 bp, Rattus norvegicus
gttatgtttgacaaaattacatcccgaatccagaaactctgttatggactcaatatggactttgtggatcctgctcagatcaccatgaaagtaatccaaggcctatacagtggggtcaccacagtggtgtgctctttggagaacagagaggagtgtctgatgtgtggatcctgagacaaggcctagaagagccagcgtctttccgccatagcagaccatgtgacatagataggcatagtgggtttgcttgattaagggaaagctttgccggacatttttgccaggagaagaatccttaatttgcagtactgtttctctatagtgtaaaggtcattttaaacaaaacaaaaaaccaaagccagctttgatattaggaatcaaagtacaggttttgggaatgcagaagagccttcctggaaatagtgatgttgtttaggaagtctcttctccctccagctttccctgtctgactgtctcagtttgggcaaagagctttagttcgctttgaccgatggcctagaagtaaaatcaagcaataagtcaccagctggagatctagacaaacttccatagttgttttgaaataaaaatttctaagtg

SEQ ID NO: 5048 - DNA, 600 bp, Rattus norvegicus
gaggggagcaaagcgtatcgcgggcgggtaccgggagctcgctctaccgcttgtcccccagcgggtcctcgggcgcagraagcgcgcgatgaagscggtgagcccggtgcgcccctcyggccgcaaggcgccgtcsggctgcgscggcggggagctggcgvtacgttgcctggcggrgcatgrccatagcytaggtggctcggcavccgckkcggcrdmggsggcggcagcdcgytgcmwkgcgsmssaggcsryrscykasgwgccggcacygygsckgcrgygcgatatgaacgaytgctacactcgcytgcggaggctcgtgcccaccatmcsgcccarcawgaaagtcagcawagtgragatchtgcagcacgwtatsgamtacatcctggacytgcagctgrcgytgragacgcacchtgctcwgbtgagacakcvgccaccgccygcgccwccgytccaytcggccggrgcttgcccrgtcgcsccgcagcrgaccccgcttacggcgctcaacactgacccggccggckccgtgaacaagcagggcgacagcattctctgccgctgagmygcgttggycaggtgtgcgkccgc

SEQ ID NO: 5049 - DNA, 617 bp, Rattus norvegicus
aagaaatgatcacatttgaatgaactgtacagtaggacactatactctgtccccgagaaactttcttcccctcagctctgttgattgcgaaatcctgcatagattatgctttgatgtagtttctgcttattacgtcaactgtaattaaacaccagaaagcacaagttcaaagtaaggcatatgcattcacaatcagagtagcccaccttggtgtttattacagtatttcgcttagcgaaggccccagttataaatattgacataagtagtcaaaggatattgggccattgtatgtgttttacctgtgtatcagggacacttaatttacgtgtactctagccccacggaagagtctacatggagagaaagcacatcgctaaccttcaacaaatgttatttttggaaacacaggtttttgtcattaaacataatgttatttcacatatmsaaaggagatgttatgtaagaatgttgtatattttaacataaatccatttagagagattatctagattcattaatttttcatagtgcctttttcacatgagtcagytggagagagcctgcaataaacagtatttgctgtgtaytmrwraaawarmwmawawmtcgtcaac

SEQ ID NO: 5050 - DNA, 600 bp, Rattus norvegicus
gttcggaaggaasccttacaggctaggagatrsatttcagtctacggawtgasttwttccccttgtmkcctctgtgtctcacctcaccatgtattrgcacccctaatctggtgggtgtaggcagaattagagcagcatcaagtaggactggtgaactctccatccacctraagcagcaagacattcawatcsctagaagaaatggggagtgggagaagatggccaaactaaaatgcccatsttggragcattagraaacmtcswgscaaatgtcccagggttgggttttctaagctccrrgactttgkcagctgtcccttgscttyatcgkcacttcagtcttcctccagtmtgcwsgtrggtggtcccacaagctcaagcaggaagatgcaggctccatgtactgtgtgcagtctcacagcagcaggtccaacacgggtgggtctggctctgcagacttctccctgccgtgcaggtcctggggctaagccaaggacccactacacaatgcaaccacattgagctactgttcccagtagacccacaaattgggaatggctagagagaatccaaagttcaagtcttttcttagataatcta

SEQ ID NO: 5051 - DNA, 600 bp, Rattus norvegicus
agagagtgcctagattactcgaaytgaatggagactgtagagtatggactgtgccgcggggccaggccctgcaggctgctgytrgaagagggactgaccggtagagaagcggagaacacgggagaaraggctcttmcaggagggaggggcttccactgtgggcaggagacccacgggggatcgcatccttccmtgaggcaggccggcctctgttggatgccccagccgctcccagccmtgtgcctgccagaaccttccgyttcctcacgctcamtamgcacacgcgcagcttcctgtcttcacctgtttcattccagcatccctgcctcctgccacagaaaaccccagccatgattggaggttctgaccmcagtacctgcccccagtactctttcagctcagactttytagaacgttcccttttctttaaaatctgcrygkyyrattaaactttatgattttattttttgtctgaaaaaaagagaagtttaagaaaatggaaatgggtaacagcaagtgaagacctattttagcmctgaatagagtatttttaaaattaaactatttgraatrttwmwwrwwaaaaaaaaaaaaaaaaaa

SEQ ID NO: 5052 - DNA, 1400 bp, Rattus norvegicus
gtgctgctgctggtggtgacgcgcagccccttcaacgcctgtgtgctcactggcagcctctacctcctgctgcggttcttcagcttcgagccggtgccgtcccgccgggccctgcaggtgctcaagccccgtgaccgcgtgtccgccatcgcccatcgcggcggcagccacgacgcgcccgagaacacgctggcggccatccggcaggcagctaagaatggagcaacaggtgtggagctggacatcgagtttacttctgatggagttcctgtcttgatgcacgataacacagtagataggacaacagacgggtctggccgattatgtgatctgacatttgaacaagttaggaaacttaatcctgcagcaaatcacagactsrgaaatgagttccctgacgaaaggwtccccaccctgagggaagcagttacagagtgcctctgccataacctcaccatcttcttcgatgtcaaaggccatgcagatatggcttctgctgctctaaagaatatatacatggaatttccccagctgtacaacaacagtwtggtctgctcattcttgccggaagtcatctakaaaatgagacaaacwkatcagaaggtaatcacagccctgactcacaggccttggagcctgagccacactggagacgggaagcctcgctacagcgtcttttggaagcagwctgtgtttgtggtgttggacatcttgcttgactggagcatgcacaatgtcttgtggwmcctgtgtgggatttcagccttcctcatgcagaargattttgtctccccgkacwatttgaagaagtggtcagccaaaggaatccaggttgttagttggactgtcaatacctttgatgaaaaraattmctwcgagtcccaccttgggtccagctacatcactgwcagcatgctggaaractgkgcacctcacttvtmgactccccaggaggarrcacagrtgcaaaactgcctggaggccttttgcakggacmcsagaacmctctgttagcacaagccctgggaatcctkcggstsatactagcaatagccacagttttaccccaagcagaaaccaggcatggcgmccatgctccaaggaaggctccacacttgcccttaaaattctggatctgcgaaaaggcagggtggccctayccaaccccgctkagggtacagagccmcaaggatgagcagagtgggtcctgcaattagggcgcaggcaccaatgcatgggcttgcatgatcactccaagttgacattttaaatcttgccatacttcagtaattcacttatttccaatatttgtcgtcagctctgttaatggcgacatgtaggtgtcaaacttgtgmccatactaatamaatcattgaaaggtgaaaaaaaaaaaaaaaaaa

SEQ ID NO: 5053 - DNA, 537 bp, Rattus norvegicus
tgctctgaacccatcctggaccgaatcctaagggctatggggaaggcttaccatcctggttgcttcacctgtgtggtgtgccaccgtggcctcgatggcatccctttcacagtggatgccaccagccagatccactgcattgaagatttccacaggaaatttgccccacggtgctcagtgtgtggtggggccatcatgccagagccaggtcaggaggagacagtgagaattgttgctctggatagaagtttccacattggctgctacaagtgtgaggagtgtgggctgctgctgtcctctgagggagagtgtcaaggctgctacccgctggatgggcatatcttgtgcaaggcttgtagtgcctggcgcattcaagagctctcagccaccgtcaccaccgactgttgactgctctaagaaggacctgctgggatctcagtccccctctgttacctcccctgacatctacccttagtgtttgcaccaaatgctgtctcttcttcctcccttcatgcaataataatcagtggagtgttt

SEQ ID NO: 5054 - DNA, 600 bp, Rattus norvegicus
  misc_feature (261)..(261): n is a, c, g, or t
gacagctaagatgactgccacctgttgtggcaggcccgatttgtcttgttctccccttactgtaccccgatataatctctgttgatsarsaggactaccccaagaatcsrcaygtwskcccccgtaaccaggcagctgtctggttcatgccttcttcccttcaaacccaacccagcgcccttgttagtgaagaggtggtccatggactgatgacagttattrgcactggatgctgtttccatagtgacaagcctrtacctnttcccmccmtttagtgcgcartgggstgctgcttcagtatcctcccagctcagttttattagatcaargctgcccttgggcmccatgttgsycmcctcaatcaccagccaaaatggtcgcyttgtccmccagaggtcaagccatcttthtggcgctgtagttcccagctcctthtagggaacaggaagttgatattgccatgggggaggtggcggggtgtggccgtcmcctcaatagttttactgtaaaagggaaatttgaacaagaacmacmammaaaaaaaaaaaaaacaaagaaaaaaataaaaaactttaaaagttgaaaaaaaaaaaaaaaaaa

SEQ ID NO: 5055 - DNA, 600 bp, Rattus norvegicus
aacaagaatacaggataaaatattscaaagctscaagaagcagttatgttactgagctacattttttacagacaaatawkkywwtwtyyytkywydkcagctttttgataatttttatatackttcatatggkrcaagagaaaaataaccagagctcacaatgtrcagttcttacactattttcacagtttgtgaacactatacacccctttgttttaakaaagatacattgtaataaattccttgcccttaagtttatagtttataataatctatgattaatacactaaaattgcctttttatgtggtcacccacacagcaraaagtgagatagctcctggacagtcagaattgctttgattccatttgcataatggcggaktgaggccgtactgagacrgacaggaagctgacagcacagaacagatgcstcttgggtsctgggagcaacagaggacagtggcttggtgcagcttcaggaagacatcccataatgtccccttatggaatacagagaatctaagggttagggggscaagggtggaaaatggggaaatgakgcaagtggatgaagagataaatcatttttaaatcctcca

SEQ ID NO: 5056 - DNA, 411 bp, Rattus norvegicus
  misc_feature (265)..(265): n is a, c, g, or t
cggmacgaggatctatacccaggacttcacagtgcctggacaggtcmtggaagaggaagtgggtcagaatggacagagccacagcctgcccaaggctgtttgtgtgaatggcacagagccccagctcagcagcaaggtgaagccagaaggccggcctggcgctgccaaccctgcacgcaaggtgtgctccagcaacaagatccgcctgctccctatttccaaacatcctcatagccacagctcaaatcctcctgttttatttaanaaaaaaaaaaaaaaaaaaaaaattgggagcggccgcaagcttattccctttagtgagggttaattttagcttggcactggccgtcgttttacaacgtcgtgactgggaaaaccctggcgttacccaacttaatcgccttgcagcac

SEQ ID NO: 5057 - DNA, 340 bp, Rattus norvegicus
cggcacgagggctcttcgtgagcggggagcgcctggtcagcgacccggccggggagctgcgccgcgtgcaggatttcctgggcctcaagcgcatcatcaccgacaagcacttctacttcaaccagaccaagggcttcccgtgcctcaagaaggcggagggcagcggcaagccgcactgcctgggcaagactaagggccgcgcgcaccccaccatcgcgcgcgaggtgctgcggcagctgcgtgacttttaccggcccttcaaccgcaaattttaccagatgaccggccgcgacttcggctgggatggatagcagaaataatttaaaaaaaaaaaaaaaaa

SEQ ID NO: 5058 - DNA, 414 bp, Rattus norvegicus
attcggcacgagggggagcggtggctagcacctgagccaggtcctcgtgstgtgggmagrctmcccaggcyrcagcmtgtmstgggaaatstctttcccatmtymtgaagggccaaggtgtatccaacaggattmtatgttstcatwttmtatggaacctcccacatcccagggtctcaccctcagctgtccgtctggatggtggtgatctcacctccattaacattcttacccagcattctgtacttcggggsccttctctcwtgttataaaactttttactgagtgaaacatcaacaccacctttgtttccattcccactrctgtaaatactgagtactaactgagaattttgactttgcattctgtcagaatacttgtgttcaataaaaattgaaaraaaaaaaaaaaaaa

SEQ ID NO: 5059 - DNA, 500 bp, Rattus norvegicus
cacgaggccagcattgaagtctacagtaccaggaccagctcaccggagcaggagggttgggagtggttctcgacagcctcccaggcctcctggagtgtctgatccctttctccaagaatgggtctgtgggggatgcttgcmttccccctgggattcctgcttgcttmtgcgctcctggtggcttcagccccagccaacccagagactcctgtgggctgagagaggcaaccaaggcagcaagaaagcagacaccaaggccctcacagaaattgacagctccctgcctggagcagcagaggctggggaatactgctcacaacggtaccaaagatgtattcacctaggtttacaagtacttgtaggactctcgataacccacatttagacaccggaagtgctattttgtatgctgttaagttttcctatctgtactttttttttttaaggggaagattttaatattaaacttggtgcttctcactgaaaaaaaaaaaaaaaaa

SEQ ID NO: 5060 - DNA, 486 bp, Rattus norvegicus
tacgagggggtgacacccactttgaccaacttcaggatgttttccttttgtcctcccgagaccgccagacacctcttctctatgctgtcttctccacctccagtggcatcttccagggctctgctgtgtgcgtgtacagcatgaacgacgtgcgccgagccttcttgggaccttttgctcacaaagaggggcctacacatcagtgggtgtcctaccagggtcgggtaccctacccaagacctggcatgtgccccagcaagatctttggcaccttcagctccaccaaggacttcccagatgatgttatccagtttgctcggaaccagagagatgtcttgggtggcagccctggggaaagcattctctttcttgggcatcgaggagaaagctgtgaacagattaggctgtccagtctggggtgaggcaggccaactgtactaaagtaatacaataaacacattctcagctgaaaaaaaaaaaaaaaaa

SEQ ID NO: 5061 - DNA, 473 bp, Rattus norvegicus
  misc_feature (96)..(96): n is a, c, g, or t
tcatcccccactcgctccttggttttgcagacacccagactatccgcattgtgtatgacatccccacgggcatccagggccctgaacatcccaacncaggcaaagacatcgtccttgcctctgtactggcttctccccaactaaaacgctccggacatttgagacccacttctggcttcaggagcgatggggaggccttgttcaggctcackcattgagytgagcgwgcagcaaagcgttaacttctccctgyttggaaataagcggtgggtggctgatcatctcaggccaaccagaggtccgttgyycaggcaactcaccagctccgcytctgaggattgsctgttgggatggaagttagccaagctttaaagggacgccagcaattgctcctttgggggaaaaaaaatctaccagtcccactgtgggtggagaaataaatggtctttctccttraaawaaaaaaaaaaaaa

SEQ ID NO: 5062 - DNA, 290 bp, Rattus norvegicus
gacaaggacattgagctaagcgaccacttctcggtgaaggtggagcagtccaagtacgtcagcctgaccattaagggggtgactgctgaggactcgggcacgtgggctgaggctcagatggtcttcgcatgtggtaatctagatagttattaccaacctgaggtgggtggtggggcctgcagggcacatctcgggaaacccttgtggcacctttgagcatgctacttgcttatctttttgtcttgctttgggataataaaaataagtaggggcaaaaaaaaaaaaaaaaa

SEQ ID NO: 5063 - DNA, 354 bp, Rattus norvegicus
cggcacgagggccakcacttcaaatactttttgtcagcatattgtcatagcaacaggaaaaggaacaggtgaagcctatcagtgaggaggctctcacttagtccttccacgtgggcttttgcttccatttgtgactcacccagggccatcttgatacactgccatggcgtcttccgcccactcactgtctgtctctggggtcctggagtcctggttggcaggcctaccagccttaattttcacttttctttagtttttggtggagaagcataactaaaaaaaaatggaakcggccgcaagcttattccctttagtgagggttaattttaccttggcactggccgtcgttttaca

SEQ ID NO: 5064 - DNA, 600 bp, Rattus norvegicus
catgcaagaatcattaggttggcaggtatattcataagtgaaaaacctggaagtgttatggtagagcataaaacctgtactgcttctgtttcggtgcaaaaatgtactagccaatacgctgaagtgtgtggcccacaaattgaacaattwaacctcaacgtcacawawmmawrmwawmawrcggattcttaactgaggagaaactaactcatcccgtctcaaatgtttctttaatctgcattctgttctttcttcctggtagtgccattamtagtgttcctcttattttatcctctctgctgaagacaggaaacattccttgragacacttggatccttctgcggaccccgatgatacaaagtggagctcaactgtccttccttttattcctttcwttttttytttctaaatttgaactctgactttgmtagacatagaaggctcaatggtggaaygttagagcaatggggattgacagtatgtgaaggtttagaggcaaacgcataggtgtgtagctgggagtgctggtatctaatataccattgtatkcactgacacaaaaataaacacatttaatcttgraaaaaaaaaaaaaaaaa

SEQ ID NO: 5065 - DNA, 524 bp, Rattus norvegicus
cacgaggaggatacggaggagaccgcagccggggggcctatggaggagaccgtggtggtggcagtggaggctatggtggagaccgaagtggtggctacggaggagacsgaggtgggggttatggaggcgacagaggtggctatggaggagaccgaggtggctatggaggcaaaatgggaggaagaaatgrykacagaaatgatcagcgcaaccgaccktwctgatgactgtttccartactcccttgtstytgacatgatccatggggawktgtcagagtgtkcctgctgctttcctcatggcctcttgagtagtgaaaytgacatttgggtttttayttgggtgggagggctggggacagttttcctttagaaatgtccattaaaattttccctkttagtttcccaccktctckttcccaacccttaaagctaaatgcgttgtaaaatattgccaaaatggaaagtgttttgtaatactgcaataaaagctgcttgttttttgtggaaaaaaaaaaaaaaaaa

SEQ ID NO: 5066 - DNA, 541 bp, Rattus norvegicus; identical to SEQ ID NO: 970

SEQ ID NO: 5067 - DNA, 600 bp, Rattus norvegicus
cagcccttgacaaaccgctccatcattgcaggctacaatgccatcctctgctgtgctgtccggggtagtcctaagcccaagatttcctggttcaagaatggcttrgamytsggasamgakgctcgttttcgcatgttctgcaagcagggagtattgaccctggagatcaggaagccctgtccctatgatgggggtgtctatgtstgcagagccaccaacktgcaggrtgaggcacagtstgwgtkccgcctggaggtgsgagttcctcagtgaccaggatggctccccagagatggttaggtaaatggatgccasccagtgtaccagaagcccaggagggagttggaggagcacatcttymtgctgctgcatgtgtatgtgtgtgcaaytsygcakcwtggaaggaytggtcagcagttttacggggcaggtytggtggattctgcagaaactgatgtcacagctcccaaggagtgstgttaacattgggagcataaagtgtgcgtgcctcagaaatggtgactggggagaggccctcatggtggctcattgtgtaagagcaataaaaaagatgagtgcmrwmaaaaaaaaaaaaaaaaa

SEQ ID NO: 5068 - DNA, 391 bp, Rattus norvegicus
attcaagatggggaagtcaaaacaggccgaccacccaatcaacgagctccacgtccaatgagagaccctgttcaaaaaaatgactgtggagagctactgaagaagacacctaacactgaccttctagtctccttagagaccagtgcttctcaaccttcctaatgcttcgactctttaacacagttcttcatttgtgatgaccccaattataaaattattttcattgtgacttcataattgcaaattttccactgttatgatttacaatataaatatctgatgatcttgggcaammmmwrwraaaawrmwgttggacacccccaaaggaattgcgactcataggtagagaactataatagactaatactgaggggaaaaaaaaaaaaaaaaa

SEQ ID NO: 5069 - DNA, 546 bp, Rattus norvegicus; identical to SEQ ID NO: 973

SEQ ID NO: 5070 - DNA, 600 bp, Rattus norvegicus
gacaagggtgtggtaggctctctttccctagagaccttaagacccagctagctctgactgcgattcacacaccccacctacctgcacaggaaggacccattccgtctgccttcggactgcttactctagtgtttctcgggacctgggtttgtgactttactgttggcaactgaccacagtatgaagagaggctgcccgcaggtgggctcacacctcagttgatgctgctagattccctaggagccagcagggagctggctggattcattgcctcccagaactgaaagaccgtcagcctggacatcctgaaacatgaccttccctgcaggccacactcctccagactcctgagtctttgcggtcaatgggcagattctttgatccaggaaatgtgaccctaccacctgggactggggaaggagcctggatgtccttgccacccctgcccagggtaagctcctttttttggtgatccacacttccaccccctcctccagtctgtttccttcaccttatttatttgcatggaggggggaacccatgggagaattttgggaatgttttggtctttcttttgtaataaaaattatttaagttgtt

SEQ ID NO: 5071 - DNA, 600 bp, Rattus norvegicus
ggrcttgggaggcmargtgggtggsagcccaagagcrgaagggaggatgggagtgyggccctgcagagytgccttcctgaccccgctgaggcmwctcstcwgtgccagagggacacgccagcctgcttcctgctgtgagaaggaatgtgccgctttgagggtgatttcacagagctctgtggggttctcatkscagtgtctgaatctcatctcactagagatgtttcycaaattggcctcttaccataatgactcaaaactctgttcttaactaccatgattgcttttgagggcctggaattataaatmtatattatattyywmdwrwwwraramwawwwwramamwwmctttgatacataacgtattttgcttttgattaatttaaactcgttctcatgccacaacctctttacggaaacagaacgggccagagcgtaccaagtctggggtttatcgcatggccttttactttctatggggaaaacagaacctaccatgtgtcaaactttttgatgtgataaaaataatactctttaaacattttactaagtgacttttaaatcccaactttattaaaraaarwrwmmmwwrcttgtgt

SEQ ID NO: 5072 - DNA, 600 bp, Rattus norvegicus
gtttgcaattaccgctgcgggtgccagtcacgcggtcactcasgcctgttccatgggagagctcctacagtgtggttgtcaggcaccccgcgggcgcgcaccgcctargccctccggccttctgggcactcctggacctccgggaccaactggctctccagatgccagcgcagcctgggagtggggaggctgcggagatgatgtcgactttgggsatgagaagtcaagactctttatggatgcacagcacaagcggggacgtggagatatccgtgctttggkgcamswgsataacawcgaggcaggcagactggcggtgcggagccacacgcgcaccgagtgtaagtgccatgggctttcgggttcctgtgctctgcgcacctgctggcagaagctgccaccgttccgcgaggtgggcgcacggctgctggagcgcttccacggcgcctcacgcgtcatgggcaccaacgacggcaaagctctgttgcytgcggtccgcaccctcaagcctcccggccgagccgatctcctctacgcagccgattcacccgacttytgcgcccccaaccggcgcaccggttcaccgggcacgcgcgkccg

SEQ ID NO: 5073 - DNA, 600 bp, Rattus norvegicus
ctgttttgaccgcacaccagataatttggtctccttccaaagaaggatacactgaaccctggagcttctctgttacatcatttcaagttgtaagataagtgagagaagtgtggttatatcagagagaattgggggcccaaacaacagaagagtgaattcagagactccctgtttatgccactgaccccatacccgtggctacgagctttctggkwattaagtaacaccgtcactgaggaaactacctccttcgtgtctaacccgatctttccaattcatagawtactcagtaactggtttcacgggtattcggaataagagctagagtgtagcctttctagatttggcaattaaaaaamaaactatagaatctgttttccggcagttttgattcgtataaaataatgacttcctaccaatttcaatgcagaagagacccattttttgacaaatcatttgtccagaagtgtgtttcagggcttgcctctccttgactacagggattgctttgtaaatgcagatatgttttttgaagactcgtttttattctttttttataagcaaataaaaacttaaamcmccaaaaaaaaaaaaaaaaaa

SEQ ID NO: 5074 - DNA, 565 bp, Rattus norvegicus; identical to SEQ ID NO: 978

SEQ ID NO: 5075 - DNA, 663 bp, Rattus norvegicus
ctggacctcgaccgataagktgtcyysacyggcakttgcrytgcttgctggctgctattggccactggcttgtgaggctcgaagtgactcacagcwyragrgaaggacaagagaacccatctggcccttgggtgatctgaccagtagagcaggctaggtggtcagtggaaatgtttttccagcactttctctcaggyatckakaaagctgttcccatgctgggtgtcctgggtggwacatagaaatgtctctcataaagcctgcctgcccccttawttawytcttcctggragsaamcttktttkcactgagaccckkcwcsagtsctgctytagcwaagtaggattactgacacagatgtacccaagcaggttgtgacctatcctgtggccttgcatgggatcactgccaatcaaatagttgggcccattcagatttttcattcttttttttgagacagggtctcaccatgtaacattggctggtctagaactggctatgtagaccargctggctttggattcatggagacctgactgcctctaagtgctgagatgaatggctgagccaccaactgtgaaaaaattgtgaacttcccctcttcctaaaagtttacattttaaataaagacctacawtaaaaarwraaaaaaaaaaaaaaaaa

SEQ ID NO: 5076 - DNA, 702 bp, Rattus norvegicus
ggcacgagggcaamacgatskctccatgatgccctgtgtgtcatccggaacctcatccgtgataaccgtgttgtgtatggaggaggggcagctgaaatatcctgcgccctggcagtcagccaagaggcagacaagtrccycactctggaacagtacgscaygagagctttmgcagmcgccytggaggtyatcmycatggsccttymasmaaacagtggcatgaatsccatccagaccatgaytgaagtccgmgytagacaagtgaaggagtctaaccytgccctggggattgactgtctgcacaagggcaktaatgatatgcagtatcagcatgtcatagaaaccttgattggtaaaaagcagcagatctctmwtrccacacagatggttaggatgatthtgaagattgatgacatccrtaagcctggagaatctgaagaataaactgtrccattaccactgtgattaaataaagggtgtgtagtacwrmrwmwrmarwwamwgctcgtcctctcacagcctgtagatgctggaataaaagcagctgtttggtaamwrrwwmmamwwamwmagagcttggagaagrrwawramwwmarwwtctgcattcattagatgkctttaagcawccttcatckgcagasctgtaataaagcmgracmacycctacagrtaawwwwwwarmaaaaaaaaaaaaaaaaaa

SEQ ID NO: 5077 - DNA, 763 bp, Rattus norvegicus; identical to SEQ ID NO: 981

SEQ ID NO: 5078 - DNA, 727 bp, Rattus norvegicus; identical to SEQ ID NO: 982

SEQ ID NO: 5079 - DNA, 481 bp, Rattus norvegicus; identical to SEQ ID NO: 983

SEQ ID NO: 5080 - DNA, 520 bp, Rattus norvegicus; identical to SEQ ID NO: 984

SEQ ID NO: 5081 - DNA, 365 bp, Rattus norvegicus
tgttaatatttgtatttaacatgttgcataatataagattatatagctttcaaagactaacagataaagatgtawtgaacagagacacattgtatgagttgttgtttctagcggatttatatgggttctaagagaaaagctggggaggcctccatccgaaatgtaacctggtcagtcacagatccaaagcttttccatttgtttatattgtaaatatttttgatttcatcaaattatttattcattaaaagaattttttgtgacgcmcarwrrrwramaawmawwwttactcagcccaagaaatggctgattgtatgatgttacctttttgtgaattctcaactcaatacattatgatccttgaa

SEQ ID NO: 5082 - DNA, 488 bp, Rattus norvegicus
cccctcctcggcttgcttctcctgctctcccgacctctacccctcccccctccgggttcmcagggctttgagcttgatcttttgaaagttttaytctattgaagtttttgctatatcttctggttttcttaagaagctttmgagtggtttctatgccctttgkaccmctgcmctgttcatatcatctcggggtcgattstgactgcgtccggatgggaaaccsaggcagaggcgtcgatagtcacgttttctggtcyccctgcaacatgtccatgggggstggggggatcctggaaagtytggtgcttwraraggkkvccmttgtctcttgkawawacggtcatgatgkgtytmtgtcaaaagttcttatatatttctyttmtaagctgaaagaaggtctatttttmtgtttttaggtctatgaatggaacgttgtaaatgcttgtccmmcmmtaaaaatactgaaaaggrraaaaaaaaaaaaaaaa

SEQ ID NO: 5083 - DNA, 600 bp, Rattus norvegicus
ccacttcagttcgaaaagaagtcatcaggaataaaatccgagccattgggaaaatggcacgggtctttacagttcttcgggaagagagtgagaatgtgctgattctcaagggcctcactcccacaggcacactcccactcggggtcctctctggaggaaagcagayttgagactgccaaactacaagcagcagaggagcgggaagccatcagaggttttacaattgcacacaggatccgaagttttgaagaagcccgaggtctagaccgaattaatgagagaatgccaccccgaaaagaggcttcttatcaccatgatgcaggaaagacacacccacacccgtcaaaaaggagcgaccwtggaaagaaagccctgtaatgactcagggccctgtgcagctgggacccaaccccatgaacaaatcatatttatttatactggaatttaaacaggaacaactcaaacaamwwaaamwmrrarrwgcatttgtaattcagtcgcatttattctgtaagaaagttgaccattttataaawwmwwmwaawwwatatatatacatatatacatatatacatatatacawaaaaaaaaaaaaaaaaa

SEQ ID NO: 5084 - DNA, 535 bp, Rattus norvegicus
cgcccgaaagccaactgtttgtactgaatggcgagaatgttctagtaaatgtgtmccaaaatktgaactactttgtacgattacagtctccacgtcgacctaacagaatattattgatattawtktkytttttttttgtataaagtgcaaacatttcgtcccaaagtctgagtactttagtgcagtgaaatgttgtttcatgtcctgtcaagaattcgtatagtacgmgcctggatctacgtgtcaaactgttccatttgtttatgtaaagtgatattaaaaagatataaactatagctgtccattgcttttggcaaaawatacaaccacacaatgtatataattcctagyttccatatttaycmgcatgtaaagggtctggtttatccatgttacagctattcaatatttatggctrraaaaaaaaaactcgtatgtacactttagtttccagaactgtttggtaacctttcgtacgttattaaagattcttaaatctcmmwmrwrmmraaaaaaaagttccgaaaaaaaaaaa

SEQ ID NO: 5085 - DNA, 452 bp, Rattus norvegicus
tcatttaaaaagtcatggtggggaagctactgggagccttcccttgcccgcctgaatgcccagggccgagtgaatgcctggcaagccaaggcaaacaacaacaagcagtggttacaaattgatctgctcaaaatcaagaaggtaacggccatcgtaactcagggttgcaagtctctgtcctctgagatgtatgtgaagagctacagcatcctgtwcagtgaccagggtgtctcctggaaaccctaccggcagaaatcctccatggtggacaagatttttgaagggaatagcaataccaaagggcatatgaagaactttttcaacccacctattatttccagatttatccgaatcattcctaaaacgtggaaccaaagtattgcacttcgcctggaactcttcggctgtgacatttattagaattaaatmcaaaaraaaaaaaaaaaaaaaaa

SEQ ID NO: 5086 - DNA, 525 bp, Rattus norvegicus; identical to SEQ ID NO: 990

SEQ ID NO: 5087 - DNA, 481 bp, Rattus norvegicus
ataggttggttgtctagataataacttggtttgctaaggagacgtgcaggccgagcttttttctttgtttgcatcctgtctgtgaccgtgacccggtctttgcatgtctctggctcctggacctgcattaggtggtgttcctttttacggtaggtcctcggatttgaactaggtagggttctagaagaagtactctgtaaatgatagtgtctcggtggcagaatagccactctgctgaaatctgaatgctccasgtgactccagaaggtccctcyccatgtgtgttttgagtgatttctcaaaaatgtgtacggggcaaaggacaacagtttacatttcatacttccgagaacttcgtatttatttatggaaaatagtgttgacttttgtatcaagaacaacagacacgcctatttttttttttaaacaagccaataaactcttcagttagcagctttmaamwraaaaaaaaaaaaaaaaa

SEQ ID NO: 5088 - DNA, 323 bp, Rattus norvegicus
ggatttgggagtgtcatgattaccctgcgtcttctagttcctgttcagtgaagaagtactttttttttttttctttaaggagggctggggacctcccaattaacagctctgaatcttacacaagccttgaatggggagacatcaagtaggtccaggcttgatctaagcttctcatttgcaggctactatcccttaatagatgtcacaccgacactgttaaatcccgtagtggatgtaaagcgaggctcaaccttgtaactgctcaaaattaaatgactgccctttctttgtgagggggttactgccaaaaaaaaaaaaaaaaa

SEQ ID NO: 5089 - DNA, 600 bp, Rattus norvegicus
ggacaagaccctcattgagaaagagaggttttatgaaagccgctgcaggccagtgacaccatcttgcaaggagctagctgacctcatgactcgctgcatgaactatgatcccaaccagagacctttcttccgagccatcatgagggacattaacaagctggaggagcagaatccagacattgtttcagaaaagcacccaataacagaggtggatcccactcattttgaaaagcgtttcctaaagaggattcgtgacttgggagagggtcactttgggaaggttgagctctgcagatatgatcctgagggagacaacacaggggaacaggtagctgtcaagtccctgaagcctgagagtggaggtaaccacatagctgatctgaagaaggagatagagatcttacggaacctctaccacgagaacattgtgaagtataaaggaatctgcatggaagacggggggaatggtatcaagctcatcatggagtttctgccttcgggaagcctaaaggaatatctgccaaagaataagaacaaaatcaacctcaaacagcagctaaaatatgccatccagatttgtaaggggatggactatctggg

SEQ ID NO: 5090 - DNA, 600 bp, Rattus norvegicus
catcatctcatggcactagaaagcgatttcagatttattccaagtctccattttaccgagctgcctcagcttgtgaggcccagggaatggaaggaccactaggccaagccaaatccctagaagacaggcctcagttcatcagcagaggaaccttcaaccctgaaaagggcaaacaaaaactaaagaatgtgaaaaactcacctcagaaaaccaaagagaccccagaggggacggtttcatctggccgaaagaaaactgtggactcagactgcagctccacacagcaactaccactgtttggaaataatgagtttatggtctaaatggacagaaatgtctccacatctcatctttggggcctcttctggtcaccttgtttgtaacagtcagtcctaatggtcctaccttgtcttcagctgacagtttgtgtgctggaacactgcacttctggcaaaagtggcctctttgaagtttgctagggatgggccagctgtgccttggctgctgtatttgatttgagattccactaaacaaagccacctgagacctgggtgattttggccaacagtagttgctctcgtgccgaattcgatatcagct

SEQ ID NO: 5091 - DNA, 1400 bp, Rattus norvegicus
agggctatttctagctctttctagagctgtttctaaccagaaacagctggaaaacaaaaagaacaaagtgtatgcagggcatgcatctcattcttagtgaaatcactacaaggacccatcccagcccctttctaagtcttaaccttgggttttactgcagtttaaattgattcttttccmatcatgacattgwaagttgccctttaacaggaaaaatggtcaccgaatgagawytgggactcaagaataacgaatttggggcrcccttacgttgaaagcatttgaacctcyctgatacmgaaggggattcccctccccgcctttttctcttgtraacaggaastaaatagcabkakkagttaaagcttggttgcagtgttcttatcttgwgggctggtttctaaaacctcatgctgctgatttgaccagggcatcckcatacctcaratgcaraccactcttctaccgggcctctgtttaccggagctttgcctcaaggataraasgctgtacagaggggctctttggtttgaggaccactgctcacccttcctgtcattaacctgtcacaccccattttatcatctccctttctctctgacacacaaaggtggggtasgtgggagggtcgwggattattcttattaaaaaacaaaatcatctgttgccaaccccatttacccatctttggtctcttactgatgggcctcttaagaattattgtattccaagtctttaaccctcakgttactaakgtaaatatacatctgsrcagtctttattacttcctgtatctctgagtaatacatcaagctggtgctgggtgatggtcatatctgaacctagacctccccgtgggtcttccacaatcctgttgatgtgggctgcttggtgtggtaaaaagcccagtcgtggtgtaacttaaccttggcgattgcatcaagcttcttgatagcagatacactctaaggttttagccccagtagaggtgaaatgaacatccctcactgccttccccagatcctcaactctccattgttaaggagaccagagataattaatgccaccaaccctggcttagaaagggtacgtcatacactgtgtagcaagagggcattacagagcctaacgctggcgtgaaaatcatgtacttagccagcaagtgagtctgcgagggtggcgtagtctggacagggtgttcagcatcgggaactgtgctctcaggtccataagctccacatagtgttggggtttgggtttgggtttctggttgaatttgagtatttgttctttttttatagagtgtaaaccaagttttatattctgtaatgcaaacaggtacctgtcgttttttgaataaaactgtttacatccaaaaaaaaaaaaaaaaaaaaaaaaaa

SEQ ID NO: 5092 - DNA, 600 bp, Rattus norvegicus
ctatggcgtcagtgcctgcgagggctgcaagggctttttccgacgaagcattcagaagaacatgatctacacttgccaccgggataagaactgcgttattaacaaggtcactaggaatcgatgccagtactgccgcctgcagaagtgctttgaagtgggcatgtccaaagagtctgtcaggaatgacaggaacaagaaaaagaaggagccytcrwrgcaggagtgcacagagagctatgagatgacagcggagctggatgacctcaccgagaagatccggaaagcccaccaggaaacctttccctcactctgccagctgggtaaatacaccacgaattccagtgctgaccaccgggtccgattggacctgggcctctgggacaaattcagtgagctggccaccaagtgcattattaagatcgtggagttcgccaagcgtctgccgggcttcacgggcctgaccatcgcagaccagatcaccctgctcaaggccgcctgcttggacatcctgattctcagaatttgtaccaggtataccccagagcaagacaccatgactttctctgatggccttaccctaaatcgaactcagatgcacaa

SEQ ID NO: 5093 - DNA, 600 bp, Rattus norvegicus
gagatgatcgcgggggactggctggaggcgaacttctccgacctggtgttcacgtattgaggggcacagggctcctcgggaggcagtcgtggcggtcaggataaagaggatggtggggggagggggagaagatgctcatggtcagagatgtggcgcagagaaattggaaasrrtkmkgadakgttggagttaaagtgaaatgagtasytttaaacagattttccarrwttttttttttaatcttttaatttttaaaaaaattttttggtctccccactcttyccttcctttatcgtgtctcaaggtagttgcacacctagtctggattgtgatttcccccacccstaaaaaaatcgtgttttgtaatttctatttctttttcctgaaattcgtgattgcaacaaaggcggaggggaccgggcgggggaggggaggaggccccgctccggaaggcgctgtttgaagctcgtggctctttgaagtctgaaagacgtcggcagaggaccctttagacggcacaactgttactctagggagttgatatttttttttcttaagagatttaaaaaggaactggtgatttaaaaaaaaaaaaaaaaa

SEQ ID NO: 5094 - DNA, 1400 bp, Rattus norvegicus
aaggacggtatasgaaacctgtttaggaatcactgatgcctgacggaggcacagtccaaggaaagaagttctggtagtcataaccatgtaaggtagtggctgagatggcaacagggctcattcttgawtctcaaccctcatctctccttttcctatwtggattttgttggtgctgtrgaaaacaaaaagagagaaaatatatattcktramrrmrvabgrdgmtcmttyccatccatcaaagatatagtaaaagtgtctttartaaattgtaattattttatgtacagttckacactgtcttccctgtgtccattkccaaaacttgcacgtgactctgaatcccacstatctcgaattttgtgacagttgtgcaactgtgatgacaataaatattgtgatacaaaawmwmaarwwrwawwwmwrmaractctaattgcctttctttgattgataataaaatgcctttgtatgtgtwrawrwwraararwwmarwtatttgatgtcattgacgaatttcacagtggtcaaacccagacacgcccatcatccctgttctgctaagagtaactttttgagtttcagcaagaaatgtcacgcattttaaaaattaattaagtgctatacctcgaaaattttcttctcagaacccagacttcaccaaatacttgtatatatggaaaacaagaaaatttatatttttggacaggaaagtatgtatgagaaactgtttttaacatccacccaggaattaagtttttgtacaattatttctctacctaatctttcattgccttcagtgtgcttcagtaatgcaaactgatattaaasatggaaaataagcmattgtttatgaatttgkgcaatgttaggtttttaacaatgracttttaaaatctgatacaagtggcatagtccaaaatattattttacttgcccaatgaatacagttcctttattttaaagtaattattttcaacatctgaccaacctagtagctaaatacatagggtggactgtttcaaaagtcatatttgctcaagacaatcaattcctctctttttttccactaaggtatttttctttaacataccttggagtagcaataaaattttaaaatcaccaactgaattttgtatctattttaagtaatatatgtaagacttgaaaataaatgttttattataatttcttatatgaagtgttaaattaattgataccagataccactggaacatttatcaactgataatttatctcaaagaacataatctgtaatcttgacatttaaaagtgaacatttgtaattcggaatttctttatttctgaaaccaagtttgtaaatgtcctttggaggaaggagatatgaattttatcaataaatcaagtcttgtctacctgg

SEQ ID NO: 5095 - DNA, 988 bp, Rattus norvegicus; identical to SEQ ID NO: 999

SEQ ID NO: 5096 - DNA, 600 bp, Rattus norvegicus
gaagcagacagcctgcctggagcagatccaggcaatggaaaagcagttccaggagaaggcgctggcagagtatgaggccaagatgaagggcctggaggctgaagtaaaggagtcaatgcgggcttgcttcaaggcctgcttccccacggaagcagaagagaagcctgagaggccctgtgaggcctctgaggagtcgtgtccacaggagccacttgtgaacaagacagacactcaggagagccgcctctgaatgccagcatctcactccgacattttagcaaggatatccacgcctttctcctcgggagaaaaggaccttattactctggggctgtgggagcctggggctgcttggctgccgcagccccgcttctcagccacataaggcagaaatgggagaccattggggcaagagccccatggaacccgagtcttttctaagctggcttcttctgtcgtcccacctgtagtgccatatacttattgaaggcaaaggaatatggaccaagagagaggaaattgggtcctggtctccctctgcctttcctaacatacatgcaggggctctcacttggagctccgttcctttcctggatgctt

SEQ ID NO: 5097 - DNA, 600 bp, Rattus norvegicus
gggggctccctccttccggctgccacctgatcctaacttgccttgcatcctggtgggcccagggactggyattgcacccttccggggattctggcaagaccgattacacgacattgagatcaaaggactgcagcctgcccccatgactttggtgtttggctgccgatgctcccaactggaccatctctaccgggacgaggtactggacgcccagcagcgtggagtgtttggacaagtcctcaccgccttttccagggatcctggcagccctaagacctatgtgcaagacctyctgaggacagagctggccgcggaggttcaccgcgtgytgtgcctcgagcaaggacacatgtttgtctgcggtgatgtcactatggcaaccagcgtcctgcaaaccgtgcagmgaattctggcaacagagggcagcatggagctggatgaagccggtgacgtcatcggcgtgctgcgggatcagcaacgctaccacgaggacattttcggactcacattgcgcacccaggaggtgacgagccgcatccgcacccagagtttttctttgcaggagcgacagttgcggggcgcagtgccctggtcctttga

SEQ ID NO: 5098 - DNA, 1400 bp, Rattus norvegicus
ttttggcatcttaggtcagaggtgcacactcctgctgtgtccattcagtttggtgtcatcctagaggcatactgtcggggaagcgtggggcacatgaaagtgctttccaaacaggttgaagcactcaataaattaaaaactttaaatagcttaatcaaattgaatgcgatgaagctgaacagagctaaaggaaaggaggccatgcacacgtgcttaaaacagagtgcctaccgggaggcgctctctgacctgcagtcacctctgaacccatgtgtcatcctctcagagctctatgtcgaaaagtgcagatacatggactccaagatgaagccgctgtggctggtctacagcaacagggcctttggagaggacgcggtgggagtgatcttcaaaaatggcgacgatttgcggcaggacatgctgaccctgcagatgctgcgcctgatggatctgctgtggaaagaagctggcttggacctgcgaatgctcccctatggctgtctagcaacaggagatcgctctggcctcattgaggttgtgagcacctctgagacaatcgctgacattcagctaaacagtagcaacgtggctgccacagcagccttcaacaaagatgctctcctgaactggctcaaggagtacaattctggggacgacctggacagagcgattgaggagttcaccctgtcctgtgctggctactgtgtagcctcttatgtccttggcattggtgacaggcacagtgacaacatcatggtgaagaaaaccggcsagctcttccacatagactttgggcatattcttggaaatttcaaatctaaatttggcattaaaagggaacgagtaccttttattcttacttatgacttcattcatgtcattcaacaaggaaaaacgggaaacacagaaaaatttggcaggttccgccagtgctgtgaagacgcgtacctgattttacggcggcatgggaatctcttcattaccctgtttgcgctgatgttgactgcagggcttcccgagctcacatcagtcaaagatatacagtatcttaaggactctcttgccttaggaaagagtgaagaagaagcactcaaacagtttaagcagaagtttgatgaggcactcagggaaagctggaccactaaggtgaactggatggctcatacagttcggaaagactacaggtcttagcgtccgctctgctctgctgcacttgcctgtttgtctcctttccattttgcacttgcactattgaacatgaccctgcgggaaatgccaagggaatgaaatcctgaagctcagcgtgaagttcagaacacggcatcccacagaagctcgtctgaaccaccccaatgcccaccctctgtaactgagtgcttccaggactcatgagtgtcagc

SEQ ID NO: 5099 - DNA, 600 bp, Rattus norvegicus
agtttggtgaaacccagtgtagactttgtctgccagctgaagttcccttctggcaactacccttcatgtttggatgacaccagagacctgcttgtccactggtgccatggcgcccctggggtcatytatatgctcatccaagcatacaaggtgttcaaagaggrgcatyamctgtgtgacgcccagcmgtgtgmtgacgtrawytggcmgtacgggctactgaagaagggctatgggytgtbccacggtgytgcagggaatgcytatgctttcytggcactytataacctcacacaagatgygaaatwcctgtacagggcctgtaagyytgytgagtggtgcttagactatggrgagcacgggtgcaggacaccggacacgcccttytytytctttgaagggatggctggaacgatatatttcytggctgacctgttagtccccacaaaggccaagttccctgcatttgaactytgagaagaaagcatgtcccctgcsgctcacagcatggttytgtgtatccyyctgagctctgtgtgtccmttgcttttgaaggaagcagaatgaaactgtatactttgaaaaaaaaaaaaaaaaaaa

SEQ ID NO: 5100 - DNA, 600 bp, Rattus norvegicus
gcttgctttttcttgttgtagaataagtttatttgtcccagttatttgggtcttaaggttattagccaaaagccagttcacctaactgagccaggagttagttatctgctttgctcaatcctgggctttgctgggtagggtcaggtgtgtccaaggtccagaaagcaaaaagggtgccccgtttctcctgggaaggcttccccgtcagtgatttctgtaaccggaccctgccctgacacagcgtcattggactacccagcagacagtagactccactctaaacccgcttcttgcggtcagttgctgtccttcagtgtgtgtaagcagtggccagacagcacccttgggtgtcatttcaagactctctcaccttggtctgctttacgtttggtttgatttggtttgttctggtttttgagacgaggcctttcactggaacctggcactcagtatttagactgcccagccagctagcctcagagaatgcatctgcgtatgcttgcctggcgctggaattcggtgcacatggctttgatgtgtaccggggatcagacacagatgtttcatgagtgcagtgcatgcctgttagtggtagagctc

SEQ ID NO: 5101 - DNA, 600 bp, Rattus norvegicus
gaywykmkkggaaattagaagagcagagaccaaatttcacaagaatcagggcgtggggcacacttttaaaagagaaagcgagacaggccsgtggacagagattcccagaggcaacggcatcaccctcacacctctgcattctgatagaagtctgaacactcgywygkgtgtcccccccttttgacgaagaatgttttatttttatttwtcatgcatgcattctcaagaggtcttgccaatcagtcaytgataggaaagacatccttgtggactttctccattttaaaatggtaacaatcagaggaattttaacaacgcctttagaaataaaaacgctgggatcaaactggcctgcaaaatcataagtcagtgaattcctkmarmmssrkrswtccwctagwwskararcgrmmrmcacmgmrtasaraaacracattctatttatttattgatgacccatggtaaaatgcaaatagatccggtgtctaaatgcattcatatttttatgactgttttgtaaatatcttttgtatattatttttctgcaataaataaatatgattgaaaaattttaaraamwwwaaaaaaaaaaaaaaaaaa

SEQ ID NO: 5102 - DNA, 1400 bp, Rattus norvegicus
ttacccagcggtagggtgctcccatcccatttgatgagatyytgtacaacaggcagcagcactatgacccaagatctggaatctttacctgtaagatcccaggcatatactatttytcctatcacatccatgtgaargggactcacgtttgggtaggcctgtataagaayggcacgccyacaatgtacacgtatgatgagtacagcaaaggctaccttggwtcaggcttcagggagygcratcatggagctcacggaaaatgaccaggtgyggcwcsagktgyssartgcggaatcgaayggmctctactcctctgagtatgtccactcgtccttctcaggattcctagtggctcccatatgaacamttcctgtcaagctcatcctaatcccccgcttagaacctcccaccccattccatcgcccgatcccgccctggtgatgcatatggaggtaggctaaaagtaatgtgaataagctttctaaagtgcactccgggaccaggtttcctcctgtaagagtgagcagcaatagtgggtatgtgaggatcctcccgaacactcggcagttctaaggccctgggtgcagggtcgggggtgctcctgtyktyyywtyyttatttaaatttcttaacgtaagtttaaaaaaaaaacaaaaaacctcccrmaaactgaaataaggctctagcgcatcatgaatctcgttttaagaactcaacattcctttttcaaaaaagtccaattttaataatatgagaatatctcggaaacatgcaggagatatcatgtcactttatattactttaaatacttgaatattcaaattcaaatgacactgtccaccttaggatatttctgatggtgcatcactccatggttcacacaaccccttacatcgagataaagtcagaygsmcgsawagwtttttttgaagtgctcctaagaaactaaaacactgtagtgaagttaatttcaattacaaggtgctttaccacagccatttcgagcttttctgcaacggcaggaagtccacgtacctggggcaacttagaaaaagtccacatacctggtgcaacttagaaacargtgtctgacttactcttatgtcagcaacgcagtattactatggtataatttctkgcatctttgtcaaatgattttaatgggcttatacgacatcagaatagacactctgtgtgccttctattccactgkaagtataaattaacattaagcttttcaaagtcagactgaaaacgaaaagacattatttatttatgctctgtactgtatttttaccgttactgtttaaaactgggaagctgtacctcayttactaaagcacgcagtatttaatytacttggtattasgagataataaaacaactggaataccctcgtg

SEQ ID NO: 5103 - DNA, 600 bp, Rattus norvegicus
ttaataactgcataaatttacatgcctagatttctgtaatattgtgtatacaaaaccaaaatctctcaagctgtaaattgtgtatacccgccaggatccccattttggggcatccatgcgcattttagatttaattcatacaattaaaaactcaatgtgactgctgacgtgctgaaactttacataagaattatttgtgatactttagttaataaaatggtgaggttttttttttcctgagttattgaacaagcaaacattacccagctgacctggcaatgactttttgtgtgtgtgcgggtagggggccacaaatattgatttttttttcctcccattagcaattttgggttttaaatactaacatggttcacactatagtttgtgtgtaacaacacatgtcacattatctttgttgctgttaattttgtgctttttttttagactttatttatttagaaggagagagagaaagagagagggagagagagagggagagagagcgagagagaaagttcctgtactttgcacttttccccccaaatccttcaatctcttgtatggcaaccaaaattaagtaaaaaaaaatatatataaaaa

SEQ ID NO: 5104 - DNA, 600 bp, Rattus norvegicus
tagagggtttccctgtggggtcggggctttgaaggtcattgacctagtttttactcttctaccaaaacacattttgctgctattggcagttctgactcacgtagagccccaacttgagtgttatagccttattttcccttgttatgggtagttctgggtaagattttggggataggaatactgggtagtccctggtgcctttctaggaaccctttgagcctaaaagctcagtctggggtttctaaaactggagagtagaaaacaggtcaggctgagggtcttgaactccaatcacaggatacacttactccactatttgaaagctatcgtcacatgccagtgccttaaaggtttgatacccctttgtgcgatcgtggcgtttaagggatctcaatacccacttgtgcagtccctttgaagaaactgaggcagagagggaagggatgtcagtgggggactggggaagtttgggaacagggccaggcctgatacactgctgtctttctcttccttcccttcccccaccccctacccctcctcatgccctctctctccacagtttacttcagcacttaagtccctgaggagtctgccctgcct

SEQ ID NO: 5105 - DNA, 600 bp, Rattus norvegicus
  misc_feature (181)..(181): n is a, c, g, or t
rgccyycsagamcmwkamttmkryaygwrrgaacactgktggttatatggmtgatcaaactaaaaacctcaagaaagctgtggttcttaaaggswcaratgayttagaaataaaaggagaaggmamsakmmgaytcasatayasbgwwyttsrmsmtacswgkycaargcrmrwkggmrmnrkrggmaagacwgtctttgmmtacagaacacagaatgtggsccgcttgcccatcatagatatcggtyctgtggatattggcaatgcwgaccaggaatttggytttgaaattgggccagtttgtttcatgtaacagaagtccagargtatcgagactwccatcaatgaccamytttacaaraastwractgdttgaagttcatcctgagactcttgaagtaatggctggtcctgcatcagctttrtacatatgatctgaagtgcctgaccaccttatcyttcagaatatttattttacttacaattytcaagtttaattgacttaatttttttcaatatggcagtttagattaaaacaacgacaatgaccacctttacaaaaagtaaaytgdttaaaaawwwaaaaaaaaaaaaaaaaaa

SEQ ID NO: 5106 - DNA, 600 bp, Rattus norvegicus
tatgtgagttcagggtacctagcatgagctagaatgacatttgctttctatcactcaaatgtacactttctcctaaatgttgaggacgtgggcacagcatgtgttactaccagcaagagctatgagaaggtgtagtagaagttagtggatggaagctaagaaactggaacatggcctagaagaraatgagtgctcctggccctgggtcttccyttcccttgtttcttggccatgaaaaattcaataaaatgaggtggttagtttwrctttgccatttaccctcaccatgatattctgtccatctctccacagaatgtaaattccaaacccaagagctaaaataaagcttctgtctttataagttgctttccccagatattgttataatgaaagaaakctcactaatacattcccaatgatgtggttataaaatactagaaaagtctgaaattttgttgaacttatagacaatcgcttggttactgccgaaatctaaccatatgtgtatagttaattaacaatgtctattatattaaaaaattatatcctaattgtattgtaaaaaaaaaaaaaaaaaagcggccgctcgagcatgcatct

SEQ ID NO: 5107 - DNA, 1400 bp, Rattus norvegicus
ggcccttggtgcttcaccactgacccgagcgtcaggtgggaatactgcaacctgaagcggtgctcggagacaggagggggtgttgcggaatcagccatagtcccccaagttcccagtgcgccaggcacctctgagacagactgcatgtatgggaatggcaaagaatatcggggcaaaacggccgtcactgcagctggaaccccctgccaggaatgggctgcccaggagccccacrgtcacagaatcttcaccccacagacaaacccacgggcaggtctggaaaagaattactgccgaaacccggatggggatgtcaatgggccctggtgctatacaatgaaccccagaaaactttacgactattgtaacattcccctttgtgcatcattatcgtcctttgaatgtgggaagcctcaggtggagccgaagaaatgccctgggagggtggtgggtggctgtgtggccaaccctcactcctggccctggcaaatcagccttagaacaagattttctggacagcacttctgtggcggtactttaatatccccagagtgggtgctgactgccgctcactgcttggagaaatcttcgagacctgaattctacaaggttatcctgggagcacacgaagaacgaatccttgggtcagatgttcagcaaatagcagtaaccaaactggtcttggaacccaacgacgctgacattgccctgctgaagctaagccgcccagccaccatcacagataatgtcatcccagcttgtctgccatctccaaattatgtggttgccgaccggacactgtgttacatcaccggctggggagaaacgaaagggactccaggtgccggccgtctcaaggaggcccagctgcccgtgatcgagaacaaggtgtgcaaccgcgctgagtatctaaacaacagagtcaaatccaccgagctctgtgccgggcatctggctggtggcatcgacagttgccagggcgacagtggaggacctctggtttgcttcgagaaggacaagtatattttacaaggagtcacttcttggggtcttggctgtgctcgccccaataagcctggtgtctatgttcgtgtttcccggtacgttaattggattgaaagggagatgaggaatgactaattgggtgggaggcagaacaaaactactaaatatggggaggggattagggcgcttgaaaaaaaacctgacagcaatcaaaccaaagacacyacactggaccactacttcctgtcacccctcagcycctccctctttttgtattattgtgggtaaaattttcctgtccctggacttctggattttgtgacaatagaccatcacttctgtgacctttgttgaaaataaactcgatacttacttwrraaaaaaaaaaaaaaaaa

SEQ ID NO: 5108 - DNA, 600 bp, Rattus norvegicus
tgctagtgggtgctggcttgaagtcagaactcacggggtgggggggaattctctgcgctcatctgtccyctckgaactctgctawttatagadtccacgtkgaytgytaaytattamtwaggggcctgctgcatgctaagcactgggatgggtgcmtgrcayrakrctgaatcctcmcacggccctgtaaagktgctttgtatcgctgacattttgmccatgatgaaatgagatgctcmsararawymtgtkttgtggktaaraycacmcagttgatargatcsgtattccmatttcagaggccctccactataacactatgctttgctcattcytgcyacaaagataactgccctgtagcatcccctgtgggtatcactccctgtctcaaattggggtgggtatggcggtgtatgtgcatgggaagtgtcttggggggagggttgtagaagcacagaggaatcacagaattattttytaagcgagataacactgtttgtttatggcccatggatcatatctccctgtccccacctatttttgtaaataaagttttatgggaacacaaccacawmmwwwawaaaaaaaaaaaaaaaaaaa

SEQ ID NO: 5109 - DNA, 600 bp, Rattus norvegicus
cggtccataatcatgttacaggagaaggcccaggaccgggagaggctgctcctgaagttcatcaagatcatgaagcacctgcgcaagctcaacaatttcaactcctacctggccatcctctccgcactggactcggcccccatccgcagactggagtggcagcgacagacctcagagggcctggctgagtactgcacgttgattgacagctcatcctccttccgagcctaccgggctgccctctcagaggtggaacctccatgtatcccatacctaggtttgatcctgcaagacctgacgttcgtccacctgggaaacccagactacatagacgggaaggtcaacttctccaagcggtggcagcagttcaacatcctggacagcatgcgctgtttccagcaggtgcactatgaaatccggagaaacgacgacatcataaacttcttcaatgacttcagcgaccacctggccgaggaagccctatgggaactctctctgaagatcaagcctaggaacataacaaggcggaaaacagaccgtgaagagaagacctaggacagctggtgtgaggatgctcaagcagccaggagagctggacgt

SEQ ID NO: 5110 - DNA, 506 bp, Rattus norvegicus; identical to SEQ ID NO: 1014

SEQ ID NO: 5111 - DNA, 600 bp, Rattus norvegicus
caysytvtgagcksctgcagcaaagaggcgtcttctatagcatggccaaggatgctggcttggtgtgaactgatctctggcatatctgatgargactgcarggccaggatcccagtgtccaggcatgagccagcaaccctggaaacctmcmctcbbsmgagaaaaaccaaaaawwraaaraaammmaaactaaaaggamgcaaaacacataaagcatcagtcacagtttgccccagcctggatctgacctcgaagaagcctgaagacagatgtgycccacttcaaacacgtctggcttctggcaccacttgtgaggctccctgaaagttcacccatgctcctgctgtatcccaaagcaaggccatgagcagccaaacacactagtgaccaaacacaagccactgcctcatgcctmttcagccacatttatagagccaagccagagcctctctgccctgccagctcttctgtctcctacagtcctgttggtgacagaagagtgtatcttgccttcaggtcttgcagttgaawgcmtggaawccwaaacaaacaaacaaaaaarararaaaraaagaaaactcctaaaaaaaaaaaaaaaaa

SEQ ID NO: 5112 - DNA, 600 bp, Rattus norvegicus
ggcagctcagtaccgagaggcaatggaagcagatttgaaggctgcggctgaggctgctgccgaagccaaggcgagggctgagattagagctcagatgggcattgggcttggctctgagaatgctrctgggccctgcarctsrgatgamsctrryaydrgrsmsbggscaaaggyccsratccaggcgggagctgaaactaaagccaaagcccaagaaagtagtgktgccagtgctggtactggtsccsgtgccagtgccagtgctkgtacmagtgtcagtaccagtggcactgctggttctggtgctawtgctgggscmagtgggggcttcagwaccaaccccagtctkmckgcmagtctyacgtttgggctyttcgctkgccytartggarctkgggccagtammagwagcagctytggtgcctgtggkttctyctmmaagtgagatacarrttgstwatcacagmgksttyttctyaagccrgggkgcactctcagacacttattcaatgcagcactctaggcaaccgytatcaatcaattgaagtsgacactctatattaaatctatttgccatttcwraraaaaaaaaaaaaaaaa

SEQ ID NO: 5113 - DNA, 1400 bp, Rattus norvegicus
  misc_feature (108)..(108): n is a, c, g, or t
  misc_feature (127)..(127): n is a, c, g, or t
  misc_feature (281)..(281): n is a, c, g, or t
  misc_feature (283)..(284): n is a, c, g, or t
  misc_feature (390)..(390): n is a, c, g, or t
  misc_feature (399)..(399): n is a, c, g, or t
  misc_feature (428)..(428): n is a, c, g, or t
  misc_feature (435)..(435): n is a, c, g, or t
  misc_feature (438)..(438): n is a, c, g, or t
  misc_feature (458)..(458): n is a, c, g, or t
agggtgaagaagcagggcatttggagtggagcagccttcaggcccagaattgctggcagcagaggccttgagccacaaatgctgcacccccagcacagcattccgcanaacgccctacccacctganagtgtgcttgacctctgatggggcaggcaggtctgccttgttttaatcactaccttgtcagctcatgcccggagggaaggacagttcatctagttgtattagaggtttccctgacaacgactgaggtgagagaatgaggttttggctcttatananncttgtgtgaaaggcacatggatcagctctccccatccgacatttatgctgctgctatggtacgtgttttggtctcctccgttctgacacaactcccgtgtaaggtncttgtcttnctgtactgacggttgtagcctcagacatnctgcacnccnctggggttttaggggtggcncttggaagtttctttggctgtctatggacttgtcacttcccacgaaaaggtcacattaccaaaacactgcctggtcttcaracttcaagcactgtgataggacttttaaatagtcgtaataaaatactatattttatgggcatttcacaaacacagtaaaattgtgacattttatgtggctgagaatgstcagataagtacaccggatagagccttacggagtgtgtgtaatacttgtgtgkgcacacagccagacggaaaawgaaaaatgcttatttcascatatawtatggctttaktttgggccattttycttycaataccygkgaaaawtttttttaaaaaawatcycyarkcygggatccmttttgkttttcagatgtgcttaataatagktttattaaatgcagaaatacagrtaagttcaaattactcaacmtgcctacacagkattgstacagsaggtttagcttcaagggctgagsyccatgtctaaatagckgacccatctgtggggaattaacactkgactaataaccatttgtctgkctgktcckgagatacaaaagtacccatacttgktwaaagtacctatacctgktagcamtawyagacagwtttttcatctacatatatgcagaagttaccacatatkaaatattactgagtattaagtagcaatctgtcagmcactaaaawwtgtragatccatytamgaaaggmkattamaccgtaccatgtygactwgttwttgtaatcmasgkgactaargaaatgatttcagcygtgkwaataaarytataaatcctccccaaacacaaaaacccagggggccgggaccaaacacccatagagcgataaaacacggcgcggttcaccacgacgggaaaccccgtgcactatagcgtcgcaaccctcgccggcatgaaagcgcgagactca

SEQ ID NO: 5114 - DNA, 600 bp, Rattus norvegicus
atatacccaccaggaccaggatgacagtgacctagtccagaactctccagggcatcctaagcacacacaggatggctccgccttgggccatggttgtctcctagagcctgaagtccctgaggagaaagaccaagtcatggtaacgttccagggctaccagaagcagaccagatggaaggaggaggcagcagaacctttggacggagagattcccttggcagaagcctttgatcctgaactcggggtgcgcctgcagggtgattcagcttggcctcctgtggctctagccacgggttatttgaaacaggagtctcaagggatggcctctgctccaccggggacaccaagtagacagtggaatcaactggctgaggaatcgtcactcctgggtgtggttagctgtgaagacctaagcatagagagtttgggttttgcccatgaacttgtccctctggactgtggggcagcctctagtggcctcctggatagccttggcactaatctggtcaccctgccattgatctctagcctgcagatagaagagtgacaggggataaggtttctttgtattttagccatgcctgctcccctccctgtacc

SEQ ID NO: 5115 - DNA, 600 bp, Rattus norvegicus
aagtgcaacaaaggtatctatgggcagagcaatgcctgccaggccctggacagcctctaccacacccagtgctttgtctgctgctcctgtggacgaactttgcggtgcaaggctttctacagcgtcaacggctctgtctactgtgaggaagattatctgttttcagggtttcaggaggcagctgagaagtgctgtgtctgtggccacttgattctagagaagatcctccaggccatggggaagtcctatcatccaggctgcttccggtgcatcgtttgtaacaagtgcctggacggcgtccccttcactgtggacttctccaaccaggtgtactgtgtgactgactaccacaaaaattacgccccgaaatgtgcagcctgtggacagcccatcctcccctcagagggctgtgaggacattgtgagggtgatatccatggaccgtgattatcactttgagtgctaccactgtgaggactgccgcatgcagctgagtgacgaggaaggttgctgctgtttcccccttgacggacatttgctctgccacggctgtcacatgcagcgcctcagtgcccgacagccccctaccaactatatctga

SEQ ID NO: 5116 - DNA, 600 bp, Rattus norvegicus
agagtacctctgggcatcttctccgtgctcagtttggcctcagagtgcaccaccctcgcagcggagcttcccaaagtgtcctacgtgaaggcactggatgtgtggctcattgcctgcctgctcttcgggtttgcctccctcgtggagtatgctgttgtccaggtgatgttgaacaatcccaaaagggttgaagctgagaaagcccgaatcgccaaggctgagcaagcagatgggaaaggtggaaacgcagctaagaagaacactgtgaacggcacggggacccctgttcatatcagcactttgcaggttggtgagaccagatgcaaaaaagtttgtacttccaagtctgatctgagatccaatgacttcagcattgttggcagcttaccaagagattttgaattatccaattatgactgctatgggaaacccattgaagtcaacaatggacttgggaaaccacaggcaaagaacaagaagcctccgcctgccaagcctgtcatccccacggcagccaagcgcattgacctctatgcaagagcattatttcccttctgcttcttgttcttcaacgttatatattggtctatatatttatga

SEQ ID NO: 5117 - DNA, 600 bp, Rattus norvegicus
gaacatcaggtgtccactgcgagggctggacagcaaggcctctctcgttctacgctccaggctgtggaacagcacgtttctagaggaatattccaaactgaactacttggacatcctcgtgagggcgtccatagatgtgaccgccgccgctcagaatatcaagctccctcatgcgggcactcaggttcgagtgacggtgtttccctcaaagacggtagctcagtattcagggatagcgtggtggatcatcctcctggctgtgcttgccgggattttgatgctggctctattagtgtttttactgtggaagtgtggtttcttcaagagaaataagaaagatcattacgatgccacctaccacaaggctgagatccacactcagccgtctgataaagagaggcttacttccgatgcatagtattgatctacttccctaattgtgtggattctttaagcgctctaggtacgatgacagtgttccccgataccatgcggtgcggattcggaaagaagagcgagagatcaacgacgagaaacacactgataaccccgaaaaaaagcggccgctcgagcatgcatctagagggccctattctatag

SEQ ID NO: 5118 - DNA, 600 bp, Rattus norvegicus
acaagtgaggatgggctggcggatggcggtgagctccctggaccactcatgatgctggcccagaactgtgcggtcatgcacaacctgmtgggtcmmgcctgcrtcwktckccswaagrrwyytsycgagaacagacaacctgatagatcgttacgaccagaggagatcgaagagctccgagaggccttccgggaatttgacaaggacaaagatggctacatcaactgccgggacctggggaactgcatgcgcaccatgggctacatgcccactgagatggaactcatcgagctgtcccagcagatcaacatgaacctgggtggccacgtggatttcgatgactttgtggaactgatgggccctaaactcctggcggagacagcagatatgatcggtgtaaaggaactgagagacgcctttcgggagtttgacaccaacggtgacggggagataagcacgagcgagctgcgagaggccatgaggaagctcctgggtcatcaggtgggacaccgggacatagaggaaattatccgagacgtggacctcaatggagatggacgagtggacttcgaagagtttgtccggatgatgtctcgctga

SEQ ID NO: 5119 - DNA, 600 bp, Rattus norvegicus
ctctgtcttgtgtcccacttctaccctgaggagggcttggaggtggaatgggagctcagaggtggcccagaaggaagttctagaaaggctgaggggaagacttgggtctccactgtccgtcaccattctgatggctctgtcagccagtctgggcacctgcagctacccccagtcactgacaagcaacatggagttcgctatgcctgtcgggtccgccaccctagcctgccctcatcggggcgcagtgctgaagtcactctggaggtggcaggcttctcagggccctccattgaggacggcataggcctcttcctgtctgcttttctccttttgggcctcttcaakgcactaggctggatggctgcctacctgaccattcctaaaatcttaaaggagaaggcctcagctaccagcctgaccgttcccaaagacgaaaagaagtcagagtgaagacactggtctgtggaagccaccctcatctctggtccaaacgactccagtagcccctgccccagaacaagaggggggtgcctcataccctcttctccctccattaaatgactcagggttgtttwwwwwwmwwwwwmwwwwwaaaaaaaa

SEQ ID NO: 5120 - DNA, 590 bp, Rattus norvegicus; identical to SEQ ID NO: 1024
  misc_feature (107)..(107): n is a, c, g, or t
  misc_feature (110)..(110): n is a, c, g, or t

SEQ ID NO: 5121 - DNA, 444 bp, Rattus norvegicus; identical to SEQ ID NO: 1025

SEQ ID NO: 5122 - DNA, 600 bp, Rattus norvegicus
ggcgtcatgccccaaaacgtagttctcccgggccctgcgccctggggcttcagactctcaggaggcatagacttcaaccagcctttggtcatcaccaggatcactccgggaagcaaggcagaagccgccaacctgtgccctggagacgtcatcctggctatcgatggctttggtacggagtccatgactcatgctgatgctcaggacaggatcaaagcagcatcttaccagttgtgtctcaagattgacagggcagaaactcgcttatggtccccgcaggtgtcggaagatgggaaagcgcatccctttaaaatcaacctagaggctgaaccgcaggaattcaaacccattggtaccgcgcacaacagaagggcccagcctttcgtagcagcagcaaacattgatgacaaaagacaggtagtgagcgcttcctataactcaccaattgggctctattcaactagcaatatccgagacgcgctacacggacagctgcggggtctcatccccagttcaccgcaaaatgaacccacagcttcagttccccctcagtcggacgtgtaccgaatgctgcacgacaatcgggatgaaccagctgct

SEQ ID NO: 5123 - DNA, 600 bp, Rattus norvegicus
cttctgtgcagcccagggctgctgagaacttgccaggctaggctttctagaaggccactggccactgtaaccaccctctcccacgcctgtcggctgcccagacacctcatacaccaccaggcagcagcggcagccctacccagccacccaactccgaacacactcactcaaagtttgcagtttgcgtagaaaagcacagctctggcgggggtagctgccacagacaatgctcatcaatagaaacccgccccatagatgcaccttgccccgcccctccctactaaggactccccactgtgccccaccacctgcactagttaaacgttctaggttggtwtgttggttggttggtttgtaaagtcaaagaaaatggtcagactggcacctatctctctctctacagactgcttcatggactctttgctgttgatgttgatctcctggtagcatgaccyttggcctttgtaagacacacagcctttctgtaccaagcccctgtctaacctacgaccccagagtgactgacggctgtgtatttctgtagaatgctgtagaatacggttttagttgagtctttacatttagaacttgaaaggattt

SEQ ID NO: 5124 - DNA, 728 bp, Rattus norvegicus; identical to SEQ ID NO: 1028

SEQ ID NO: 5125 - DNA, 600 bp, Rattus norvegicus
gaccttaaacctaaakatggtgacaaggacccttcawawaacaattcatgccaaagttcytgggcawattggattgtccccatcgtgggtgcwattcwwataggtttcctgwatcgtcacttmtgggctgmyagcaaatcctcctragdagdccacgttdaagtgtcggagcacatctcctgggagtgaragggtggagacttgtstgkaggaggctgcagggtgctccttccytggatcctgccagttgwtttctttccccttggagccaagatggttgaccaratatctatcctccttcaatgcaggaccagaatctgtccatcagcytgagcctgacgcccaaagcacctgctcacgttgtgtccttstcagggtttyttytcactggttcccastcattcccttcattwmaamagttratgccaatgacttagagttcctytgttgtagtgacatkkcctttggggacaktacatgatttctgatactttgaattcacagtagacatagttaagggaacagcggtctagttttgagtctttccccatttttcttttaagtaaatttttttwaattctgaaaaaaaaaaaaaaaaaa

SEQ ID NO: 5126 - DNA, 600 bp, Rattus norvegicus
agaacttctgatccctagagcctctgtgtgagagacagggatgaccgccacacagagctctggagcaagtcctaggcaccaaggacacacaggagcatagcmcaggcrragatcatgagagcatggaggagagcttgtttcaaatcctccttgaccactgctgtccggccctttaccaaaggacaaaaccctgcttctcttagagtgaggctgggagagacccacccytcagtgtgtgcagagcctgggaagtgagcagtrccggggtccttcatggagagcactgtggcaggtgrctgtacctccmgtccttcccacacatccggggagktcaggggtctaaggactmgccctgctggtcttgakctgttcctctcagactmtcagcmtcctctgcctctttstgatttctggctttaggatcccctttccctmtcccaacccmtttccctgtktkcctaktttcttcccagstggtcttctagaaacatcccctccccakttctcctcattgctcgcttcttatttttgcccactccccactcstgcttcmtgagctgacaggaaamtaaaggctwtaaataaaaaaaaaaaaaaaaa

SEQ ID NO: 5127 - DNA, 600 bp, Rattus norvegicus
gaagactggctttgagccaggaggagccagctccgytagccaggcaagccactgcagaagttgtgccatccttcatcaacaaagatgcggagcctttcgatatgacgttgaaatgccttccaaatttgtctgaggascggaaggcagcactgtctgaggggcgagcaccgttcccagagctacaacaacacgcacccgcgttgagcgattccgttgttagcttggaaggatttaagaaaactttccacaatyagctgggtgaagcaraagatggcggtcctccagagctcaaatacttargctcagatgctcagtcmcggaaaaagaggcagtctggcgcactgctcagtgagcagtgttgccacatcggttgtaccagaagatccattgctaaactctgctgatacggagctaatggtgcgcaacccgggcagtgtcgsgtgcgttcttgctacctggctaatgcctctttctgtccccttttcttatttattaggatctgagaaaccataattcacacttggatttgtcctttgataagagagaaatgttctctgcattgttgtagttctgttaataatatttttatgcaaaaacttt

SEQ ID NO: 5128 - DNA, 1091 bp, Rattus norvegicus; identical to SEQ ID NO: 1032

SEQ ID NO: 5129 - DNA, 600 bp, Rattus norvegicus
catgtaaatgcctttagcatttcgattactgtacattttgtttaaggtgacccttcagcatgccgytaatgtcttggttagtgacagtgcattttgtagtactgtacaagtgttgtgctaacggtaagccatttcttaagttttttgccttgattasggtaccctaatttraggswwwwaaaaaaaaaaaaaammwytatttttgytaattataaaactgtaaagagctatcakagctaacccmgtygttagtcaaggggtttattgctaaatgtytggtgtaaagttgagaaracccttytscattttggcgacaggctcctttggggagaggcasctttctgttttataagcgcacacttgtgtttattgaatgagcatatctcagtgtttgcctgtcaggttctgaagcatttcatacatgtcggaacacgcagcaggattcaaggaacagtgagtgtggtgtgaagtccctattttatggagatctctctaactttacattttcattccatctgtagatttttctatctttataaaatattggagttattttttaaggaaaaatagaaaagtagcttgtgaatagctcaaaccaag

SEQ ID NO: 5130 - DNA, 600 bp, Rattus norvegicus
gcctaaaaagaaagaaargaaagatcctagtgcgctgaaggaaagagaagtyccccagcatccttcctgcttgttcttccrgymyrakrcacagctgggtccaccttaccacatcctggtggawaccaamttcatcaacttttccattaaagccaaactggacttagtgcagtcaatgatggactgtctstacgccaagtgtatcccttgtataaccgattgtgtamtggctgaaattgagaaattaggacagaagtatcgtgtkgcamtaagaatcsccaaagatccccgatttgaccgattgccatgcacacacaaaggaacctatgccgatgactgcstggtgcagagggtaactcascacaagtgttacattgtggccacagttgaccgtgacctcaaacgaagaatccggaagatccctkgtgtcccaatcatgtmcctttctaaccacagatacaacatcgagcggatgccagatgattatggagcccctcgcttctaattctyactccacagaatstgcctgctgttcttggaccagctttctctcatcaattaattwaacrckytctgatttttaaaaaaamaaaaaaaaaa

SEQ ID NO: 5131 - DNA, 600 bp, Rattus norvegicus
acgtgtttttaggcctttaagtggtggaatttcaktgtacataagacagatagcacccgagttaccacgttgtatagcatagtaccttttcacttactgcttctaatttactgtgtggggcttctctctgcggtgttacgttagggcaggtaggattgtaaagcagttcaracttagaccttaactcastaagtttgcacaggtacttaraacaggtacacatcacactacagttgagttcataagctactgaagactttgcaattgcatggacttagattttaatatcatttacacagcgggacttttaaaacaaataataccatcaaaattctttcctgggactatagctcacttcgaagcacatgcaactctctgggtttaatcctccacacggggaggaaaaacagtagcttcctgtattaacagcggtacagtatttttatatgaaaattaggtttttatttatgtgtagttggcattgtattttattgwattttaacttttgtaatttaaattctatatcagatcctttaagccatttcatgcagaaaattttataattaaaaatacccattatgtaaaaaaaaaaaaaaaaaa

SEQ ID NO: 5132 - DNA, 600 bp, Rattus norvegicus
  misc_feature (488)..(488): n is a, c, g, or t
tcactggtcgtctgccccaaggaattgtgcgggagctgaaaagtcgaggagtggcctacaaatcgagagacacagcaataaagacctagctwgatgcmgrmmawarmrdmwwrdwmwctacttctgkccttgdtwtcttgtggaactaaaaggtgggacccaaagactycttgccctccagctcargatcagcagaccccgtgaaggcagcacatmcggccttaagtcacctccctttytctkaccactggtgaagtgggagtgtctgagtggattctcagaggctgtatcaggagagtaagatgctgatttcccmmctctgttcagggttwtgcctttgwccatgggcasgamtwtggttcaaatgccaataaaacaaacctttggagtacttaacaacttaagagtctaagctgtcattgaccttctctagagagctcatctgtgacgagtcaaactgctattctgtgcctctgaggatagtgtgngtttctgctttactctttctggctctgtcgtgcttcggacgtttgtctgacgctttgtaagctgagcctgcaagttttttttaaactctttcttctaaaaaaaaaaaaaaaa

SEQ ID NO: 5133 - DNA, 600 bp, Rattus norvegicus
gaagagctacaccaagagctcgcacctgaaggcgcacctgcgcacgcacaccggagagaagccttatgcctgctcctgggatggctgcaactggaggttcgctcgctctgacgaactgacgcgccactaccggaagcacabkggacatcgccccttctgctgtggcctctgcccacgtgctttctcacgctcsgascacytakctcttcacatgaagsgtcacctytgagagagcctgcacaagggctggggatgaaatgagagtggatccaaggactgtttcccaamggatggtcccactcagatcaagagctgaccggraggccatacawagaagcyttcamcagawrccttacatcctcagggagccacacacatggccccacagacccakagatacaggccgccaagtaaatcaactcatatggatccmtagaccagcacaggagkgmccytgagtcctgragstggatggaatggratgagattttccwgaatctagaagcgagcttcrcmckgtgcccadagctgggmhkgysckgskkactmtrramrykwsccmcmtaaaaaaaaamaaaaamaaaaaaaatctcgcggccg

SEQ ID NO: 5134 - DNA, 1290 bp, Rattus norvegicus
gtctttgtttgcgttgtataactttaacgagtgagtttaaaattatttaatttccttagaaaaatagcaccatttgggaaaaaaaaactggtgttacgaagaacataaatgcactgtttttwtttttwtttttattttawataatttaaattgacttttcccacgtctttaagtttgaaactgttaagctgaataaaaacttaagcyrcrarkcgataacttcgctacattacaaggagcatagaaatgtttacaaacggcttacagaattgcatgtgcagggtccatccacaccacacttgtaattgcacagaacycrtgccakytcagagtttakgtgtacacacgtacccagccgagtgattttagagtarctactgcrcaaattgacaataggtcataggtcattctctctctctcccccccttttgcttcccttttctttttctcccmtattwcctttccttscccctaccccctaactcatgaaaagactctatggactgaaaagccccasgctgaaaggactgaactgccttgattgacatggggaagggggttagtagactgtgtatcggcagcacaggctgyagctcgacgtgtgggtctgatggccagcgtgcakggcagagcattttgcacactgtttgttttcctgtcttgcacttacaaataaggtctatgggagtagcatggaaaacggwtgttgwttttccctytttcttttttaattgcttttgtttaaaatttgatcgccttaactactgtaaacatagcctatttttgtgcttaagatactgaatggaaaactccattgtgtgttgctggactgttwyggaaatatttggtcaaatgtatgttaatttggctgtaatggcrkywmragcragcaaacaarcaaacaaaaaaagctgtgaaaatggccttggagcattatctttagttacttgaagagtytctgggttwttttttaatacagkttatgytaaaataatctktattaatytagagaagacaatcaatgyctgtgaaagaacggactctttggattttttttttttttttgbggtcaytgtgagtgattgctttttcttttccttagtwtcacattcttcywttgttgtaaatcttagactgacatctagctttgacaatcatagtatgttytatttcctgagggggaataacttacaayacygkttagttkygtactaytggtgtgttggtgaatttwtaaactgtgtgctaactgcaataaattatwtgaactgwraaaaaaaaaaaaaaaaa

SEQ ID NO: 5135 - DNA, 518 bp, Rattus norvegicus
cagacctcgaacaacattccagctgacatcgtctttgttttaaaggacaagccacacaatatcttcaagagagatggttctgatgtcatttatccagccaggattagccttcgggaggctctctgtggttgcactgtgaatgttcctactctggacggcaggaccattcctgttgtattcaaagatgtcatcaggcctggcatgcggaggaaagttcctggagaakgsyttcccctycccaaaacacctgagaaacgtggagaccttgttatcgaatttgaagtcatcttccctgataggatccccatctcatccagaaccatcctggagcaggttcttcccatatagctgcctgcattcctcaaggactgagccagggacctttccagagctgcagatttccagaccgktccactggttgcatactgcgggagggcccagggagggcttttgctctgccgaatgttttccacagaatatattacaatctttcaaagtcgcaaaaaaaaaaaaaaaaa

SEQ ID NO: 5136 - DNA, 732 bp, Rattus norvegicus; identical to SEQ ID NO: 1040

SEQ ID NO: 5137 - DNA, 856 bp, Rattus norvegicus
cggccgcaaaggttttctttttttttctttttctttttttttatattgccttatttctcaatggctgagccttatcatgacacatcaagctttcctataaatgttgtcctggcatcccaccagagtaagcattcatacgctctgcttcagttcatatatacatatataatgtgtcttcttccttaattttgttactttatttgggatcagctccttgcactctttcctgactcagtcctttttgtctcacacccttttcttacatgatcatttcctgtgttgtttttgacagtgatccctggattaggcacttctgttaatattttaaagacgttagttccagcaacggagtggaaaagccttgaagtgtagctatggagggagtgttcaaatactactgacgcaggcacattagtgctggagagtcaaagccatctccctttattagttgttctacacatcaaaagtcagaagtatttctgtggaattgtgtaagaggccctttgaaggagatacactgtcaaaatgctcaaataataggcagcagctttcagtatgaaaaagatgttctcagaaaaggaaataactcaatagtcttgggttcagaagttagtggaattattcggatttcagtatcattgtcttccagataactctcagcctcacagaatggccttctgagttcacactctgaaaggaagtacacttcctcttttgaacatttctgtagttccttcgtattaatgttttaatgtttakgagcatcagccmgggaatctgtttggactttccattctgtagagtgcaaaacttgtgccagtggcaaaagtggttcttttaaaaaaaaaaaaaaaaa

SEQ ID NO: 5138 - DNA, 1400 bp, Rattus norvegicus
  misc_feature (781)..(781): n is a, c, g, or t
  misc_feature (799)..(799): n is a, c, g, or t
  misc_feature (813)..(813): n is a, c, g, or t
  misc_feature (847)..(847): n is a, c, g, or t
  misc_feature (943)..(943): n is a, c, g, or t
  misc_feature (994)..(994): n is a, c, g, or t
  misc_feature (1097)..(1097): n is a, c, g, or t
  misc_feature (1222)..(1222): n is a, c, g, or t
cagagcaagatcctgaaagtcatccgcaaaaacattgtgaagaagtgccttgagctcttctctgagttggctgargacaaagrgrmctmcaagaaattttatgaggcattctctaagaatttaaagcttggaatccatgaggattccactaaccgtcgccgcctctytgagctccttcgctaccatacctctcagtctggagatgagatgacttccctgtcagagtatgtgtctcgcatgaaggagacacaraagtccatctactatatcactggtgagagcaaagagcaggtggccaactctgccttcgtggagcgtgtgcggaaacggggctttgaggtggtatacatgactgagcccattgatgagtactgcgtacagcagytywwkkwkttckmtkscwmgakcctggtctccrkgmccwmskwggkcmyggagctaccagaggatkaggaararaarararaamwrgakgagagcaaggcaargtttgagaatctctgcaagctcatgaaggagatcttggacaagaaggttgaaaaagtgactatctccaataggcttgtktcttcmccctgctgcattgtgacmagcacytaysgytggacagccaacatggamcggatyatgarggcccaggcmytgcrbgacaactckacmrtgggvtacatgatggcmargaaacacytrvagatcamccytghcsrcmcsakygygragaytytsbgkcagaagsytrakscrkacawwawsgrcaaagytgkcamrrmsbtgbtggtgntshtrtwtvavamtgytntgmtbtyhthtsgntkykmmsdkbassabssccvaacscaywccaacngcatbtaccgcatgattaaaytmggcykgggcatykatraaratraggtcmytgcadadragcccaktghtgywgttchbgwtragatcccccchntggarggygatgrggatgcytskcgcatgraaravgtggattaaagsytmntgggaagcccycsmcctbtgtatagtatcccygtggytcccccwmswgcyttgaytggccbtgacccacytggmtbtbtghtcatgtbdacaaraathtyttntatcckgyccttgtgcsttaaggcargaagatcccctcccacagaatagcaggkwtgggtrwtdtktaktgtgktttkttgtttgttttattwtgttstraaattaaaagtwtgcmardtwarrnwrwwrmarwwwwwwhmvaaaaaaaaawaaaaaarracwwtwgcgkccgcaagcttaktccytwtagtgagggttaattttagcttggcactggccgtcgttttacaacgtcgtgactgggaaaaccctggcgttaccaacttaatcgccttgcagcacatccccctttcgccagctgg

SEQ ID NO: 5139 - DNA, 600 bp, Rattus norvegicus
cccattgtcatcaacaacacacaccgggtcttgaaagragackataaaacsccagccaatctkaaaggwtattttcaggtgaaccrgmacagtrcctccccacacytggsamgwksgtgatttccagtctccacagggctcagatscytgagtcctcgacytgcacacggaagctggactaacccawgcacatggcthtcgktcatgccagsatggagcagtcatacatctcggcagaagctagctcagaacctctgttyygggcaacmccgagsasggrragactacttcggtttcagagacttggggatyttctattyyktttttctccttgagaacyttytttaaaagaattsamtttgctatcttcccyaatggacaggctccttggtgacctcatctcctgggataagacctgtgacccgtgcctctccttgactggacgctgaactcaaagkatctatttaagagtttaatatatgggctctcctctctttagtcctactcagtttcacagagaaaagaaattaattatttgaataamgtaramarrmwrmwrwmwrtgccttamwwmmvamarwraaawaaaaaaraaaaaaa

SEQ ID NO: 5140 - DNA, 600 bp, Rattus norvegicus
tcargcacrasaaaaccarmagcattctgttctgtggcaggttctcatctccataaagacacatttactacatggggagagtcctctcttcagtatctccaccamtccaaagctctgycaggatgggcaagtagggggaaaccatgttccaagatgaggatactttcttcctgccagcctgatcttatgatgcctgcattcagctctccctatcctgaatgcatttgtgcccttttgcaggttatgtctaatgatgccatatagcctttgctatgccgctgatactcataacttatarccaataacttacagcctggtagaactgaatcaatgtgtaagaatgytggagagaaggacagatactaggaaaagttgctgatcttgcaaaggacacagggacatttcccaccacccacatggctgcttacaacctctggaaattccastttccacccatgtcttgawgcctttatttggctactactggccccagcatcctgtataagcatgtaacatcactcaaagttatgcagaaacaagtaaattttaaaaaaataaataaaaatttaagaagtgrwaaarwaaaaaaaaaaaaaaaaa

SEQ ID NO: 5141 - DNA, 786 bp, Rattus norvegicus; identical to SEQ ID NO: 1045

SEQ ID NO: 5142 - DNA, 504 bp, Rattus norvegicus; identical to SEQ ID NO: 1046

SEQ ID NO: 5143 - DNA, 600 bp, Rattus norvegicus
tgcggttgcaactggagttgcgtgctggtgcggagcagctggacagttggctgaccgacgaagagcgctgtttgaattacatcttagcccagaagcccgaccggctcakggacgaagaactcgcggagctggaggatgagttctgcaaactgacgtgtgactccactggccagggtggagccacacaggtagctccagcaggttcgaagtccctggtttcctctccggccgaggagaagccactgccggccgccggscagacttttctgttccayggkcagcysrymgsygarsydsacywdcwgwwbcdksrwsaccakagwsawycgsscrctsartskgcmwsaccagcagacattcgcgcgctcagtgggcctcaagtggcgcakggtagggcgctcgctgcagcgtagctgtcgagcactgagggatcctgccctcgactcgctggcctatgagtatgagcgtsatgggctatatgagcaggccttccagctgctgcgccgtttcatacaagccgasggccgccgtgccacactgcaacgcctagtggaggcgctggaggagaacgagctcactagtctagcagaagatctgcta

SEQ ID NO: 5144 - DNA, 1207 bp, Rattus norvegicus
gaataagctattgttttgcctcagagcagcttgtaagacattctctctaatacagtacatctgttgacagatctaaggattgccctgtaaacataacagcattttgagagcttgaagatttcccattgcggaagtcagtttctaaaatgccttaataggtctgtgttgtaaattttttctttagtttttgtaagcatcaaagattatggggatttttttttctggaaaagaattaataaacacaaaggactgttatggtttgcatagggcgtggttatgtggtcaaagttaccctgctgcctggtagtctagtagacttctgtctgaggtgtctctgttgcagtgatcggcagccagagtagcttaaccagtctcctttcctggcagtagattgtgtggtatttttattgcttgtgcagtaactagcttatgctggtaatatcacattttgaagtgttaattttgtttywmrasscgtctagtaagtgaaatgcawcctaattttatcaccatattcaccaaccagcatgggtaattattttaacaatgcttatatttgagttctgcagtgtataatggagtatagttcaattaatcctttggktttagtatgtctaaarratacmatgagaagttaatttatgctcaagtggtaccacttaaaggcatgtgttcttttagtatgtaaaatgrratagtrccytgaatttaagtagaatgtacttaggcattgtagggtcctgaaatagatttttccmctacataattgaaatcmatggagcaactagtttcacattaaaatgtacacactaatacttagttttacttccttgtggataatattaagcacttactctgaagttttctgaaagttaactgcaaagacattattaaggatggtgggatacctgcaaaagctatgtgggcttacatagatgactgtgtttcatggtgaaatcttctgtcttttgcagtgctcatgatgtgtggggagcacagaaggcattgctatagtcagtcatcttgtttttcttttgtagttatttgttttagtgtattggttataaagatactgtctatttataaattgctactttgtattttatgcatgctctgtattttgcctattttttttagctattgatttggagtatattctcatcctaataaacagttatagggggmmawwwaaaaaaaaaaaaaaaaa

SEQ ID NO: 5145 - DNA, 600 bp, Rattus norvegicus
cccaccasaacatgtgcamgtagcaaggaagcctgtggaaagaactggtgctttctgaaggagacaaggactgagggcctyctcagccaagagaatcttcctccmaagwwcgctatccgtgtcactttaaacagcatgctgctttgttaagttgctgtcagwgttgcccacytmccacccytcaggggttagaaaagykgaykwkrcgtagtsccatggwaaagccacatwwmcatgcaatagctgggtgattccccaattcactgacaaatgasttktarcywyaswtgsstyyswgcmtcwgygctcagardgksdskgrtywwavswscyccttttttggwtgaacgagaaaaggttscctgaaacagagtagtmgatgccacrkgattgactcctcagactggcaaagtccawgtgcaatgcttatgagttgwtctgcttctttcttatgcagaatttcatttgtwtgatcmgcactgatgsgawtcccattcagcttgtatttttaagttgactgaaccactgcctgatgttttwtatttaaatgtatttaaaggaaataaacactgttmcgcarmmmamaaaaaaaaaaaaaaa

SEQ ID NO: 5146 - DNA, 589 bp, Rattus norvegicus
gcttyatctctctccttttcaaagaccctaaactggctgtgaaactctacttcggaccctgcaattcctaccagtaccgcctagttggacytgggcagtgggaaggagccaggaatkccatcctcacccagaagcagcggatcctgaagccgttaaagactcgcactctccagacctcagctagtgccccagtgtctttcctgattaaggtcctggggctgcttgctattgttctggccttctttttcaagcttcatgggttctaatctgtcccatgacacttttctccatcaccgcctctttgaaagggagactaaagaaattacatcctcattataattttacttcaggggaacaagtagggggactgattgtagggagatcagaagaattaggtctagatataaagctaaattaaggtcacaggatgctgttatcattctactatctcctccaattcatcagtcttcacgtggtattctgtaataacaccagcacaggtagatagtgccaccagtcatggcaagttttgagttacaatgataaaaaaaatctcaataaaattatgcaggataaaaaaaaaaaaaaa

SEQ ID NO: 5147 - DNA, 552 bp, Rattus norvegicus; identical to SEQ ID NO: 1051

SEQ ID NO: 5148 - DNA, 600 bp, Rattus norvegicus
tggaagctatacaggagccttgtctgagccctatgagggcctagaggccgaggagtgtggtatcctggatggctgcgcccacggccgctgtgtacgtgttccagaaggcttcacctgtgattgtttcgacggywaccgcytggacatcaccsgcatgtcytgmgtsgacatcaacgagtgtgacgaggytgaggcaacctccccactbtgsrtcaatgcgcdytgtgtcaacactratggttcctwccgctgtatttgccgtccgggatttgcacccacgcaccaaccacatcaytgtgcgcctgytmgacctcgggcctgagcagctgcgtgcgcctagcctcccattataaytgagcaytaggagcttccagagtgcacctagccttccthtagtctgcatgtgtgtraggatgtcagacagtctcgatgtaggatgvacggacacakaggggtgccttytatggcaccagttcatcatgcctagcccctcccaccagtgccctgggcctgtshtgggttccctgacacatttsdtgcccttttatacaattktcaattaaaccacctatdwtgwamwwwmaaaaaaaaaaaaaaaaa

SEQ ID NO: 5149 - DNA, 648 bp, Rattus norvegicus
gcagctctatccggtattttgagatcacgtctgaggctccgttcctgcattatcttyccatgttcagtyccaaggagtctcaacgtggtatgggctacatgcccaaacgtggcctggaagtgaataagtgcgagattgccagattctataagcttcatgagcggaaatgtgagcctattgccatgacagtgcctagaaagtcggacctgttccaggaggacctgtatccacccactgccggayccgaccccgccctcacagctgaggagtggctgagcggtcgtgatgctggccccctcytcatttccctcaaggatggmtacgtgcccccaaagmgcagggagytragagtcaacaggggcytggacagtgctcgcagaagagctacacsggagcsyrktmgcastcwtasctcgsamascrtgtyryggctggaggaggwtstgaggaatckcaacgccatagtgcaaaagcttcaagagcgcctggacaggctggagragactgttcaggccaagtagaagactccagagccttcatctggggccagccatttactctgctcccaccccaaccctcaggccmtatggtggataagacgaaaataataaaacggctttattttctggtmaaaaaaaaaaaaaaaaa

SEQ ID NO: 5150 - DNA, 641 bp, Rattus norvegicus
gcctcgtgccggtggggcacggctaccacacaatagaggatgaagccctctacaacaggctactgaaagaaaacatgcactttgaggtctgcccctggtccagctacctcaytggcgcctggaatcccaaaacgacgcatgcagttgttcgcttcaaagatgatcargccaaytactccctcaactyggacgaccccctcatcttcaagtycacyrkggacactgactaccagatggtgaaaaaagacatgggcttcmctgaagaggagttcaaragactgaacatcaatgcggcgaagwcaagcttyctcccaraggacsagaagaaggaacttctggaacggctytacaaggaataccaatagccmccacakgctgatgggcakgccccctgaagawggcaaggccgcttytccgagcctcatmctgtgaatggagtctttacaacthtgacatamtgaccttscttccttccttccttcaagaccttgaagtggccasgtctgtcctctgattggatgtcttggctaggcccagggaccttgacaatcatgggcatgaatgtgaaaccttcctttytaaagctaaaaatacggtgttcaataaagcagctggtgactgggaaaaaaaaaaaaaaaaaa

SEQ ID NO: 5151 - DNA, 951 bp, Rattus norvegicus; identical to SEQ ID NO: 1055

SEQ ID NO: 5152 - DNA, 892 bp, Rattus norvegicus
cacgaggcatttttttggtccgtcaaagacaggttttcactatataatcctgacttgcctggaactaactgtgtaaacttggctggcctcagactcacagtggtccaccggctctcggcctcttaagtgctgggattaagggcctgtgtgaccaccagttgttgagtaacttggcccttagtcagcaaggggatcagaagaagcaaagccaagctggtagagaagccagaggtagagaacaagtagaagagaatcctgggcttagtgctgtcctttaaattcacaagagtgcattgttttcctagaacatagcaaacctccagctaactgctgagcggacaggttactttctgcaggagcgaggtgtgccatggttccccgatctgagggctccatgccaaccattctcttttgagtatgctatgctagctwttttctccctaggtgttagattttgcattccagggatatcattgtgtgtatgtatwtatgtatgcgtactttgctgktacaagtaaacaaacttcaatytgaagtgcamwmaawawrwrrwawmmatatgtatcgaccatgtgccatatatctactatggtcactagcacgtctttaatgatgcttgttatwacatcgtcgcttctttttcattcaacttgcagaacttttgtagaattctttttttccctttacatataagttcatatatttttctacttcagtcctgtgaagcttatccccaatcacttttctattagtctcccctctgtatatgaggggagttattacatatacaaggttcttttgacaatcaacaatttcttaactgtaataatgtgtacattacttaataargacttgacatgctammrwrrwrwaaawamamctttgtttccct

SEQ ID NO: 5153 - DNA, 600 bp, Rattus norvegicus
tacacctgtagcctgracggwgttgtacgtctctgggatgcccggactggccgcctgcttactgwctaccggggccacactgctgagatcctggactttgcactcagcaaagatgcttccctggtggtgaccacctcaggagaccacaaagcaaaagtattttgtgtccaragacctgaccgtwaacggytgcagsctytggcatggtgtctggtgttgagggggggataaagggacccmtgccctcccccagcaraggtgtgggtgcaragggaagaggaggggagaacattggactgytttccaaccctttcagstgrcctgcctastccttgtccttttcttccytggrgacccmccttkccaggcctgccytmccctgtccagccctggggccttttwggrggccatgtytctttcactttgattcgctggtgtgasccmtgggstgcgtctttgtatgttgggggtaggtctttgakgttcccgttctttcccttcccaagtytytgggaaaggraaggrggragrgrgrctwgttacmgattttaaaaatgtaaataaaatwtacttcccgttrrmaaaaaaaaaaaaaaaaaa

SEQ ID NO: 5154 - DNA, 1024 bp, Rattus norvegicus
atgggcgactcagtgcaggagactggcaaggcatggtatgaaggtctggcagagctctgggctcttccagtcttctctagtcctgggcctctgagtaatttgcagggctctctgtctaccccattgctcctcactttagcttagatgcagtgggaagatggcatgtagttggaccaagcagatctgggatgatgccccaggccaggagggcttgtgcttgtgggtcaagtgaagaagaagtagtctcagggtgtcactggccgccctctctaacttggcctttaccccgtatgtcatagacccgttcacacagctctgactttagctgccacaagtgagtagttgggggttgtgctcaagtgtatcacaagaatttcctggaaatgtaagcattctcttcttagtctaggtttctctgactctcctttctggtttcggtacactcttcagtcatgtaggcttagtttctaaacctgtgggtgtgtccaagtggacacagatgtgcaggctcaggcagttgaggrtaggatagtttaaggcyytgggtcatgtytaagtgmcagrarastkaagsctgtgtgggcargbtkaagatcttgtgggtgtggttaratgcacatgcatatttgaaatactccgtgttcaaatctggtttgaaataatgcagctcaaggaaagcccaaagcgtagggaggtcaaaggcmcttgtctgtgsggagtgagcgatgaargcgcgtaactggtgcacatttaratgcaatgtttcaagttgattgttaataaaamccaaatttacactggtgtgtgtagtgtagtttctaaaaagcacttcacattttaaatttttcttggaaaatttctagtaatctaaatgtctaattttttaatctttttgtgtatgttcatgtttytcagtattactgcttgaacgactctctgtacggggatttgtatgtgctatacacggggtgtytaaaggtagcaataaagcctttcgttmcaaarrraaaaaaaaaaaaaaaaa

SEQ ID NO: 5155 - DNA, 890 bp, Rattus norvegicus
ttattttaattttttttgttttgtttttttttaataagaattttcattttaagcacatttatactgaaggaatttgtgctgtgtattgggggagcwsratskagagctgaagggggtgggccctggkkatgsscassrctyakmagggctcccctctyycctgatgtccgagcggatgctcccacctccagkcttttctcctcagwtttctctaatactgwgaaaaactaactttccaaggccaccttycctaccctgtgcaggaaagcagctccmtcctccctttgcmtagccactgggtgtgggcatcttgggcagctacccctgggaggaggagatccwggcttttggcttgtstccttactcaccaagaagcrgggtaagggtgaagctagggcccctgggatgagtaggctgttactcctcactgcccgtcagagctcacttcatccaagccccagccccactgtgaaggggccggctaaggggtccaagtttamcccagcccccagcctcatagccaccagcaccccatgsgsccstccaacacacatgcgcatgtmmtcatgcgtggacrcacacacacacacaaacwcacacatacacacacacrcctstggcctgarttccwccaattccccccagcytacccstaacccctyagccccctccttgccccgcaggacgggactccagggggtcccctcccctacacccctgggctgggggagcaggctctaccttgccctcytgcctgggtggggtctcaccctggagcccactggtgcacttgttcctgctgggtttccactgagatctactggagaaagaataaagttctatttattctmwaaaaaaaaaaaaaaaaaaaaagcttcgcggccctcgtg

SEQ ID NO: 5156 - DNA, 600 bp, Rattus norvegicus
ttgggttgggggctgtatttwktytwtktwtkttccaggggaaaaaaaaactttaatgatgacmcagtttcctgacaataaaggaacgctgaraacaagcgtcgkgcgtcacgtcgggsagagcggaagtaagctccgacgccttcctyttsggmaacccctytcagccaagagctcaagtgaractygggcggkgggaaatggaragtcctttgggaggacatttacagaaaacctgtgagtcccctccaaaggctagctgacaaatcacaggtagkgccttcctccctcctttccaragtcaggtgaagaggctmgcaaagttgttgagcatcagctggatcagctgcccagggtaraccacgtgggccgccatgtcggaagcctcctgctmaggtcgaaacagsgtcggtccaaacacaattcccaggttgtgggcagtcaytcggktcttatcckagtgtgcgatcactctgcacagatgttccaggatgtactgcagagtgtcatggttgggcctcggcaacgagtctattaatttctgtattttagagaggcagtgctctggctcagaaagttcctgagataagtagagatctt

SEQ ID NO: 5157 - DNA, 600 bp, Rattus norvegicus
gtggtaggccagtttcagatagtttcatttcacctgtaaactgyatcacttttactgawattgtaattttcaaatgtataatatgtttacaratgtgccctgcatttagwagctttgytcctatttttcttttttttttcctttttggttgagtctcctgcctgccaaaagctaggatgcttcaggcccctgtacatcagtgaggcatccttgagctttaaagcactgagcaaactggaaaatgcaacacgccacatactgaactgaaaagtctgtgttttgtgttccttttttttttttaatttttaataaaaattttcaaaaagttaaaaaaattttsrtkmmagaaaaacgaggctccagtttgttttataggttttaaagttctgccgtgtgtttaattgccttgtgtgaccacttgtcgccttagggctgaatccttaccccacttttattaagtgtccgttttgcttgcctggaattttaaagttggtctgttgcacaaatcacaaaaacaaaagaacaaaaaaatacttcctaggtttatggcatacaaggttgaatgaacatacttaaaaaaaaaaaaaaaaaaccctcgtg

SEQ ID NO: 5158 - DNA, 600 bp, Rattus norvegicus
sactgttaatggagctcctkgccccccttaacttgaggaaagggaccctytccttccgcagccatcttttccctccttttwactttttctggycccccytttccactttgactttccctggttcctcccatcttcagagtgggaggtgggttttataaataaatctatctatatatawawaaawawawawawrwamawarraaaaaccaaawawamawamwwawwwtctawrrammaammarawwaawwwaaatgccacacacacacaccattgtaccctgttagaaaacagaaggaaatcgtcctcataaacttaaggtgctggcagttggcttgttggcttagtggacactatcattacaaagctctcaggtgagacttcccatttccaagaagggatggagtatattttactgtctctgatgttccctcttcagtttaaatcaccaataaaagctgtattaaatcattgaaatgctaagtctgaatcccccattctgaacacttactcaaaaatctagttagaatcccacattgatacctttctcacttcatatattctaatagagtttgaagcttttgaaattaaacagttcgagc

SEQ ID NO: 5159 - DNA, 600 bp, Rattus norvegicus
gcttggattgttttgaaagtacaaaagaaccacatagtttctactgacaggtttcarmmctcmcaaagawtaakttscrrcbkmvrvrwmkgtttttattttcaacctatgacttgactggtcctaaagctgytatttgattaatatgttgtcattgatagaagcctgttggttccgcaaactgaaatgattgtcgcagacagtgtttcctttttcttgttggtgttgctgatttgtgagcatgctttctgattacaaaagcgtgagtggcgacytccgtgaggcacggcatcagtgwgcactcttctgtcctgatttaagctgcctagtgtagtgctatwacagttttgttcagttaactttctttttaaaaagttgttcgcacatttttagggtgcccttacttcaraaaggagagggagtrggagagccttagaacttttgaggggaaaataaaaagctataacatacaacgtactgtatcaaactattttacatgaatgacmcaagtattctgaataaaaaaaattshdcrtkgttaaaaaamaarrwrwwawrtaataaatttatttttcwtaamtcaaaaaaaaaaaaaaaaaa

SEQ ID NO: 5160 - DNA, 515 bp, Rattus norvegicus
ggtatctcatgtcaagattttgttgggaatcagatagcatcaaaggagagaagtctctgctatcattttatcccccaggcatggtgggagcagagatatcagattattactatgcactaggggacatcatagtgtttgacacaagtgtcctgactggytatgccttggagacaataatgttmatggccttggcttatctattaagaggtatttcagacagggagaggctaattcatcttctgtcgtctccctgtgtccacagtggagcatcctcctgaaaactcaggccaagactttccatactcagtgagctcagctctgctctcatatccctttctctcctggcactcctagattattacaatagtagtaataatctgggaaggggaagcaaagaatccactgggttgaaaagctagctggttttgctttgactttgaaaatggcaacacatcagcttcagtctcttgacttggaatggaaatccagtgcttaacttatgatagcttctggcc

SEQ ID NO: 5161 - DNA, 707 bp, Rattus norvegicus
ggcctaattctacttcagatcacttaggaaagcctcatgctttcacccactcttagattttaaatacctttattacatgtagcagatgtatttgaatttgatgtatctgaacatgaaagtatttgaattgtgattccatttcttttgtatttgtgtggtaaagttttaaaacacagtcattggtaataagtactttctaaaggggtaaaaaccataaaaaattcaagagttaaaatcctattatttatgccctttcrrcacrwgargataaactatacatttgtgacaagacaaagttcttgggtcctccatctcttattcttgctgaggacattgtagcttcaactagaatttgattcccttgataaagaatctcatggaattgcctctgataatttatcatggctctgtttaaacctcctcctccaactatctgcttatcttggcatctgttaaactgcctgcttgggcaaaagctccctgcagctgctgagcaagataatagaatgtgggttttgttctaaatgcttggggttatacttgggtcccaaatacctgaatgcactcagagatggctggaataaagactttcatttggctctaaaaaaaaaaaaaaaaaaaatctcgcggccgcaagcttattccctttagtgagggttaattttagcttggcactggccgtcgttttacaacgtcgtgactgggaa

SEQ ID NO: 5162 - DNA, 804 bp, Rattus norvegicus
gctgaagcagaacggcattcctgtggccatgggcaagctgctggacatcctggatgctcaatgtgtcaccttcacgactgctgccgcccgcaaggagaagctcagacagaagaggcggcagccctcgggccgaaagaaaaaggatcagaaatgaccgtcctccacccagttagacctgccagaggcctgagcacctagtgtaagggaggcctccacagtatgtcgtaggacgtggacctgtgtctgtgtaaaggacaagaagtcttctgcactctaactgtgtgtgtcacccttggtctcagagcagaccctcccccctcagccagcactagttttccccctttggcccaagcagggtccccatcctatgtgtacctgaaaggcagtgggccataccagctgaccaggccaagacccaagcctcttctcttgccagtgtccagcacagccaagcacaccacggcggaccagacaggatgggcagcctgcaccactattgtcataggtgctsttccgcchtgtgcytgcccagacacttrcsastgtcrccagcattsttcaagtaggactgtgagtaggscccagtacagytttgaagacccycaaagtaagcatgyttgtgggctmtgcccatttgtgttagscmtmtttgacccagtstrgaytvtgggdccagaaaaadcccagaagtttsgatttctacarmwwrwraawrwmhwyatgtgytttaaatacagtgaagttgttttwtatgawrwrmaawaaaarhmaawgaaggctttatttaaaaaaaaaaaaaaaaaa

SEQ ID NO: 5163 - DNA, 959 bp, Rattus norvegicus
tgtcttccaccacagcagccctgggagaggaaaacatgctgagcacaatggtcttggctaagttactccttagagccaacatcagtggcaatccgcacacagaagaaaaatcccagaccgttctgtaacttacagacaccggagaatttgaaagaacaaaaaccattaagacagcacttcagattctcatcaggactatttctaacaagtcagtttttggtgaacgtagtggacttaatctgtatatgttctccagttacatcagactttctctgtggccttgttcttcatttcagtgttaatcagctaaaacagaattgttgctatgacgtgggagtgaacataagccactgcctggcctttttttttcttcagagcttgttgtctttttcgctatgttaractttgcagaatgcccaraagctttcyttcataaaatagaaagaaaaaacatttggcttatttttcactgtagctagtcttttatacaataatcttgtaagaaaatttcttgaattctamayrwkrctctttctagatttttgaaatcaaaagttttcagtaaaaagtttcttactttattttattatattargtagttaaagaaaatgtagggttatttaccataacctgttcattaatatcagaaatttacaatagcattttaagagcatagtaggttctagcataccgtgtagttcctatggagtattgtgagagcgaattgttggagatgggctgcttttcatctcgttctccagtttccattgttggtttattgcagatttgtatcctgtgtcaaattcaaggtattattgataaaccttttcaaccagcagcaagaagttcaaatttttttttctgtcgctgtaacagaaaacacagttatgtatataacatttatgtagcaataaatgtgccatcctttttttaamawarwaaamwarwmarmwwtttac

SEQ ID NO: 5164 - DNA, 600 bp, Rattus norvegicus
tcagccagaagggagctctgaccactgtgaaggactcataagccggcaaatcttsggcmygrrrcaggaccagcsgacacgacgggcaatggaaggtgctatagccgaaagaattgatgagttcattggcaaactgaaggacctaaagcaaatggcttccccgttcacgctgatcattgatgatccctcgggaaacagctttgtagaaaacccacacgctcctcaaaaagatagcgccttggtgatcacatactacgaccggaccccacagcaagctgagatgctggggctccaagcagaagcaccagaagagaagtcggaagaggaagaccttagaaacgaagtgcgtggtgttggctcccatggaacacgtagtggggttatgggttgagtctgatgagtatccagtgtgtcactgtcacagctcacgtgggtaaccaccagcggaatgtctcagctcgaatgggcgggagtgctcagtctgtgccctgtattatgttgtaggtgctccagttcaacacaaactgcccagagtgcaacgcccccgctcagaccaacatgaagcttgtccgtatctttmawmaaaaaaaaaaaaaaaaa

SEQ ID NO: 5165 - DNA, 524 bp, Rattus norvegicus
aacgcagtgtgaccaaactccccaccgccctttggacgtgaatcgccttggggtgcaagtttggggtacaaacgtctacttcgcaagaaggcctgggaccgccccgccccmrccgccagtggttggsgaagtttacatccggattttcacasgttktgttgccacactgcccagactctgamtaaccttgtgggctscaggttttcgatactgcaacctcctcaaatattagcactgcctccccgcgcctgtchtattcctccaggcccccgaggtcctgccctcatcccggcggagcrggaacccgagggcgcagtggagcccggggcctccggcccgcgctgagcagctatggctgcggcgatagccagctccttgatccggcagaagcggcaggcgagggagtccaacagcgaccgggtgtcggcctccaagcgccgctccagccccagcaaagacgggcgctccctgtgcgagaggcacgtcctcggggtgttcagcaaagtgcgcttytgcagcggccg

SEQ ID NO: 5166 - DNA, 931 bp, Rattus norvegicus
acattggtaacagcaatttctctaattaaacaatccaaagtatctgccgacgatcgctgcaaagttcttattagctctttgcaagactgccttcatggaattgagtccaagtcctatgggtctggatcaagacgtgaacgatcaagagaaagggaccatagtagatcacgggaaaagagtcgacgtcataaatctcggagtagagatcgccatgatgattatkrcasagagagaagcagagagcgagagakacaccggratcgcgatcgggatcgtgaccgggagcgcgaccgagagcgagaataccgtcatcgttagaagctgaaggaagaggaacaccttycaagacaaagcaktcttcacggggaaagtgacgcttgtccarcagtttgcttcttgattgaactgaacctgtaaggattcatggataaactgaacaggaatagatctgaataaagcaaatctgcatwawtggtaammarwarmwmwamwwttattkwttatgttgcttaactgttttatttgaaggaaactgtgtgatttaaaaagttaatagcttttgcaactktattactggttatatatytggccattataatgtgcaagcwattggaaaaagtcaagtaaatgctwgwttttatagtagtttgttcttgwtaaaatgttcatatgataatgtctgtaaacagcaccaatttgattacaatagatgtagtgttgtaataaactgtttaatgggrmwrawrwrwaaarmwrwtcaagttatttgatgtktacacctcagggaaagtsttgtgttcagcaatatctaaagataatgttactatgacaacatttttactgtcctttaaaaaagcattgcaatagcgtgtttggatatgcatcaatctaatcttgcgttcagtgaattaaacatgactaattaagtgtc

SEQ ID NO: 5167 - DNA, 575 bp, Rattus norvegicus
tgaccagccyrcsarcttgggrgtggaaaatsccgtcccagaaggcaggacggggctktcaggactcggtgatgtaaycattggattctgatgtcccaacttgctgtcmccvccaaaggcaatcattttcccttgtaaatgctccttccctcatstgccttcatattgaaggttctggagtttwaytawtttttattttgttatttytwtycctccttctyttccctccccaccccccttgtccagattttgtgcgttgaagggtacmtggttcgactatctcctgttgggaacaaggacccgttgatatgttbtagaacagtgcctytgaaatgccatagcctcagacagttagttccttcctccttccctcscyytaagtkscyccaagctgtgttktragtgragggaagggggggtgatgttgtaaaaggggcmggagggtggtggcggtcaacmggrggcmgacmccggtgcttggaagggggttcttaaattwtatttaaaaagaaactttttttttttgtwtaaataaaagaaaacgggatctktmwmmrwaaaaaaaaaaaaaaaaa

SEQ ID NO: 5168 - DNA, 600 bp, Rattus norvegicus
gatgttgaacagcacacgttagccaagtacctgatggagctgaccctcgtcgaatamgacatggtgcattaccacccttctcaggtcgcagctgctgcttcctgcctctctcagaaggtgctggsccamggaaaatggaatttaamgcmgcmgtattacacaggctacatggagagtgaaatactggaagtcatgcagcacmtgsccaagmacgtcgtgaaagtcaatgaaaacctcaccaagttcatcgctgtcaagaacaaatatgccagcagcaggctcytgaagatcagcacgatccctcagctgaactccagaaccatcaaagacytggcmtcccctctgatgggcagaccctaggcagccgggcttcctyccatcgtgtgcttctcagatttstatatattctagtttacatcacaaaacctaattttctaattgtgtattgatgaaaaataaagctattgattttcttaarrwammmrwrwawawmwrwatgctctatactgaagaaatgtagaatggcctaccataaccgtgctctgtactgaagaaaaataaagccactgatttacttwarrwwaaaaaaaaaaaaaaaaa

SEQ ID NO: 5169 - DNA, 561 bp, Rattus norvegicus
cacgaggcttactgcggatctgaactctatggagaagtccttctctgacctcttcaagcggtttgagaagcagaaggaagtgattgaaggcyaccwswagaatgaagattcactgaagaagtgtgttgaggattacatagtgaagattggraaagaaggccagaggtaccaggcgctgaaggcccacgcagaagaaaaactcaagatggcaaatgaagagatcscccaagtgcgaagcaaggcccaagcagaggcactggctctccaggcaagcctgaggaaggcacagttgcagatccagtcactggagaagactgtggagcagaagactaaagagaacgatgaactgaacaggatctgcgatgaactcattgctaagatggagaagaagatctgaccacagctgactgtcrccagccctcttctgtctgtctgtctgtctscccatttccttgtctgtctgacttctgtgtggtttatttaaacctctattcatttctaagttacattactttgaaaagagtaaagtttaatttcaaactcaaaaaaaaaaaaaaaaaa

SEQ ID NO: 5170 - DNA, 451 bp, Rattus norvegicus
gggaaagacagtggacaggtcaagtctaaaggcagtaactgaagttcgctgtggttcacctgtaccctcagttcagcttggcttcggcctaggtcttgctcaggggccaagttccccacgccctccacagagaaccagtgttctgttctggggacagataaggggctttstgtgtttatwatggcagcagggccaaggggatcctcagaacaccctgtyttccccctcagccchtgagggagacaaagttmtgccytgggctggggtcctgtgttcttggtrctgtgctctgggaggcaggagcacatggagscagctgggggtggggagtgttgggtgraggcagggacagctctctgccctaggcctacccaggtccagttccaccttsgcctcatctgccagaccttaataaagcctctgcttctcctgtwaaaaaaaaaaaaaawaa

SEQ ID NO: 5171 - DNA, 521 bp, Rattus norvegicus
aaagggtcwygargggaagccacactggcccctttttgtccccttgcacacagcgtaraagggaaggataagaattgatacgggaataaacagagcatgcgtacagggactcaatggagaccagaggaggctgtcagctgcctgggcttgmtcagtcttcctcactgccctagtgaggcaggcgtctgggtgctcttgggtagggtgggcctcccctttcctgatgcaggcactcctcagcccattttacttatgtcctgcccttcctcttccccacccagttgacccatttgaagtctccttcagccactgaaggtggtcatggtactggggacttgggagagtgagaccctgtggagggaraggagaggagagtgtctgggtgggggttggggataggggtgaacggtgctggaagcccagctaaatttctgtcttgtttgggtttttttttttttgttttgttttgtttaatgtatatttttattataattattatatwtgaawrmmawwmaaaaaaa

SEQ ID NO: 5172 - DNA, 517 bp, Rattus norvegicus; identical to SEQ ID NO: 1076

SEQ ID NO: 5173 - DNA, 639 bp, Rattus norvegicus
cgtcgtgatggtcatcctcatcaccatctttgtggtttttctctatatcaaaaaggtggtcaagaaaccaaaggacarysaggtcttacccyctgaggctcgaggacaagatcctgtggagatagaagattatcccggtcacaacastgctgctccagtgcaggagacgttgcatgggtgtcagcctgttgcacaggaggatggtaaagagagtcgcatctcagtgcaggagcggcaggtgacaggcagcatgsccttgaagcccmtgrtytgagccctggaactgttytgraggtgatggttccggagcakaggcctggctmtgacagccgctgacttttgaagtytgmgaggagccaaggcagagcccggtgcagctaackwtcgtgcctgcccctgtcatctctmgacttgcyttttaaagatggaggaaaagctttggcgtcaggggtccgcagtaatatytacagagtgcagcaatgcaggcccagagatgtcttgctgcggttttcactgtaaggagtcgtggacacgggagtccatgacttgtggcttgtgctgytagaaggcacctggttgcccagcagccggggactggctaaataawtctgtaattatttawamaaaaaaaaaaaaaaa

SEQ ID NO: 5174 - DNA, 483 bp, Rattus norvegicus; identical to SEQ ID NO: 1078

SEQ ID NO: 5175 - DNA, 600 bp, Rattus norvegicus
aggatacatctatgggcaatgcttcctccgggatggtgaggaaaggccccatccgagcccctgagcatctacgtsccaccgtgcgctgggattaccagcccgacatctgcaaggactacaaggagactggattytgcggcttcggggacagctscaaattccttcatgaccgttcagattacaagcacgggtggcagatcgaacgtgagcttgatgagggtcgctatggcgtctatgaggatgaaaactatgaagtgggaagcgatgatgaggaaataccattcaaatgtttcatctgtcgccagaccttccaaaatccagttgttaccaagtgtaggcattatttctgcgagagctgtgcactgcagcatttccgcaccacctcgcgctgctatgtctgtgaccagcagaccaatggcgttttcaatccagcgaaagaattgattgctaaacttggaaagcatcgagctgaagcagagggtgctgcctctgatttcctagaagacccagaggagagtccagtttccattatttagattttccgtaatccccasccttaaaataaatattttgttgtttcttwaaaaaaaaaaaaaaaaa

SEQ ID NO: 5176 - DNA, 518 bp, Rattus norvegicus
gccagccggactcctccaccgtgcttcccccagagagtcctggagccttaggasccacggagcttccaaagcctcagcccaggcagctgtggctcctgctgctactgcctctcacagtggtgctgctggcagccgcctggtgccttcgctgscaaaggacaagaaggagggtggagctccgccctggggtgcccctcccctcccatccctaggatgtgagacttgtgcgtcgctgactcagccagggtcttctctcgggttgggawccaaaacaaggaacaagctaggcaaatgctgtgctgagctacatccccagcccagaggacacactgtctgggcctggcgatggacatgtgtaattccagagcttctggattggagatgctgaaactggaggatactgactttaagaaaaacagaaaggaagaaggggatgcattgtcgccctgtgtggtcgcttctgtcacctccgccccttaaaataaaaacaactgccgggtaaaaaaaaaaaaaaaaaa

SEQ ID NO: 5177 - DNA, 600 bp, Rattus norvegicus
gacaggcagcgggcaggcacggtgacaggaatggcagtgaacatagctgccttgctgtctgtcatgctccagccgtacatgcccacagtcagctccaccattcagacccagctccagctcccagaggcagcctgccgcatccttgccacaagyttcatttgtaccttaccagcaggccaccgaattggcacagtcagtcctttgttccagaaattggaaaatgmccagwttgaaaatttgaggcagcgctttggagggggccaggctaaagggtcccccaagccagcagttgttgaggcagttactacagcagggtcgcaggacatacaagtgctggtggatgargtaaccaaacagggaaacatagttcgggaactgaaagyacagaaggcwgacaagaaccaggttgctgcagaagtggctaaactcttggatctaaagaaacagttggctttggctgaggggaagcccattgaawctccgaaaggcaagaagaaaaagtgagagaatgttcacacaaagtcactttactgggtatggacagtaataaagaatgtmcwgysyvrrmrrmmrmwmraaawmgtcgacctgcaggcatgc

SEQ ID NO: 5178 - DNA, 352 bp, Rattus norvegicus
gacgtcctgtgtggacacgcccactcggcccaaaacaaggaggctctctcctgggacatccacccagaaatcctatgwksgkcassagsacgacccatctttggctccatggcagataaactcactgaaggtcatctgtgtgagctccaggggaggactkagtcctgtatgggctargcarcggagggagagcgctctccctytggagtgcagaagccaccttcaatcaccctgstagggttcatcccatctttgtgtcccagttgtgactctcmcctctgtatgaaagcaggcatytaaggagcagattggaattaaaaacaactgttcmgtggraaaaaaaaaaaaaaaa

SEQ ID NO: 5179 - DNA, 444 bp, Rattus norvegicus; identical to SEQ ID NO: 1083

SEQ ID NO: 5180 - DNA, 600 bp, Rattus norvegicus
  misc_feature (146)..(146): n is a, c, g, or t
  misc_feature (332)..(332): n is a, c, g, or t
aaaaaactcgaggtcgacggtatcgataagcttgatatcgcttttccagttctcctttcaagctttctgttatgttgattttgcctgaagtagatgagggcccttactattatggtgattagttttttgtttgtttaattcctttntatattaaagaaagatggttattcagatattagatttgaaaggttagtagtttaaaaattagcaagccacatgtattttggccccttctgctttattctcccaataaaatgcttgttgggaccctaaggtgaccctgtaccccttgatgttaataacattggcattgtagcttaaatccctagaanattgtatggaccaaaggccaaatattagtgatcaggaataccactttctttgtccgaatgacttttattctactatcactgtgaaagataatttccttgtgttgtgtttactgactggggaaccttagtctatctgcttaagccgactacgactgatgcacttagcttaaccatcagctgactatgcttgctgaaggagcatggttcagacagtagcacggaatggaatcaccttgactgaattggggtttgagttcccaaatggttg

SEQ ID NO: 5181 - DNA, 600 bp, Rattus norvegicus
aagctttccccacctcagtctgcacctcctcytgggcccccaccccggccgcggccacctgcaccctacatctgcactgagtgtggcaaaagcttcagccactggtcgaagctgacgcggcaccaacgcacgcacacgggcgagcggcctaacgcctgtaccgactgcggcaagaccttctcgcagagctcgcacctggtgcagcaccggcgcatccacacaggcgagaagccgtacgcctgctctgaatgcggcaagcgctttagctggagctcaaacctcatgcagcaccagcgcatccacmcaggcgagaaaccttatacttgccccgactgcggcgctcccacagtggtctaaagcccttcgtgtgcccgcgctgcggcagaggcttcagccagcctaagagcctggcacgccacctacggttgcacccagagctgtcagggccgggtgtggcggccaaggtgctggcagccagtgtgcgccgagccaaggcacccgaggaagccacagcagcggacggcgaaatcgccatcccagtaggcgacggcgagggcatcatcgtggtgggcccaccaggggacggcgctgcagcggccg

SEQ ID NO: 5182 - DNA, 724 bp, Rattus norvegicus
  misc_feature (638)..(638): n is a, c, g, or t
cacgagggtcccctgagctgccaccagcatggatgacatctacaaagcagcggyagagsagttgacagargaacagaagaatgagttcaaggctgccttcgatatctttgtcctgggcgcggaggatggctgcatcagcaccaaggagctgggcaaggtgatgaggatgctgggacagaaccccacacctgaggagctgcaggagatratcgacgaggtasaygaggatggcagtggcacagtggacttcgacgagttccttgtcatgatgbtycggtgcatgaaggatgacrvcaaagggaaktckgasgrggmsmtgtcgratctctyccgcwtgwttgacaaaaacgmtgatggytacattgacttggwtgaactgaaratgwtrctgcaggccacaggtgrgaccatcacggaagatgacatcgawgagctcatgaaggacggtgacaagaacaacgatgsccgaatcgaytatgacgasttcctggagttcmtgaaggrcgtggagtagacamtggctktgcacagagttgcccatgcctgttytcvtaayccarmyggaccccgtgrtaggartkcacccgggttytytagamtctctgmamctgsytgtgtccytgaarcyttggctcttntggactctccctgttcccgtcccagggramwcaaataaatcctctctcskkggvvvvmwrrwmwmwwrraaaaaaaaaaaaaaaaa

SEQ ID NO: 5183 - DNA, 600 bp, Rattus norvegicus
tcagtgccacctggtgcctttgaccacatgcctcagctgtgggaacttaaggtggcacacaacccctggcactgcgactgcagcctcacctacctacgcctctggctggaggaccacatgcccgaggccctgtcacatgtgtactgtgccagcccggacttggctacccagcgcccactgggccagctcacaggctatgagctaggtaactgtggctggaagctgccaccatcctgggcctattcagggatctggtgggatgtgtcactggtggctgtggctgtgctaggcctgattctgctggctggtctactgaacacatttacagagtcccggaactgaacctagccccaaaaccagggagagcccagacytaagccaggtccccagaagcatcagccccagtcagcccatgctatcaaaagcccacacggagtgggctgaggccacctcatgggtaaaggcacttgctgcccagtctaaagacctgggttggatcctcagaagagaatggaatctcacctcctcagccttgccatgcccacacgacaaataaataaatgtaattttaaamgmcarmaawaaaaaaaaaaaaaaaaa

SEQ ID NO: 5184 - DNA, 574 bp, Rattus norvegicus
cgagccgatggtccccatccctgaacccttagccctcaaccccaccacagaatctaagatctttcatctggctgcgccaggggcaggggatcctaagcaaatgccttccgtggacatcaggccccatggcytaaagggctcccagggcaaacttctcccgcaaaacctgaaggtgggggaatggcggctacacattccasaaagtgstacamttgmacccacaaccgggaaggstatgaagcgatccttagagggtggtgactgcccatcgtcmgacggtgtmgtggcttggaatgttattattgccgaggacctggttagaggtataaagacctttttttcactgttacctaatcttttttttctcccccctctwacaattttttttttggtgtgttgtacagcagtataatttttcacttatttattccatcggtagatattgtttgtacaatgtacratggttttcatttcagaaaataaaraaaaaaagttctgatcrtaarwwwrrmrrmwwarmccattgtaataaggaataaaaatcaggtggataatgaaaaaaaaaaaaaaaaaa

SEQ ID NO: 5185 - DNA, 557 bp, Rattus norvegicus; identical to SEQ ID NO: 1089

SEQ ID NO: 5186 - DNA, 418 bp, Rattus norvegicus
aacctcatggtccagcagctggagaactctgasssacmyttsrmsctgkrkcwcmasaakcggsackwkgttccgggcaaatggatcattgacaacatcaktgattccatcgaaaagagccacaaaactgtgttcgtgctttctgagaacttcgtacgcagtgagtggtgcaagtatgaactggacttctcccacttcaggctctttgacgagaacaatgacgcggccatccttgttttgctggaacccattgagaagaaagccattccccagcgcttctgcaaactgcgcaagataatgaacactaagacatacctggagtggcccttggatgaaggccagcgggaagtgttttgggcaaatctgagaactgcaataaaatcctaggttctccammmwraaaaaaaaaaaaaaaaaa

SEQ ID NO: 5187 - DNA, 430 bp, Rattus norvegicus
cggcacgaggctttctgctcagcttctcctgtgtgattgacagmtttgctgcwgaaggctcattttaatttattaattgctttgagcacaactttragaggacgtartggggtcctggccatcccacaagtggtggtaaccctggtggttgctgttttcctcccttctgctactggcaaaaggatctttgtggccaaggagctgctatarcctggggtggggtcatgccctcctctcccattgtccctctgccccatcctccarcagggaaaatgcagcagggatgccctggaggtggctgarcccctgtctakagagggaggcaagscctgytgacacaggtctttcctaaggctgcaaggtttaggctggtggcccaggaccatcatcctactgtaataaagatgattgtgaaataaaaaaaaaaaaa

SEQ ID NO: 5188 - DNA, 600 bp, Rattus norvegicus
gacagaacaatttttctcawgttctttggagtcwtgggtttttgrgaaaaacaataattccaggaggtacaaggacaattcttccccaaacgataacccttaacacatcttacacaaaaaaargagcccwgsmgaaactggaggattcacggwgtctaggttataaatatcaatttaaaagtcacccatatcatgtaactcasgagcctytgttccaacccagkgkgttttatgaaacaaagagacarggctaactaaaggaatcaaagaacccttctccaagcactgacamcaatctaactggacaccctactctgakyccatgtgtccttgtcacaaagatgattttaaaagtaagaaagctgctttycwsmwwgktcctacccagtgagctaactgatctaamcatgctcccctctctcttcctgccaaacctctcactcscctaccctttttgcagtagggattaaacccaggcctcacatgccaggcagactctcttycactaagctatgtccccaaccctgtttttatttcatgttttttgagacagtcttgcaaagttactcaggttgcccctcagctcactctagctggggt

SEQ ID NO: 5189 - DNA, 528 bp, Rattus norvegicus
tgcaaagccaaacggggtagaaatcccgggttactgagtagcttttcgcaggccactggggacgaggctatcttattttgtgcttgtgtctgcctttccgggacccttacttcttcctcctgtgcccatctcttgacctctgtctatcccaggcaaagacatcgtccttgcctctgtactggcttctccccaactaaaacgctccggacatttgagacccacttctggcttcaggagcgatggggaggccttgttcaggctcacgcattgagctgagcgagcagcaaagcgttaacttctccctgcttggaamtaagcggtgggtggctgatcatctcaggccaaccagaggtccgttgcccaggcaactcaccagctccgcctytgaggattggctgttgggatggaagttasccaagctttaaagggacgccagcaattgctcctttgggggaaaaaaaatctaccagtcccactgtgggtggagaaataaatggtctttctccttvraaaaaaaaaaaaaaaaaa

SEQ ID NO: 5190 - DNA, 301 bp, Rattus norvegicus
taagttgtgtttattcctggagtgacatgccaccccgaatggctcactttcactgaggatgctgtcctctgatttagctgctgcctccagcctctggcttgagaacttactaaaggcacttccttcctgttaaacccctgttaactctccataaatttggtgattctctgctaggcctaagattttgagttaacatctcttgaagccaaactccaccttctgtgctttktgcttgggataatggagtttttctttagaaacagtgccaagaatgacaagatattaaaaaaaaaaaaaaaaa

SEQ ID NO: 5191 - DNA, 556 bp, Rattus norvegicus
cacgaggctccagctgggcattgaggaagccttcaccagcaaggctgacctgtcagggatcacaggggccaggaacctagcagtctcccaggtggtccataaggctgtgcttgatgtatttgaggagggcacagaagcatctgctgccacagcagtcaaaatcaccctcctttmtgcattagtggagacaaggaccattgtgcgtttcaacaggcccttcctgatgatcattgtccctacagacacccagaacatcttcttcatgagcaaagtcaccaatcccaagcaagcctagagcttgccatcaagcagtggggctctcagtaaggaacttggaatgcaagctggatgcctgggtctctgggcacagcctggcccctgtgcaccgagtggccatggcatgtgtggscctgtctgcttatccttggaaggtgacagcgattccctgtgtagctctcacatgcacaggggcccatggactcttcagtctggagggtcctgggcctcctgacagcaataaataatttcgttggacacgtaaaaaaaaaaaaaaaaa

SEQ ID NO: 5192 - DNA, 600 bp, Rattus norvegicus
ccagatcacattgcaaacagagaaagtamgcmggcattcgatttcagcctgtgtccagctacaggakcaatttttaatcctgcagtctcctcaggcaatgtgacctgtgatgcagtcagcagctttagtgcctttctttgccttttaaatcgccacgaatcacagatggctatttagtggccctacaatgctgcaacacatcggcttgcgttttagtcttaattatttgtttcttggataattgtttgtgtcagctgttagtggtgaaacagggctctagtgaatcttttatttatgaagtctaacttagtgttcacgtggctagtggcaagcattttacagtgatcacccaatttaatcttttgtatactttttagaaatgccaagagccttactaaactggagcagatttatgatatagtgatgatataggtagatgttagtcttgaagctcttattttgtgtgcaactgattatacaaacatattaaccaagcattattacacacataatatctataactaggactttgataactgttatataaagtgtgtaaaatttgtatgaataaatttttgtaaccaaaaaaaaaaaaaaaaa

SEQ ID NO: 5193 - DNA, 415 bp, Rattus norvegicus; identical to SEQ ID NO: 1097

SEQ ID NO: 5194 - DNA, 450 bp, Rattus norvegicus; identical to SEQ ID NO: 1098

SEQ ID NO: 5195 - DNA, 461 bp, Rattus norvegicus
cgcttccccccacgcctccaggaagtcttggccgccagtgggctcccgggtttcggccgcgaagcccmckwsktttcctcctctctcctcatcttcaacggttacctcaagttcatgcagcacctcaggggttcagccctcgatgccaacagacgactattcggaggagtctgacacggatctcagccaaaagtccgacggaccggcgagcccggtggagggtcccaaagaccccagctgccccaaggacagtggtctgaccagtgtakgaacggacaccttcagattgtaagctttgaagatgaacaattacaaatgaatttaaataaagaaaaaaagattaataacaaaccaatttcaaaaatagactaactgcaattccaaagcttctaaccaaaaaaamaaaaaamaaacaaaaacacaaaaaacaaaamcaaaaaaarraaaaaaaaaaaaaaaaa

SEQ ID NO: 5196 - DNA, 600 bp, Rattus norvegicus
tcagagggatggagaaagaagtggagaaggtcctttccctgtggtttctacctttaagccaaagaaacaagctgtgcggacctggcccattaagagcacccactgggagatgcgctgaaagagcctgaggccatgcagttggacactgaacttgktaaaaatgtccttccccaaggaagccataatktgcagatgaactgaccaaaggaaaagcttgagacagcttcctgcggggaagccaggtacaagagagacagcttgggctgacccagcatctctgcaagatttccacctgytgggctgccaragagttttgtagcccggcwctgactgcatcctccccttccctggggcagcattccctgaagctgtgccagcaggaggactatagcagcctggttttggagtatagctgtaagggcagtgcccatgtgtatagtctgtggagtttagcttaaagggcagggcccacatgtacagtgtctgwatataaacgtgctgtctgttcatttmtacgactggaggttttttatacagtgttcttggattcataataaagtgatgttyttggtttwwwaawrraaaaaaaaaaaaaaaaaa

SEQ ID NO: 5197 - DNA, 541 bp, Rattus norvegicus; identical to SEQ ID NO: 1101

SEQ ID NO: 5198 - DNA, 600 bp, Rattus norvegicus
  misc_feature (583)..(583): n is a, c, g, or t
atgatgaaagccttcgaaagtacaaggaggccctgctgggccgagtagctgtctctgcagaccccaatgtccccamcgtcattgtgacccgcttgaccttggtgtgcagcactgccccaggccctctggaactggacctgacaggkgatctggagagcttcaagaaacagtcatttgtgttgaaggaaggtgtggagtaccggataaaaatctctttccgggtgaacagagagatcgtgtcaggcatgaagtacatccagcacacatacaggaaaggggtcaaaattgacaagactgactacatggtcgggagctatgggccaagggctgaggagtatgagttcctgacacccatggaagaggcccccaaaggcatgcttgctcggggcagttacaacatcaagtcccgctycwcagatgatgacaaaactgaccacctgtcctgggagtggaatctcaccatcaaaaaggaatggaaggactgagctccagctgggaggcgggcagggcgacggacagacagaaggaccgacatgcccctccctaaacccctacccaccccaaaccaaagtgcttgacaggnccttcctcaccattcct

SEQ ID NO: 5199 - DNA, 564 bp, Rattus norvegicus; identical to SEQ ID NO: 1103

SEQ ID NO: 5200 - DNA, 472 bp, Rattus norvegicus
tcggcacgaggccggcagcgccttccaaccctgagcccatcccgaggagccctgggaggcccaagagcccgcaccacgcccagcccgrcccttccaatcttccctgcactgccgctgcccgctggggaccagttcccacgcgcctgtcccaccccagccctgtgttmcaatttttcgtttggtcttaggtcttcccatggctccctctctcctggactggttattcttgttattattgttaataataataataataattattattattatttccccyccgtgctccccacttctctyaggctcgcccccaagttgccagtgtttctgaatgtcctcgtgtctgtgrttgcgctcctttccccaggaaaaaraaaaraaaaaraaattcgcatgtttaatgtgacttcccactccctgtctgtgttctaacttatttataaaaggatgatggctgtaaaaaaaaaaaaaaaaa

SEQ ID NO: 5201 - DNA, 504 bp, Rattus norvegicus
acacaagacaaaccgaccacaattagagaagcctttccctaaagtgtaacttaagtggctgcagaaccagcaacctgtaaccgcccttcaaatggcatgaggaggtgggcaccggccccgcccagcatgtgtgtgtctmtatctcgsgtctacctgctcctttcggcctagtcagatgggtgtakawamagacccgsatgtgtctgtawymaaacggcacctagagatgctcctgtcagtgtcctcaaggctccaccaagacgcgcaccgggctaccacatggtccctgtcatgtgacctattactctgacataaatccatctgtaatatattgccagtatataasccgtttagtttgtcaattgattaagctgtatgtcttataagagactatgtaaagsgggaatatggaggagtgaactctcagacccttgaagatgtagcttccggatttgaaccgattaaatggcacctgtatwccgaaaawmrrmamrarmwmrtgcc

SEQ ID NO: 5202 - DNA, 502 bp, Rattus norvegicus
cggcacgaggaggaccccaggctctcggagacatcagccaggcgtctgtggagctgactgccttcaattcaagcaactagacattggagagataatgtgagtcaatgagaaaggtagaatgtctacaggacagagctatgtccctcttcttaggaccaggccgaagcaggccttcctgtggcctgtggtaggcttggagactggagtcttcagattcaaagggcccaaatcaccctggtcacctcgtcaagggtggcatcggctccatctccaatsccgagtctgcctgtgtcagggacaaatattctgaactgggacggaaaggaggcaagggccctcaggcttcacagcaagaagaaacaacttgattgcaggctccacttccattcccctgtccccgaagcagaagaggggggagggaggagctgacggacttgaaaaggccccttgtctaggtaccccacaaaaataaactttgaaaacttaaaaaaaaaaaaaaaaa

SEQ ID NO: 5203 - DNA, 600 bp, Rattus norvegicus
  misc_feature (431)..(431): n is a, c, g, or t
tgttgcctttgggaaggggctttctaattggcgaccttcaggtagcagtggtcctggccaacctggccagccaggagctgggacgatccttgcaggagcctcaggattgcagcaggttcagatggcaggtgctccaaaccagcagcagccgatgctcagtggagtccagatggctcaagcaggccagccagggaaaatgccaagtggaataaaaaccaacatcaagtcagcttcaatgcatccytaccagcggtgagtgtggacggcagcctccactctcaggtgatctgtgctgagttgagcaatgaaattatcttttgctcaaggcttatttmgatgggtacaataaaagatgcaggctttcagcaararamarawmwmarmtccactgtgaatasccatggaacttgggaaaatgacytatttttycntgasccgtgttcttgtctgtaaatggtgataatacctacctcataggkttgttgtgaggattgaaatgggarartgaatgtaaracacttagcacggtatacaaaatactggkycttgaataaataatagttycctacttttmammmhdvmhmmmwrwwmmwaaaaaaa

SEQ ID NO: 5204 - DNA, 440 bp, Rattus norvegicus
taggtcgtgttccttgtggggcatctgatgrgyacgaggtttgcagggaggacgytgactagtgggagtctggtcctgctgactctggatgcccggggaactggagctgcccagctgactgtcaacagtgagaagatggtgattggcaccatgctggtgaaggatgtgatacaggctctgacacagtgactgctcagcactgttacccactgatcttcacccgatccctccctgtgacatctgctcacagatctctcccctcacctcaacctagtgcgagcacagtctccctcccacstgcttcctatgggtcccttagtgacttcccagaggaagacagaagctgctccttcatcaacccctctcctcagttttctgtatgtacttacgtagcaaatctcaataaaatgcgctctctcccttraaaaaaaaaaaaaaaa

SEQ ID NO: 5205 - DNA, 456 bp, Rattus norvegicus
ccagtgtctggggtgggccaagcacctggtgggggccggggcgcacttttggatcaaatccggcaaggaattcagctgaacaagacccctggagctatggagaaytcagtwcsgcargcactccytcagcagtcagaaggcctagtgggtgccmtgatgcatgtcatgcagaagaggagtaaagtcatccactcctcagatgaaggggaggatcagaccggtgaggatgaagaggatgatgawtgggacgactgaaytcatcttccttcctgcaggccagttcctctcactccacactcactstgccatcgagattcctyttcactgtcagcttccaaattcatctgtggtgaattcattcaacsttatacccactctaaactcaacaccgcgtcaacctttacttcttcccacgcagggattaaacaggwtgaaaatgaaaaaaaaaaaaaaaaa

SEQ ID NO: 5206 - DNA, 905 bp, Rattus norvegicus
  misc_feature (57)..(57): n is a, c, g, or t
ttcagtcacagctcagatctcatcaagcaccagagaacccacactggagaaaagccntacgagtgtgatgactgtgggaaaccttcactcagagctgcagcctccttgaacatcacagaattcacactggggagaagccataccagtgcaacatgtgtcccaaagcctttaggcgtagctcacatctcctgagacatcagaggacccacactggggataaagattttttgttccagaaccttactgggaaagtcagagtagggtggaaagccattgggaaaatattgrgactcctgtgtcttatcaatgcaatgattgtgagagaagtttcagtaggattacaagccttattgaacaccaaaaagtacacactggtgagaagccctttgaatgccagacctgtggaaaaggcttcacccgaccttcataccttattcaacatcagagaagacacacrgggaagaaaacttctgtcacagtgacccctgctgtacattccgaagttggtgttcaactgtcattgaactgaagccgctctggagctcttaatgactgcagaagtcataggctagggctctatttaataatgtacatcctcagatattaggaatctgactaagacttattatcttctacattctagaaggtgactataaaaaaaaamwwawttcataggagagttgtctgcaagagttctaacctattggaattaaatgggcttcctgactgtcaaattgccttcccttggcctgcacttcctgtctcttgagggaaaggttatgctttttttgggaggggtgggggtgggcgaagttactctgacccttctttaggctaatgagcccttcacgtgtggtcagacttggaactcttatgtcctgctttgtgccttgtatacaggggct

SEQ ID NO: 5207 - DNA, 972 bp, Rattus norvegicus; identical to SEQ ID NO: 1111

SEQ ID NO: 5208 - DNA, 782 bp, Rattus norvegicus
taacgagcccaactcccgaacgccgcccgccgctcgccatggacgccggtgtgactgaaagcggactcaacgtgactctcaccattcggctgctgatgcacggaaaggaagtaggcagcatcaycgggaattgactccagctctccagaggtgaaaggctattgrgcaagtttggatgcatctactcaaaccacccatgaactcaccattccaaataacttaatcggytgsataatcggscgccaaggcgccaacatcaatgagrymcgmsrgatgtccggggcccagatcawaattgscaacccagtgsaaggctcttctggaaggcaggtcactattactggctccgctgccagtattagcctggcccwgtatckrmwcrakgcmaggctttcctctbagaagggcatgsggtgcagctagamcagtktrggttcgctcgtamcccccttytgmtgttttcccatgatccaactgtgtaatttctggtcagtgattccaggttttaaataatttgtaagtgttcagtttstacactttatcatccgctaagaatttaaagaaaaatcacattctctgttcagctgttaatgctgggawccwtatttagttttataagcttttccctgtttttagtttcgtttgggtttttggctcatggattttattttctgkwkgtcsaaaaatgtaagagtggaatgttaataaatttcagtttagttctgtaatgtcamvrmwwwarrvawwaaammaatggattggywwwwaaaaaaawaaaaaaa

SEQ ID NO: 5209 - DNA, 1195 bp, Rattus norvegicus; identical to SEQ ID NO: 1113

SEQ ID NO: 5210 - DNA, 600 bp, Rattus norvegicus
accctgtactctacaaagatgacttccctgagaaactgaagagtttccccaacatcggcagcttgtgagctcaccggttcccagggctgtggaggagccstacaacattcacggtgggggtgaggaggccagcytggctcagactyccccaaacacactggagcctcttgagctatgagccmtgctttgtcctctcatctccgtggactctgaaaatgccaaaggaakggagcctcagggacaagctgcagcttggagcccagcstatcgctcttgggttgccaacccagctcaccatytcactgaccctgcagctgcctcagagggtcagcystcswgcybcagatcccaggagtcacagcagaggcatgcgattgtttyacatctgcagactytggggaaatggcaaacctyaaacgtgctacagatcccagtacctctgagggttagaactgtgcttgggacccgagtcatgagcccaagtacacagcagagcacacgctgccaagatgtgtcctgacagtccctgaacaagtctttgktttggctttttgatatgrttaaaattattttttactccttwwwaaaaaaaaaaaaaaa

SEQ ID NO: 5211 - DNA, 658 bp, Rattus norvegicus
cacctgttcccaacccagactatgagcccatccgaaaaggccaacgggacctgtattctggcctgaatcagagagcagtctgacagataggagggacacttccttctgtggacccatgctattccttgttctctggacaagcggcakagtccacagccttattcttcagcctcctggtgarcacgcatcctakaaccttcctctcccacttcctttgctagaagccagtactasgacattgctgactcagtatcctttkaaatatcatgactggtcarattgtmggccakccaccttgtgggsatacttttctcagttgccctgctgccatysmbkgccagctcccccyttyttcaccaatgtcatctytgcmttcmatcmmttmccwmkcctwmttkgccctmatagcmagcamtwwmswatagytkkytgkttttctacctctgtattttatgcccttctctggggatggatttggtgatcattggcataggtcctgccccattcatagatcctgacccagcccctgccacgggcccctttccaggcttcaccttaggtccttggatggtcatctccatatccatcaatataccaagctyttctttgctaatgcaaaagcaataaagtatgttggttggaaaarawaaaaaaaaaa

SEQ ID NO: 5212 - DNA, 1224 bp, Rattus norvegicus
caacctgaactccagagaagccagatacgacccctcgctgctggatgtccgcctgtctccaaattacgtggtgtgcagggactgtgaagtcaccaacgatggacacaccattcaagtcatcctgaagtcgaaatcagttttgtcaggaggaccgctgcctcagggacaggagtttgaactgtatgaagttagatttcactggggaagagaaaaccagcgtggttctgagcacacggtcaatttcaaagccttccccatggagctccacctgatccactggaattccacgctgtttggcagcatcgatgaggcggttgggaaacmcsasggcattgtcatcattgcactgttcgtccagatagggaaggagcatgttggcttgaaggctgtgactgagatacttcaggatatccaatacaagggaaaatccaaaacaattccatgctttaatcctaacactttattaccagaccctcttctgcgggattactgggtctatgaaggatctcttactattccaccttgcagtgaaggagttacctggatattattccgatacccattaactatatcccagctgcagatagaagaatttcgaagactgaggacacatgttaagggggcagaactygtcgaaggctgtgacgggattttgggagataatttccgacctacccagcccytgagtgacagagtcatccgagcagcatttcagtagccagagaaacytgaaacaagcccatytgcatcagggaagaagacgttggtcycacagagtcctttgatgaggagtggaaactctwgagcggcagcttcctgttaaccttcaagcctgcattatcttcagttactgcggctttgatggagatctgtgrccattgtctgtatacatgmtgttatgagatattagaagtggctgttcactataaagaaaatcagtgtgcatgcacacmccacagcttctggaattcatacttttgcacatactgcctgttgcttatgtgtagaaagaatgaaagtagttttcagacttattaatgtgactgtatcatattatcaatwtgrgrtaagaaaaacamrwhwmmaragccaagtcatttatttcctttctgtattrgaaaatwtgcycmctagtgtatttcttgataataaagtgttttgatctmcmawarmwwrraamawmaaaatmcaatwtgaaggrgtcwtaaaaaaaaaaaaaaaaaa

SEQ ID NO: 5213 - DNA, 1150 bp, Rattus norvegicus
aggattctttagtttgcgtgaatgcccttctttccatagaacattcttmaykwggmwgtgmatacatttkctttamrygasaaaaaaaaggaaaaaaagaaaacagaaaaaaaaaaaggacagtttaattttgtatagctcatgcttacctcaggattctttagtttgcttgaatgcccttctttccatagaacattcttaatttggcagtgaatacattttctttaagtttaaaaaagaaaagaaaagaaactggaataattatacccacctttttttgatgtttatatttaggggttttgttgataaatcaagtcttggttgtggcttgctgaattcaatatttatgagtggtgcatttttaagtatagtgaacgcgaaccataktgcggwgatgaagccctcgatattctgtaaaaaacaaaarmaaaaaaaaaaatctgcctatgcatgttttttaaraaaaaaaaamwaaaataaaatggctgtctcggcctgtatgggactgcaakgcgcttcgcggyctgacatatactggaaatgtattagactggcattctttatattctcttaattgcttaatgcctttgaaattttgtaatcaaaacaaaagctttgaaaaaatctaarrgggagrgtattcttaaaagtttttaacataagcttgtmagtgcacacatagatggtcggcatgtttagcaaactttgtgaaatttaawtaagtttgtagttacatktgaaactctaaatgcatggtaaccgttgatgtcataacagwwtagttatttcgttctgytctgtcatgtgccacaaaatacgtactttttttcaccttttttttgtytttttggktwtttgbtkttytkkttwtdtytgkwttttttkktytttttgccctttgtatattagtygaggttmcaactggttcattytgaaaacamcracgacaracagcraaaaagtccattcatattttttaacaattgtataagtgcccaagtcattcastacaccctcaagccttgcctttgtaatttgacttytgaaatgtcggcgatcaaagcatgcacctgtaccaatgacaaaagaaaaagcattttatattactactcaataaaatgtgcatgaacttwaaaaaaaaaaaaaaaaa

SEQ ID NO: 5214 - DNA, 1400 bp, Rattus norvegicus
cctggggtaggagagtcagctstgtttctgtagaagtcagtgggtgtwtctgttgctcttcatgcacatacatagatataccaaaaacagatacaggctacttacagccacacaggttgtgaaatgagaaccaactggaacatcatttggattgttttatcatattctgcaaatccaatatcagaactgctcaaaagttcacaaaattactatttttcgcttgggtttaaaacattagcagtgtcttctatgctgaagctgaccactgatctcttacactgtgactgtggactcgaatcagcttatagatctgcttccaaagcatgcacagtgggagcttccaaccactgaatcwccatgatattcacctcatctgccaataagatgcaccagcttcttccagtgtaagattctgcagaacctgtgaccacttgactttacacctgctatgcctccttgcctgttttgtgatacaaaataaaattgtttgggattgcwmawwmawwrraawwwmwtctaggccaacttcagcccttggtaaacttgcggactgttcctgatgttaarattaaaacttcaaaggcgctatttattagtcacacagagccatttcaagagaaaggagctctgcctttccccatcagtttccttagaraagagacacttggctctgtgtggagttgctgctggcwsswgrgtgttctcttcctggtacaatgggcaacccacactattaggcccttatgtttggctgaaatcttactagccatgtgcactggtcttttctacagctktcatttttctgtttcactcattaacccactgcattgatattcttyytgggagytggtcaggsccttgcctcaaattgtgcttaatgacacctkgcagatagcttgttytcagaaatcattttaagaccctaattatgtcaacccaggcagggawawttytgtctttyatggaaccaattatkgagcttccaaaaaggggagagcagggacacttcmcaaccaatcaaccaaaccaaactcacacccatytaaccaaacattaataagatgaatcattattatggtaaatgtcaccttgkatytgccctaggcacattccaatatcagcatctccaccttyttcattgcttctaacattgaagttataaaatggtcmtgccttttgccaagagcacagcactactcccttbtgagacctccytccccacccygagcatcacctytytgccaacattttgtggaaactaaaagaatcttactatgtacagataaattgtattatattttttgtacttaatgttttgtgtaaatagtttgccttgttcagttgtatgtgagtattcaaataaaccmtgccatttwggrgrmaaaaaaamaaaaaaaaaa

SEQ ID NO: 5215 - DNA, 867 bp, Rattus norvegicus
ggtaccataactaacgagtgtgcagagcagactgacgatcttcccctctctggaagctgctgctggagagctccggccagcagttcgtgtgaatctctcagagggaatgcaactggtccctgtgatcttttcaccttcatttttatatagagatgttaatgtcaatcgaaagaaatgtatcttagcatttgaatgaatttacccgtaataatattatccacacatttgcaatggctggcatctgctcyaykmssattgctgttcgcaggctgtgggaatttcacctgtcaaaccaaactttccctctctgatgtgcactttgttttttttcccagattcgtcacaatgcctattgtcccgcccttctctttccttttctctccattttgccatctgtctcttatgatttataaggggaaaaacttgttttgttagagggccaggttagaagtcattgtataatttgtaggcttttgtaaggattgaatgcaagcgtggaaatttaggctgaattctctatcaaaagaaaaaatgtgaagggaaagggaaaaatcaggagggaggatcgcttcatgcattatttatctcgaccttttgggggagaaggaactcccccatcctttcaagagattaaaaataaatcaacagtctgaaaacctaagcagacacggggcattaccaggatcagccacacacgtgtttccttctatttattttgaagaaaaatttcatgggaaaagtatgtatttttttgtatattctacagagtttattytagtatgtattgacatctcaaagaacaaggaaattgttctgtgattaagctataaataaagtatctaattttcctaaaaaaaaaaaaaaaaa

SEQ ID NO: 5216 - DNA, 600 bp, Rattus norvegicus
tcagtaagattctaggtctccaaaattacaggctttttcttcattaccttttttattaagaaggaggagaatggatggacggttccagacctgcctgagaggaaagactctgttrktgaaccagagtgaaataaagcagtggtctcaaawrwwmamwmmmwmrrwawmawmmwwtctygtcrgagaccatggtcaaggtccgtgccggctcactggcactcaactctgagggaggcttttccaggactggagagaaccaaaagctgttggaatgaaggggtttgggggcacagtttggtcagcacttctgtgaactagggacttgttattaaggtcattttccagagcaggcaattcaatgaggctactttacaaggattagtccagaacagattagccgtaaggcagctaaccaggaaaacaggtcaatacgaggtttttctgatcccgttacgctcaggctgctgcggctgccaagaacttaaatttgcaagcctcttttgagggagttccgaccaaggtaactggatgcttcctgttctgactagaaacttcctgtctgcaaagtaaactggctcctccaaaaaaaaaaaaaaaaaa

SEQ ID NO: 5217 - DNA, 600 bp, Rattus norvegicus
ttcccagagtctgatggcagtgactggtccargtagttttcctcccacagccagtgcaggcagcaggtgtggtccaggccctaccccaccccactatgstcctttgaagccaacgtgcctccctcacckscacabkggagggatgacgcaggggagaacawagaattgcttggccctcaactgggttaggaccattgcaggtgacgcartgttgaagacactttaaagcactaccagccacattcaggaactctgttcacaggtatcctaccagcacaatgaggctaactgtgactcgtggggcccagagtcagaagaaagaaaaggcagcagctttcctktgggcagtacactggattraagrcaaagmggsayrargsgwcagatgattgtgaytctcatsaggggggtgagcggagagtrttgattctctgatggtaactgacagrtgtgaacaatgytcarccctccctccctcccagggaagaaaagcaaagattcaaagtaagcatgataatagttggtttaccagtgttccttccaaggagacatatattttttmatwaaykatmrttgyawtrraaaaaaaaaaaaaaaaaa

SEQ ID NO: 5218 - DNA, 1063 bp, Rattus norvegicus
gtttgccaatccacagcagctgatttctccaagcttgaatgagcccatgggggtctgatcaggtgaggtgaccgctggcaagtgacccagcccttgtcaactctcccaccccaactgctgctgccatgagcactgtgggatctgggagctgggttagcggggacagtaagaaagggccaggagcccatccccaaaacctggacatgtcctagcctggtgtctgcctgggcaccaatactaagcaggcaggcaggctgcatggcaatgacccacaccagagccagccatggcaggccccagcacccaagcagagtatatgatcatttcccttgcaccccatgtctggaatttttctcgtgagctcactgtggaaaggaggttacaagcccagggtcactgtgccactccatagtcagtccccttagtaagtaaccttcaaaggcaaataaatgacctaattaaaaaacacrarrgccggccttccttcaaggagtcccctaaraatctgtgggcsctctgctccgactgaggaagtcggagtaaatgcagacagctgcagactgttctagagttccgttcttttctctgatggcacatctcttgtgttcagttattacccaaaaaaacaargrccaaagaaggccaatctctcatttgaccgtgtttttaatctgcctgttttgacacatsccgtctgtagtaaccgctcgctgtgagsccccatcttgacagtccaagtgatcgtgaccagtgaytagcgtcccgtgttcyyctgctcttctaagaaactgagacagtgtgagtcattgcccagcaataatgtcaccaggagtcagcagcacgcctcatctcctgacagcattatgatgtttcgattctgtttactgtgtgttacatgtggtttcatttggtatttatttgtgttttgaggtcttgcgatgtttctgttctgctgctaataataaaatttgtaagactgtagaatgcaaaawwwwrmaawrmwaaagtgtctwttagaggaaaataaagctgatttargrrwmmwraaaaaaaaaaaaaaaaa

SEQ ID NO: 5219 - DNA, 600 bp, Rattus norvegicus
ctcccaacgttccytgaaggtctccactagactctgggcttccctttgcctagtgcaggggtcaccgctggagaagaaccmacactgtccttggtgtgctccaagcctggagccaatttaccctgttgsccmacccagccccagcgggggattatttcctgggtttctgtccctccaaggcttaccaggtgtagttgsmtttgttcttmtggggctgttagtccttmtactttmtttctcasttcashbtggaysmcckwctgwgyctswgcagkckkcwgtsyytsmsascmrtgtgcayragcaaatatgcaacttacmttgggatctgcagtcagttgaagccaagyttcccacatmctctytgtttrccatgaggtgatgtggggttkccattgtgtctgtcattaccaccgtgtctttcctaacccagtytcacagtttatgtatagtagtaaragttgtcytkccaccaaaggcatgtgacagatktaccaatykcatgtattctcaacamaggcgaraaakacaaattcctaccvcammarraaaaaaaaaaaaaaaaactcgagggggggcccggtacccaattcgccgaat

SEQ ID NO: 5220 - DNA, 682 bp, Rattus norvegicus; identical to SEQ ID NO: 1124

SEQ ID NO: 5221 - DNA, 761 bp, Rattus norvegicus
ggaaaagggagatgagagggtgagagggaacagttgtcrgggaactgttcgaggaaccacacagaaaagggcctctctaaagcaacgmacmygwyatytttsmaggaccataggactaaagcaaagccatgaagtgcctgctgatctccctggccctatggctgggcacagcggacatacacgggacagagcttgagctcagcgagacacagcgcagaggcctgcaggtggctctgraggagttccacagacacccgcytgtgcagtgggsctwcsaggaratyrstgysgrcrktsctgatgwcytgttcttmtcagctggcasmwttskgasgvkggaatttaagctccagcagaccagctgcstgaagaaggactggaaaaagccrgagtgtacaatcaaaccaaatgggaggaagcggaaatgcmtggcbtgcatcaaastggaccccaagggtaaagwtctaggccggatggtccmstgcccaataytgaagcaagggcctcakcakgagcctcargartcccaktgcagtaagatagcacakgccggcgaggactcccgcathtacttcttccbtgggcagtttgccttctccagggctytacaatccaaataagccytggacagggtttcatcttacttcctgtacarccgtggcggtacccaccatatkgcctcccaaagactttmaamwccaggytawtaaaactgttcctttccaaaaaararaaaaaamaaaaagaatgtgtggcggccg

SEQ ID NO: 5222 - DNA, 600 bp, Rattus norvegicus
gtattgaactactgctcctctgaccacgtttatttgggcactccaaaacagggcttattttagaaataaattcctccaagcaaagcctcctgcaaatgcagtacaacttactggtswcaragaactcaggtctccctttctgcctccatctgccatttcataccattgcagaaagagcctctgcatgtaatcgttcaacrgarssagstccagccctgatcagtgacttgctgaacggcactgacgtggaggtggcccttccttcggaagctgtaaattcagcccccgaattccttagtgttaagatcctagagtgaatcatgggtagttgcctggggcacagtgaagtccaggaaaggctttgtgtctgttttgaaaacaaacatcaaacatgtgacctcggagagtccttttctgtgagaatgttcactttctagtatattactgtacatgattgctctgtgaaaagacttcgcctatgcagccttgtttgattttatttcctttggtttgtactgttgttaagagcatattgtattatagagctatttggatattttaaatataaagatgtattgtttccataaaaaaaaaaaaaaa

SEQ ID NO: 5223 - DNA, 600 bp, Rattus norvegicus
ggtgttcacagcatgcatgaccctcacagctgcccctggagtcttccctgtcaccgttcagccacctcactgtgtccccgacacatacagcaacgccacactmtggtacaagatcttcacaactgccakagatgccaacacgaaayacgctcaagactacaaccctttytggtgtwacaagggcgccattgggaaagtctaccacgctttaaatcccaagctcaccgtcattgtcccagatgacgaccgctccttaatmaacmtgcatctcatgcacaccagttacttccttttcgtgatggtgataacgatgttctgmtatgcagttatcaaaggcakacccagcaaactgcgkcagagcaatcctgaattttgccctragaakgtggctttggmtgatgcctaatcccacagctccccattttctgagagaccaagwaccatgatcattgcctgctgaatcggccagggcctggccactctgtgaawacacgatcttgcaatgttgggttattccagccaaagacatttcaagtgcctgtaactgatctgtacatatttataaacgttgatctggaaamwraaaaaaaaaaaaaaaaa

SEQ ID NO: 5224 - DNA, 547 bp, Rattus norvegicus; identical to SEQ ID NO: 1128

SEQ ID NO: 5225 - DNA, 600 bp, Rattus norvegicus
asggtgygcaatgcatcawamaatggcctttttgarggtgggaaaggaargcatattacattgytccatgayakgcatgcaagactgctayccaasatatatwactkayatacatttggkgacttagaraaaccaatcakttgtgayaagcctgaaaagcctggcatwtttaacatacgtcagaaggttctgtgtggmcgargttctscarttggaccatgtggccctgtgaaagtgtcavaakgccaattttgttaagtttgcagcadaacatcaymtcswscctaargaatacaatgtggattgaatcrarggtggrgaccttaccttaacaaagaaagcaaaagtwtgtcwgygtaaaatgtggactaaactgctttcagggagaaatgttttaaaaatcagtacaggttggamatggggatcttccttsctggtgagagccctyccgatgtaaggcaggctccaccacgctaacttctgcagataaaaactctctgcttatttmstcktstcctctgagttcaagcgctgctggattcgtttggcatagctttgtgccatggagttaataatagacaggataaagtaacacaccac

SEQ ID NO: 5226 - DNA, 600 bp, Rattus norvegicus
gtccggctgcaatgtagacatgaactttgcagagttttacaaaaatgtttaatgatgacttaaaactttttaagrgaaaamwmarwawwahykkyrcakgttttctaacagatttttgactgtwatttaacccstgccttatttgtgcctgtttgcagcttarttctgtcctgttggattgtcaccaagtgcttacttasgtcatgaccccatgtgtttaaragtaattgttcagagtttgttacamctttcccatcctttaaaatctctaccaatgcctaaaactmtaattgatatttttagtaaaacattttygtaagagrtaagaaaattggattttaaaacmgcmgtwgcagcagctyttccttccaagcattggcagtgagagagctttccgtcctgggggcctcagctcgggwgtcttcaggtgtgtatggagagcaggkcctcgccgctccccagggacagcgcatctcttwggagygaccaggaactgatccttttctaacttttgtatcatgttaagtgttgtcttawwwaawawwwwwawmwtgattttctatctataaagattttaccmtcaaaaaaaaaaaaaaaaaa

SEQ ID NO: 5227 - DNA, 600 bp, Rattus norvegicus
ccactttgcacagctagtgtactgagctctcaaggctatgctgctgccagctgccacctgctgagcaggcgaggggctgctgtccggcgcagtgaagttgctgcttctcccaggcaaggctatggaccagtggagtgtcccagccatygkcwgwskgtgccccatctgccgctgggactcaaagccaggatctggcatcaagactgggagctccagcctgtaagacccaagagctttgacatcctaagctcagtgtggcaggaagggctgggaccagtatgtaagactgccatgggtcctgcctgccctcagatgtgtcctaacactgcagacagcactgaagtcaagagggactaggcacaggacctactcaagggtatgaatagtgttacttcawmmararwrwwamwwwgtttctctcccaatgtttggagaccaccagagaatctctgggctgcatgagcccacacaagcctgaggtaaagcccagcgtcccccagcaacaggaggtagaggtttgggctgccccactaagcttccaggtatgctgtgtcagtcctgtcttaccaaagatgaatgaagcaaaaaaaaaaaaaaaaa

SEQ ID NO: 5228 - DNA, 777 bp, Rattus norvegicus
gaaagtaccctctggcccttttcaatgaccagactttgaaggccaaggtgggacagctgcttctctctcacaacctgagctttgtgatcatggtaccccagagcccgacacaccaacttgaagacatggaaaaggcactcaaccccactgtctttaaggccatcctgaagaagctrgmrckrkscaagtttcagcccacttacgtgatgatgcctcgcattaaagtawagagcakccaagacatgctgtcaatcatggagaaactggaattctttgacttcacttasgmwckmrrcytgtgtgggctgactsaggacccagatcttcaggtgtcttccatgaaacacgagacggtgttggaacygrcagagrcmggysyggamrcrgmcgsakybwcmayyatmkcystkkcccgaaacttactcatctttgaggtgcagcagcctttcctcttcctgctctgggaccagcgacacaagttsscaskmkkcaygrsccgtgtatatgaccccagggcytgagacagscaggagtcaggcttragtaagcactgccacccaagcttcagctcatccagctatttcctsgccaytgcctgccctagccacttccagccttargaactggcagaaggaacagtttccacccaccaacccccatggtattgacatgctctctaaaccactgttttgcarcttttatggttcaagcttaacagagtctacaaataaaacttgcagacmcttthwwhwmwmrmwwaaaaaaaaaaaaaaaaaa

SEQ ID NO: 5229 - DNA, 600 bp, Rattus norvegicus
waatccaaggrcmatmgtggtgagaaarcagacvccaaaggagccaawtcagaacaactcmacaacccttgaatttgactccccaaccttaggaacctcgaaamrygagrcgattytgggataaraaaccttcgctgtttraggaagtttggcttcatttwawactgttttggcatggactgtattwattttcaaaatggcktgtttttggttttccytggcaagttwtattgtgagtttttstaattatgaagcaaatttttttccmccatgctttatgtgattgtatttaaawtgatgtgttattatgtcaaaaaaaaaaaamcggatbtattaaagaamcaattggcctttywrarmwrawwwwwmmawcttttgtaattatctttattaaaaaattgtwcttgrawrrwmwwmwrwmwrwwwattatgaargcttgtttccaagcccgactgtgagactggagcatacccatggtgatttcagtggcagagaccctctcactgagtctgtacgtgcttactggctctaacaggtatttcctatttcaataaaaatgacaccatgtcaccttgtatagttaaaaaaaaaaaaaaaaa

SEQ ID NO: 5230 - DNA, 600 bp, Rattus norvegicus
tctcggaggttctggaaatgtcacttggtgttcctgagaccatcgagagcttaactggaagcaggggaaagctcctcctyttcctcctcctcttccyyctctccttccttctcctcctccacttcctccttcttttccccccccatagcccaggtctttgagtaacctgattacttctgtgttcctacccagttccagtgaatkmggmamraggcaagcaccattttacatttaattgccacaaggaaaattacttataaaagcctccgttttctgtcttttaacaacagattttatgtgtacgagtgtttgcctgcgtacatgcacatgcacccaaccacttgcatgcytattttcctgaggaggccaggagaggttttggaaaccctgaaatggagattatagatgcttgtraactagccactcagtgctggcatcggaacccaggtcctctgtttggtttmttagaatrgaaaagtgaaaagctatagtctgagctttgattttaagataaatgtttaaacagtctggtctcatgactttacagaaacaataaaattgtataatacttctttaaaammamaaaaaaaaaaaaaaaaa

SEQ ID NO: 5231 - DNA, 600 bp, Rattus norvegicus
gtctacgagacaaacccaaagtcatcattgtgcaggcctgcagaggtgraaacyctggrraagtgtggatcagagagtcttcaggagcccactcctacagagctgtagatctacctaggaatatggaagctgatgctgtccgcatgagccatgtggagaargamttcrkyrcmskstactstacaacaccacaccacttgtcytacagagacaaaacaagaggctcttacttcatctccaaactcatttcctgcttccggatacatgcctgctmttgtcatctatytgatatatttctgaasgtgcaacaatcatttgaaaaggcaagtattaattcccagatgcccaccattgatcgggcaaccttgacaagatatttstacctctttsctggcaaytgagaacaaagcagyttgaagaagtgatcttgkccaaggatcatgatatatacctgcaattccaggattagggaaactgaggaaagaataattatgaattcaagaccarcctcagcaatactgtgggattctgtcacataaacaagcaaacaagcaaaaataaaacaaacaamcaaaaaactttraaaaaaaaaaaaaaaaa

SEQ ID NO: 5232 - DNA, 600 bp, Rattus norvegicus
tgcacttggctgccaaagaaggccacctccctgtggtggagttcytaatgaagcacacagcctgcaatgttgggcatcggaaccataagggggacaccgccttcgacttggccaggttytatggaagaaatgaggtcatcagcctgatgraggcgaatggggttgrgggagccacgagcctgcagtgagtgtggtggtcttttccmycswscgccttctctttgtcccttagttggctgsctgtcctgttttaytrtcacttattaaaatatagggtttcgttytgctttgttttcatattttargcagstagtcaaatccttcaaaactgcctaagtggaaatcttrctacaagtttrtgaaatatktaaacatctttttcactgtcaaaattytgatttctaacatgtaattgcatatrgctatctgtgcctttcttctggatattttatctytgatttttttttttctttccttgcttaccctttgccattctcaatgtctgacttggagactwtgttttaaaaattatttgtcctgatgcatcttttgcctaattaaaacacattttttcataararraaaaaaaaaaaaaaaaaa

SEQ ID NO: 5233 - DNA, 600 bp, Rattus norvegicus
catgagaagctctgctttccttctctgcccatcttccccttttgttttacaaatcagcctggcatgcctgcgagtgtgagacctggtaagaaaactcccacaaggatcctgcagtggaacgcaggcgcatcacagtagaagttcagcatcacctgaagactgactggcaggcagcactgaatcctcactagagagctaagcaaagcttggttgtgggaccgtgctctgaggaccaagccgaaatgctaccacctgagtttgcctttgtgaggcattagtgtagaccaatgaagaagatgctgcaggaatwgggaagctaccctctaaaacagccactgtgctaagtttcagattatttgcacaattatagtaccaagagtttatgaagtctagaaatggcawgaaatttgtttttttactctttgtttctgccaccttctaactctggaggccacctggtgtggagagggctgtgatgcgcatctccataacatcacaagtcctgacaacagtgatggcgtgtttcctttctagaccatgtttatcatttcttttgaaatcactaaaaatacatgattcattgacaaaaaaaaaaaaaaa

SEQ ID NO: 5234 - DNA, 508 bp, Rattus norvegicus
ggatacaatgctgttcctagcagtggggtagtgtctaccacccttctaccaaaaaaaaatcccttccttgtgggattcttgggcatctcctgcctccttcactctcacggtaattaatgtcttaattggctgttgcctggggaacaggagagctgctgcaggcagatgacctcatggggggtggagggaggtgaggtgcccaggtggctatttgccctgcagagctgggagttcccccccaccacccacctccacactgcctcctggccagctgcccaccccagtgccaggtgggagagggagcaaaacagccagccccttccaggtggcagtcggaagggatttttgtttttgattctgttgccatttgtgtaaatactwgtcttttttggaagaaataatgtaaagatgttttgtataaactctgaattmttwwmwwrwwrmwwwwwwmttagaaaaaaatgagaactaaaaaaaaattaaccacatggaaaaaaaaaaaaaaaaa

SEQ ID NO: 5235 - DNA, 920 bp, Rattus norvegicus
ctsasgasrgaaaaaacatgtccgactccctggtggtgtgtgacgtggacccggagctaaaggwawcmctkrggawrkksmgkktcygwramswgryswdcwrkvcmkmmawmahwrtgaaagtggacaaagmccggcagatggtggtgctrgaagaygaattccagaatgttkccccagaggaacttaagtyggagttgccagagagacagcccaggttcgtggtctayagctataagtacgtgcatgacgacggcagggtgtcctaccctttgtgtytcatcttcyccagccccgtgggstgcaagcctgaacaacagatgatgtacgcgggaagtaaaaacaggctggtgcagatcgcggagctkacaaaggtgtwtgaaatccgcaccacagacgasctcaccgagacctggyttaaggaaamgttmgcttkctttcgttgacgtktgagccagrgatytggaatctttacttckgaagactcagactgataggatatgaacatccaagagytaawtaragattaaaatktcaggaawrwdwawhaaaamrmamraaaammamgaaaatagacaacagataaagctgcaagagccagaagcgaaatgcgagactagttccttgcctaggaagggcagggcccagggttcaggctccagctccgaggaagatacggccgataaaagcaagtcaagcctcgagggggggccggtacccaagtggccgaaaagggagtgcgattacaattcaggggccgcgtgtcaaaagccggcaggggaacccggaggtagccaataaatcgcggagaaagtccccttcgcaaagagtaaaggaaaggccccgatcccttccaatgggcgcgaaggaaggaaggaccgcacatggaaacgggaattggaacacctcaccagcgagga

SEQ ID NO: 5236 - DNA, 600 bp, Rattus norvegicus
tagctscagtywygmkggggttgttcaaagtagggtgtgtgtaacgtctcactggaccactttagtctaaccaggaaccctttagctgacagcattgcttacgcaggaaagtagctggcaasgtgagtgccagaattcaaaccaatcataaaatccattcaaaataaagaakywttwtttgtttttaawamawmaraawmawwwtattgtaaacactagcagagtttctccctcggtacaaggtgggtggttttaacctggagtctaacccacagactgagagccgtgtagcagtgtctgtggttttgtttgtatgagtgaatagaggcaccgtcataataaaatgcatctcagagaatatgcattttacctttgggaatatgttaatttcaggcagcattccctatgggaaaggtgataccagctctgatatgcaaagcatatgataatttatcattctaacttcaacatataatagggattgtgacctgatatttggagatgkwaatattgctcagcatattaatcctgatggaatatagcattgtagttgactttttttaaaaaaaaacaaaaamwwwaaaaaaaaammwmrwrmcg

SEQ ID NO: 5237 - DNA, 1011 bp, Rattus norvegicus
gggtgaatacaagtgtcagacaggtctctcaatgccaagtgaccctgtgcagttagaaatctacagagattggctgctactccagacctcccacagagtcctcacagaaggagagcctctggccttgaggtgtcacccgtggcagaataagaaagtgtacaatgtggctttctatcgaaatggagaatcccttgacttttctcaaggttcagaggtcaccattctgaaaaccaacctgagtcacagcggcatctatcactgctcagccatgggaaaaaaactcttcaagtctgcaggagtgtctgtcaccgtgaaagagctatttgccacaccagtgctgagagtgtccttgtcatctcccttcccggaggggagtctggtcatcctgaactgtgagacaagattgttcctgcagagtcctggcttacggctttacttctccttctatgtgggcagtaagatcctggaggacaggagcacatcctccgagtaccacataccaagggctgaaagggaagatgatggatcatactggtgcgaggtarccacggaggacggccgtgtccttaagcgcagcaccaagttggagctatttggtccccagtcatcasrkcmygwskggtttcacatcctattttatctgtcagtgggaataatgtttttggtgaacacagttctctatgtgaaaatacacaggctgcagagagagaaaaaatwcaatttrgaagtccctttggtttctgagaaggggaagaaagcaacttcctttcagcaagttaraagcgatgacgtgtatgaagaagtaacagccactgtaagataggccaccccaaaagaagctcctgaaggacctcaaaactcaggtgaccctggaccttagcagcctgaaccacttcctctctgtggcagtaccgtggcacaaacttcccaaacttgaccctgaaactgtgggrccaaggcacacaactcttaaataaagcaaatattcagactgaaaaaaaaaaaaaaaaa

SEQ ID NO: 5238 - DNA, 571 bp, Rattus norvegicus
cacgaggcggaagagctgtaccacctcatgatgctgtgctggarggagcgcccagaggacaggcccacgtttgactaccttcggagcgttctggatgacttcttcacagccacagagggccagtaccagccccagccttgaggccttgcggtcccaagatcctcccctatccctctggagttcttgtgccctatccatgcggcytgtgcacacgtggactccgactcggcacgtgaagcctgtgcgtgtgccatacatagccgtttttgtctcatacacacatccgtagttatgtgggttctacacatgtgccttatacccatggaacatgtgagtytaagtcttagagaccacctaaggtgtctctttccattccattttctgaaaccacagagaggagaaggcttgtgattgctgcatgtgtmtgtctaccactgccttthtgggggcctccaggaaggccctccttgtgggctgccatccaatmtaatgtctctgtgtrctgtgccttgrtgrtaccacacaccaggmgctcaataaaagtctgttcavttaaaaaaaaaaaaaaaaa

SEQ ID NO: 5239 - DNA, 789 bp, Rattus norvegicus
cacgaggatgctgccatgctccccgccttgataatggactgaacctctgaacctgtaccacctggatgcagcaggttctgagtcttatcttctgtgagggccacttgtggcccattcaccacctccccaactgggcccgcatgccctggatggagcaagcctcctttagcagcctcctttccaagcttaacacctcctggcctcgtctactcacctcccacctgaacgccmarsksctktsmscgrctcwgatgawktccraggscaaggtttctttggctcctggtttgaccatgtgaaggggtggctgggcctccagaaggacctaactttgcttttcgtcacctacgaggagctgcatcaggaacctcgctcaaccattcggaagttaagtgaattcctggggcgcaccytggggccaaaggaagaggagatcatactggaacacagcagcttctccttcatgagtcagagtaacatggtcaactacagccttttatccaaggagatcatagaccagagtcagggcaagttcctccggaaaggtgttgtggggaactggagggaatactttactcctgagctgaatgaaaagttcaacgctgtctaccagtccaagatgggtgactctggtctttccctcccctggaccatggactgaccyttctgacccatctagcctagtcacatgggtcactatgctcctggtmtagcctgtcctcttactgtgctctgtccctggtctagcaataaaagcccagatccmcgttdaaaaaaaaaaaaaaaaaa

SEQ ID NO: 5240 - DNA, 810 bp, Rattus norvegicus; identical to SEQ ID NO: 1144
  misc_feature (474)..(474): n is a, c, g, or t
  misc_feature (520)..(520): n is a, c, g, or t
  misc_feature (728)..(728): n is a, c, g, or t

SEQ ID NO: 5241 - DNA, 600 bp, Rattus norvegicus
gggwagagtttktkttstatgcatctgactgaagacgaaatcgcattgttttctgcatttgtactgatgtcagcagatcgctcctggcttcaggaaaaggtaaaaatagaaaaactgcaacagaaaattcagctagcccttcaacatgtccttcagaagaaccaccgagaasatggaattctaacaaagctaatatgcaaggtgtctacgttaagagccctatgcggacgacatacagaaaagctaatggcatttaaagcaatatacccagacattgtgcgactccattttcytccgttatacaaggaattgttcacttcagaatttgagccagcaatgcaaatcgatgggtaaatgtagcgcccgggcacttctagaacatytggagtacaaacaggaaagtaagagaaaaataagagaggaaataaaacagtaacaacgaagacaaatttacctgagacactttctatggccctgcacagccctggagcgccaacacactgcacagacatyttgtggtgaccggkgttcakgcwcaaaggggaaacaatcaaaaccaataaaagctgaacttgttttgmtcaaaaaaaaaaaaaaaaa

SEQ ID NO: 5242 - DNA, 600 bp, Rattus norvegicus
catgacctagttagagtaattaggcaacaggttycagagaaaaammaraarawraaaaagaagacaaaatggcgaggggacagggscmccggcactcacaaactacagtgtgtcatcttgtgacagcctgaagccctgggcatagcaaccgtgaactgccagccctgggaccagcccactgcytaactgcactgagaaccatttctaaccacagcccttggctctggactgggcacaggaagagaacgagggaggaggggcaggagcaggcaggggctggctttgctgcttctcccatggagacatggagacagcttccaaacccttgttgttgattgagcccagttcccagtctyttggtgggcttgttgtttcttttaactccatagggmtggtttgctgtggaagtgyttttatccacattyaacgcaccagacaagccatgagcaagcttcctccctgaccccgtccccagtgtytragctcttgtgtyttttgtagatttttwaattatttgagtaawgattattttattaaaraggtctgtgcccmttgcctgcaaarmmmmaarwmwwwrgcagacctccgataaatgctgga

SEQ ID NO: 5243 - DNA, 600 bp, Rattus norvegicus
agggttcacagcadaagggcttggggcgccccgctcmcgcccactgagctcartctgggggcagccgasgtacctgtcccargggccttaracccttgcacctggctgcgcatctggccggggcargggcggggcgcatgctcactckcccgtgtgggtccgcaggtggwacttgagggactgtttgtagcggaagcacttagcacagtgcgtgcargggtaggsccgctcgcccgtgtgcgctcgctggtgctccagcaggtggtgcttctgtgtgaagcgcttgccacactcagcgcagtggtagggccgctcacccgtatggatgcgccggtgctccagcaggtggtgcttgcggatgaagctcttgccgcactcagggcaggcgtgcggccgttcgcgcgagtgcacgcggcagtggttagygagcttagatttctcactgaagctcttctcacactccgggcacttgaagggccgttcaccggtatgagtccgctggtggcgcagcagatgcgacgggcggctgaagctcttgccgcacaggctgcaaatgaaggagacttcgtgcttgccagcatgcacgcgctggtcctcgtg

SEQ ID NO: 5244 - DNA, 600 bp, Rattus norvegicus
  misc_feature (181)..(181): n is a, c, g, or t
akggatakacatattactaacgtggagctgtwrttccaytcyttctttcttttaaattttacakaattgyattagattttgcttatattttcaagtatttatkttktgagttaaaattctgcttasgccccaaaacttcctttatgcactcawttgccaaaagatttatgccaarttykgnacsmkggtaaatgaawagagtttgttttctgtggtgtttgtcaaatgttctatgtataattgactgtctgtaacatgctgwttcsttcctctgcagatagagctgctttcctaaatctgtctgtctttctttaggatagctgtatgtctgtaaatatatgttctattaaatcactctatcagacgcttgtctgtcttttgatgtagaagcagctttgtagcaccttggtttaggtctgctgcattttgttgctgcacttggttcattctgaatataaatgtaacatcagatattaagctattgttataaaaggttgaatttaaatcatgtaagtcaaaattgaaagggtgttawtaagtgtgcctttattttgcatgaaaataaaaaaattatacgtaaagcaaaaaaaaaaaaaaaaa

SEQ ID NO: 5245 - DNA, 600 bp, Rattus norvegicus
cctgggtaacttgaggagaccctggatcagatgtgttgctactagtctgctggctggttcagggccttcctcagatgcacacaaacatctgtcctttttaggtatttttctaagaggtgcctttctagaactagagccacttggtgccgcacacctatttcctcatctgacggatgtgtgcagagccgccwcrtrgacacggtgacagcaggttcagcagagggacgaactccagtctccaggaacagaaagggcctttcagatttcctaaccatcaaaagaacctttcactcagcctctcaaatcgcgtccacaccttctgttccacacagctgtctccatgcctctgtatcagcagggtcagaaatccagaccagaggctcgaagaagtgcagacagcacagtctcaaggatcatgtgaggggctgcctcccttcaaaggacggacttcagttagctcttcagcggggcacaggctcatgaactgggagggtttgaacaggaagcccaatctagactcctgtgcactccctttctctagcctgccctcgccatggtctgaatgggctgtaacggatgaggtaactgatgcttctcttg

SEQ ID NO: 5246 - DNA, 542 bp, Rattus norvegicus
gggcggaggtgacaaatacagtgaagatcccagasysycaccastmccccactcccaccccagtgagccagttcataagaagctgcattttgacaacatccacagggcattgtccagtcatttcaggacaactggtmtaaagagtttccaacttcttgagaacawttaaatgtcacttaataataagkagcaggccatatgcaggccattttttaataaagaawctgaggaattttctctgcatagctttgctttctggataaaataaaaggaccaggtacatgcctctagatattggcatacagagtccagaagggttttgytttaagtaagctaggaatgagttcatatgtcagtgtaaggaacaaatgtatcatatgtgtatcttttgtgaagaaaaggttttctttactgttttgtaggctcagcatatctgtacatatwtatttattggagtttagctagaacacaagcaaagcctttgcttatgacgtcacgtgtataaaataaatagattacaatgtaaaaaaaaaaaaaaaaaa

SEQ ID NO: 5247 - DNA, 600 bp, Rattus norvegicus
raggagctcacyttctttttaaagcaaatgaccagggattacctcagtgggcragcttatgcttagcatgtaagggcctggggtctgttcccagcaacaataaacgagtaaytaaggtaagtttacamragrgrywygascgaacacagtagtaattcaccgtggtagttaaatgtttacatctttcttccaaagatacwccattaaagacaggttthtgctcacaacgttttattactggtcatcaagctttagctgtattgatgacaaatcggctttattmgkmaykmrgaagatcaccmggggcaaaatttatttgaaaattactaagttbtaaacagctctbmcaacagagtaggtgtgsctgttsccatgtttgsttattartaagataaagactggattgttagaataatgtaactgtgagcttgagttacyaggttgwhwtgwttywtgttttgtahttttttyytaaacattcgagaggacatccaaaacactgttcttaatgttgaaccytgacatggcttcattatgtaaatatttcagttattaaaaatgtatrtatttgrwmwwrrarawrmwwwmwwwrarwcttgt

SEQ ID NO: 5248 - DNA, 600 bp, Rattus norvegicus
atctttttagcactaagcaattttatttcagcctttcagctgtcgctgtgagttgttccagacctttctgtgsctttttggtaaggctgctaataascaaagcatgagaatggtgtatgctaaaccatatgtttaaactgatctttgcaccaaaggactttttcwccaagttatttygttattcttccaaatattaagagatttttaaaaagtaaaggagtgaccytttttttttatagstgawttcycaawttcyttatawgcttttttagawtaatttcaaagattaagtgctgctttaaactattatactttgagttttagattggccaaatacattaatgtagttaaattcatctttaaagtacacatatgtgcctagagccaaaaaaaataatgatttaatttatgatcttatgttgagastaatttgacatcttatttwacagtcatttacagtgaaacaatgttccaggtagctttaaaagctatacggtgctaattagtaaaatattaagggcaatatttwactgctagcttgcaaaattttaagtgttttaaaaataaaatacwtgaraatawwwaaaaaaaaaaaaaaaa

SEQ ID NO: 5249 - DNA, 1027 bp, Rattus norvegicus; identical to SEQ ID NO: 1153

SEQ ID NO: 5250 - DNA, 645 bp, Rattus norvegicus
gctcactgtcactcgmkgyswagaatcycgcctgggactgtaacctgtgtcttgtctttgaaattcacacctgctccccatttttccgcctggtttgctgtccctactgaggtggacagcctagagtaatggcagggagtgtcccttgggcggcaagtcggagactatggggctcgatgctctcggcatgcagaagcttctctctgggcgttccactattggcccgcgtaaggcttactcttccacctcccagagtgattgatcgctggaatgagaagagagctctgtttggtgtawacgrcaacattggaatcctgggggatttcgaaaagcatycaaaagaactgatcaagggcccagtatggcttckaggytggagaggaaatgaattgcagcgttgwatccgaaarwagraaatggtgggaaacagaatgttcamtgaggacctgcacaaccttaacaaacggatcagctatctctacaaacactttaaccgacatggaaagtacagatagkacagaactggagagacacatttatcaccccgagaaggggaacaggacttagcccagtagggaaagagcttttcgtgctctctgtaataaagcggggcctctttggaacctgaaaaaaaaaaaaaaaaaa

SEQ ID NO: 5251 - DNA, 588 bp, Rattus norvegicus
gctttgctttgcttttaaggccattggggggtatttattttttaaggaaaaaaagctgcaaaaattatatattgcaaggtgtgatggtctggtttgggtgaatttcaggggaaatgaggaacagaaaaaggaaagggagatttgtaagtggattctcatcctctctcctcctcaccccccctccctttccttaggccttttgcattgaaaatgcaccaggggaggttagtgaggggggggagtcattttaaggagaacaaagctatgaagttcttttgtattcttgtgggggggtggtaggaggggggaggacagcaaacaaagctwaatgcwtctggagagcctctgggagctgttcagtttgaggagccaaaaaataaataaataaataaaaatgaactttcagttcagagaggcagtctataggtagatgctcccctacccccatcgtggttattgtgtttttggactgaatttacttgattattgtaaaacttgcaataaagaattttagtgttgatgtgaaatgcccccgtgatcaataataaaccartggctgtgaattagttttaaaaaaaaaaaaaaaaa

SEQ ID NO: 5252 - DNA, 1400 bp, Rattus norvegicus
gcaacggagccacagatgccatagsscttgttgctaatgttgcagccaacctgattgcctttctggctgtattggccttcatcaattctaccctttcctggctgggggaaatggtggatatccatggactcactttccaggtcatctgctcctatgtcctaaggccaatggttttcatgatgggtgtacagtgggcagactgcccattggtggctgagatagtgggagtcaaattcttcataaatgaatttgtggcctatcaacaactgtctcagtacaagaacaaacgtctctctggagtcgaagagtggatcaatggcgagaaacagtggrtttctgtgaaggctgaaatcattgcaacattttctctctgtggatttgccaatcttacttccatagggatcacactgggaggcttgacatccatggttccccaacggaagagtgacttgtgcaagcttgtggtcagggccctcttcacaggtgcctgtgtttccttcatcagtgcctgtatggcasgarkccwckakgttcccakakgygctgaaactgactgtgtctcattcttaaacacaaatttcaccaryagaacctatgagacatatgtgtgctgcagagagctcttccagagtactttgctgaatggcaccaacatgscttctttctyaggcccytggcaagacaaggagtccagcctcaggaatcttgctaamtgctgtkacctctataccagcactgtgtgtgcctgaggctggtggggccattccrtgacagttcttatagaacagattyrtattmccaaatayatsttcatgtacttaggcttattctctgagaacygcactaaactccacaaaatgaaagtcctgatctcactgtggctctgtataaaaacsagcayccacctttccactggcrtgccacatagyagatgtgaaattcattatagaccctcttgagccaaagtatggtgggaatgtagctaagggggaaatatgtgtgtggtaagtgctaagatggagattcaaccmctggccagggccagagtggggagagtggsgaaatccaagtagatgcttagatttaacttggtggtacaccctgtggtcacttacctgtaagctcagagctaaggggattgcctcagatccaaggcaagcctggcccgaaccctgaagtctttcacagaagtgatagagtagaggcyatgtccttgggcarggatggaggtgagggaatatatttctaaagttatatgggaaacacttgtgaatacttaatgataacatattttttattgccaaargttgtatacttaaaaactcttttcattttcatacattaytaaaargctttctgtaataaagtgtttttatgtaaaaaaaammaaaaaaaaaaaa

SEQ ID NO: 5253 - DNA, 600 bp, Rattus norvegicus
ttcagagaatacctttgcctccaacacctgcaccagaaacatacgaagattatggatatgatgattcatacgcagaacagagctacgaaggctatgaaggctattacagccagagtcaaggggagtcagagtattatgactatggacatggggagcttcaagattcttatgaagcctatggacaagatgactggaatgggaccaggccatcactgaaggctcctccagctaggccagtgaagggagcwtacagagagcaccywtatrgacgttattaaaaacaaacaggaggggaaaatatcagttatgagcwaacwtgytactgatttsttgtatcmcaggattcctgttgckttacccacaacagacaagtaattgtstaagtgtttttatttgtggtccgtttcttttccccaccttcctccattctgaattatgcattctggcttctgtatgtagtattttaaaatgagttaaaatagatttaggaatatcgaattaatttttgaagtgtgtagatgctttttttatttgttgtttaaatattaacagtgtacctttgatgttaaaaaagtgttgagttaaaaaaaaaaaaaaaaa

SEQ ID NO: 5254 - DNA, 600 bp, Rattus norvegicus
ctggaagttttccagaaaaacaagcaatgtatgtctttctggatataaaacagwaaatwcakkcamkakgagaggccttgctttgatctaactcattggaggctagctaaaattgaaacaaatctacctattggtagaatcaaagctgtgaacctgtggcttatttgagacaacctctgataatctattaacaatatccaacagtttcaatgtccttgttgaactatcctggtacctttctcgtgaataggaagttcattcttaaagttgtagaattccaaattggttttacgtgcattttgtaaagtgttgaaccagtgctgagtccatccctgtgtgatatactattactaatgcatgtggtgccatgcttgtcttcaaatatagaagtagtgctaaatggggaaarwawarwmrwwaaattaaaccaagaaaggatccataatgatgtcttagaggcccggaactgttccttcattgactagcgacagcctgggaagtcatctgtgagcttctatgacttttgtatttagcaatgttgcatgctccaataattgatattaaaagcaacacttgttttctgaaaaaaaaaaaaaaaaa
